United States Patent Application Publication US 2024/0254659 A1 - sequence listing, part 2

SEQ ID NO: 16109 - protein, 85 aa, Homo sapiens
QVSCSNNTHLVSENKEQTTHPELFAGNKTQNLHHMQYFPNNVIPKQDLLHRCFQEQEQKSQQASVLQGYKNRNQDMSGQQAAQLA

SEQ ID NO: 16110 - protein, 85 aa, Homo sapiens
QQRYLIHNHANVFPVPDQGGSHTQTPPQKDTQKHAALRWHLLQKQEQQQTQQPQTESCHSQMHRPIKVEPGCKPHACMHTAPPEN

SEQ ID NO: 16111 - protein, 85 aa, Homo sapiens
KTWKKVTKQENPPASCDNVQQKSIIETMEQHLKQFHAKSLFDHKALTLKSQKQVKVEMSGPVTVLTRQTTAAELDSHTPALEQQT

SEQ ID NO: 16112 - protein, 85 aa, Homo sapiens
TSSEKTPTKRTAASVLNNFIESPSKLLDTPIKNLLDTPVKTQYDFPSCRCVEQIIEKDEGPFYTHLGAGPNVAAIREIMEERFGQ

SEQ ID NO: 16113 - protein, 85 aa, Homo sapiens
KGKAIRIERVIYTGKEGKSSQGCPIAKWVVRRSSSEEKLLCLVRERAGHTCEAAVIVILILVWEGIPLSLADKLYSELTETLRKY

SEQ ID NO: 16114 - protein, 85 aa, Homo sapiens
GTLTNRRCALNEERTCACQGLDPETCGASFSFGCSWSMYYNGCKFARSKIPRKFKLLGDDPKEEEKLESHLQNLSTLMAPTYKKL

SEQ ID NO: 16115 - protein, 85 aa, Homo sapiens
APDAYNNQIEYEHRAPECRLGLKEGRPFSGVTACLDFCAHAHRDLHNMQNGSTLVCTLTREDNREFGGKPEDEQLHVLPLYKVSD

SEQ ID NO: 16116 - protein, 85 aa, Homo sapiens
VDEFGSVEAQEEKKRSGAIQVLSSFRRKVRMLAEPVKTCRQRKLEAKKAAAEKLSSLENSSNKNEKEKSAPSRTKQTENASQAKQ

SEQ ID NO: 16117 - protein, 85 aa, Homo sapiens
MAELLRLSGPVMQQSQQPQPLQKQPPQPQQQQRPQQQQPHHPQTESVNSYSASGSTNPYMRRPNPVSPYPNSSHTSDIYGSTSPM

SEQ ID NO: 16118 - protein, 85 aa, Homo sapiens
NFYSTSSQAAGSYLNSSNPMNPYPGLLNQNTQYPSYQCNGNLSVDNCSPYLGSYSPQSQPMDLYRYPSQDPLSKLSLPPIHTLYQ

SEQ ID NO: 16119 - protein, 85 aa, Homo sapiens
PRFGNSQSFTSKYLGYGNQNMQGDGFSSCTIRPNVHHVGKLPPYPTHEMDGHFMGATSRLPPNLSNPNMDYKNGEHHSPSHIIHN

SEQ ID NO: 16120 - protein, 85 aa, Homo sapiens
YSAAPGMFNSSLHALHLQNKENDMLSHTANGLSKMLPALNHDRTACVQGGLHKLSDANGQEKQPLALVQGVASGAEDNDEVWSDS

SEQ ID NO: 16121 - protein, 85 aa, Homo sapiens
EQSFLDPDIGGVAVAPTHGSILIECAKRELHATTPLKNPNRNHPTRISLVFYQHKSMNEPKHGLALWEAKMAEKAREKEEECEKY

SEQ ID NO: 16122 - protein, 85 aa, Homo sapiens
PICQTEPLATKLQNGSPLPERAHPEVNGDTKWHSFKSYYGIPCMKGSQNSRVSPDFTQESRGYSKCLQNGGIKRTVSEPSLSGLL

SEQ ID NO: 16123 - protein, 85 aa, Homo sapiens
QIKKLKQDQKANGERRNFGVSQERNPGESSQPNVSDLSDKKESVSSVAQENAVKDFTSFSTHNCSGPENPELQILNEQEGKSANY

SEQ ID NO: 16124 - protein, 85 aa, Homo sapiens
HDKNIVLLKNKAVLMPNGATVSASSVEHTHGELLEKTLSQYYPDCVSIAVQKTTSHINAINSQATNELSCEITHPSHTSGQINSA

SEQ ID NO: 16125 - protein, 85 aa, Homo sapiens
QTSNSELPPKPAAVVSEACDADDADNASKLAAMLNTCSFQKPEQLQQQKSVFEICPSPAENNIQGTTKLASGEEFCSGSSSNLQA

SEQ ID NO: 16126 - protein, 85 aa, Homo sapiens
PGGSSERYLKQNEMNGAYFKQSSVFTKDSFSATTTPPPPSQLLLSPPPPLPQVPQLPSEGKSTLNGGVLEEHHHYPNQSNTTLLR

SEQ ID NO: 16127 - protein, 85 aa, Homo sapiens
EVKIEGKPEAPPSQSPNPSTHVCSPSPMLSERPQNNCVNRNDIQTAGTMTVPLCSEKTRPMSEHLKHNPPIFGSSGELQDNCQQL

SEQ ID NO: 16128 - protein, 85 aa, Homo sapiens
MRNKEQEILKGRDKEQTRDLVPPTQHYLKPGWIELKAPRFHQAESHLKRNEASLPSILQYQPNLSNQMTSKQYTGNSNMPGGLPR

SEQ ID NO: 16129 - protein, 85 aa, Homo sapiens
QAYTQKTTQLEHKSQMYQVEMNQGQSQGTVDQHLQFQKPSHQVHFSKTDHLPKAHVQSLCGTRFHFQQRADSQTEKLMSPVLKQH

SEQ ID NO: 16130 - protein, 85 aa, Homo sapiens
MNQQASETEPFSNSHLLQHKPHKQAAQTQPSQSSHLPQNQQQQQKLQIKNKEEILQTFPHPQSNNDQQREGSFFGQTKVEECFHG

SEQ ID NO: 16131 - protein, 85 aa, Homo sapiens
ENQYSKSSEFETHNVQMGLEEVQNINRRNSPYSQTMKSSACKIQVSCSNNTHLVSENKEQTTHPELFAGNKTQNLHHMQYFPNNV

SEQ ID NO: 16132 - protein, 85 aa, Homo sapiens
IPKQDLLHRCFQEQEQKSQQASVLQGYKNRNQDMSGQQAAQLAQQRYLIHNHANVFPVPDQGGSHTQTPPQKDTQKHAALRWHLL

SEQ ID NO: 16133 - protein, 85 aa, Homo sapiens
QKQEQQQTQQPQTESCHSQMHRPIKVEPGCKPHACMHTAPPENKTWKKVTKQENPPASCDNVQQKSIIETMEQHLKQFHAKSLFD

SEQ ID NO: 16134 - protein, 85 aa, Homo sapiens
HKALTLKSQKQVKVEMSGPVTVLTRQTTAAELDSHTPALEQQTTSSEKTPTKRTAASVLNNFIESPSKLLDTPIKNLLDTPVKTQ

SEQ ID NO: 16135 - protein, 85 aa, Homo sapiens
YDFPSCRCVEQIIEKDEGPFYTHLGAGPNVAAIREIMEERFGQKGKAIRIERVIYTGKEGKSSQGCPIAKWVVRRSSSEEKLLCL

SEQ ID NO: 16136 - protein, 85 aa, Homo sapiens
VRERAGHTCEAAVIVILILVWEGIPLSLADKLYSELTETLRKYGTLTNRRCALNEERTCACQGLDPETCGASFSFGCSWSMYYNG

SEQ ID NO: 16137 - protein, 85 aa, Homo sapiens
CKFARSKIPRKFKLLGDDPKEEEKLESHLQNLSTLMAPTYKKLAPDAYNNQIEYEHRAPECRLGLKEGRPFSGVTACLDFCAHAH

SEQ ID NO: 16138 - protein, 85 aa, Homo sapiens
RDLHNMQNGSTLVCTLTREDNREFGGKPEDEQLHVLPLYKVSDVDEFGSVEAQEEKKRSGAIQVLSSFRRKVRMLAEPVKTCRQR

SEQ ID NO: 16139 - protein, 85 aa, Homo sapiens
KLEAKKAAAEKLSSLENSSNKNEKEKSAPSRTKQTENASQAKQLAELLRLSGPVMQQSQQPQPLQKQPPQPQQQQRPQQQQPHHP

SEQ ID NO: 16140 - protein, 85 aa, Homo sapiens
QTESVNSYSASGSTNPYMRRPNPVSPYPNSSHTSDIYGSTSPMNFYSTSSQAAGSYLNSSNPMNPYPGLLNQNTQYPSYQCNGNL

SEQ ID NO: 16141 - protein, 85 aa, Homo sapiens
SVDNCSPYLGSYSPQSQPMDLYRYPSQDPLSKLSLPPIHTLYQPRFGNSQSFTSKYLGYGNQNMQGDGFSSCTIRPNVHHVGKLP

SEQ ID NO: 16142 - protein, 85 aa, Homo sapiens
PYPTHEMDGHFMGATSRLPPNLSNPNMDYKNGEHHSPSHIIHNYSAAPGMFNSSLHALHLQNKENDMLSHTANGLSKMLPALNHD

SEQ ID NO: 16143 - protein, 85 aa, Homo sapiens
RTACVQGGLHKLSDANGQEKQPLALVQGVASGAEDNDEVWSDSEQSFLDPDIGGVAVAPTHGSILIECAKRELHATTPLKNPNRN

SEQ ID NO: 16144 - protein, 85 aa, Homo sapiens
HPTRISLVFYQHKSMNEPKHGLALWEAKMAEKAREKEEECEKYGPDYVPQKSHGKKVKREPAEPHETSEPTYLRFIKSLAERTMS

SEQ ID NO: 16145 - protein, 85 aa, Homo sapiens
PASVTALTDARGHTDTEGRPPSPPPTSTPEKCLSVACLDKNELSDHLDAMDSNLDNLQTMLSSHGFSVDTSALLDLFSPSVTVPD

SEQ ID NO: 16146 - protein, 85 aa, Homo sapiens
MSLPDLDSSLASIQELLSPQEPPRPPEAENSSPDSGKQLVHYTAQPLFLLDPGSVDTGSNDLPVLFELGEGSYFSEGDGFAEDPT

SEQ ID NO: 16147 - protein, 84 aa, Homo sapiens
QEPPRPPEAENSSPDSGKQLVHYTAQPLFLLDPGSVDTGSNDLPVLFELGEGSYFSEGDGFAEDPTISLLTGSEPPKAKDPTVS

SEQ ID NO: 16148 - protein, 85 aa, Homo sapiens
EEPPSPPQSPRVEEASPGRPSSVDTLLSPTALIDSILRESEPAPASVTALTDARGHTDTEGRPPSPPPTSTPEKCLSVACLDKNE

SEQ ID NO: 16149 - protein, 85 aa, Homo sapiens
LSDHLDAMDSNLDNLQTMLSSHGFSVDTSALLDLFSPSVTVPDMSLPDLDSSLASIQELLSPQEPPRPPEAENSSPDSGKQLVHY

SEQ ID NO: 16150 - protein, 84 aa, Homo sapiens
QLPGALPPECTPNIDGPNAKSVQREQSLHSFHTLFCRRCFKYDCFLHPFHATPNTYKRKNTETALDNKPCGPQCYQHLPLLPRN

SEQ ID NO: 16151 - protein, 85 aa, Homo sapiens
EASMFRVLIGTYYDNFCAIARLIGTKTCRQVYEFRVKESSIIAPAPAEDVDTPPRKKKRKHRLWAAHCRKIQLKKDGSSNHVYNY

SEQ ID NO: 16152 - protein, 85 aa, Homo sapiens
QPCDHPRQPCDSSCPCVIAQNFCEKFCQCSSECQNRFPGCRCKAQCNTKQCPCYLAVRECDPDLCLTCGAADHWDSKNVSCKNCS

SEQ ID NO: 16153 - protein, 85 aa, Homo sapiens
IQRGSKKHLLLAPSDVAGWGIFIKDPVQKNEFISEYCGEIISQDEADRRGKVYDKYMCSFLFNLNNDFVVDATRKGNKIRFANHS

SEQ ID NO: 16154 - protein, 85 aa, Homo sapiens
APAPAEDVDTPPRKKKRKHRLWAAHCRKIQLKKDGSSNHVYNYQPCDHPRQPCDSSCPCVIAQNFCEKFCQCSSECQNRFPGCRC

SEQ ID NO: 16155 - protein, 85 aa, unidentified
  REGION 1..85: note = Description of Unknown:cds_NC_019843.3_cds_YP_009047202.1_1 target sequence
SFVAGVTAQGARGTYRAALNSEKHQDHVSLTVPLCGSGNLVEKLSPWFMDGENAYEVVKAMLLKKEPLLYVPIRLAGHTRHLPGP

SEQ ID NO: 16156 - protein, 85 aa, unidentified
  REGION 1..85: note = Description of Unknown:cds_NC_019843.3_cds_YP_009047202.1_1 target sequence
RVYLVERLIACENPFMVNQLAYSSSANGSLVGTTLQGKPIGMFFPYDIELVTGKQNILLRKYGRGGYHYTPFHYERDNTSCPEWM

SEQ ID NO: 16157 - protein, 85 aa, unidentified
  REGION 1..85: note = Description of Unknown:cds_NC_019843.3_cds_YP_009047202.1_1 target sequence
DDFEADPKGKYAQNLLKKLIGGDVTPVDQYMCGVDGKPISAYAFLMAKDGITKLADVEADVAARADDEGFITLKNNLYRLVWHVE

SEQ ID NO: 16158 - protein, 85 aa, unidentified
  REGION 1..85: note = Description of Unknown:cds_NC_019843.3_cds_YP_009047202.1_1 target sequence
RKDVPYPKQSIFTINSVVQKDGVENTPPHYFTLGCKILTLTPRNKWSGVSDLSLKQKLLYTFYGKESLENPTYIYHSAFIECGSC

SEQ ID NO: 16159 - protein, 85 aa, unidentified
  REGION 1..85: note = Description of Unknown:cds_NC_019843.3_cds_YP_009047202.1_1 target sequence
GNDSWLTGNAIQGFACGCGASYTANDVEVQSSGMIKPNALLCATCPFAKGDSCSSNCKHSVAQLVSYLSERCNVIADSKSFTLIF

SEQ ID NO: 16160 - protein, 85 aa, unidentified
  REGION 1..85: note = Description of Unknown:cds_NC_019843.3_cds_YP_009047202.1_1 target sequence
GGVAYAYFGCEEGTMYFVPRAKSVVSRIGDSIFTGCTGSWNKVTQIANMFLEQTQHSLNFVGEFVVNDVVLAILSGTTTNVDKIR

SEQ ID NO: 16161 - protein, 85 aa, unidentified
  REGION 1..85: note = Description of Unknown:cds_NC_019843.3_cds_YP_009047202.1_1 target sequence
QLLKGVTLDKLRDYLADYDVAVTAGPFMDNAINVGGTGLQYAAITAPYVVLTGLGESFKKVATIPYKVCNSVKDTLAYYAHSVLY

SEQ ID NO: 16162 - protein, 85 aa, unidentified
  REGION 1..85: note = Description of Unknown:cds_NC_019843.3_cds_YP_009047202.1_1 target sequence
RVFPYDMDSGVSSFSELLFDCVDLSVASTYFLVRILQDKTGDFMSTIITSCQTAVSKLLDTCFEATEATFNFLLDLAGLFRIFLR

SEQ ID NO: 16163 - protein, 85 aa, unidentified
  REGION 1..85: note = Description of Unknown:cds_NC_019843.3_cds_YP_009047202.1_1 target sequence
NAYVYTSQGFVVVNGKVSTLVKQVLDLLNKGMQLLHTKVSWAGSKIIAVIYSGRESLIFPSGTYYCVTTKAKSVQQDLDVILPGE

SEQ ID NO: 16164 - protein, 85 aa, unidentified
  REGION 1..85: note = Description of Unknown:cds_NC_019843.3_cds_YP_009047202.1_1 target sequence
FSKKQLGLLQPTDNSTTVSVTVSSNMVETVVGQLEQTNMHSPDVIVGDYVIISEKLFVRSKEEDGFAFYPACTNGHAVPTLFRLK

SEQ ID NO: 16165 - protein, 85 aa, unidentified
  REGION 1..85: note = Description of Unknown:cds_NC_019843.3_cds_YP_009047202.1_1 target sequence
GGAPVKKVAFGGDQVHEVAAVRSVTVEYNIHAVLDTLLASSSLRTFVVDKSLSIEEFADVVKEQVSDLLVKLLRGMPIPDFDLDD

SEQ ID NO: 16166 - protein, 85 aa, unidentified
  REGION 1..85: note = Description of Unknown:cds_NC_019843.3_cds_YP_009047202.1_1 target sequence
FIDAPCYCFNAEGDASWSSTMIFSLHPVECDEECSEVEASDLEEGESECISETSTEQVDVSHETSDDEWAAAVDEAFPLDEAEDV

SEQ ID NO: 16167 - protein, 85 aa, unidentified
  REGION 1..85: note = Description of Unknown:cds_NC_019843.3_cds_YP_009047202.1_1 target sequence
TESVQEEAQPVEVPVEDIAQVVIADTLQETPVVPDTVEVPPQVVKLPSAPQTIQPEVKEVAPVYEADTEQTQNVTVKPKRLRKKR

SEQ ID NO: 16168 - protein, 85 aa, unidentified
  REGION 1..85: note = Description of Unknown:cds_NC_019843.3_cds_YP_009047202.1_1 target sequence
NVDPLSNFEHKVITECVTIVLGDAIQVAKCYGESVLVNAANTHLKHGGGIAGAINAASKGAVQKESDEYILAKGPLQVGDSVLLQ

SEQ ID NO: 16169 - protein, 85 aa, unidentified
  REGION 1..85: note = Description of Unknown:cds_NC_019843.3_cds_YP_009047202.1_1 target sequence
GHSLAKNILHVVGPDARAKQDVSLLSKCYKAMNAYPLVVTPLVSAGIFGVKPAVSFDYLIREAKTRVLVVVNSQDVYKSLTIVDI

SEQ ID NO: 16170 - protein, 85 aa, unidentified
  REGION 1..85: note = Description of Unknown:cds_NC_019843.3_cds_YP_009047202.1_1 target sequence
PQSLTFSYDGLRGAIRKAKDYGFTVFVCTDNSANTKVLRNKGVDYTKKFLTVDGVQYYCYTSKDTLDDILQQANKSVGIISMPLG

SEQ ID NO: 16171 - protein, 85 aa, unidentified
  REGION 1..85: note = Description of Unknown:cds_NC_019843.3_cds_YP_009047202.1_1 target sequence
YVSHGLDLMQAGSVVRRVNVPYVCLLANKEQEAILMSEDVKLNPSEDFIKHVRTNGGYNSWHLVEGELLVQDLRLNKLLHWSDQT

SEQ ID NO: 16172 - protein, 85 aa, unidentified
  REGION 1..85: note = Description of Unknown:cds_NC_019843.3_cds_YP_009047202.1_1 target sequence
ICYKDSVFYVVKNSTAFPFETLSACRAYLDSRTTQQLTIEVLVTVDGVNFRTVVLNNKNTYRSQLGCVFFNGADISDTIPDEKQN

SEQ ID NO: 16173 - protein, 85 aa, unidentified
  REGION 1..85: note = Description of Unknown:cds_NC_019843.3_cds_YP_009047202.1_1 target sequence
GHSLYLADNLTADETKALKELYGPVDPTFLHRFYSLKAAVHGWKMVVCDKVRSLKLSDNNCYLNAVIMTLDLLKDIKFVIPALQH

SEQ ID NO: 16174 - protein, 85 aa, unidentified
  REGION 1..85: note = Description of Unknown:cds_NC_019843.3_cds_YP_009047202.1_1 target sequence
AFMKHKGGDSTDFIALIMAYGNCTFGAPDDASRLLHTVLAKAELCCSARMVWREWCNVCGIKDVVLQGLKACCYVGVQTVEDLRA

SEQ ID NO: 16175 - protein, 85 aa, unidentified
  REGION 1..85: note = Description of Unknown:cds_NC_019843.3_cds_YP_009047202.1_1 target sequence
RMTYVCQCGGERHRQLVEHTTPWLLLSGTPNEKLVTTSTAPDFVAFNVFQGIETAVGHYVHARLKGGLILKFDSGTVSKTSDWKC

SEQ ID NO: 16176 - protein, 85 aa, unidentified
  REGION 1..85: note = Description of Unknown:cds_NC_019843.3_cds_YP_009047202.1_1 target sequence
KVTDVLFPGQKYSSDCNVVRYSLDGNFRTEVDPDLSAFYVKDGKYFTSEPPVTYSPATILAGSVYTNSCLVSSDGQPGGDAISLS

SEQ ID NO: 16177 - protein, 85 aa, unidentified
  REGION 1..85: note = Description of Unknown:cds_NC_019843.3_cds_YP_009047202.1_1 target sequence
FNNLLGFDSSKPVTKKYTYSFLPKEDGDVLLAEFDTYDPIYKNGAMYKGKPILWVNKASYDTNLNKFNRASLRQIFDVAPIELEN

SEQ ID NO: 16178 - protein, 85 aa, unidentified
  REGION 1..85: note = Description of Unknown:cds_NC_019843.3_cds_YP_009047202.1_1 target sequence
KFTPLSVESTPVEPPTVDVVALQQEMTIVKCKGLNKPFVKDNVSFVADDSGTPVVEYLSKEDLHTLYVDPKYQVIVLKDNVLSSM

SEQ ID NO: 16179 - protein, 85 aa, unidentified
  REGION 1..85: note = Description of Unknown:cds_NC_019843.3_cds_YP_009047202.1_1 target sequence
LRLHTVESGDINVVAASGSLTRKVKLLFRASFYFKEFATRTFTATTAVGSCIKSVVRHLGVTKGILTGCFSFAKMLFMLPLAYFS

SEQ ID NO: 16180 - protein, 85 aa, unidentified
  REGION 1..85: note = Description of Unknown:cds_NC_019843.3_cds_YP_009047202.1_1 target sequence
DSKLGTTEVKVSALKTAGVVTGNVVKQCCTAAVDLSMDKLRRVDWKSTLRLLLMLCTTMVLLSSVYHLYVFNQVLSSDVMFEDAQ

SEQ ID NO: 16181 - protein, 85 aa, unidentified
  REGION 1..85: note = Description of Unknown:cds_NC_019843.3_cds_YP_009047202.1_1 target sequence
GLKKFYKEVRAYLGISSACDGLASAYRANSFDVPTFCANRSAMCNWCLISQDSITHYPALKMVQTHLSHYVLNIDWLWFAFETGL

SEQ ID NO: 16182 - protein, 85 aa, unidentified
  REGION 1..85: note = Description of Unknown:cds_NC_019843.3_cds_YP_009047202.1_1 target sequence
AYMLYTSAFNWLLLAGTLHYFFAQTSIFVDWRSYNYAVSSAFWLFTHIPMAGLVRMYNLLACLWLLRKFYQHVINGCKDTACLLC

SEQ ID NO: 16183 - protein, 85 aa, unidentified
  REGION 1..85: note = Description of Unknown:cds_NC_019843.3_cds_YP_009047202.1_1 target sequence
YKRNRLTRVEASTVVCGGKRTFYITANGGISFCRRHNWNCVDCDTAGVGNTFICEEVANDLTTALRRPINATDRSHYYVDSVTVK

SEQ ID NO: 16184 - protein, 85 aa, unidentified
  REGION 1..85: note = Description of Unknown:cds_NC_019843.3_cds_YP_009047202.1_1 target sequence
ETVVQFNYRRDGQPFYERFPLCAFTNLDKLKFKEVCKTTTGIPEYNFIIYDSSDRGQESLARSACVYYSQVLCKSILLVDSSLVT

SEQ ID NO: 16185 - protein, 85 aa, unidentified
  REGION 1..85: note = Description of Unknown:cds_NC_019843.3_cds_YP_009047202.1_1 target sequence
SVGDSSEIATKMFDSFVNSFVSLYNVTRDKLEKLISTARDGVRRGDNFHSVLTTFIDAARGPAGVESDVETNEIVDSVQYAHKHD

SEQ ID NO: 16186 - protein, 85 aa, unidentified
  REGION 1..85: note = Description of Unknown:cds_NC_019843.3_cds_YP_009047202.1_1 target sequence
IQITNESYNNYVPSYVKPDSVSTSDLGSLIDCNAASVNQIVLRNSNGACIWNAAAYMKLSDALKRQIRIACRKCNLAFRLTTSKL

SEQ ID NO: 16187 - protein, 85 aa, unidentified
  REGION 1..85: note = Description of Unknown:cds_NC_019843.3_cds_YP_009047202.1_1 target sequence
RANDNILSVRFTANKIVGGAPTWFNALRDFTLKGYVLATIIVFLCAVLMYLCLPTFSMAPVEFYEDRILDFKVLDNGIIRDVNPD

SEQ ID NO: 16188 - protein, 85 aa, unidentified
  REGION 1..85: note = Description of Unknown:cds_NC_019843.3_cds_YP_009047202.1_1 target sequence
DKCFANKHRSFTQWYHEHVGGVYDNSITCPLTVAVIAGVAGARIPDVPTTLAWVNNQIIFFVSRVFANTGSVCYTPIDEIPYKSF

SEQ ID NO: 16189 - protein, 85 aa, unidentified
  REGION 1..85: note = Description of Unknown:cds_NC_019843.3_cds_YP_009047202.1_1 target sequence
SDSGCILPSECTMFRDAEGRMTPYCHDPTVLPGAFAYSQMRPHVRYDLYDGNMFIKFPEVVFESTLRITRTLSTQYCRFGSCEYA

SEQ ID NO: 16190 - protein, 85 aa, unidentified
  REGION 1..85: note = Description of Unknown:cds_NC_019843.3_cds_YP_009047202.1_1 target sequence
QEGVCITTNGSWAIFNDHHLNRPGVYCGSDFIDIVRRLAVSLFQPITYFQLTTSLVLGIGLCAFLTLLFYYINKVKRAFADYTQC

SEQ ID NO: 16191 - protein, 85 aa, unidentified
  REGION 1..85: note = Description of Unknown:cds_NC_019843.3_cds_YP_009047202.1_1 target sequence
AVIAVVAAVLNSLCICFVTSIPLCIVPYTALYYYATFYFTNEPAFIMHVSWYIMFGPIVPIWMTCVYTVAMCFRHFFWVLAYFSK

SEQ ID NO: 16192 - protein, 85 aa, unidentified
  REGION 1..85: note = Description of Unknown:cds_NC_019843.3_cds_YP_009047202.1_1 target sequence
KHVEVFTDGKLNCSFQDAASNIFVINKDTYAALRNSLTNDAYSRFLGLFNKYKYFSGAMETAAYREAAACHLAKALQTYSETGSD

SEQ ID NO: 16193 - protein, 85 aa, unidentified
  REGION 1..85: note = Description of Unknown:cds_NC_019843.3_cds_YP_009047202.1_1 target sequence
LLYQPPNCSITSGVLQSGLVKMSHPSGDVEACMVQVTCGSMTLNGLWLDNTVWCPRHVMCPADQLSDPNYDALLISMTNHSFSVQ

SEQ ID NO: 16194 - protein, 85 aa, unidentified
  REGION 1..85: note = Description of Unknown:cds_NC_019843.3_cds_YP_009047202.1_1 target sequence
KHIGAPANLRVVGHAMQGTLLKLTVDVANPSTPAYTFTTVKPGAAFSVLACYNGRPTGTFTVVMRPNYTIKGSFLCGSCGSVGYT

SEQ ID NO: 16195 - protein, 85 aa, unidentified
  REGION 1..85: note = Description of Unknown:cds_NC_019843.3_cds_YP_009047202.1_1 target sequence
KEGSVINFCYMHQMELANGTHTGSAFDGTMYGAFMDKQVHQVQLTDKYCSVNVVAWLYAAILNGCAWFVKPNRTSVVSFNEWALA

SEQ ID NO: 16196 - protein, 85 aa, unidentified
  REGION 1..85: note = Description of Unknown:cds_NC_019843.3_cds_YP_009047202.1_1 target sequence
NQFTEFVGTQSVDMLAVKTGVAIEQLLYAIQQLYTGFQGKQILGSTMLEDEFTPEDVNMQIMGVVMQSGVRKVTYGTAHWLFATL

SEQ ID NO: 16197 - protein, 85 aa, unidentified
  REGION 1..85: note = Description of Unknown:cds_NC_019843.3_cds_YP_009047202.1_1 target sequence
VSTYVIILQATKFTLWNYLFETIPTQLFPLLFVTMAFVMLLVKHKHTFLTLFLLPVAICLTYANIVYEPTTPISSALIAVANWLA

SEQ ID NO: 16198 - protein, 85 aa, unidentified
  REGION 1..85: note = Description of Unknown:cds_NC_019843.3_cds_YP_009047202.1_1 target sequence
PTNAYMRTTHTDIGVYISMSLVLVIVVKRLYNPSLSNFALALCSGVMWLYTYSIGEASSPIAYLVFVTTLTSDYTITVFVTVNLA

SEQ ID NO: 16199 - protein, 85 aa, unidentified
  REGION 1..85: note = Description of Unknown:cds_NC_019843.3_cds_YP_009047202.1_1 target sequence
KVCTYAIFAYSPQLTLVFPEVKMILLLYTCLGFMCTCYFGVFSLLNLKLRAPMGVYDFKVSTQEFRFMTANNLTAPRNSWEAMAL

SEQ ID NO: 16200 - protein, 85 aa, unidentified
  REGION 1..85: note = Description of Unknown:cds_NC_019843.3_cds_YP_009047202.1_1 target sequence
NFKLIGIGGTPCIKVAAMQSKLTDLKCTSVVLLSVLQQLHLEANSRAWAFCVKCHNDILAATDPSEAFEKFVSLFATLMTFSGNV

SEQ ID NO: 16201 - protein, 85 aa, unidentified
  REGION 1..85: note = Description of Unknown:cds_NC_019843.3_cds_YP_009047202.1_1 target sequence
DLDALASDIFDTPSVLQATLSEFSHLATFAELEAAQKAYQEAMDSGDTSPQVLKALQKAVNIAKNAYEKDKAVARKLERMADQAM

SEQ ID NO: 16202 - protein, 85 aa, unidentified
  REGION 1..85: note = Description of Unknown:cds_NC_019843.3_cds_YP_009047202.1_1 target sequence
TSMYKQARAEDKKAKIVSAMQTMLFGMIKKLDNDVLNGIISNARNGCIPLSVIPLCASNKLRVVIPDFTVWNQVVTYPSLNYAGA

SEQ ID NO: 16203 - protein, 85 aa, unidentified
  REGION 1..85: note = Description of Unknown:cds_NC_019843.3_cds_YP_009047202.1_1 target sequence
LWDITVINNVDNEIVKSSDVVDSNENLTWPLVLECTRASTSAVKLQNNEIKPSGLKTMVVSAGQEQTNCNTSSLAYYEPVQGRKM

SEQ ID NO: 16204 - protein, 85 aa, unidentified
  REGION 1..85: note = Description of Unknown:cds_NC_019843.3_cds_YP_009047202.1_1 target sequence
LMALLSDNAYLKWARVEGKDGFVSVELQPPCKFLIAGPKGPEIRYLYFVKNLNNLHRGQVLGHIAATVRLQAGSNTEFASNSSVL

SEQ ID NO: 16205 - protein, 85 aa, unidentified
  REGION 1..85: note = Description of Unknown:cds_NC_019843.3_cds_YP_009047202.1_1 target sequence
SLVNFTVDPQKAYLDFVNAGGAPLTNCVKMLTPKTGTGIAISVKPESTADQETYGGASVCLYCRAHIEHPDVSGVCKYKGKFVQI

SEQ ID NO: 16206 - protein, 85 aa, unidentified
  REGION 1..85: note = Description of Unknown:cds_NC_019843.3_cds_YP_009047202.1_1 target sequence
PAQCVRDPVGFCLSNTPCNVCQYWIGYGCNCDSLRQAALPQSKDSNFLNRVRGSIVNARIEPCSSGLSTDVVFRAFDICNYKAKV

SEQ ID NO: 16207 - protein, 85 aa, unidentified
  REGION 1..85: note = Description of Unknown:cds_NC_019843.3_cds_YP_009047202.1_1 target sequence
AGIGKYYKTNTCRFVELDDQGHHLDSYFVVKRHTMENYELEKHCYDLLRDCDAVAPHDFFIFDVDKVKTPHIVRQRLTEYTMMDL

SEQ ID NO: 16208 - protein, 85 aa, unidentified
  REGION 1..85: note = Description of Unknown:cds_NC_019843.3_cds_YP_009047202.1_1 target sequence
VYALRHFDQNSEVLKAILVKYGCCDVTYFENKLWFDFVENPSVIGVYHKLGERVRQAILNTVKFCDHMVKAGLVGVLTLDNQDLN

SEQ ID NO: 16209 - protein, 85 aa, unidentified
  REGION 1..85: note = Description of Unknown:cds_NC_019843.3_cds_YP_009047202.1_1 target sequence
GKWYDFGDFVITQPGSGVAIVDSYYSYLMPVLSMTDCLAAETHRDCDFNKPLIEWPLTEYDFTDYKVQLFEKYFKYWDQTYHANC

SEQ ID NO: 16210 - protein, 85 aa, unidentified
  REGION 1..85: note = Description of Unknown:cds_NC_019843.3_cds_YP_009047202.1_1 target sequence
VNCTDDRCVLHCANFNVLFAMTMPKTCFGPIVRKIFVDGVPFVVSCGYHYKELGLVMNMDVSLHRHRLSLKELMMYAADPAMHIA

SEQ ID NO: 16211 - protein, 85 aa, unidentified
  REGION 1..85: note = Description of Unknown:cds_NC_019843.3_cds_YP_009047202.1_1 target sequence
SSNAFLDLRTSCFSVAALTTGLTFQTVRPGNFNQDFYDFVVSKGFFKEGSSVTLKHFFFAQDGNAAITDYNYYSYNLPTMCDIKQ

SEQ ID NO: 16212 - protein, 85 aa, unidentified
  REGION 1..85: note = Description of Unknown:cds_NC_019843.3_cds_YP_009047202.1_1 target sequence
MLFCMEVVNKYFEIYDGGCLNASEVVVNNLDKSAGHPFNKFGKARVYYESMSYQEQDELFAMTKRNVIPTMTQMNLKYAISAKNR

SEQ ID NO: 16213 - protein, 85 aa, unidentified
  REGION 1..85: note = Description of Unknown:cds_NC_019843.3_cds_YP_009047202.1_1 target sequence
ARTVAGVSILSTMTNRQYHQKMLKSMAATRGATCVIGTTKFYGGWDFMLKTLYKDVDNPHLMGWDYPKCDRAMPNMCRIFASLIL

SEQ ID NO: 16214 - protein, 85 aa, unidentified
  REGION 1..85: note = Description of Unknown:cds_NC_019843.3_cds_YP_009047202.1_1 target sequence
ARKHGTCCTTRDRFYRLANECAQVLSEYVLCGGGYYVKPGGTSSGDATTAYANSVFNILQATTANVSALMGANGNKIVDKEVKDM

SEQ ID NO: 16215 - protein, 85 aa, unidentified
  REGION 1..85: note = Description of Unknown:cds_NC_019843.3_cds_YP_009047202.1_1 target sequence
QFDLYVNVYRSTSPDPKFVDKYYAFLNKHFSMMILSDDGVVCYNSDYAAKGYIAGIQNFKETLYYQNNVFMSEAKCWVETDLKKG

SEQ ID NO: 16216 - protein, 85 aa, unidentified
  REGION 1..85: note = Description of Unknown:cds_NC_019843.3_cds_YP_009047202.1_1 target sequence
PHEFCSQHTLYIKDGDDGYFLPYPDPSRILSAGCFVDDIVKTDGTLMVERFVSLAIDAYPLTKHEDIEYQNVFWVYLQYIEKLYK

SEQ ID NO: 16217 - protein, 85 aa, unidentified
  REGION 1..85: note = Description of Unknown:cds_NC_019843.3_cds_YP_009047202.1_1 target sequence
DLTGHMLDSYSVMLCGDNSAKFWEEAFYRDLYSSPTTLQAVGSCVVCHSQTSLRCGTCIRRPFLCCKCCYDHVIATPHKMVLSVS

SEQ ID NO: 16218 - protein, 85 aa, unidentified
  REGION 1..85: note = Description of Unknown:cds_NC_019843.3_cds_YP_009047202.1_1 target sequence
PYVCNAPGCGVSDVTKLYLGGMSYFCVDHRPVCSFPLCANGLVFGLYKNMCTGSPSIVEFNRLATCDWTESGDYTLANTTTEPLK

SEQ ID NO: 16219 - protein, 85 aa, unidentified
  REGION 1..85: note = Description of Unknown:cds_NC_019843.3_cds_YP_009047202.1_1 target sequence
LFAAETLRATEEASKQSYAIATIKEIVGERQLLLVWEAGKSKPPLNRNYVFTGYHITKNSKVQLGEYIFERIDYSDAVSYKSSTT

SEQ ID NO: 16220 - protein, 85 aa, unidentified
  REGION 1..85: note = Description of Unknown:cds_NC_019843.3_cds_YP_009047202.1_1 target sequence
YKLTVGDIFVLTSHSVATLTAPTIVNQERYVKITGLYPTITVPEEFASHVANFQKSGYSKYVTVQGPPGTGKSHFAIGLAIYYPT

SEQ ID NO: 16221 - protein, 85 aa, unidentified
  REGION 1..85: note = Description of Unknown:cds_NC_019843.3_cds_YP_009047202.1_1 target sequence
ARVVYTACSHAAVDALCEKAFKYLNIAKCSRIIPAKARVECYDRFKVNETNSQYLFSTINALPETSADILVVDEVSMCTNYDLSI

SEQ ID NO: 16222 - protein, 85 aa, unidentified
  REGION 1..85: note = Description of Unknown:cds_NC_019843.3_cds_YP_009047202.1_1 target sequence
INARIKAKHIVYVGDPAQLPAPRTLLTRGTLEPENFNSVTRLMCNLGPDIFLSMCYRCPKEIVSTVSALVYNNKLLAKKELSGQC

SEQ ID NO: 16223 - protein, 85 aa, unidentified
  REGION 1..85: note = Description of Unknown:cds_NC_019843.3_cds_YP_009047202.1_1 target sequence
FKILYKGNVTHDASSAINRPQLTFVKNFITANPAWSKAVFISPYNSQNAVSRSMLGLTTQTVDSSQGSEYQYVIFCQTADTAHAN

SEQ ID NO: 16224 - protein, 85 aa, unidentified
  REGION 1..85: note = Description of Unknown:cds_NC_019843.3_cds_YP_009047202.1_1 target sequence
NINRFNVAITRAQKGILCVMTSQALFESLEFTELSFTNYKLQSQIVTGLFKDCSRETSGLSPAYAPTYVSVDDKYKTSDELCVNL

SEQ ID NO: 16225 - protein, 85 aa, unidentified
  REGION 1..85: note = Description of Unknown:cds_NC_019843.3_cds_YP_009047202.1_1 target sequence
NLPANVPYSRVISRMGFKLDATVPGYPKLFITREEAVRQVRSWIGFDVEGAHASRNACGTNVPLQLGFSTGVNFVVQPVGVVDTE

SEQ ID NO: 16226 - protein, 85 aa, unidentified
  REGION 1..85: note = Description of Unknown:cds_NC_019843.3_cds_YP_009047202.1_1 target sequence
WGNMLTGIAARPPPGEQFKHLVPLMHKGAAWPIVRRRIVQMLSDTLDKLSDYCTFVCWAHGFELTSASYFCKIGKEQKCCMCNRR

SEQ ID NO: 16227 - protein, 85 aa, unidentified
  REGION 1..85: note = Description of Unknown:cds_NC_019843.3_cds_YP_009047202.1_1 target sequence
AAAYSSPLQSYACWTHSCGYDYVYNPFFVDVQQWGYVGNLATNHDRYCSVHQGAHVASNDAIMTRCLAIHSCFIERVDWDIEYPY

SEQ ID NO: 16228 - protein, 85 aa, unidentified
  REGION 1..85: note = Description of Unknown:cds_NC_019843.3_cds_YP_009047202.1_1 target sequence
ISHEKKLNSCCRIVERNVVRAALLAGSFDKVYDIGNPKGIPIVDDPVVDWHYFDAQPLTRKVQQLFYTEDMASRFADGLCLFWNC

SEQ ID NO: 16229 - protein, 85 aa, unidentified
  REGION 1..85: note = Description of Unknown:cds_NC_019843.3_cds_YP_009047202.1_1 target sequence
NVPKYPNNAIVCRFDTRVHSEFNLPGCDGGSLYVNKHAFHTPAYDVSAFRDLKPLPFFYYSTTPCEVHGNGSMIEDIDYVPLKSA

SEQ ID NO: 16230 - protein, 85 aa, unidentified
  REGION 1..85: note = Description of Unknown:cds_NC_019843.3_cds_YP_009047202.1_1 target sequence
VCITACNLGGAVCRKHATEYREYMEAYNLVSASGFRLWCYKTFDIYNLWSTFTKVQGLENIAFNVVKQGHFIGVEGELPVAVVND

SEQ ID NO: 16231 - protein, 85 aa, unidentified
  REGION 1..85: note = Description of Unknown:cds_NC_019843.3_cds_YP_009047202.1_1 target sequence
KIFTKSGVNDICMFENKTTLPTNIAFELYAKRAVRSHPDFKLLHNLQADICYKFVLWDYERSNIYGTATIGVCKYTDIDVNSALN

SEQ ID NO: 16232 - protein, 85 aa, unidentified
  REGION 1..85: note = Description of Unknown:cds_NC_019843.3_cds_YP_009047202.1_1 target sequence
ICFDIRDNCSLEKFMSTPNAIFISDRKIKKYPCMVGPDYAYFNGAIIRDSDVVKQPVKFYLYKKVNNEFIDPTECIYTQSRSCSD

SEQ ID NO: 16233 - protein, 85 aa, unidentified
  REGION 1..85: note = Description of Unknown:cds_NC_019843.3_cds_YP_009047202.1_1 target sequence
FLPLSDMEKDFLSFDSDVFIKKYGLENYAFEHVVYGDFSHTTLGGLHLLIGLYKKQQEGHIIMEEMLKGSSTIHNYFITETNTAA

SEQ ID NO: 16234 - protein, 85 aa, unidentified
  REGION 1..85: note = Description of Unknown:cds_NC_019843.3_cds_YP_009047202.1_1 target sequence
FKAVCSVIDLKLDDFVMILKSQDLGVVSKVVKVPIDLTMIEFMLWCKDGQVQTFYPRLQASADWKPGHAMPSLFKVQNVNLERCE

SEQ ID NO: 16235 - protein, 85 aa, unidentified
  REGION 1..85: note = Description of Unknown:cds_NC_019843.3_cds_YP_009047202.1_1 target sequence
LANYKQSIPMPRGVHMNIAKYMQLCQYLNTCTLAVPANMRVIHFGAGSDKGIAPGTSVLRQWLPTDAIIIDNDLNEFVSDADITL

SEQ ID NO: 16236 - protein, 85 aa, unidentified
  REGION 1..85: note = Description of Unknown:cds_NC_019843.3_cds_YP_009047202.1_1 target sequence
FGDCVTVRVGQQVDLVISDMYDPTTKNVTGSNESKALFFTYLCNLINNNLALGGSVAIKITEHSWSVELYELMGKFAWWTVFCTN

SEQ ID NO: 16237 - protein, 85 aa, unidentified
  REGION 1..85: note = Description of Unknown:cds_NC_019843.3_cds_YP_009047202.1_1 target sequence
ANASSSEGFLLGINYLGTIKENIDGGAMHANYIFWRNSTPMNLSTYSLFDLSKFQLKLKGTPVLQLKESQINELVISLLSQGKLL

SEQ ID NO: 16238 - protein, 84 aa, unidentified
  REGION 1..84: note = Description of Unknown:cds_NC_019843.3_cds_YP_009047202.1_1 target sequence
DGGAMHANYIFWRNSTPMNLSTYSLFDLSKFQLKLKGTPVLQLKESQINELVISLLSQGKLLIRDNDTLSVSTDVLVNTYRKLR

SEQ ID NO: 16239 - protein, 85 aa, unidentified
  REGION 1..85: note = Description of Unknown:cds_NC_019843.3_cds_YP_009047202.1_1 target sequence
VSLTVPLCGSGNLVEKLSPWFMDGENAYEVVKAMLLKKEPLLYVPIRLAGHTRHLPGPRVYLVERLIACENPFMVNQLAYSSSAN

SEQ ID NO: 16240 - protein, 85 aa, unidentified
  REGION 1..85: note = Description of Unknown:cds_NC_019843.3_cds_YP_009047202.1_1 target sequence
GSLVGTTLQGKPIGMFFPYDIELVTGKQNILLRKYGRGGYHYTPFHYERDNTSCPEWMDDFEADPKGKYAQNLLKKLIGGDVTPV

SEQ ID NO: 16241 - protein, 85 aa, unidentified
  REGION 1..85: note = Description of Unknown:cds_NC_019843.3_cds_YP_009047202.1_1 target sequence
DQYMCGVDGKPISAYAFLMAKDGITKLADVEADVAARADDEGFITLKNNLYRLVWHVERKDVPYPKQSIFTINSVVQKDGVENTP

SEQ ID NO: 16242 - protein, 85 aa, unidentified
  REGION 1..85: note = Description of Unknown:cds_NC_019843.3_cds_YP_009047202.1_1 target sequence
PHYFTLGCKILTLTPRNKWSGVSDLSLKQKLLYTFYGKESLENPTYIYHSAFIECGSCGNDSWLTGNAIQGFACGCGASYTANDV

SEQ ID NO: 16243 - protein, 85 aa, unidentified
  REGION 1..85: note = Description of Unknown:cds_NC_019843.3_cds_YP_009047202.1_1 target sequence
EVQSSGMIKPNALLCATCPFAKGDSCSSNCKHSVAQLVSYLSERCNVIADSKSFTLIFGGVAYAYFGCEEGTMYFVPRAKSVVSR

SEQ ID NO: 16244 - protein, 85 aa, unidentified
  REGION 1..85: note = Description of Unknown:cds_NC_019843.3_cds_YP_009047202.1_1 target sequence
IGDSIFTGCTGSWNKVTQIANMFLEQTQHSLNFVGEFVVNDVVLAILSGTTTNVDKIRQLLKGVTLDKLRDYLADYDVAVTAGPF

SEQ ID NO: 16245 - protein, 85 aa, unidentified
  REGION 1..85: note = Description of Unknown:cds_NC_019843.3_cds_YP_009047202.1_1 target sequence
MDNAINVGGTGLQYAAITAPYVVLTGLGESFKKVATIPYKVCNSVKDTLAYYAHSVLYRVFPYDMDSGVSSFSELLFDCVDLSVA

SEQ ID NO: 16246 - protein, 85 aa, unidentified
  REGION 1..85: note = Description of Unknown:cds_NC_019843.3_cds_YP_009047202.1_1 target sequence
STYFLVRILQDKTGDFMSTIITSCQTAVSKLLDTCFEATEATFNFLLDLAGLFRIFLRNAYVYTSQGFVVVNGKVSTLVKQVLDL

SEQ ID NO: 16247 - protein, 85 aa, unidentified
  REGION 1..85: note = Description of Unknown:cds_NC_019843.3_cds_YP_009047202.1_1 target sequence
LNKGMQLLHTKVSWAGSKIIAVIYSGRESLIFPSGTYYCVTTKAKSVQQDLDVILPGEFSKKQLGLLQPTDNSTTVSVTVSSNMV

SEQ ID NO: 16248 - protein, 85 aa, unidentified
  REGION 1..85: note = Description of Unknown:cds_NC_019843.3_cds_YP_009047202.1_1 target sequence
ETVVGQLEQTNMHSPDVIVGDYVIISEKLFVRSKEEDGFAFYPACTNGHAVPTLFRLKGGAPVKKVAFGGDQVHEVAAVRSVTVE

SEQ ID NO: 16249 - protein, 85 aa, unidentified
  REGION 1..85: note = Description of Unknown:cds_NC_019843.3_cds_YP_009047202.1_1 target sequence
YNIHAVLDTLLASSSLRTFVVDKSLSIEEFADVVKEQVSDLLVKLLRGMPIPDFDLDDFIDAPCYCFNAEGDASWSSTMIFSLHP

SEQ ID NO: 16250 - protein, 85 aa, unidentified
  REGION 1..85: note = Description of Unknown:cds_NC_019843.3_cds_YP_009047202.1_1 target sequence
VECDEECSEVEASDLEEGESECISETSTEQVDVSHETSDDEWAAAVDEAFPLDEAEDVTESVQEEAQPVEVPVEDIAQVVIADTL

SEQ ID NO: 16251 - protein, 85 aa, unidentified
  REGION 1..85: note = Description of Unknown:cds_NC_019843.3_cds_YP_009047202.1_1 target sequence
QETPVVPDTVEVPPQVVKLPSAPQTIQPEVKEVAPVYEADTEQTQNVTVKPKRLRKKRNVDPLSNFEHKVITECVTIVLGDAIQV

SEQ ID NO: 16252 - protein, 85 aa, unidentified
  REGION 1..85: note = Description of Unknown:cds_NC_019843.3_cds_YP_009047202.1_1 target sequence
AKCYGESVLVNAANTHLKHGGGIAGAINAASKGAVQKESDEYILAKGPLQVGDSVLLQGHSLAKNILHVVGPDARAKQDVSLLSK

SEQ ID NO: 16253 - protein, 85 aa, unidentified
  REGION 1..85: note = Description of Unknown:cds_NC_019843.3_cds_YP_009047202.1_1 target sequence
CYKAMNAYPLVVTPLVSAGIFGVKPAVSFDYLIREAKTRVLVVVNSQDVYKSLTIVDIPQSLTFSYDGLRGAIRKAKDYGFTVFV

SEQ ID NO: 16254 - protein, 85 aa, unidentified
  REGION 1..85: note = Description of Unknown:cds_NC_019843.3_cds_YP_009047202.1_1 target sequence
CTDNSANTKVLRNKGVDYTKKFLTVDGVQYYCYTSKDTLDDILQQANKSVGIISMPLGYVSHGLDLMQAGSVVRRVNVPYVCLLA

SEQ ID NO: 16255 - protein, 85 aa, unidentified
  REGION 1..85: note = Description of Unknown:cds_NC_019843.3_cds_YP_009047202.1_1 target sequence
NKEQEAILMSEDVKLNPSEDFIKHVRTNGGYNSWHLVEGELLVQDLRLNKLLHWSDQTICYKDSVFYVVKNSTAFPFETLSACRA

SEQ ID NO: 16256 - protein, 85 aa, unidentified
  REGION 1..85: note = Description of Unknown:cds_NC_019843.3_cds_YP_009047202.1_1 target sequence
YLDSRTTQQLTIEVLVTVDGVNFRTVVLNNKNTYRSQLGCVFFNGADISDTIPDEKQNGHSLYLADNLTADETKALKELYGPVDP

SEQ ID NO: 16257 - protein, 85 aa, unidentified
  REGION 1..85: note = Description of Unknown:cds_NC_019843.3_cds_YP_009047202.1_1 target sequence
TFLHRFYSLKAAVHGWKMVVCDKVRSLKLSDNNCYLNAVIMTLDLLKDIKFVIPALQHAFMKHKGGDSTDFIALIMAYGNCTFGA

SEQ ID NO: 16258 - protein, 85 aa, unidentified
  REGION 1..85: note = Description of Unknown:cds_NC_019843.3_cds_YP_009047202.1_1 target sequence
PDDASRLLHTVLAKAELCCSARMVWREWCNVCGIKDVVLQGLKACCYVGVQTVEDLRARMTYVCQCGGERHRQLVEHTTPWLLLS

SEQ ID NO: 16259 - protein, 85 aa, unidentified
  REGION 1..85: note = Description of Unknown:cds_NC_019843.3_cds_YP_009047202.1_1 target sequence
GTPNEKLVTTSTAPDFVAFNVFQGIETAVGHYVHARLKGGLILKFDSGTVSKTSDWKCKVTDVLFPGQKYSSDCNVVRYSLDGNF

SEQ ID NO: 16260 - protein, 85 aa, unidentified
  REGION 1..85: note = Description of Unknown:cds_NC_019843.3_cds_YP_009047202.1_1 target sequence
RTEVDPDLSAFYVKDGKYFTSEPPVTYSPATILAGSVYTNSCLVSSDGQPGGDAISLSFNNLLGFDSSKPVTKKYTYSFLPKEDG

SEQ ID NO: 16261 - protein, 85 aa, unidentified
  REGION 1..85: note = Description of Unknown:cds_NC_019843.3_cds_YP_009047202.1_1 target sequence
DVLLAEFDTYDPIYKNGAMYKGKPILWVNKASYDTNLNKFNRASLRQIFDVAPIELENKFTPLSVESTPVEPPTVDVVALQQEMT

SEQ ID NO: 16262 - protein, 85 aa, unidentified
  REGION 1..85: note = Description of Unknown:cds_NC_019843.3_cds_YP_009047202.1_1 target sequence
IVKCKGLNKPFVKDNVSFVADDSGTPVVEYLSKEDLHTLYVDPKYQVIVLKDNVLSSMLRLHTVESGDINVVAASGSLTRKVKLL

SEQ ID NO: 16263 - protein, 85 aa, unidentified
  REGION 1..85: note = Description of Unknown:cds_NC_019843.3_cds_YP_009047202.1_1 target sequence
FRASFYFKEFATRTFTATTAVGSCIKSVVRHLGVTKGILTGCFSFAKMLFMLPLAYFSDSKLGTTEVKVSALKTAGVVTGNVVKQ

SEQ ID NO: 16264 - protein, 85 aa, unidentified
  REGION 1..85: note = Description of Unknown:cds_NC_019843.3_cds_YP_009047202.1_1 target sequence
CCTAAVDLSMDKLRRVDWKSTLRLLLMLCTTMVLLSSVYHLYVFNQVLSSDVMFEDAQGLKKFYKEVRAYLGISSACDGLASAYR

SEQ ID NO: 16265 - protein, 85 aa, unidentified
  REGION 1..85: note = Description of Unknown:cds_NC_019843.3_cds_YP_009047202.1_1 target sequence
ANSFDVPTFCANRSAMCNWCLISQDSITHYPALKMVQTHLSHYVLNIDWLWFAFETGLAYMLYTSAFNWLLLAGTLHYFFAQTSI

SEQ ID NO: 16266 - protein, 85 aa, unidentified
  REGION 1..85: note = Description of Unknown:cds_NC_019843.3_cds_YP_009047202.1_1 target sequence
FVDWRSYNYAVSSAFWLFTHIPMAGLVRMYNLLACLWLLRKFYQHVINGCKDTACLLCYKRNRLTRVEASTVVCGGKRTFYITAN

SEQ ID NO: 16267 - protein, 85 aa, unidentified
  REGION 1..85: note = Description of Unknown:cds_NC_019843.3_cds_YP_009047202.1_1 target sequence
GGISFCRRHNWNCVDCDTAGVGNTFICEEVANDLTTALRRPINATDRSHYYVDSVTVKETVVQFNYRRDGQPFYERFPLCAFTNL

SEQ ID NO: 16268 - protein, 85 aa, unidentified
  REGION 1..85: note = Description of Unknown:cds_NC_019843.3_cds_YP_009047202.1_1 target sequence
DKLKFKEVCKTTTGIPEYNFIIYDSSDRGQESLARSACVYYSQVLCKSILLVDSSLVTSVGDSSEIATKMFDSFVNSFVSLYNVT

SEQ ID NO: 16269 - protein, 85 aa, unidentified
  REGION 1..85: note = Description of Unknown:cds_NC_019843.3_cds_YP_009047202.1_1 target sequence
RDKLEKLISTARDGVRRGDNFHSVLTTFIDAARGPAGVESDVETNEIVDSVQYAHKHDIQITNESYNNYVPSYVKPDSVSTSDLG

SEQ ID NO: 16270 - protein, 85 aa, unidentified
  REGION 1..85: note = Description of Unknown:cds_NC_019843.3_cds_YP_009047202.1_1 target sequence
SLIDCNAASVNQIVLRNSNGACIWNAAAYMKLSDALKRQIRIACRKCNLAFRLTTSKLRANDNILSVRFTANKIVGGAPTWFNAL

SEQ ID NO: 16271 - protein, 85 aa, unidentified
  REGION 1..85: note = Description of Unknown:cds_NC_019843.3_cds_YP_009047202.1_1 target sequence
RDFTLKGYVLATIIVFLCAVLMYLCLPTFSMAPVEFYEDRILDFKVLDNGIIRDVNPDDKCFANKHRSFTQWYHEHVGGVYDNSI

SEQ ID NO: 16272 - protein, 85 aa, unidentified
  REGION 1..85: note = Description of Unknown:cds_NC_019843.3_cds_YP_009047202.1_1 target sequence
TCPLTVAVIAGVAGARIPDVPTTLAWVNNQIIFFVSRVFANTGSVCYTPIDEIPYKSFSDSGCILPSECTMFRDAEGRMTPYCHD

SEQ ID NO: 16273 - protein, 85 aa, unidentified
  REGION 1..85: note = Description of Unknown:cds_NC_019843.3_cds_YP_009047202.1_1 target sequence
PTVLPGAFAYSQMRPHVRYDLYDGNMFIKFPEVVFESTLRITRTLSTQYCRFGSCEYAQEGVCITTNGSWAIFNDHHLNRPGVYC

SEQ ID NO: 16274 - protein, 85 aa, unidentified
  REGION 1..85: note = Description of Unknown:cds_NC_019843.3_cds_YP_009047202.1_1 target sequence
GSDFIDIVRRLAVSLFQPITYFQLTTSLVLGIGLCAFLTLLFYYINKVKRAFADYTQCAVIAVVAAVLNSLCICFVTSIPLCIVP

SEQ ID NO: 16275 - protein, 85 aa, unidentified
  REGION 1..85: note = Description of Unknown:cds_NC_019843.3_cds_YP_009047202.1_1 target sequence
YTALYYYATFYFTNEPAFIMHVSWYIMFGPIVPIWMTCVYTVAMCFRHFFWVLAYFSKKHVEVFTDGKLNCSFQDAASNIFVINK

SEQ ID NO: 16276 - protein, 85 aa, unidentified
  REGION 1..85: note = Description of Unknown:cds_NC_019843.3_cds_YP_009047202.1_1 target sequence
DTYAALRNSLTNDAYSRFLGLFNKYKYFSGAMETAAYREAAACHLAKALQTYSETGSDLLYQPPNCSITSGVLQSGLVKMSHPSG

SEQ ID NO: 16277 - protein, 85 aa, unidentified
  REGION 1..85: note = Description of Unknown:cds_NC_019843.3_cds_YP_009047202.1_1 target sequence
DVEACMVQVTCGSMTLNGLWLDNTVWCPRHVMCPADQLSDPNYDALLISMTNHSFSVQKHIGAPANLRVVGHAMQGTLLKLTVDV

SEQ ID NO: 16278 - protein, 85 aa, unidentified
  REGION 1..85: note = Description of Unknown:cds_NC_019843.3_cds_YP_009047202.1_1 target sequence
ANPSTPAYTFTTVKPGAAFSVLACYNGRPTGTFTVVMRPNYTIKGSFLCGSCGSVGYTKEGSVINFCYMHQMELANGTHTGSAFD

SEQ ID NO: 16279 - protein, 85 aa, unidentified
  REGION 1..85: note = Description of Unknown:cds_NC_019843.3_cds_YP_009047202.1_1 target sequence
GTMYGAFMDKQVHQVQLTDKYCSVNVVAWLYAAILNGCAWFVKPNRTSVVSFNEWALANQFTEFVGTQSVDMLAVKTGVAIEQLL

SEQ ID NO: 16280 - protein, 85 aa, unidentified
  REGION 1..85: note = Description of Unknown:cds_NC_019843.3_cds_YP_009047202.1_1 target sequence
YAIQQLYTGFQGKQILGSTMLEDEFTPEDVNMQIMGVVMQSGVRKVTYGTAHWLFATLVSTYVIILQATKFTLWNYLFETIPTQL

SEQ ID NO: 16281 - protein, 85 aa, unidentified
  REGION 1..85: note = Description of Unknown:cds_NC_019843.3_cds_YP_009047202.1_1 target sequence
FPLLFVTMAFVMLLVKHKHTFLTLFLLPVAICLTYANIVYEPTTPISSALIAVANWLAPTNAYMRTTHTDIGVYISMSLVLVIVV

SEQ ID NO: 16282 - protein, 85 aa, unidentified
  REGION 1..85: note = Description of Unknown:cds_NC_019843.3_cds_YP_009047202.1_1 target sequence
KRLYNPSLSNFALALCSGVMWLYTYSIGEASSPIAYLVFVTTLTSDYTITVFVTVNLAKVCTYAIFAYSPQLTLVFPEVKMILLL

SEQ ID NO: 16283 - protein, 85 aa, unidentified
  REGION 1..85: note = Description of Unknown:cds_NC_019843.3_cds_YP_009047202.1_1 target sequence
YTCLGFMCTCYFGVFSLLNLKLRAPMGVYDFKVSTQEFRFMTANNLTAPRNSWEAMALNFKLIGIGGTPCIKVAAMQSKLTDLKC

SEQ ID NO: 16284 - protein, 85 aa, unidentified
  REGION 1..85: note = Description of Unknown:cds_NC_019843.3_cds_YP_009047202.1_1 target sequence
TSVVLLSVLQQLHLEANSRAWAFCVKCHNDILAATDPSEAFEKFVSLFATLMTFSGNVDLDALASDIFDTPSVLQATLSEFSHLA

SEQ ID NO: 16285 - protein, 85 aa, unidentified
  REGION 1..85: note = Description of Unknown:cds_NC_019843.3_cds_YP_009047202.1_1 target sequence
TFAELEAAQKAYQEAMDSGDTSPQVLKALQKAVNIAKNAYEKDKAVARKLERMADQAMTSMYKQARAEDKKAKIVSAMQTMLFGM

SEQ ID NO: 16286 - protein, 85 aa, unidentified
  REGION 1..85: note = Description of Unknown:cds_NC_019843.3_cds_YP_009047202.1_1 target sequence
IKKLDNDVLNGIISNARNGCIPLSVIPLCASNKLRVVIPDFTVWNQVVTYPSLNYAGALWDITVINNVDNEIVKSSDVVDSNENL

SEQ ID NO: 16287 - protein, 85 aa, unidentified
  REGION 1..85: note = Description of Unknown:cds_NC_019843.3_cds_YP_009047202.1_1 target sequence
TWPLVLECTRASTSAVKLQNNEIKPSGLKTMVVSAGQEQTNCNTSSLAYYEPVQGRKMLMALLSDNAYLKWARVEGKDGFVSVEL

SEQ ID NO: 16288 - protein, 85 aa, unidentified
  REGION 1..85: note = Description of Unknown:cds_NC_019843.3_cds_YP_009047202.1_1 target sequence
QPPCKFLIAGPKGPEIRYLYFVKNLNNLHRGQVLGHIAATVRLQAGSNTEFASNSSVLSLVNFTVDPQKAYLDFVNAGGAPLTNC

SEQ ID NO: 16289 - protein, 85 aa, unidentified
  REGION 1..85: note = Description of Unknown:cds_NC_019843.3_cds_YP_009047202.1_1 target sequence
VKMLTPKTGTGIAISVKPESTADQETYGGASVCLYCRAHIEHPDVSGVCKYKGKFVQIPAQCVRDPVGFCLSNTPCNVCQYWIGY

SEQ ID NO: 16290 - protein, 85 aa, unidentified
  REGION 1..85: note = Description of Unknown:cds_NC_019843.3_cds_YP_009047202.1_1 target sequence
GCNCDSLRQAALPQSKDSNFLNRVRGSIVNARIEPCSSGLSTDVVFRAFDICNYKAKVAGIGKYYKTNTCRFVELDDQGHHLDSY

SEQ ID NO: 16291 - protein, 85 aa, unidentified
  REGION 1..85: note = Description of Unknown:cds_NC_019843.3_cds_YP_009047202.1_1 target sequence
FVVKRHTMENYELEKHCYDLLRDCDAVAPHDFFIFDVDKVKTPHIVRQRLTEYTMMDLVYALRHFDQNSEVLKAILVKYGCCDVT

SEQ ID NO: 16292 - protein, 85 aa, unidentified
  REGION 1..85: note = Description of Unknown:cds_NC_019843.3_cds_YP_009047202.1_1 target sequence
YFENKLWFDFVENPSVIGVYHKLGERVRQAILNTVKFCDHMVKAGLVGVLTLDNQDLNGKWYDFGDFVITQPGSGVAIVDSYYSY

SEQ ID NO: 16293 - protein, 85 aa, unidentified
  REGION 1..85: note = Description of Unknown:cds_NC_019843.3_cds_YP_009047202.1_1 target sequence
LMPVLSMTDCLAAETHRDCDFNKPLIEWPLTEYDFTDYKVQLFEKYFKYWDQTYHANCVNCTDDRCVLHCANFNVLFAMTMPKTC

SEQ ID NO: 16294 - protein, 85 aa, unidentified
  REGION 1..85: note = Description of Unknown:cds_NC_019843.3_cds_YP_009047202.1_1 target sequence
FGPIVRKIFVDGVPFVVSCGYHYKELGLVMNMDVSLHRHRLSLKELMMYAADPAMHIASSNAFLDLRTSCFSVAALTTGLTFQTV

SEQ ID NO: 16295 - protein, 85 aa, unidentified
  REGION 1..85: note = Description of Unknown:cds_NC_019843.3_cds_YP_009047202.1_1 target sequence
RPGNFNQDFYDFVVSKGFFKEGSSVTLKHFFFAQDGNAAITDYNYYSYNLPTMCDIKQMLFCMEVVNKYFEIYDGGCLNASEVVV

SEQ ID NO: 16296 - protein, 85 aa, unidentified
  REGION 1..85: note = Description of Unknown:cds_NC_019843.3_cds_YP_009047202.1_1 target sequence
NNLDKSAGHPFNKFGKARVYYESMSYQEQDELFAMTKRNVIPTMTQMNLKYAISAKNRARTVAGVSILSTMTNRQYHQKMLKSMA

SEQ ID NO: 16297 - protein, 85 aa, unidentified
  REGION 1..85: note = Description of Unknown:cds_NC_019843.3_cds_YP_009047202.1_1 target sequence
ATRGATCVIGTTKFYGGWDFMLKTLYKDVDNPHLMGWDYPKCDRAMPNMCRIFASLILARKHGTCCTTRDRFYRLANECAQVLSE

SEQ ID NO: 16298 - protein, 85 aa, unidentified
  REGION 1..85: note = Description of Unknown:cds_NC_019843.3_cds_YP_009047202.1_1 target sequence
YVLCGGGYYVKPGGTSSGDATTAYANSVFNILQATTANVSALMGANGNKIVDKEVKDMQFDLYVNVYRSTSPDPKFVDKYYAFLN

SEQ ID NO: 16299 - protein, 85 aa, unidentified
  REGION 1..85: note = Description of Unknown:cds_NC_019843.3_cds_YP_009047202.1_1 target sequence
KHFSMMILSDDGVVCYNSDYAAKGYIAGIQNFKETLYYQNNVFMSEAKCWVETDLKKGPHEFCSQHTLYIKDGDDGYFLPYPDPS

SEQ ID NO: 16300 - protein, 85 aa, unidentified
  REGION 1..85: note = Description of Unknown:cds_NC_019843.3_cds_YP_009047202.1_1 target sequence
RILSAGCFVDDIVKTDGTLMVERFVSLAIDAYPLTKHEDIEYQNVFWVYLQYIEKLYKDLTGHMLDSYSVMLCGDNSAKFWEEAF

SEQ ID NO: 16301 - protein, 85 aa, unidentified
  REGION 1..85: note = Description of Unknown:cds_NC_019843.3_cds_YP_009047202.1_1 target sequence
YRDLYSSPTTLQAVGSCVVCHSQTSLRCGTCIRRPFLCCKCCYDHVIATPHKMVLSVSPYVCNAPGCGVSDVTKLYLGGMSYFCV

SEQ ID NO: 16302 - protein, 85 aa, unidentified
  REGION 1..85: note = Description of Unknown:cds_NC_019843.3_cds_YP_009047202.1_1 target sequence
DHRPVCSFPLCANGLVFGLYKNMCTGSPSIVEFNRLATCDWTESGDYTLANTTTEPLKLFAAETLRATEEASKQSYAIATIKEIV

SEQ ID NO: 16303 - protein, 85 aa, unidentified
  REGION 1..85: note = Description of Unknown:cds_NC_019843.3_cds_YP_009047202.1_1 target sequence
GERQLLLVWEAGKSKPPLNRNYVFTGYHITKNSKVQLGEYIFERIDYSDAVSYKSSTTYKLTVGDIFVLTSHSVATLTAPTIVNQ

SEQ ID NO: 16304 - protein, 85 aa, unidentified
  REGION 1..85: note = Description of Unknown:cds_NC_019843.3_cds_YP_009047202.1_1 target sequence
ERYVKITGLYPTITVPEEFASHVANFQKSGYSKYVTVQGPPGTGKSHFAIGLAIYYPTARVVYTACSHAAVDALCEKAFKYLNIA

SEQ ID NO: 16305 - protein, 85 aa, unidentified
  REGION 1..85: note = Description of Unknown:cds_NC_019843.3_cds_YP_009047202.1_1 target sequence
KCSRIIPAKARVECYDRFKVNETNSQYLFSTINALPETSADILVVDEVSMCTNYDLSIINARIKAKHIVYVGDPAQLPAPRTLLT

SEQ ID NO: 16306 - protein, 85 aa, unidentified
  REGION 1..85: note = Description of Unknown:cds_NC_019843.3_cds_YP_009047202.1_1 target sequence
RGTLEPENFNSVTRLMCNLGPDIFLSMCYRCPKEIVSTVSALVYNNKLLAKKELSGQCFKILYKGNVTHDASSAINRPQLTFVKN

SEQ ID NO: 16307 - protein, 85 aa, unidentified
  REGION 1..85: note = Description of Unknown:cds_NC_019843.3_cds_YP_009047202.1_1 target sequence
FITANPAWSKAVFISPYNSQNAVSRSMLGLTTQTVDSSQGSEYQYVIFCQTADTAHANNINRFNVAITRAQKGILCVMTSQALFE

SEQ ID NO: 16308 - protein, 85 aa, unidentified
  REGION 1..85: note = Description of Unknown:cds_NC_019843.3_cds_YP_009047202.1_1 target sequence
SLEFTELSFTNYKLQSQIVTGLFKDCSRETSGLSPAYAPTYVSVDDKYKTSDELCVNLNLPANVPYSRVISRMGFKLDATVPGYP

SEQ ID NO: 16309 - protein, 85 aa, unidentified
  REGION 1..85: note = Description of Unknown:cds_NC_019843.3_cds_YP_009047202.1_1 target sequence
KLFITREEAVRQVRSWIGFDVEGAHASRNACGTNVPLQLGFSTGVNFVVQPVGVVDTEWGNMLTGIAARPPPGEQFKHLVPLMHK

SEQ ID NO: 16310 - protein, 85 aa, unidentified
  REGION 1..85: note = Description of Unknown:cds_NC_019843.3_cds_YP_009047202.1_1 target sequence
GAAWPIVRRRIVQMLSDTLDKLSDYCTFVCWAHGFELTSASYFCKIGKEQKCCMCNRRAAAYSSPLQSYACWTHSCGYDYVYNPF

SEQ ID NO: 16311 - protein, 85 aa, unidentified
  REGION 1..85: note = Description of Unknown:cds_NC_019843.3_cds_YP_009047202.1_1 target sequence
FVDVQQWGYVGNLATNHDRYCSVHQGAHVASNDAIMTRCLAIHSCFIERVDWDIEYPYISHEKKLNSCCRIVERNVVRAALLAGS

SEQ ID NO: 16312 - protein, 85 aa, unidentified
  REGION 1..85: note = Description of Unknown:cds_NC_019843.3_cds_YP_009047202.1_1 target sequence
FDKVYDIGNPKGIPIVDDPVVDWHYFDAQPLTRKVQQLFYTEDMASRFADGLCLFWNCNVPKYPNNAIVCRFDTRVHSEFNLPGC

SEQ ID NO: 16313 - protein, 85 aa, unidentified
  REGION 1..85: note = Description of Unknown:cds_NC_019843.3_cds_YP_009047202.1_1 target sequence
DGGSLYVNKHAFHTPAYDVSAFRDLKPLPFFYYSTTPCEVHGNGSMIEDIDYVPLKSAVCITACNLGGAVCRKHATEYREYMEAY

SEQ ID NO: 16314 - protein, 85 aa, unidentified
  REGION 1..85: note = Description of Unknown:cds_NC_019843.3_cds_YP_009047202.1_1 target sequence
NLVSASGFRLWCYKTFDIYNLWSTFTKVQGLENIAFNVVKQGHFIGVEGELPVAVVNDKIFTKSGVNDICMFENKTTLPTNIAFE

SEQ ID NO: 16315 - protein, 85 aa, unidentified
  REGION 1..85: note = Description of Unknown:cds_NC_019843.3_cds_YP_009047202.1_1 target sequence
LYAKRAVRSHPDFKLLHNLQADICYKFVLWDYERSNIYGTATIGVCKYTDIDVNSALNICFDIRDNCSLEKFMSTPNAIFISDRK

SEQ ID NO: 16316 - protein, 85 aa, unidentified
  REGION 1..85: note = Description of Unknown:cds_NC_019843.3_cds_YP_009047202.1_1 target sequence
IKKYPCMVGPDYAYFNGAIIRDSDVVKQPVKFYLYKKVNNEFIDPTECIYTQSRSCSDFLPLSDMEKDFLSFDSDVFIKKYGLEN

SEQ ID NO: 16317 - protein, 85 aa, unidentified
  REGION 1..85: note = Description of Unknown:cds_NC_019843.3_cds_YP_009047202.1_1 target sequence
YAFEHVVYGDFSHTTLGGLHLLIGLYKKQQEGHIIMEEMLKGSSTIHNYFITETNTAAFKAVCSVIDLKLDDFVMILKSQDLGVV

SEQ ID NO: 16318 - protein, 85 aa, unidentified
  REGION 1..85: note = Description of Unknown:cds_NC_019843.3_cds_YP_009047202.1_1 target sequence
SKVVKVPIDLTMIEFMLWCKDGQVQTFYPRLQASADWKPGHAMPSLFKVQNVNLERCELANYKQSIPMPRGVHMNIAKYMQLCQY

SEQ ID NO: 16319 - protein, 85 aa, unidentified
  REGION 1..85: note = Description of Unknown:cds_NC_019843.3_cds_YP_009047202.1_1 target sequence
LNTCTLAVPANMRVIHFGAGSDKGIAPGTSVLRQWLPTDAIIIDNDLNEFVSDADITLFGDCVTVRVGQQVDLVISDMYDPTTKN

SEQ ID NO: 16320 - protein, 85 aa, unidentified
  REGION 1..85: note = Description of Unknown:cds_NC_019843.3_cds_YP_009047202.1_1 target sequence
VTGSNESKALFFTYLCNLINNNLALGGSVAIKITEHSWSVELYELMGKFAWWTVFCTNANASSSEGFLLGINYLGTIKENIDGGA

SEQ ID NO: 16321 - protein, 85 aa, unidentified
  REGION 1..85: note = Description of Unknown:cds_NC_034440.1_cds_YP_009361856.2_1 target sequence
SFVADVTAQGARGTYRAALNSEKHHDHVSLTVPLCGSGDLVSKLSPWFMDGYDACEAVKVMLSNKEKLLFVPIRLVGYTKHLPGP

SEQ ID NO: 16322 - protein, 85 aa, unidentified
  REGION 1..85: note = Description of Unknown:cds_NC_034440.1_cds_YP_009361856.2_1 target sequence
RVYLVERLINGIYTDPFMVNQVAYSSSANAGLVGTTLQGKPIGLFFPFDADLVTGDHTFLLRKYGRGGYHYTPFHYERDATSRPE

SEQ ID NO: 16323 - protein, 85 aa, unidentified
  REGION 1..85: note = Description of Unknown:cds_NC_034440.1_cds_YP_009361856.2_1 target sequence
WMDDLEADPKGKYAQNLLKKLIGGDVTPVDQYMCGVDGKPINDYAGLMAKEGITKLADIEADVASRVDADGFIVLKNKLYRLVWH

SEQ ID NO: 16324 - protein, 85 aa, unidentified
  REGION 1..85: note = Description of Unknown:cds_NC_034440.1_cds_YP_009361856.2_1 target sequence
VERKDVQYAKQSIFTINSVVQREGLQDIPPHYFTLGGKIDMLVPRNKWNGVANLPLKQKILYTFYGKESLENHSYIYHSAFTDCG

SEQ ID NO: 16325 - protein, 85 aa, unidentified
  REGION 1..85: note = Description of Unknown:cds_NC_034440.1_cds_YP_009361856.2_1 target sequence
GCGNGSWLTGNAVQGFSCGCGASYLSNDVEVQSSGLIKPNALFCATCPFAKGDSCSSSCKHSIAQLVSYLSERCNVIADSKSFTL

SEQ ID NO: 16326 - protein, 85 aa, unidentified
  REGION 1..85: note = Description of Unknown:cds_NC_034440.1_cds_YP_009361856.2_1 target sequence
VFGGVAYAYFGCEEGTMYFVPRAKSVVSKIGDSIFTGCTGSWTKVTQIANLFLEQTQRSLNFVGEFVVNDVVLAILSGTTTNVDK

SEQ ID NO: 16327 - protein, 85 aa, unidentified
  REGION 1..85: note = Description of Unknown:cds_NC_034440.1_cds_YP_009361856.2_1 target sequence
LRELLKGITLEKLRDYLADYDVAVTLGPFMDNAVNVGGKGLQYATITAPFLVLTGLGESFKKVAAIPYKVCKSFKETLSYYADSI

SEQ ID NO: 16328 - protein, 85 aa, unidentified
  REGION 1..85: note = Description of Unknown:cds_NC_034440.1_cds_YP_009361856.2_1 target sequence
LYRVFPYDMDSDVSSFTELLFDCVGLSVASTYFIVRLLQDKTGDFMSTILSSCQSAVRKLLDTCLEATEATLNFLLELANLFKIF

SEQ ID NO: 16329 - protein, 85 aa, unidentified
  REGION 1..85: note = Description of Unknown:cds_NC_034440.1_cds_YP_009361856.2_1 target sequence
LRGAYVYTSQGFVVLQGKMSSLVKQVVDLLNKGMQLLHTKVSWAGSKVSAVIYSGRESLIFPTGTYYCVSTKAKSVQHQFDVILP

SEQ ID NO: 16330 - protein, 85 aa, unidentified
  REGION 1..85: note = Description of Unknown:cds_NC_034440.1_cds_YP_009361856.2_1 target sequence
GDCSKKQLGLLEPTDNSTTVEVTVSSNTVETVVGQLEQTNMHSPDVIVGDYVIISDKLFVRSKEEDRVVFYPACTNGTAVPTLFK

SEQ ID NO: 16331 - protein, 85 aa, unidentified
  REGION 1..85: note = Description of Unknown:cds_NC_034440.1_cds_YP_009361856.2_1 target sequence
LKGGAPVKRVAFGDDEIHEVAAVRSVTVEYNIHAVLDALLASSSLRTFVVDKSLSIEEFVDVVKEQVSDLLAKLLRGMPIPDFDL

SEQ ID NO: 16332 - protein, 85 aa, unidentified
  REGION 1..85: note = Description of Unknown:cds_NC_034440.1_cds_YP_009361856.2_1 target sequence
DDFIDTPCYCFNADGDVSWSSTMIFSLHPVECEDDSFECDSDQDDDQESVCEPLVEETNVQVQESDDDGWAAAVEEAFPIEELEE

SEQ ID NO: 16333 - protein, 85 aa, unidentified
  REGION 1..85: note = Description of Unknown:cds_NC_034440.1_cds_YP_009361856.2_1 target sequence
PPVQVVPNDSVVRSQVAQPIEIVVQETPVQPLEDVAPAVATPSIQLQEIQTEVLDTPPVYEADIEQTQIVVSKPKRLRKKRNVDP

SEQ ID NO: 16334 - protein, 85 aa, unidentified
  REGION 1..85: note = Description of Unknown:cds_NC_034440.1_cds_YP_009361856.2_1 target sequence
LFNFEHKVITDCVTMVLGDAIQVAKCYDEAVLVNAANTYLKHGGGIAGAINAASNGAVQQESDEYILAKGPLQVGDSVLLQGHSL

SEQ ID NO: 16335 - protein, 85 aa, unidentified
  REGION 1..85: note = Description of Unknown:cds_NC_034440.1_cds_YP_009361856.2_1 target sequence
AKNILHVVGPDARAKQDVSLLGKCYKAMNAYPLVVTPLVSAGIFGVQPSVSFDYLIREVKTRVLVVVNSQDIYKSLTTVEVPQGL

SEQ ID NO: 16336 - protein, 85 aa, unidentified
  REGION 1..85: note = Description of Unknown:cds_NC_034440.1_cds_YP_009361856.2_1 target sequence
TFSYDGLRGALRKARDYGFTVFVCTDNSANTKVLRNKGVDYTKKSTTVDGVQYYCYTAKDTLDSIVLEANKASGIISMPLGYVSH

SEQ ID NO: 16337 - protein, 85 aa, unidentified
  REGION 1..85: note = Description of Unknown:cds_NC_034440.1_cds_YP_009361856.2_1 target sequence
GLDLMQAGAIVRRVKVPYVCLLANKEQEAILMSEDVKLSPSADFVKHVRTNGGYNSWHLVEGELLVRDLTLNKLLHWSDQTICYK

SEQ ID NO: 16338 - protein, 85 aa, unidentified
  REGION 1..85: note = Description of Unknown:cds_NC_034440.1_cds_YP_009361856.2_1 target sequence
SDKFYVVKNGVALPFETLAACRTYLDSRTAQQLTIEVLVTVDGVNFRTVVLNNKSSYRSQLGCVFYNGADISDTIPDEKQNGCSL

SEQ ID NO: 16339 - protein, 85 aa, unidentified
  REGION 1..85: note = Description of Unknown:cds_NC_034440.1_cds_YP_009361856.2_1 target sequence
YLADNLTADETKVLKELYGPVDPTFLHRFYSLKAVVQKWKMVVCDKVRSLKLSDNNCYINVVIMILDLLKDIKFVIPALQHAFMK

SEQ ID NO: 16340 - protein, 85 aa, unidentified
  REGION 1..85: note = Description of Unknown:cds_NC_034440.1_cds_YP_009361856.2_1 target sequence
HKGGDSTEFIALIMTYGNCTFGAPDDATRLLHTVLAKAELCCSARMVWREWCNVCGIKDVVIQGLKACCYVGVQTVEDLHARMTY

SEQ ID NO: 16341 - protein, 85 aa, unidentified
  REGION 1..85: note = Description of Unknown:cds_NC_034440.1_cds_YP_009361856.2_1 target sequence
VCQCGGERHRQLVEHTAPWLLLSGTPNEKLVTTSTAPDFVAFNVFQGLETAVGHYVHARLKDGLILKFDSGTLSKTSDWKCKVTD

SEQ ID NO: 16342 - protein, 85 aa, unidentified
  REGION 1..85: note = Description of Unknown:cds_NC_034440.1_cds_YP_009361856.2_1 target sequence
VLFPNQKYSSDCNVVRYSLDGKFRTEVDPDLSAFYVKDGKYFTSEPPVTYSPATVLAGSVYTNSCLVSSDGQPGGDAISLSFNNL

SEQ ID NO: 16343 - protein, 85 aa, unidentified
  REGION 1..85: note = Description of Unknown:cds_NC_034440.1_cds_YP_009361856.2_1 target sequence
LGFDSSKPVTKKYTYSILPKEDGDVLLAEFSTYDPIYKNGAMLKGKPVLWVTNASYDATLNKFNRATLRQIYDVAPIEIENKYTP

SEQ ID NO: 16344 - protein, 85 aa, unidentified
  REGION 1..85: note = Description of Unknown:cds_NC_034440.1_cds_YP_009361856.2_1 target sequence
LSVEPSPVEKVSTVEVALAKPELTIVKCKGLIKPFVKANVSFVSDETGLPVVEYLSKEDLHTLYVDPKYQVIVLKDNALSTIFRL

SEQ ID NO: 16345 - protein, 85 aa, unidentified
  REGION 1..85: note = Description of Unknown:cds_NC_034440.1_cds_YP_009361856.2_1 target sequence
HTVESGDLNVVAASGSLTRKVKLLFRASFYFKELASRTLTATTVVGSCINSVVRHLGVTKGILASLFSFVKMLFVLPLSYFSDSE

SEQ ID NO: 16346 - protein, 85 aa, unidentified
  REGION 1..85: note = Description of Unknown:cds_NC_034440.1_cds_YP_009361856.2_1 target sequence
TSTTEVKVSALKTAGVVTGNVLKQCCTAAVDLSMDKLRRVDWKATLRLLLMLCTTMVLLSSVYHLYVFNQVLSSDVMFEDAQGLK

SEQ ID NO: 16347 - protein, 85 aa, unidentified
  REGION 1..85: note = Description of Unknown:cds_NC_034440.1_cds_YP_009361856.2_1 target sequence
KFYKEVRAYLGVSSGCDGLAAAYRANSFDVPTFCANRSVMCNWCLINQDSITHYPALKMVQTHLSHYVLNIDWLWFALEVGLAYI

SEQ ID NO: 16348 - protein, 85 aa, unidentified
  REGION 1..85: note = Description of Unknown:cds_NC_034440.1_cds_YP_009361856.2_1 target sequence
LYTSAFNWLLLAGTLQYFFAQTSIFVDWRSYNYVVSSAFWLFTHIPMPGLVRIYNLLACLWLLRKFYQHVINGCKDTACLLCYKR

SEQ ID NO: 16349 - protein, 85 aa, unidentified
  REGION 1..85: note = Description of Unknown:cds_NC_034440.1_cds_YP_009361856.2_1 target sequence
NRLTRVEASTVVCGGKRTFYIAANGGISFCRRHNWNCVDCDTAGVGNTFICEEVASDLTTTLRRPVNSTDRSHYYVDSVLVKETV

SEQ ID NO: 16350 - protein, 85 aa, unidentified
  REGION 1..85: note = Description of Unknown:cds_NC_034440.1_cds_YP_009361856.2_1 target sequence
VQFNYRRDGQSCYERFPLCAFTNLDKLKFKEVCKTTTGIPEYNFIIYDSSDRGQESLARSACVYYSQVLCKSILLVDSSLVTSVG

SEQ ID NO: 16351 - protein, 85 aa, unidentified
  REGION 1..85: note = Description of Unknown:cds_NC_034440.1_cds_YP_009361856.2_1 target sequence
NSGEIAIKMFDSFVNSFVSLYNVTRDKLEKLISTARDGVKRGDNFHSVLTTFIDAARGPAGVESDVETNEIVDSVQYAHKHDIQL

SEQ ID NO: 16352 - protein, 85 aa, unidentified
  REGION 1..85: note = Description of Unknown:cds_NC_034440.1_cds_YP_009361856.2_1 target sequence
TNESYNNYVPSYVKPDSVSTGDLGSLIDCNAASVNQTSMRQANGACIWNAAAYMKLSDVLKRQIRIACRKCNLAFRLTTSKLRAN

SEQ ID NO: 16353 - protein, 85 aa, unidentified
  REGION 1..85: note = Description of Unknown:cds_NC_034440.1_cds_YP_009361856.2_1 target sequence
DNMLSVKFTATKIVGGAPTWFNTLRDFTLKSYVFVTIIVFLCAVLMYFCLPTFAMAPVEFYEDRILEYKVLDNGIIRDISPDDKC

SEQ ID NO: 16354 - protein, 85 aa, unidentified
  REGION 1..85: note = Description of Unknown:cds_NC_034440.1_cds_YP_009361856.2_1 target sequence
FANKYRSFSQWYHEHVGGSYDNSISCPLTVAVIAGVAGARIPDVPTTLAWVNRQIVFFVSRVFANSNSVCYTPINEIPYKSFSDS

SEQ ID NO: 16355 - protein, 85 aa, unidentified
  REGION 1..85: note = Description of Unknown:cds_NC_034440.1_cds_YP_009361856.2_1 target sequence
GCILPSECTMFRDAEGRMSPYCYDPTVLPGAFAYSQMKPHVRYDLYDTNMFIKFPEVVFESTLRITKTLTTQYCRFGSCEYAQEG

SEQ ID NO: 16356 - protein, 85 aa, unidentified
  REGION 1..85: note = Description of Unknown:cds_NC_034440.1_cds_YP_009361856.2_1 target sequence
VCITTNGSWAIFNDHHLSRPGVYCGSDYVDIVRRLAVSLFQPITYFQLTTSLVLGIGLCAFLTLLFYYINKVKRAFADYTQCAMI

SEQ ID NO: 16357 - protein, 85 aa, unidentified
  REGION 1..85: note = Description of Unknown:cds_NC_034440.1_cds_YP_009361856.2_1 target sequence
AVIAAVLNSLCICFVSSIPLCIVPYTALYYYATFYFTNEPAAIMHVSWYIMFGPIVPMWLTCVYTVAMCFRHFFWVVAYFSKKHV

SEQ ID NO: 16358 - protein, 85 aa, unidentified
  REGION 1..85: note = Description of Unknown:cds_NC_034440.1_cds_YP_009361856.2_1 target sequence
EVFTDGKLNCSFQDAASNIFVVNKDTYAALRNAITNDVYSRYLGLFNKYKYYSGAMETAAYREAAACHLAKALQTYSETGSDLLY

SEQ ID NO: 16359 - protein, 85 aa, unidentified
  REGION 1..85: note = Description of Unknown:cds_NC_034440.1_cds_YP_009361856.2_1 target sequence
QPPNCSITSGVLQSGLVRMSHPSGDVEACMVQVTCGSMTLNGLWLDNTVWCPRHVMCPADQLADPNYDALLVSMTNHSFSVNKHI

SEQ ID NO: 16360 - protein, 85 aa, unidentified
  REGION 1..85: note = Description of Unknown:cds_NC_034440.1_cds_YP_009361856.2_1 target sequence
GAPANLRVIGHAMQGTLLKLTVDVANPSTPAYTFTTVKPGASFSVLACYNGRPTGTFTVVMRPNYTIKGSFLCGSCGSVGYTKEG

SEQ ID NO: 16361 - protein, 85 aa, unidentified
  REGION 1..85: note = Description of Unknown:cds_NC_034440.1_cds_YP_009361856.2_1 target sequence
SVINFCYMHQMELANGTHTGSAFDGTMYGAFLDKQVHQVQLTDKYCSTNVVAWLYAAILNGCAWFVKSNRTSIVSFNEWALANQF

SEQ ID NO: 16362 - protein, 85 aa, unidentified
  REGION 1..85: note = Description of Unknown:cds_NC_034440.1_cds_YP_009361856.2_1 target sequence
TEFVGTQSIDMLAVKTGVAIEQLLYAIQQLHTGFQGKQILGSSMLEDEFTPEDVNMQIMGVVMQSGVRKVTYGTAHWLFATFVLS

SEQ ID NO: 16363 - protein, 85 aa, unidentified
  REGION 1..85: note = Description of Unknown:cds_NC_034440.1_cds_YP_009361856.2_1 target sequence
YVVFLQTTKFTLWNYLFETIPTQLFPLLFVTVACVMLLVKHKHTFLTLFLLPVAICLTYANIVYEPATPISSALIAVANWLAPTN

SEQ ID NO: 16364 - protein, 85 aa, unidentified
  REGION 1..85: note = Description of Unknown:cds_NC_034440.1_cds_YP_009361856.2_1 target sequence
VYMRTTHTDIGVYISLSLVLAIVVKRLYNPSLSNFALALCSGVMWLYTYSVGEVSSPIAYLVFVTTLTSDYTITVFVTVNLAKIC

SEQ ID NO: 16365 - protein, 85 aa, unidentified
  REGION 1..85: note = Description of Unknown:cds_NC_034440.1_cds_YP_009361856.2_1 target sequence
TYIIFAYAPQLTLVFPEVKMILLLYTCFGFMCTCYFGVFSLLNLKLRAPMGVYDFKVSTQEFRFMTANNLTAPRNSWEAMSLNFK

SEQ ID NO: 16366 - protein, 85 aa, unidentified
  REGION 1..85: note = Description of Unknown:cds_NC_034440.1_cds_YP_009361856.2_1 target sequence
LLGIGGTPCIKVAAIQSKLTDLKCTSVVLLSVLQQLHLEANSKAWAFCVKCHNDILAATDPSEAFEKFVSLFATLMTFSGNVDLD

SEQ ID NO: 16367 - protein, 85 aa, unidentified
  REGION 1..85: note = Description of Unknown:cds_NC_034440.1_cds_YP_009361856.2_1 target sequence
ALASDIFETPSVLQATLSEFSHLATFAELEAAQRAYQEAMDSGDASPQVLKALQKAVNVAKNAYEKDKAVARKLERMAEQAMTSM

SEQ ID NO: 16368 - protein, 85 aa, unidentified
  REGION 1..85: note = Description of Unknown:cds_NC_034440.1_cds_YP_009361856.2_1 target sequence
YKQARAEDKKAKIVSAMQTMLFGMIKKLDNDVLNGIISNARNGCIPLSVVPLCASNKLRVVIPDFTVWNQVVTYPSLNYAGALWD

SEQ ID NO: 16369 - protein, 85 aa, unidentified
  REGION 1..85: note = Description of Unknown:cds_NC_034440.1_cds_YP_009361856.2_1 target sequence
IAVINNVDNEIVKSSDVVENNESLTWPLVLECTRAASSAIKLQNNEIKPSGLRTMVVSAGQEQTNCNTSSLAYYEPVQGRKMLMA

SEQ ID NO: 16370 - protein, 85 aa, unidentified
  REGION 1..85: note = Description of Unknown:cds_NC_034440.1_cds_YP_009361856.2_1 target sequence
LLSDNAYLKWARVEGQEGFVSVELQPPCKFLIAGPKGPEIRYLYFVKNLNNLHRGQVLGHIAATVRLQAGSNTEFAANSSVLSLV

SEQ ID NO: 16371 - protein, 85 aa, unidentified
  REGION 1..85: note = Description of Unknown:cds_NC_034440.1_cds_YP_009361856.2_1 target sequence
NFTVDPQKAYIDFVNAGGAPLTNCVKMLTPKTGTGIAISVKPESTADQETYGGASVCLYCRAHIEHPDVSGVCKYKGKFVQIPSQ

SEQ ID NO: 16372 - protein, 85 aa, unidentified
  REGION 1..85: note = Description of Unknown:cds_NC_034440.1_cds_YP_009361856.2_1 target sequence
CTRDPVGFCLTNTPCNVCQYWIGYGCNCDSLRQAALPQSKDSNFLNESGVLLVNARIEPCASGLSTDVVFRAFDICNYKAKVAGI

SEQ ID NO: 16373 - protein, 85 aa, unidentified
  REGION 1..85: note = Description of Unknown:cds_NC_034440.1_cds_YP_009361856.2_1 target sequence
GKYYKTNTCRFVELDDQGHHLDSYFVVKRHTMENYELEKHCYDLLRDCDSVAPHDFFVFDVDKTKTPHIVRQRLTEYTMMDLVYA

SEQ ID NO: 16374 - protein, 85 aa, unidentified
  REGION 1..85: note = Description of Unknown:cds_NC_034440.1_cds_YP_009361856.2_1 target sequence
LRHFDQNNCEVLKAILVKYDCCDATYFENKLWFDFVENPSVIGVYHKLGERVRQAVLSTVKFCDHMVKAGLVGVLTLDNQDLNGK

SEQ ID NO: 16375 - protein, 85 aa, unidentified
  REGION 1..85: note = Description of Unknown:cds_NC_034440.1_cds_YP_009361856.2_1 target sequence
WYDFGDFVITQPGSGVAIVDSYYSYLMPVLSMTNCLAAETHRDCDFNKPLIEWPLTEYDFTDYKVQLFEKYFKYWDQTYHANCVN

SEQ ID NO: 16376 - protein, 85 aa, unidentified
  REGION 1..85: note = Description of Unknown:cds_NC_034440.1_cds_YP_009361856.2_1 target sequence
CTDDRCVLHCANFNVLFAMTMPKTCFGPIVRKIFVDGVPFVVSCGYHYKELGLVMNMDVSLHRHRLSLKELMMYAADPAMHIASS

SEQ ID NO: 16377 - protein, 85 aa, unidentified
  REGION 1..85: note = Description of Unknown:cds_NC_034440.1_cds_YP_009361856.2_1 target sequence
NAFLDLRTSCFSVAALTTGLTFQTVRPGNFNQDFYDFVVSKGFFKEGSSVTLKHFFFAQDGNAAITDYNYYSYNLPTMCDIKQML

SEQ ID NO: 16378 - protein, 85 aa, unidentified
  REGION 1..85: note = Description of Unknown:cds_NC_034440.1_cds_YP_009361856.2_1 target sequence
FCMEVVNKYFEIYDGGCLNASEVVVNNLDKSAGHPFNKFGKARVYYESMSYQEQDELFAMTKRNVIPTMTQMNLKYAISAKNRAR

SEQ ID NO: 16379 - protein, 85 aa, unidentified
  REGION 1..85: note = Description of Unknown:cds_NC_034440.1_cds_YP_009361856.2_1 target sequence
TVAGVSILSTMTNRQYHQKMLKSMAATRGSTCVIGTTKFYGGWDFMLKTLYKDVDNPHLMGWDYPKCDRAMPNMCRIFASLILAR

SEQ ID NO: 16380 - protein, 85 aa, unidentified
  REGION 1..85: note = Description of Unknown:cds_NC_034440.1_cds_YP_009361856.2_1 target sequence
KHGTCCTTRDRFYRLANECAQVLSEYVLCGGGYYVKPGGTSSGDATTAYANSVFNILQATTANVSALMGANGNKIVDKEVKDMQF

SEQ ID NO: 16381 - protein, 85 aa, unidentified
  REGION 1..85: note = Description of Unknown:cds_NC_034440.1_cds_YP_009361856.2_1 target sequence
ELYVNVYRSTNPDPKFVDRYYAFLNKHFSMMILSDDGVVCYNSDYAAKGYIAGIQNFKETLYYQNNVFMSEAKCWVETDLKKGPH

SEQ ID NO: 16382 - protein, 85 aa, unidentified
  REGION 1..85: note = Description of Unknown:cds_NC_034440.1_cds_YP_009361856.2_1 target sequence
EFCSQHTLYIKDGDDGYFLPYPDPSRILSAGCFVDDIVKTDGTLMVERFVSLAIDAYPLTKHEDIEYQNVFWVYLQYIEKLYKDL

SEQ ID NO: 16383 - protein, 85 aa, unidentified
  REGION 1..85: note = Description of Unknown:cds_NC_034440.1_cds_YP_009361856.2_1 target sequence
TGHMLDSYSVMLCGDNSAKFWEEAFYRELYSSPTTLQAVGSCVVCHSQTSLRCGTCIRRPFLCCKCCYDHVIATPHKMVLSVSPY

SEQ ID NO: 16384 - protein, 85 aa, unidentified
  REGION 1..85: note = Description of Unknown:cds_NC_034440.1_cds_YP_009361856.2_1 target sequence
VCNAPGCDVADVTKLYLGGMSYFCVDHRPVCSFPLCTNGLVFGLYKNMCTGSPSIVEFNRLATCDWTESGDYTLANTTTEPLKLF

SEQ ID NO: 16385 - protein, 85 aa, unidentified
  REGION 1..85: note = Description of Unknown:cds_NC_034440.1_cds_YP_009361856.2_1 target sequence
AAETLRATEEASKQSYAIATIKEIVGDRQLLLVWEAGKSKPPLNRNYVFTGYHITKNSKVQLGEYIFERIDYSDAVSYKSSTTYK

SEQ ID NO: 16386 - protein, 85 aa, unidentified
  REGION 1..85: note = Description of Unknown:cds_NC_034440.1_cds_YP_009361856.2_1 target sequence
LTVGDIFILTSHSVATLTAPTIVNQERYVKITGLYPTITVPEEFASHVANFQKAGYSKYVTVQGPPGTGKSHFAIGLAIYYPTAR

SEQ ID NO: 16387 - protein, 85 aa, unidentified
  REGION 1..85: note = Description of Unknown:cds_NC_034440.1_cds_YP_009361856.2_1 target sequence
VVYTACSHAAVDALCEKAFKYLNIAKCSRIIPAKARVECYDRFKVNETNSQYLFSTINALPETSADILVVDEVSMCTNYDLSIIN

SEQ ID NO: 16388 - protein, 85 aa, unidentified
  REGION 1..85: note = Description of Unknown:cds_NC_034440.1_cds_YP_009361856.2_1 target sequence
ARVKAKHIVYVGDPAQLPAPRTLLTRGTLEPENFNSVTRLMCNLGPDIFLSMCYRCPKEIVSTVSALVYNNKLLAKKELSGQCFK

SEQ ID NO: 16389 - protein, 85 aa, unidentified
  REGION 1..85: note = Description of Unknown:cds_NC_034440.1_cds_YP_009361856.2_1 target sequence
MLYKGNVTHDASSAINRPQLAFVKNFITANPAWSKAVFISPYNSQNAVARSMLGLTTQTVDSSQGSEYQYVIFCQTADTAHANNI

SEQ ID NO: 16390 - protein, 85 aa, unidentified
  REGION 1..85: note = Description of Unknown:cds_NC_034440.1_cds_YP_009361856.2_1 target sequence
NRFNVAITRAQKGILCVMTSQALFDSLEFTELSFTNYKLQSQIVTGLFKDCSRETSGLSPAYAPTYVSVDDKYKTCDELCVNLNL

SEQ ID NO: 16391 - protein, 85 aa, unidentified
  REGION 1..85: note = Description of Unknown:cds_NC_034440.1_cds_YP_009361856.2_1 target sequence
PANVPYSRVISRMGFKLDASVPGYPKLFITREEAVRQVRSWIGFDVEGAHASRNACGTNVPLQLGFSTGVNFVVQPVGVVDTEWG

SEQ ID NO: 16392 - protein, 85 aa, unidentified
  REGION 1..85: note = Description of Unknown:cds_NC_034440.1_cds_YP_009361856.2_1 target sequence
NMLTGISARPPPGEQFKHLVPLMHKGAAWPIVRRRIVQMLSDTLDKLSDYCTFVCWAHGFELTSASYFCKIGKEQKCCMCNRRAA

SEQ ID NO: 16393 - protein, 85 aa, unidentified
  REGION 1..85: note = Description of Unknown:cds_NC_034440.1_cds_YP_009361856.2_1 target sequence
AYSSPLQSYACWSHSCGYDYVYNPFFVDVQQWGYVGNLATNHDRYCSVHQGAHVASNDAIMTRCLAIHACFIEHVDWDIEYPYIS

SEQ ID NO: 16394 - protein, 85 aa, unidentified
  REGION 1..85: note = Description of Unknown:cds_NC_034440.1_cds_YP_009361856.2_1 target sequence
HEKKLNSCCRIVERNVVRAALLAGSFDRVYDIGNPKGIPIVDHPVVEWHYFDAQPLTRKVQQLFYTEDLASRFADGLCLFWNCNV

SEQ ID NO: 16395 - protein, 85 aa, unidentified
  REGION 1..85: note = Description of Unknown:cds_NC_034440.1_cds_YP_009361856.2_1 target sequence
PKYPNNAIVCRFDTRVHSEFNLPGCDGGSLYVNKHAFHTPAYDVSAFRDLKPLPFFYYSTTPCEVHGTGSMLEDIDYVPLKSAVC

SEQ ID NO: 16396 - protein, 85 aa, unidentified
  REGION 1..85: note = Description of Unknown:cds_NC_034440.1_cds_YP_009361856.2_1 target sequence
VTACNLGGAVCRKHATEYRDYMEAYNLVSASGFRLWCYKTFDIYNLWSTFTKVQGLENIAYNVVKQGHFTGVDGELPVAVVNDKI

SEQ ID NO: 16397 - protein, 85 aa, unidentified
  REGION 1..85: note = Description of Unknown:cds_NC_034440.1_cds_YP_009361856.2_1 target sequence
FTKSGVNDICVFENKTTLPTNVAFELYAKRVVRSHPDFKLLHNLQADICYKFVLWDYERCNIYGTATIGVCKYTDIEVNSALNIC

SEQ ID NO: 16398 - protein, 85 aa, unidentified
  REGION 1..85: note = Description of Unknown:cds_NC_034440.1_cds_YP_009361856.2_1 target sequence
FDIRDNGSLEKFMTTPNAILISDRKIKNYPCMVGPDYAYFNGAIIRDSDTVKQPVKFYFYKKVNNEFVEFSDCAYTQGRSCSDFE

SEQ ID NO: 16399 - protein, 85 aa, unidentified
  REGION 1..85: note = Description of Unknown:cds_NC_034440.1_cds_YP_009361856.2_1 target sequence
AMSVMETDFLALDSDVFIKKYGLENYAFEHVVYGDFSHTTLGGLHLLIGLYKKHLDGHIIMEEMIRESSTIHNYFITETSTASFK

SEQ ID NO: 16400 - protein, 85 aa, unidentified
  REGION 1..85: note = Description of Unknown:cds_NC_034440.1_cds_YP_009361856.2_1 target sequence
AVCSVIDLKLDDFVQILKSQDLGVVSKVVKVPIDLTMIEFMLWCKDGQVQTFYPRLQASADWKPGQAMPSLFKVQNVNLERCELA

SEQ ID NO: 16401 - protein, 85 aa, unidentified
  REGION 1..85: note = Description of Unknown:cds_NC_034440.1_cds_YP_009361856.2_1 target sequence
NYKQSIPMPRGVHMNIAKYMQLCQYLNTCTIAVPANMRVIHFGAGSDKGIAPGTSVLRQWLPTDAIIIDNDLNDFVSDADISLFG

SEQ ID NO: 16402 - protein, 85 aa, unidentified
  REGION 1..85: note = Description of Unknown:cds_NC_034440.1_cds_YP_009361856.2_1 target sequence
DCVTVRVGQQVDLVISDMYDPSTKNITGSNESKALFFTYLCNFINNNLALGGSVAIKITEHSWSVDLYEIMGKFAWWTVFCTNAN

SEQ ID NO: 16403 - protein, 85 aa, unidentified
  REGION 1..85: note = Description of Unknown:cds_NC_034440.1_cds_YP_009361856.2_1 target sequence
ASSSEGFLLGINYLGTIKENIDGGAMHANYIFWRNSNPMNLSTYSLFDLSKFQLKLKGTPVLQLKESQINELVISLLSQGKLLIR

SEQ ID NO: 16404 - protein, 84 aa, unidentified
  REGION 1..84: note = Description of Unknown:cds_NC_034440.1_cds_YP_009361856.2_1 target sequence
DGGAMHANYIFWRNSNPMNLSTYSLFDLSKFQLKLKGTPVLQLKESQINELVISLLSQGKLLIRDNDVLSVSTDVLVNFYRGKR

SEQ ID NO: 16405 - protein, 85 aa, unidentified
  REGION 1..85: note = Description of Unknown:cds_NC_034440.1_cds_YP_009361856.2_1 target sequence
VSLTVPLCGSGDLVSKLSPWFMDGYDACEAVKVMLSNKEKLLFVPIRLVGYTKHLPGPRVYLVERLINGIYTDPFMVNQVAYSSS

SEQ ID NO: 16406 - protein, 85 aa, unidentified
  REGION 1..85: note = Description of Unknown:cds_NC_034440.1_cds_YP_009361856.2_1 target sequence
ANAGLVGTTLQGKPIGLFFPFDADLVTGDHTFLLRKYGRGGYHYTPFHYERDATSRPEWMDDLEADPKGKYAQNLLKKLIGGDVT

SEQ ID NO: 16407 - protein, 85 aa, unidentified
  REGION 1..85: note = Description of Unknown:cds_NC_034440.1_cds_YP_009361856.2_1 target sequence
PVDQYMCGVDGKPINDYAGLMAKEGITKLADIEADVASRVDADGFIVLKNKLYRLVWHVERKDVQYAKQSIFTINSVVQREGLQD

SEQ ID NO: 16408 - protein, 85 aa, unidentified
  REGION 1..85: note = Description of Unknown:cds_NC_034440.1_cds_YP_009361856.2_1 target sequence
IPPHYFTLGGKIDMLVPRNKWNGVANLPLKQKILYTFYGKESLENHSYIYHSAFTDCGGCGNGSWLTGNAVQGFSCGCGASYLSN

SEQ ID NO: 16409 - protein, 85 aa, unidentified
  REGION 1..85: note = Description of Unknown:cds_NC_034440.1_cds_YP_009361856.2_1 target sequence
DVEVQSSGLIKPNALFCATCPFAKGDSCSSSCKHSIAQLVSYLSERCNVIADSKSFTLVFGGVAYAYFGCEEGTMYFVPRAKSVV

SEQ ID NO: 16410 - protein, 85 aa, unidentified
  REGION 1..85: note = Description of Unknown:cds_NC_034440.1_cds_YP_009361856.2_1 target sequence
SKIGDSIFTGCTGSWTKVTQIANLFLEQTQRSLNFVGEFVVNDVVLAILSGTTTNVDKLRELLKGITLEKLRDYLADYDVAVTLG

SEQ ID NO: 16411 - protein, 85 aa, unidentified
  REGION 1..85: note = Description of Unknown:cds_NC_034440.1_cds_YP_009361856.2_1 target sequence
PFMDNAVNVGGKGLQYATITAPFLVLTGLGESFKKVAAIPYKVCKSFKETLSYYADSILYRVFPYDMDSDVSSFTELLFDCVGLS

SEQ ID NO: 16412 - protein, 85 aa, unidentified
  REGION 1..85: note = Description of Unknown:cds_NC_034440.1_cds_YP_009361856.2_1 target sequence
VASTYFIVRLLQDKTGDFMSTILSSCQSAVRKLLDTCLEATEATLNFLLELANLFKIFLRGAYVYTSQGFVVLQGKMSSLVKQVV

SEQ ID NO: 16413 - protein, 85 aa, unidentified
  REGION 1..85: note = Description of Unknown:cds_NC_034440.1_cds_YP_009361856.2_1 target sequence
DLLNKGMQLLHTKVSWAGSKVSAVIYSGRESLIFPTGTYYCVSTKAKSVQHQFDVILPGDCSKKQLGLLEPTDNSTTVEVTVSSN

SEQ ID NO: 16414 - protein, 85 aa, unidentified
  REGION 1..85: note = Description of Unknown:cds_NC_034440.1_cds_YP_009361856.2_1 target sequence
TVETVVGQLEQTNMHSPDVIVGDYVIISDKLFVRSKEEDRVVFYPACTNGTAVPTLFKLKGGAPVKRVAFGDDEIHEVAAVRSVT

SEQ ID NO: 16415 - protein, 85 aa, unidentified
  REGION 1..85: note = Description of Unknown:cds_NC_034440.1_cds_YP_009361856.2_1 target sequence
VEYNIHAVLDALLASSSLRTFVVDKSLSIEEFVDVVKEQVSDLLAKLLRGMPIPDFDLDDFIDTPCYCFNADGDVSWSSTMIFSL

SEQ ID NO: 16416 - protein, 85 aa, unidentified
  REGION 1..85: note = Description of Unknown:cds_NC_034440.1_cds_YP_009361856.2_1 target sequence
HPVECEDDSFECDSDQDDDQESVCEPLVEETNVQVQESDDDGWAAAVEEAFPIEELEEPPVQVVPNDSVVRSQVAQPIEIVVQET

SEQ ID NO: 16417 - protein, 85 aa, unidentified
  REGION 1..85: note = Description of Unknown:cds_NC_034440.1_cds_YP_009361856.2_1 target sequence
PVQPLEDVAPAVATPSIQLQEIQTEVLDTPPVYEADIEQTQIVVSKPKRLRKKRNVDPLFNFEHKVITDCVTMVLGDAIQVAKCY

SEQ ID NO: 16418 - protein, 85 aa, unidentified
  REGION 1..85: note = Description of Unknown:cds_NC_034440.1_cds_YP_009361856.2_1 target sequence
DEAVLVNAANTYLKHGGGIAGAINAASNGAVQQESDEYILAKGPLQVGDSVLLQGHSLAKNILHVVGPDARAKQDVSLLGKCYKA

SEQ ID NO: 16419 - protein, 85 aa, unidentified
  REGION 1..85: note = Description of Unknown:cds_NC_034440.1_cds_YP_009361856.2_1 target sequence
MNAYPLVVTPLVSAGIFGVQPSVSFDYLIREVKTRVLVVVNSQDIYKSLTTVEVPQGLTFSYDGLRGALRKARDYGFTVFVCTDN

SEQ ID NO: 16420 - protein, 85 aa, unidentified
  REGION 1..85: note = Description of Unknown:cds_NC_034440.1_cds_YP_009361856.2_1 target sequence
SANTKVLRNKGVDYTKKSTTVDGVQYYCYTAKDTLDSIVLEANKASGIISMPLGYVSHGLDLMQAGAIVRRVKVPYVCLLANKEQ

SEQ ID NO: 16421 - protein, 85 aa, unidentified
  REGION 1..85: note = Description of Unknown:cds_NC_034440.1_cds_YP_009361856.2_1 target sequence
EAILMSEDVKLSPSADFVKHVRTNGGYNSWHLVEGELLVRDLTLNKLLHWSDQTICYKSDKFYVVKNGVALPFETLAACRTYLDS

SEQ ID NO: 16422 - protein, 85 aa, unidentified
  REGION 1..85: note = Description of Unknown:cds_NC_034440.1_cds_YP_009361856.2_1 target sequence
RTAQQLTIEVLVTVDGVNFRTVVLNNKSSYRSQLGCVFYNGADISDTIPDEKQNGCSLYLADNLTADETKVLKELYGPVDPTFLH

SEQ ID NO: 16423 - protein, 85 aa, unidentified
  REGION 1..85: note = Description of Unknown:cds_NC_034440.1_cds_YP_009361856.2_1 target sequence
RFYSLKAVVQKWKMVVCDKVRSLKLSDNNCYINVVIMILDLLKDIKFVIPALQHAFMKHKGGDSTEFIALIMTYGNCTFGAPDDA

SEQ ID NO: 16424 - protein, 85 aa, unidentified
  REGION 1..85: note = Description of Unknown:cds_NC_034440.1_cds_YP_009361856.2_1 target sequence
TRLLHTVLAKAELCCSARMVWREWCNVCGIKDVVIQGLKACCYVGVQTVEDLHARMTYVCQCGGERHRQLVEHTAPWLLLSGTPN

SEQ ID NO: 16425 - protein, 85 aa, unidentified
  REGION 1..85: note = Description of Unknown:cds_NC_034440.1_cds_YP_009361856.2_1 target sequence
EKLVTTSTAPDFVAFNVFQGLETAVGHYVHARLKDGLILKFDSGTLSKTSDWKCKVTDVLFPNQKYSSDCNVVRYSLDGKFRTEV

SEQ ID NO: 16426 - protein, 85 aa, unidentified
  REGION 1..85: note = Description of Unknown:cds_NC_034440.1_cds_YP_009361856.2_1 target sequence
DPDLSAFYVKDGKYFTSEPPVTYSPATVLAGSVYTNSCLVSSDGQPGGDAISLSFNNLLGFDSSKPVTKKYTYSILPKEDGDVLL

SEQ ID NO: 16427 - protein, 85 aa, unidentified
  REGION 1..85: note = Description of Unknown:cds_NC_034440.1_cds_YP_009361856.2_1 target sequence
AEFSTYDPIYKNGAMLKGKPVLWVTNASYDATLNKFNRATLRQIYDVAPIEIENKYTPLSVEPSPVEKVSTVEVALAKPELTIVK

SEQ ID NO: 16428 - protein, 85 aa, unidentified
  REGION 1..85: note = Description of Unknown:cds_NC_034440.1_cds_YP_009361856.2_1 target sequence
CKGLIKPFVKANVSFVSDETGLPVVEYLSKEDLHTLYVDPKYQVIVLKDNALSTIFRLHTVESGDLNVVAASGSLTRKVKLLFRA

SEQ ID NO: 16429 - protein, 85 aa, unidentified
  REGION 1..85: note = Description of Unknown:cds_NC_034440.1_cds_YP_009361856.2_1 target sequence
SFYFKELASRTLTATTVVGSCINSVVRHLGVTKGILASLFSFVKMLFVLPLSYFSDSETSTTEVKVSALKTAGVVTGNVLKQCCT

SEQ ID NO: 16430 - protein, 85 aa, unidentified
  REGION 1..85: note = Description of Unknown:cds_NC_034440.1_cds_YP_009361856.2_1 target sequence
AAVDLSMDKLRRVDWKATLRLLLMLCTTMVLLSSVYHLYVFNQVLSSDVMFEDAQGLKKFYKEVRAYLGVSSGCDGLAAAYRANS

SEQ ID NO: 16431 - protein, 85 aa, unidentified
  REGION 1..85: note = Description of Unknown:cds_NC_034440.1_cds_YP_009361856.2_1 target sequence
FDVPTFCANRSVMCNWCLINQDSITHYPALKMVQTHLSHYVLNIDWLWFALEVGLAYILYTSAFNWLLLAGTLQYFFAQTSIFVD

SEQ ID NO: 16432 - protein, 85 aa, unidentified
  REGION 1..85: note = Description of Unknown:cds_NC_034440.1_cds_YP_009361856.2_1 target sequence
WRSYNYVVSSAFWLFTHIPMPGLVRIYNLLACLWLLRKFYQHVINGCKDTACLLCYKRNRLTRVEASTVVCGGKRTFYIAANGGI

SEQ ID NO: 16433 - protein, 85 aa, unidentified
  REGION 1..85: note = Description of Unknown:cds_NC_034440.1_cds_YP_009361856.2_1 target sequence
SFCRRHNWNCVDCDTAGVGNTFICEEVASDLTTTLRRPVNSTDRSHYYVDSVLVKETVVQFNYRRDGQSCYERFPLCAFTNLDKL

SEQ ID NO: 16434 - protein, 85 aa, unidentified
  REGION 1..85: note = Description of Unknown:cds_NC_034440.1_cds_YP_009361856.2_1 target sequence
KFKEVCKTTTGIPEYNFIIYDSSDRGQESLARSACVYYSQVLCKSILLVDSSLVTSVGNSGEIAIKMFDSFVNSFVSLYNVTRDK

SEQ ID NO: 16435 - protein, 85 aa, unidentified
  REGION 1..85: note = Description of Unknown:cds_NC_034440.1_cds_YP_009361856.2_1 target sequence
LEKLISTARDGVKRGDNFHSVLTTFIDAARGPAGVESDVETNEIVDSVQYAHKHDIQLTNESYNNYVPSYVKPDSVSTGDLGSLI

SEQ ID NO: 16436 - protein, 85 aa, unidentified
  REGION 1..85: note = Description of Unknown:cds_NC_034440.1_cds_YP_009361856.2_1 target sequence
DCNAASVNQTSMRQANGACIWNAAAYMKLSDVLKRQIRIACRKCNLAFRLTTSKLRANDNMLSVKFTATKIVGGAPTWFNTLRDF

SEQ ID NO: 16437 - protein, 85 aa, unidentified
  REGION 1..85: note = Description of Unknown:cds_NC_034440.1_cds_YP_009361856.2_1 target sequence
TLKSYVFVTIIVFLCAVLMYFCLPTFAMAPVEFYEDRILEYKVLDNGIIRDISPDDKCFANKYRSFSQWYHEHVGGSYDNSISCP

SEQ ID NO: 16438 - protein, 85 aa, unidentified
  REGION 1..85: note = Description of Unknown:cds_NC_034440.1_cds_YP_009361856.2_1 target sequence
LTVAVIAGVAGARIPDVPTTLAWVNRQIVFFVSRVFANSNSVCYTPINEIPYKSFSDSGCILPSECTMFRDAEGRMSPYCYDPTV

SEQ ID NO: 16439 - protein, 85 aa, unidentified
  REGION 1..85: note = Description of Unknown:cds_NC_034440.1_cds_YP_009361856.2_1 target sequence
LPGAFAYSQMKPHVRYDLYDTNMFIKFPEVVFESTLRITKTLTTQYCRFGSCEYAQEGVCITTNGSWAIFNDHHLSRPGVYCGSD

SEQ ID NO: 16440 - protein, 85 aa, unidentified
  REGION 1..85: note = Description of Unknown:cds_NC_034440.1_cds_YP_009361856.2_1 target sequence
YVDIVRRLAVSLFQPITYFQLTTSLVLGIGLCAFLTLLFYYINKVKRAFADYTQCAMIAVIAAVLNSLCICFVSSIPLCIVPYTA

SEQ ID NO: 16441 - protein, 85 aa, unidentified
  REGION 1..85: note = Description of Unknown:cds_NC_034440.1_cds_YP_009361856.2_1 target sequence
LYYYATFYFTNEPAAIMHVSWYIMFGPIVPMWLTCVYTVAMCFRHFFWVVAYFSKKHVEVFTDGKLNCSFQDAASNIFVVNKDTY

SEQ ID NO: 16442 - protein, 85 aa, unidentified
  REGION 1..85: note = Description of Unknown:cds_NC_034440.1_cds_YP_009361856.2_1 target sequence
AALRNAITNDVYSRYLGLFNKYKYYSGAMETAAYREAAACHLAKALQTYSETGSDLLYQPPNCSITSGVLQSGLVRMSHPSGDVE

SEQ ID NO: 16443 - protein, 85 aa, unidentified
  REGION 1..85: note = Description of Unknown:cds_NC_034440.1_cds_YP_009361856.2_1 target sequence
ACMVQVTCGSMTLNGLWLDNTVWCPRHVMCPADQLADPNYDALLVSMTNHSFSVNKHIGAPANLRVIGHAMQGTLLKLTVDVANP

SEQ ID NO: 16444 - protein, 85 aa, unidentified
  REGION 1..85: note = Description of Unknown:cds_NC_034440.1_cds_YP_009361856.2_1 target sequence
STPAYTFTTVKPGASFSVLACYNGRPTGTFTVVMRPNYTIKGSFLCGSCGSVGYTKEGSVINFCYMHQMELANGTHTGSAFDGTM

SEQ ID NO: 16445 - protein, 85 aa, unidentified
  REGION 1..85: note = Description of Unknown:cds_NC_034440.1_cds_YP_009361856.2_1 target sequence
YGAFLDKQVHQVQLTDKYCSTNVVAWLYAAILNGCAWFVKSNRTSIVSFNEWALANQFTEFVGTQSIDMLAVKTGVAIEQLLYAI

SEQ ID NO: 16446 - protein, 85 aa, unidentified
  REGION 1..85: note = Description of Unknown:cds_NC_034440.1_cds_YP_009361856.2_1 target sequence
QQLHTGFQGKQILGSSMLEDEFTPEDVNMQIMGVVMQSGVRKVTYGTAHWLFATFVLSYVVFLQTTKFTLWNYLFETIPTQLFPL

SEQ ID NO: 16447 - protein, 85 aa, unidentified
  REGION 1..85: note = Description of Unknown:cds_NC_034440.1_cds_YP_009361856.2_1 target sequence
LFVTVACVMLLVKHKHTFLTLFLLPVAICLTYANIVYEPATPISSALIAVANWLAPTNVYMRTTHTDIGVYISLSLVLAIVVKRL

SEQ ID NO: 16448 - protein, 85 aa, unidentified
  REGION 1..85: note = Description of Unknown:cds_NC_034440.1_cds_YP_009361856.2_1 target sequence
YNPSLSNFALALCSGVMWLYTYSVGEVSSPIAYLVFVTTLTSDYTITVFVTVNLAKICTYIIFAYAPQLTLVFPEVKMILLLYTC

SEQ ID NO: 16449 - protein, 85 aa, unidentified
  REGION 1..85: note = Description of Unknown:cds_NC_034440.1_cds_YP_009361856.2_1 target sequence
FGFMCTCYFGVFSLLNLKLRAPMGVYDFKVSTQEFRFMTANNLTAPRNSWEAMSLNFKLLGIGGTPCIKVAAIQSKLTDLKCTSV

SEQ ID NO: 16450 - protein, 85 aa, unidentified
  REGION 1..85: note = Description of Unknown:cds_NC_034440.1_cds_YP_009361856.2_1 target sequence
VLLSVLQQLHLEANSKAWAFCVKCHNDILAATDPSEAFEKFVSLFATLMTFSGNVDLDALASDIFETPSVLQATLSEFSHLATFA

SEQ ID NO: 16451 - protein, 85 aa, unidentified
  REGION 1..85: note = Description of Unknown:cds_NC_034440.1_cds_YP_009361856.2_1 target sequence
ELEAAQRAYQEAMDSGDASPQVLKALQKAVNVAKNAYEKDKAVARKLERMAEQAMTSMYKQARAEDKKAKIVSAMQTMLFGMIKK

SEQ ID NO: 16452 - protein, 85 aa, unidentified
  REGION 1..85: note = Description of Unknown:cds_NC_034440.1_cds_YP_009361856.2_1 target sequence
LDNDVLNGIISNARNGCIPLSVVPLCASNKLRVVIPDFTVWNQVVTYPSLNYAGALWDIAVINNVDNEIVKSSDVVENNESLTWP

SEQ ID NO: 16453 - protein, 85 aa, unidentified
  REGION 1..85: note = Description of Unknown:cds_NC_034440.1_cds_YP_009361856.2_1 target sequence
LVLECTRAASSAIKLQNNEIKPSGLRTMVVSAGQEQTNCNTSSLAYYEPVQGRKMLMALLSDNAYLKWARVEGQEGFVSVELQPP

SEQ ID NO: 16454 - protein, 85 aa, unidentified
  REGION 1..85: note = Description of Unknown:cds_NC_034440.1_cds_YP_009361856.2_1 target sequence
CKFLIAGPKGPEIRYLYFVKNLNNLHRGQVLGHIAATVRLQAGSNTEFAANSSVLSLVNFTVDPQKAYIDFVNAGGAPLTNCVKM

SEQ ID NO: 16455 - protein, 85 aa, unidentified
  REGION 1..85: note = Description of Unknown:cds_NC_034440.1_cds_YP_009361856.2_1 target sequence
LTPKTGTGIAISVKPESTADQETYGGASVCLYCRAHIEHPDVSGVCKYKGKFVQIPSQCTRDPVGFCLTNTPCNVCQYWIGYGCN

SEQ ID NO: 16456 - protein, 85 aa, unidentified
  REGION 1..85: note = Description of Unknown:cds_NC_034440.1_cds_YP_009361856.2_1 target sequence
CDSLRQAALPQSKDSNFLNESGVLLVNARIEPCASGLSTDVVFRAFDICNYKAKVAGIGKYYKTNTCRFVELDDQGHHLDSYFVV

SEQ ID NO: 16457 - protein, 85 aa, unidentified
  REGION 1..85: note = Description of Unknown:cds_NC_034440.1_cds_YP_009361856.2_1 target sequence
KRHTMENYELEKHCYDLLRDCDSVAPHDFFVFDVDKTKTPHIVRQRLTEYTMMDLVYALRHFDQNNCEVLKAILVKYDCCDATYF

SEQ ID NO: 16458 - protein, 85 aa, unidentified
  REGION 1..85: note = Description of Unknown:cds_NC_034440.1_cds_YP_009361856.2_1 target sequence
ENKLWFDFVENPSVIGVYHKLGERVRQAVLSTVKFCDHMVKAGLVGVLTLDNQDLNGKWYDFGDFVITQPGSGVAIVDSYYSYLM

SEQ ID NO: 16459 - protein, 85 aa, unidentified
  REGION 1..85: note = Description of Unknown:cds_NC_034440.1_cds_YP_009361856.2_1 target sequence
PVLSMTNCLAAETHRDCDFNKPLIEWPLTEYDFTDYKVQLFEKYFKYWDQTYHANCVNCTDDRCVLHCANFNVLFAMTMPKTCFG

SEQ ID NO: 16460 - protein, 85 aa, unidentified
  REGION 1..85: note = Description of Unknown:cds_NC_034440.1_cds_YP_009361856.2_1 target sequence
PIVRKIFVDGVPFVVSCGYHYKELGLVMNMDVSLHRHRLSLKELMMYAADPAMHIASSNAFLDLRTSCFSVAALTTGLTFQTVRP

SEQ ID NO: 16461 - protein, 85 aa, unidentified
  REGION 1..85: note = Description of Unknown:cds_NC_034440.1_cds_YP_009361856.2_1 target sequence
GNFNQDFYDFVVSKGFFKEGSSVTLKHFFFAQDGNAAITDYNYYSYNLPTMCDIKQMLFCMEVVNKYFEIYDGGCLNASEVVVNN

SEQ ID NO: 16462 - protein, 85 aa, unidentified
  REGION 1..85: note = Description of Unknown:cds_NC_034440.1_cds_YP_009361856.2_1 target sequence
LDKSAGHPFNKFGKARVYYESMSYQEQDELFAMTKRNVIPTMTQMNLKYAISAKNRARTVAGVSILSTMTNRQYHQKMLKSMAAT

SEQ ID NO: 16463 - protein, 85 aa, unidentified
  REGION 1..85: note = Description of Unknown:cds_NC_034440.1_cds_YP_009361856.2_1 target sequence
RGSTCVIGTTKFYGGWDFMLKTLYKDVDNPHLMGWDYPKCDRAMPNMCRIFASLILARKHGTCCTTRDRFYRLANECAQVLSEYV

SEQ ID NO: 16464 - protein, 85 aa, unidentified
  REGION 1..85: note = Description of Unknown:cds_NC_034440.1_cds_YP_009361856.2_1 target sequence
LCGGGYYVKPGGTSSGDATTAYANSVFNILQATTANVSALMGANGNKIVDKEVKDMQFELYVNVYRSTNPDPKFVDRYYAFLNKH

SEQ ID NO: 16465 - protein, 85 aa, unidentified
  REGION 1..85: note = Description of Unknown:cds_NC_034440.1_cds_YP_009361856.2_1 target sequence
FSMMILSDDGVVCYNSDYAAKGYIAGIQNFKETLYYQNNVFMSEAKCWVETDLKKGPHEFCSQHTLYIKDGDDGYFLPYPDPSRI

SEQ ID NO: 16466 - protein, 85 aa, unidentified
  REGION 1..85: note = Description of Unknown:cds_NC_034440.1_cds_YP_009361856.2_1 target sequence
LSAGCFVDDIVKTDGTLMVERFVSLAIDAYPLTKHEDIEYQNVFWVYLQYIEKLYKDLTGHMLDSYSVMLCGDNSAKFWEEAFYR

SEQ ID NO: 16467 - protein, 85 aa, unidentified
  REGION 1..85: note = Description of Unknown:cds_NC_034440.1_cds_YP_009361856.2_1 target sequence
ELYSSPTTLQAVGSCVVCHSQTSLRCGTCIRRPFLCCKCCYDHVIATPHKMVLSVSPYVCNAPGCDVADVTKLYLGGMSYFCVDH

SEQ ID NO: 16468 - protein, 85 aa, unidentified
  REGION 1..85: note = Description of Unknown:cds_NC_034440.1_cds_YP_009361856.2_1 target sequence
RPVCSFPLCTNGLVFGLYKNMCTGSPSIVEFNRLATCDWTESGDYTLANTTTEPLKLFAAETLRATEEASKQSYAIATIKEIVGD

SEQ ID NO: 16469 - protein, 85 aa, unidentified
  REGION 1..85: note = Description of Unknown:cds_NC_034440.1_cds_YP_009361856.2_1 target sequence
RQLLLVWEAGKSKPPLNRNYVFTGYHITKNSKVQLGEYIFERIDYSDAVSYKSSTTYKLTVGDIFILTSHSVATLTAPTIVNQER

SEQ ID NO: 16470 - protein, 85 aa, unidentified
  REGION 1..85: note = Description of Unknown:cds_NC_034440.1_cds_YP_009361856.2_1 target sequence
YVKITGLYPTITVPEEFASHVANFQKAGYSKYVTVQGPPGTGKSHFAIGLAIYYPTARVVYTACSHAAVDALCEKAFKYLNIAKC

SEQ ID NO: 16471 - protein, 85 aa, unidentified
  REGION 1..85: note = Description of Unknown:cds_NC_034440.1_cds_YP_009361856.2_1 target sequence
SRIIPAKARVECYDRFKVNETNSQYLFSTINALPETSADILVVDEVSMCTNYDLSIINARVKAKHIVYVGDPAQLPAPRTLLTRG

SEQ ID NO: 16472 - protein, 85 aa, unidentified
  REGION 1..85: note = Description of Unknown:cds_NC_034440.1_cds_YP_009361856.2_1 target sequence
TLEPENFNSVTRLMCNLGPDIFLSMCYRCPKEIVSTVSALVYNNKLLAKKELSGQCFKMLYKGNVTHDASSAINRPQLAFVKNFI

SEQ ID NO: 16473 - protein, 85 aa, unidentified
  REGION 1..85: note = Description of Unknown:cds_NC_034440.1_cds_YP_009361856.2_1 target sequence
TANPAWSKAVFISPYNSQNAVARSMLGLTTQTVDSSQGSEYQYVIFCQTADTAHANNINRFNVAITRAQKGILCVMTSQALFDSL

SEQ ID NO: 16474 - protein, 85 aa, unidentified
  REGION 1..85: note = Description of Unknown:cds_NC_034440.1_cds_YP_009361856.2_1 target sequence
EFTELSFTNYKLQSQIVTGLFKDCSRETSGLSPAYAPTYVSVDDKYKTCDELCVNLNLPANVPYSRVISRMGFKLDASVPGYPKL

SEQ ID NO: 16475 - protein, 85 aa, unidentified
  REGION 1..85: note = Description of Unknown:cds_NC_034440.1_cds_YP_009361856.2_1 target sequence
FITREEAVRQVRSWIGFDVEGAHASRNACGTNVPLQLGFSTGVNFVVQPVGVVDTEWGNMLTGISARPPPGEQFKHLVPLMHKGA

SEQ ID NO: 16476 - protein, 85 aa, unidentified
  REGION 1..85: note = Description of Unknown:cds_NC_034440.1_cds_YP_009361856.2_1 target sequence
AWPIVRRRIVQMLSDTLDKLSDYCTFVCWAHGFELTSASYFCKIGKEQKCCMCNRRAAAYSSPLQSYACWSHSCGYDYVYNPFFV

SEQ ID NO: 16477 - protein, 85 aa, unidentified
  REGION 1..85: note = Description of Unknown:cds_NC_034440.1_cds_YP_009361856.2_1 target sequence
DVQQWGYVGNLATNHDRYCSVHQGAHVASNDAIMTRCLAIHACFIEHVDWDIEYPYISHEKKLNSCCRIVERNVVRAALLAGSFD

SEQ ID NO: 16478 - protein, 85 aa, unidentified
  REGION 1..85: note = Description of Unknown:cds_NC_034440.1_cds_YP_009361856.2_1 target sequence
RVYDIGNPKGIPIVDHPVVEWHYFDAQPLTRKVQQLFYTEDLASRFADGLCLFWNCNVPKYPNNAIVCRFDTRVHSEFNLPGCDG

SEQ ID NO: 16479 - protein, 85 aa, unidentified
  REGION 1..85: note = Description of Unknown:cds_NC_034440.1_cds_YP_009361856.2_1 target sequence
GSLYVNKHAFHTPAYDVSAFRDLKPLPFFYYSTTPCEVHGTGSMLEDIDYVPLKSAVCVTACNLGGAVCRKHATEYRDYMEAYNL

SEQ ID NO: 16480 - protein, 85 aa, unidentified
  REGION 1..85: note = Description of Unknown:cds_NC_034440.1_cds_YP_009361856.2_1 target sequence
VSASGFRLWCYKTFDIYNLWSTFTKVQGLENIAYNVVKQGHFTGVDGELPVAVVNDKIFTKSGVNDICVFENKTTLPTNVAFELY

SEQ ID NO: 16481 - protein, 85 aa, unidentified
  REGION 1..85: note = Description of Unknown:cds_NC_034440.1_cds_YP_009361856.2_1 target sequence
AKRVVRSHPDFKLLHNLQADICYKFVLWDYERCNIYGTATIGVCKYTDIEVNSALNICFDIRDNGSLEKFMTTPNAILISDRKIK

SEQ ID NO: 16482 - protein, 85 aa, unidentified
  REGION 1..85: note = Description of Unknown:cds_NC_034440.1_cds_YP_009361856.2_1 target sequence
NYPCMVGPDYAYFNGAIIRDSDTVKQPVKFYFYKKVNNEFVEFSDCAYTQGRSCSDFEAMSVMETDFLALDSDVFIKKYGLENYA

SEQ ID NO: 16483 - protein, 85 aa, unidentified
  REGION 1..85: note = Description of Unknown:cds_NC_034440.1_cds_YP_009361856.2_1 target sequence
FEHVVYGDFSHTTLGGLHLLIGLYKKHLDGHIIMEEMIRESSTIHNYFITETSTASFKAVCSVIDLKLDDFVQILKSQDLGVVSK

SEQ ID NO: 16484 - protein, 85 aa, unidentified
  REGION 1..85: note = Description of Unknown:cds_NC_034440.1_cds_YP_009361856.2_1 target sequence
VVKVPIDLTMIEFMLWCKDGQVQTFYPRLQASADWKPGQAMPSLFKVQNVNLERCELANYKQSIPMPRGVHMNIAKYMQLCQYLN

SEQ ID NO: 16485 - protein, 85 aa, unidentified
  REGION 1..85: note = Description of Unknown:cds_NC_034440.1_cds_YP_009361856.2_1 target sequence
TCTIAVPANMRVIHFGAGSDKGIAPGTSVLRQWLPTDAIIIDNDLNDFVSDADISLFGDCVTVRVGQQVDLVISDMYDPSTKNIT

SEQ ID NO: 16486 - protein, 85 aa, unidentified
  REGION 1..85: note = Description of Unknown:cds_NC_034440.1_cds_YP_009361856.2_1 target sequence
GSNESKALFFTYLCNFINNNLALGGSVAIKITEHSWSVDLYEIMGKFAWWTVFCTNANASSSEGFLLGINYLGTIKENIDGGAMH

SEQ ID NO: 16487 - protein, 85 aa, unidentified
  REGION 1..85: note = Description of Unknown:cds_NC_010438.1_cds_YP_001718610.1_1 target sequence
GSNHLTLAFASDSEISASGCSTREEAVSRYSEAAIYGFENCRFVASGLQEIVDGVSADDYVLCFSGVTTLRAFVGKYGDRPRNLR

SEQ ID NO: 16488 - protein, 85 aa, unidentified
  REGION 1..85: note = Description of Unknown:cds_NC_010438.1_cds_YP_001718610.1_1 target sequence
GWLLFSNCNYFLEEIDVIFGFGGGDASPVYVDNYMCGANGKPVLPADVWVYQDYFGEETELIVNGVKHVKVWHVTRTDIPYQFQS

SEQ ID NO: 16489 - protein, 85 aa, unidentified
  REGION 1..85: note = Description of Unknown:cds_NC_010438.1_cds_YP_001718610.1_1 target sequence
LGAIESIEWLTDIPHTLRNGSRLSAARAVKHSKNVVLSEPLKTLYQACGSPFVTNGSTLREAVPKPVFAHAYVACKCGRKAWSVG

SEQ ID NO: 16490 - protein, 85 aa, unidentified
  REGION 1..85: note = Description of Unknown:cds_NC_010438.1_cds_YP_001718610.1_1 target sequence
DWSGYKSTCCGVFGKPQCVVFGEVVPGDVFITTSSVGSGTRYYNGLTVKHVVTVDGLACWRVLKTQSVDGLTATPSFDDYSDAAF

SEQ ID NO: 16491 - protein, 85 aa, unidentified
  REGION 1..85: note = Description of Unknown:cds_NC_010438.1_cds_YP_001718610.1_1 target sequence
DCCVYHNNTQLAVAYKMGLLSGNFDETVIDGVLAGAIDVGSAVLDVIDRICDAQPWFIQKFGALFESAWAAFVATLKKIPALSSE

SEQ ID NO: 16492 - protein, 85 aa, unidentified
  REGION 1..85: note = Description of Unknown:cds_NC_010438.1_cds_YP_001718610.1_1 target sequence
FVQLCSALQKAILTVRDGVIDFYVENVAPKFVAAVEAFKMLVVGVFDFSVDTYKVVGETFKRVGDYVLLGNAVAKLVTTKVKGVR

SEQ ID NO: 16493 - protein, 85 aa, unidentified
  REGION 1..85: note = Description of Unknown:cds_NC_010438.1_cds_YP_001718610.1_1 target sequence
QAGAKKVTFATPVIGVAKRVTSTRTEIDSVQLVACASTPLVENGCTVIVDGIAFFKSGGVYRLMADTDLVYETPVYCQQATCKPV

SEQ ID NO: 16494 - protein, 85 aa, unidentified
  REGION 1..85: note = Description of Unknown:cds_NC_010438.1_cds_YP_001718610.1_1 target sequence
FKCAKPDGFPDVTSVNPDTLAHEVKKILGGIARPYDKYTCSVINGECQVDHSYNFKAPAYITDKQQFVMLCKDFVVDAKFEEFYV

SEQ ID NO: 16495 - protein, 85 aa, unidentified
  REGION 1..85: note = Description of Unknown:cds_NC_010438.1_cds_YP_001718610.1_1 target sequence
KALEAKSLDGFEPYYEAFTIFKGELKCPAELIELDDGGLFNTFIKTVNSAYDFVKNLKVSVTVKGVICTAAKRFKRWANALAKIY

SEQ ID NO: 16496 - protein, 85 aa, unidentified
  REGION 1..85: note = Description of Unknown:cds_NC_010438.1_cds_YP_001718610.1_1 target sequence
TEFITGACKTVVIGGLEFAYYCFAKPAIALGDIFVRVSKNALSAFNRPTEAGAVDALVFEGGDIETVCSRVQFDTVALEPVQEVP

SEQ ID NO: 16497 - protein, 85 aa, unidentified
  REGION 1..85: note = Description of Unknown:cds_NC_010438.1_cds_YP_001718610.1_1 target sequence
VPSDGYVAVVDGYTFFTDGTHYFPTGLSRCYTTCFKRGGGTVEFSEVVEVKEIDPVYKVRLEYEFEDENIAIVCKKAIGKIITFE

SEQ ID NO: 16498 - protein, 85 aa, unidentified
  REGION 1..85: note = Description of Unknown:cds_NC_010438.1_cds_YP_001718610.1_1 target sequence
GTDWSEFEQTLINAVSVVGEFVDLPDFYVYDEEGGTDLSKVVMVSQWPLKSSPEPQNFDPSPLAAFVVSCGLECDFSGCGDPVSC

SEQ ID NO: 16499 - protein, 85 aa, unidentified
  REGION 1..85: note = Description of Unknown:cds_NC_010438.1_cds_YP_001718610.1_1 target sequence
FQTVEGAALCISMERSCKCGTDQAVCEGFYVPVKPCASTDTCDECGCDRISTITSMVGTGFVDLCDNPVVPFDCVECGFGGYNGV

SEQ ID NO: 16500 - protein, 85 aa, unidentified
  REGION 1..85: note = Description of Unknown:cds_NC_010438.1_cds_YP_001718610.1_1 target sequence
CFVNVDVAIPPPEDLPPPPEPEPEPPVDAMQEVAEALSFIVDEPSAFVDPFKFEYYDHAGVRVLKQEVNNCWVASTLVQLQLYGF

SEQ ID NO: 16501 - protein, 85 aa, unidentified
  REGION 1..85: note = Description of Unknown:cds_NC_010438.1_cds_YP_001718610.1_1 target sequence
DSDAMSLFKAGSVSPMVRRCYEAVGAIRGSLGDVSQCLEKLLSDSHTMFMTFDVKCDCGASVAEMSGAVFRFMPTRDSFNYGACP

SEQ ID NO: 16502 - protein, 85 aa, unidentified
  REGION 1..85: note = Description of Unknown:cds_NC_010438.1_cds_YP_001718610.1_1 target sequence
TCRSVMVYKIKSMQGTGFFCQDPKPFNTARSLVRPVSASVYSGRTDGGHYKTNIYDARVCVDGFGVTSITTGNVNVILLHDVSYG

SEQ ID NO: 16503 - protein, 85 aa, unidentified
  REGION 1..85: note = Description of Unknown:cds_NC_010438.1_cds_YP_001718610.1_1 target sequence
LVETVPAVVNDVVTTTVESVTSAATPSVEPFATFGSVEFYQGDVKALSALPCDFVVNAANENLQHAGGVAKAINDLTGGVLQRLS

SEQ ID NO: 16504 - protein, 85 aa, unidentified
  REGION 1..85: note = Description of Unknown:cds_NC_010438.1_cds_YP_001718610.1_1 target sequence
DDYTRANGKVKVGCGVMLECPLRVFNVVGPRKGKHARSLLVKCYKSVLSNPGVPLTPLVSVGIFGVPLSDSFIALTSVVGERRVL

SEQ ID NO: 16505 - protein, 85 aa, unidentified
  REGION 1..85: note = Description of Unknown:cds_NC_010438.1_cds_YP_001718610.1_1 target sequence
CFCYSDTERKAILKLIEQRSSVDQPTVPIVPPTADVEVATVVQCVSETEAATVVMDVVAEPQPTEVIATQPCVPEALEVVGSVTY

SEQ ID NO: 16506 - protein, 85 aa, unidentified
  REGION 1..85: note = Description of Unknown:cds_NC_010438.1_cds_YP_001718610.1_1 target sequence
YPVDVGVVGVRPDNIILHTTQDLGLCAFGKLLDEQACGALSASIDAYKQNTAVVPPGNIVTFKCEGQPTVVLAVFPPADDAAYLK

SEQ ID NO: 16507 - protein, 85 aa, unidentified
  REGION 1..85: note = Description of Unknown:cds_NC_010438.1_cds_YP_001718610.1_1 target sequence
NVKRAVSKLAKLKGVSVSTFSTIDVHKRLLAFVKLFCVASMDVVGDVHTTPSVVKVTEDGRTVKDVVVSTTTTAGDQLGPCAVEG

SEQ ID NO: 16508 - protein, 85 aa, unidentified
  REGION 1..85: note = Description of Unknown:cds_NC_010438.1_cds_YP_001718610.1_1 target sequence
ASLTTSVVTDVVNSVVAVAPNVDWDSHYGFKDAGNFHVLDHSAYAYDSDFVDGKRALAGSDNNCWVNATCLQLQFAGVEFLSKGV

SEQ ID NO: 16509 - protein, 85 aa, unidentified
  REGION 1..85: note = Description of Unknown:cds_NC_010438.1_cds_YP_001718610.1_1 target sequence
TAMWNEFLTGDVARFVHWLYWLNGASKGDLGDVETTLNLVAKHAKPKGCVTIEKTTVDGCCVSEKRVNSLVVNASVLRQGVGDGY

SEQ ID NO: 16510 - protein, 85 aa, unidentified
  REGION 1..85: note = Description of Unknown:cds_NC_010438.1_cds_YP_001718610.1_1 target sequence
CQHGNEYIIRVSRVEGTAIIVNVGDPSVKAPNLLISGTAYTAFSGPIDAGHYRVYCSATSKVFDGKSIVGGDLCNLAVTSVVVVN

SEQ ID NO: 16511 - protein, 85 aa, unidentified
  REGION 1..85: note = Description of Unknown:cds_NC_010438.1_cds_YP_001718610.1_1 target sequence
KFFKAEVCNAKSSEPTAVKIMSKLDDASDKFFTAGDVVSHNIANSVVWFFTMLSILFKAFKTRDFKVFALAPERTGIIFTRSLKY

SEQ ID NO: 16512 - protein, 85 aa, unidentified
  REGION 1..85: note = Description of Unknown:cds_NC_010438.1_cds_YP_001718610.1_1 target sequence
NIKAARDMLKRKQKWVFWFLKFCLLLYTAYAVLFMFIRFGPPNETLCKDHVDGYANSTFVKDDYCNSALCRVCLFGYQELADLPH

SEQ ID NO: 16513 - protein, 85 aa, unidentified
  REGION 1..85: note = Description of Unknown:cds_NC_010438.1_cds_YP_001718610.1_1 target sequence
TNVVWRHVGMPLFVNWMPLFYLAFLFIFGGFVTKGFVLYFVAQYVNAFGVHFGMQDLFWPLHLIPFSTFGDEMVVLFLVGRFLMF

SEQ ID NO: 16514 - protein, 85 aa, unidentified
  REGION 1..85: note = Description of Unknown:cds_NC_010438.1_cds_YP_001718610.1_1 target sequence
VKHVCFGCDKASCVACSKSARLTRVPMQTIVCGANKSFYVTANGGKNFCSRHNFFCVNCDSHGPGNTFINEVVARELSNVVKSSV

SEQ ID NO: 16515 - protein, 85 aa, unidentified
  REGION 1..85: note = Description of Unknown:cds_NC_010438.1_cds_YP_001718610.1_1 target sequence
KPTDVAYLEVDKVEFNDGFYYLYSGETFWRYNFDITDNKYSCKEALKSCNVLSDFIVYNDAGSNITQVRNACVYFSQLLCKPIKL

SEQ ID NO: 16516 - protein, 85 aa, unidentified
  REGION 1..85: note = Description of Unknown:cds_NC_010438.1_cds_YP_001718610.1_1 target sequence
VNASLLSTLNVDFNGALHSAFVNVLSDSFSRDLSNCSTMNECKQALGFEVSDDEFLNGVSDAHRYNVLLSDTSCNNLVTSYAKPE

SEQ ID NO: 16517 - protein, 85 aa, unidentified
  REGION 1..85: note = Description of Unknown:cds_NC_010438.1_cds_YP_001718610.1_1 target sequence
EKLSVHDLGTCMRFGAKVVNHNVLIKENVPVVWLASEFHLLSEEGRKYIVKTTKAKGVTFLLTFNSNPMQLNIPSTSIVNKRAAG

SEQ ID NO: 16518 - protein, 85 aa, unidentified
  REGION 1..85: note = Description of Unknown:cds_NC_010438.1_cds_YP_001718610.1_1 target sequence
VGSKFFWWVCLAIVAFFLLLNASEFGYVATSFEDFGFKYIEHGVLKDFDGPLSCVHNVFDNFNAWHEARYGVVPINRRICPIVVG

SEQ ID NO: 16519 - protein, 85 aa, unidentified
  REGION 1..85: note = Description of Unknown:cds_NC_010438.1_cds_YP_001718610.1_1 target sequence
TIDNIRFVPNVPSGIVLIGKTLVFAVKAVFTETGNCFNLNGLTTLGSCIFNSACTNMDGLGGPATYCYKEGLFENSKLYSDLVPH

SEQ ID NO: 16520 - protein, 85 aa, unidentified
  REGION 1..85: note = Description of Unknown:cds_NC_010438.1_cds_YP_001718610.1_1 target sequence
SHYKLEDGNFIKLPETLARGLGFVTIKTMETTYCRVGECLDSKAGVCFGLDRFFVYNTEFGGDYICGSGFLSFFRNVLSIFTSSF

SEQ ID NO: 16521 - protein, 85 aa, unidentified
  REGION 1..85: note = Description of Unknown:cds_NC_010438.1_cds_YP_001718610.1_1 target sequence
SVMALSGQVMFNCIVAAIAVVVCFLVIKFKRMFGDLSMGVCTVVAVVLINNVSYIITQNMLFMFLYAIFYFLAVKGLKYAWIWHI

SEQ ID NO: 16522 - protein, 85 aa, unidentified
  REGION 1..85: note = Description of Unknown:cds_NC_010438.1_cds_YP_001718610.1_1 target sequence
GYVVAYFTLAPWFLVAWYLGATAVDVLPAILKLKISTQLFEGDKFVGTFETAAYGTFVLDMRSYEKLVNSMPMDKIKQYAATYNK

SEQ ID NO: 16523 - protein, 85 aa, unidentified
  REGION 1..85: note = Description of Unknown:cds_NC_010438.1_cds_YP_001718610.1_1 target sequence
YKYYSGSASEADYRCACFAHLAKALLAYADNHQDLLYTPPSVSYNSTLQSGLKKMAQPSGIVEKCVVRVCYGNMTLNGLWLGDIV

SEQ ID NO: 16524 - protein, 85 aa, unidentified
  REGION 1..85: note = Description of Unknown:cds_NC_010438.1_cds_YP_001718610.1_1 target sequence
VCPRHVMASSTTNTIDYEYEYSMMRLHNFSVSVGNVFLGVNGVTMEGVNLHIKVNQSNPHTPKHTFRTLKPGDSFNILACYDGTP

SEQ ID NO: 16525 - protein, 85 aa, unidentified
  REGION 1..85: note = Description of Unknown:cds_NC_010438.1_cds_YP_001718610.1_1 target sequence
AGVYGITMRPNYTIRGSFINGACGSPGYNVVNGNVEFCYLHQLELGSGCHVGSNFDGIMYGNFQDQPSLQIEGADQLVTPNVVAF

SEQ ID NO: 16526 - protein, 85 aa, unidentified
  REGION 1..85: note = Description of Unknown:cds_NC_010438.1_cds_YP_001718610.1_1 target sequence
LYGALLNGVNWFVSPERLSVEAFNEWAHNNGFTDMSGAECFTMLAAKTGVDVQRVLASIQKIAKSFGGRNILGFTSLTDEFTAAE

SEQ ID NO: 16527 - protein, 85 aa, unidentified
  REGION 1..85: note = Description of Unknown:cds_NC_010438.1_cds_YP_001718610.1_1 target sequence
VIKQMYGVNLQSRKLPSVFNNIMLVGVFWFMFISEMLYYTSSYWIKPDLITPIFIILFAIAVFLTAFVKHKVLFLYTFLVPGIVI

SEQ ID NO: 16528 - protein, 85 aa, unidentified
  REGION 1..85: note = Description of Unknown:cds_NC_010438.1_cds_YP_001718610.1_1 target sequence
TATSNLAWDCYVRDLLAKYLDYHMSIFNMDIQGVFNIAACFMVNALHTWRYMRSGYTTRVTYVASLIVSVYNYWYVGDALSLAMM

SEQ ID NO: 16529 - protein, 85 aa, unidentified
  REGION 1..85: note = Description of Unknown:cds_NC_010438.1_cds_YP_001718610.1_1 target sequence
LLLNVNNNWYIGACAYRFVLIVANYMNPAVIGFLGSFKVIMFLYVAVGYLCCIYYGILYWLNKFFKCTLGVYDFKVSAAEFKYMV

SEQ ID NO: 16530 - protein, 85 aa, unidentified
  REGION 1..85: note = Description of Unknown:cds_NC_010438.1_cds_YP_001718610.1_1 target sequence
ANDLRAPCGVFDSLLLSFRLMGIGGEKTIKISTVQSKLTEIKCTNVVLMGVLTSMNIEANSKDWAFCVDLHNKINLSTDAEKAME

SEQ ID NO: 16531 - protein, 85 aa, unidentified
  REGION 1..85: note = Description of Unknown:cds_NC_010438.1_cds_YP_001718610.1_1 target sequence
YLLALLTFFLSRQKDFNCTELLDSYFADSSILQSVASTFVNMPSFIAYETARQNYEDATNNGSSPQLVKQLKRAMNIAKAEFDHE

SEQ ID NO: 16532 - protein, 85 aa, unidentified
  REGION 1..85: note = Description of Unknown:cds_NC_010438.1_cds_YP_001718610.1_1 target sequence
AAVQRKIQRMAEQAASQMYKEARAVNRKSKVISSMHALLFGMLRKLDMSAIDTILNLARGGVVPLNIIPAACATKLVVVASDHES

SEQ ID NO: 16533 - protein, 85 aa, unidentified
  REGION 1..85: note = Description of Unknown:cds_NC_010438.1_cds_YP_001718610.1_1 target sequence
FTRVYQQGAVHYAGAVWTLSEVKDNDGKPVHVKEITKDNTALTWPLVLNCERVVKLQNNEIIPGKLKQRPVKGEGDGGVAADGKA

SEQ ID NO: 16534 - protein, 85 aa, unidentified
  REGION 1..85: note = Description of Unknown:cds_NC_010438.1_cds_YP_001718610.1_1 target sequence
LYNTEGGRTFMYAFVADKPDLKVVKWEFEGGRNTIELEPPCRFAVSNSNGTTSIKYLYFVKNLNTLRRGAVLGYIGATVRLQAGT

SEQ ID NO: 16535 - protein, 85 aa, unidentified
  REGION 1..85: note = Description of Unknown:cds_NC_010438.1_cds_YP_001718610.1_1 target sequence
QTELVANSSLLTMCSFAVDPRKCYLDAVKNGVKPVTNCVKMLSNGSGTGQAVTVGVEANTNQDSYGGASVCLYCRAHIDHPSMDG

SEQ ID NO: 16536 - protein, 85 aa, unidentified
  REGION 1..85: note = Description of Unknown:cds_NC_010438.1_cds_YP_001718610.1_1 target sequence
FCQFKGRYVQVPIGTVDPIRYCLENDICKVCHCWLNNGCTCDRTTVVQSLDNNYLNRVRGSSAARLEPCNGTEPEHVIRAFDIYN

SEQ ID NO: 16537 - protein, 85 aa, unidentified
  REGION 1..85: note = Description of Unknown:cds_NC_010438.1_cds_YP_001718610.1_1 target sequence
KDVACIGKFVKVNCVRFKNADKHDAFYVVKRCTKSVMEHEQSIYDALKDCGAVSPHDFFVWKDGRSVYGNIARHDLTKYTMMDLV

SEQ ID NO: 16538 - protein, 85 aa, unidentified
  REGION 1..85: note = Description of Unknown:cds_NC_010438.1_cds_YP_001718610.1_1 target sequence
HALRNFDEKNCETLKEILVISGACDSSYFDNKNWYDPVENEDIHRVYAKLGCVVANAMLKCVALCDAMVAKGVVGVLTLDNQDLN

SEQ ID NO: 16539 - protein, 85 aa, unidentified
  REGION 1..85: note = Description of Unknown:cds_NC_010438.1_cds_YP_001718610.1_1 target sequence
GNFYDFGDFTIGIPGVGVPLATSYYSYLMPVMGMTNCLARECFVKSEIFGSDFKTYDLLEYDFTEHKLGLFNKYFKHWDLDYHPN

SEQ ID NO: 16540 - protein, 85 aa, unidentified
  REGION 1..85: note = Description of Unknown:cds_NC_010438.1_cds_YP_001718610.1_1 target sequence
CSDCYDEMCVIHCANFNALFATTIPDTSFGPLCRKVFIDGVPVVTTAGYHFKQLGLVWNKDLNTHSTRLTINELLRFVTDPALLV

SEQ ID NO: 16541 - protein, 85 aa, unidentified
  REGION 1..85: note = Description of Unknown:cds_NC_010438.1_cds_YP_001718610.1_1 target sequence
ASSPALFDQRTVCFSVAALGTGLTKQTVKPGHFNKEFYDFLCAQGFFDEGSELTLKHFFFAQKGDAAIRDFDFYRYNRPTVLDIC

SEQ ID NO: 16542 - protein, 85 aa, unidentified
  REGION 1..85: note = Description of Unknown:cds_NC_010438.1_cds_YP_001718610.1_1 target sequence
QARVAYHVVKRYFDIYEGGCIAARDVVVTNLNKSAGYPLNKFGKASLYYESLSYEEQDALYALTKRNVLPTMTQLNLKYAISGKE

SEQ ID NO: 16543 - protein, 85 aa, unidentified
  REGION 1..85: note = Description of Unknown:cds_NC_010438.1_cds_YP_001718610.1_1 target sequence
RARTVGGVSLLSTMTTRQFHQKHLKSIVNTRNATVVIGTTKFYGGWDNMLRNLMDGVDNACLMGWDYPKCDRALPNMIRMISAMI

SEQ ID NO: 16544 - protein, 85 aa, unidentified
  REGION 1..85: note = Description of Unknown:cds_NC_010438.1_cds_YP_001718610.1_1 target sequence
LGSKHVNCCTNSDRYYRLCNELAQVLTEVVYSNGGFYMKPGGTTSGDATTAYANSVFNIFQAVSANINRILGINSNTCNNLAVKS

SEQ ID NO: 16545 - protein, 85 aa, unidentified
  REGION 1..85: note = Description of Unknown:cds_NC_010438.1_cds_YP_001718610.1_1 target sequence
LQRMLYDNCYRSSAVDPGFVDTFYGYLRKHFSMMILSDDGVVCYNKEYASLGYVADINAFKATLYYQNNVFMSTSKCWVEEDLTK

SEQ ID NO: 16546 - protein, 85 aa, unidentified
  REGION 1..85: note = Description of Unknown:cds_NC_010438.1_cds_YP_001718610.1_1 target sequence
GPHEFCSQHTMQIVDGDGTYYLPYPDPSRILSAGVFVDDVIKTDAVVLLERYVSLAIDAYPLSKHPNPEYRKVFYVLLDWVKHLN

SEQ ID NO: 16547 - protein, 85 aa, unidentified
  REGION 1..85: note = Description of Unknown:cds_NC_010438.1_cds_YP_001718610.1_1 target sequence
NTLNQGVLESFSVTLLEDASSKFWDESFYANLYEKSAVLQAAGLCVVCNSQTVLRRGDCLRRPMLCTKCAYDHVVGTNHKFILAI

SEQ ID NO: 16548 - protein, 85 aa, unidentified
  REGION 1..85: note = Description of Unknown:cds_NC_010438.1_cds_YP_001718610.1_1 target sequence
TPYVCNAAGCAVNDVTKLYLGGLSYYCVDRKPQLSFPLCSGGNVFGLYKNSATGSPDVEVFNTLATSDWTDAKDYRLANEVKDSL

SEQ ID NO: 16549 - protein, 85 aa, unidentified
  REGION 1..85: note = Description of Unknown:cds_NC_010438.1_cds_YP_001718610.1_1 target sequence
RLFAAETVKAKEECVTSSYAAATLKEIIGPKELLLSWEPGKIKPPLNRNSVFTCFQVTKDSKFQVGEFTFEKLDYGSDTVCYKST

SEQ ID NO: 16550 - protein, 85 aa, unidentified
  REGION 1..85: note = Description of Unknown:cds_NC_010438.1_cds_YP_001718610.1_1 target sequence
ATCKLQPGMIFVLTSHNIQPLRAPTIANQERYAAICKLKPTFNISDAYSTLVPYYQMIGRQKITTIQGPPGSGKSHCVIGLGLYY

SEQ ID NO: 16551 - protein, 85 aa, unidentified
  REGION 1..85: note = Description of Unknown:cds_NC_010438.1_cds_YP_001718610.1_1 target sequence
PGARIVFAACSHAAVDSLCVKASTTYVVEHCTRIIPARARVECFSGFKANNNSAQYIFSTVNALPECTADIVVIDEVSMCTNYDL

SEQ ID NO: 16552 - protein, 85 aa, unidentified
  REGION 1..85: note = Description of Unknown:cds_NC_010438.1_cds_YP_001718610.1_1 target sequence
SIVNQRVAYKHIVYVGDPQQLPAPRTMITRGVLEPKDYNVVTQRMCAVGPDVFLHKCYRCPAEIVKTVSELVYENKFVPVHSESK

SEQ ID NO: 16553 - protein, 85 aa, unidentified
  REGION 1..85: note = Description of Unknown:cds_NC_010438.1_cds_YP_001718610.1_1 target sequence
QCFKIFCKGAVQVDNGSSINRRQLEVVKMFLAKNPSWSKAVFISPYNSQNYVASRSLGLQIQTVDSSQGSEYDYVIFAQTSDTAH

SEQ ID NO: 16554 - protein, 85 aa, unidentified
  REGION 1..85: note = Description of Unknown:cds_NC_010438.1_cds_YP_001718610.1_1 target sequence
ACNINRFNVAITRAKKGIFCIMCDKLLYEALKFFEVKLTDLQAGDTCGLFKDCSKFDDPPLPPSHAPTYVALSDRFKTEGDLAVQ

SEQ ID NO: 16555 - protein, 85 aa, unidentified
  REGION 1..85: note = Description of Unknown:cds_NC_010438.1_cds_YP_001718610.1_1 target sequence
IGSKTPCTYERVISFMGFRFDLNIPGYHTLFCTRDFAMRHVRGWLGMDVEGAHVCGSNVGTNVPLQIGFSNGVDFVVNPEGCVMT

SEQ ID NO: 16556 - protein, 85 aa, unidentified
  REGION 1..85: note = Description of Unknown:cds_NC_010438.1_cds_YP_001718610.1_1 target sequence
NVNDVIAPVKARAPPGEQFAHLIPLMRRGQPWTVIRKRIVQMCCDYVSPSSDILIFVLWAGGLELTTMRYFVKVGPRCDCHCGKV

SEQ ID NO: 16557 - protein, 85 aa, unidentified
  REGION 1..85: note = Description of Unknown:cds_NC_010438.1_cds_YP_001718610.1_1 target sequence
ATCYNSAEHAFYCFRHALGCDYLYNPYVIDIQQWGYTGSLSSNHHEHCNVHRNEHVASGDAIMTRCLAIYDCFVKNVDWSITYPF

SEQ ID NO: 16558 - protein, 85 aa, unidentified
  REGION 1..85: note = Description of Unknown:cds_NC_010438.1_cds_YP_001718610.1_1 target sequence
IGNEAAINRSGRIVQSHAVKAALKVYNPKAIHDIGNPKGIRCAVTDASWYCYDKNPISSNVKTLEYDYLVHGQFDGLCLFWNCNV

SEQ ID NO: 16559 - protein, 85 aa, unidentified
  REGION 1..85: note = Description of Unknown:cds_NC_010438.1_cds_YP_001718610.1_1 target sequence
DMYPEFSVVCRFDTRCKSAFNLEGVNGGSLYVNNHAFHTPAFDKRAFAKLKAIPFFFYDDGECDSCQGSINYVPLHASNCVTRCN

SEQ ID NO: 16560 - protein, 85 aa, unidentified
  REGION 1..85: note = Description of Unknown:cds_NC_010438.1_cds_YP_001718610.1_1 target sequence
IGGAVCSKHANMYYAYVNAYNTFTQAGFTIWVPNSFDVYNLWQTLVTPKLQSLENVAFNVVKHGSFIGVDGELPVAIVADKVFVR

SEQ ID NO: 16561 - protein, 85 aa, unidentified
  REGION 1..85: note = Description of Unknown:cds_NC_010438.1_cds_YP_001718610.1_1 target sequence
EGTVDNVLFVNKTTLPTNVAFELYAKRKTGNTPSLTILRNLGVTRTYKFVLWDYEAERPFTSYTKDVCGYTDFDADVCTCYDNSI

SEQ ID NO: 16562 - protein, 85 aa, unidentified
  REGION 1..85: note = Description of Unknown:cds_NC_010438.1_cds_YP_001718610.1_1 target sequence
AGSFERFSMCRDGVLISTSAVKKLSAIKLNYGYLNGEPVTTSEDKPITWYFYVRKDGQFLDQCDSIFTQGRSAENFVPRTQMETD

SEQ ID NO: 16563 - protein, 85 aa, unidentified
  REGION 1..85: note = Description of Unknown:cds_NC_010438.1_cds_YP_001718610.1_1 target sequence
FLELDMGLFISKYGLENFAFEHIVYGDVSKTTLGGLHLLISQVRLSKMGILKVEEFVHTGDSSLRCASVTYVDNPSSKMVCSYMD

SEQ ID NO: 16564 - protein, 85 aa, unidentified
  REGION 1..85: note = Description of Unknown:cds_NC_010438.1_cds_YP_001718610.1_1 target sequence
ILLDDFVTLLKTLDLSVVSKVHEVIVDCKVYRWMLWCKDHKVQTFYPQLQSAEWKCGYSMPSLYKIQRMCLEPCNLYNYGASIKL

SEQ ID NO: 16565 - protein, 85 aa, unidentified
  REGION 1..85: note = Description of Unknown:cds_NC_010438.1_cds_YP_001718610.1_1 target sequence
PDGIMFNVVKYTQLCQYLNSTTMCVPHNMRVLHLGAGSDKGVAPGTTVLRRWLPDDAVIVDNDVNDYVSDADMSVVGDCTTLYLQ

SEQ ID NO: 16566 - protein, 85 aa, unidentified
  REGION 1..85: note = Description of Unknown:cds_NC_010438.1_cds_YP_001718610.1_1 target sequence
DKFDLVISDMYDGRIKHIDGENVSKDGFFVYLNGVITEKLALGGSVAIKITEHSWNKRTYELIQKFAYWTLFCTSVNTSSSEAFL

SEQ ID NO: 16567 - protein, 85 aa, unidentified
  REGION 1..85: note = Description of Unknown:cds_NC_010438.1_cds_YP_001718610.1_1 target sequence
IGVNYLGDLNTTPIVDGNVMHANYIFWRNSTIMAMSYNSVLDLSKFECRHKATVVIALKDTDLSEVIVGLIRNGKLLIRKNGSVC

SEQ ID NO: 16568 - protein, 84 aa, unidentified
  REGION 1..84: note = Description of Unknown:cds_NC_010438.1_cds_YP_001718610.1_1 target sequence
TPIVDGNVMHANYIFWRNSTIMAMSYNSVLDLSKFECRHKATVVIALKDTDLSEVIVGLIRNGKLLIRKNGSVCGYGNHLVSTK

SEQ ID NO: 16569 - protein, 85 aa, unidentified
  REGION 1..85: note = Description of Unknown:cds_NC_010438.1_cds_YP_001718610.1_1 target sequence
SRYSEAAIYGFENCRFVASGLQEIVDGVSADDYVLCFSGVTTLRAFVGKYGDRPRNLRGWLLFSNCNYFLEEIDVIFGFGGGDAS

SEQ ID NO: 16570 - protein, 85 aa, unidentified
  REGION 1..85: note = Description of Unknown:cds_NC_010438.1_cds_YP_001718610.1_1 target sequence
PVYVDNYMCGANGKPVLPADVWVYQDYFGEETELIVNGVKHVKVWHVTRTDIPYQFQSLGAIESIEWLTDIPHTLRNGSRLSAAR

SEQ ID NO: 16571 - protein, 85 aa, unidentified
  REGION 1..85: note = Description of Unknown:cds_NC_010438.1_cds_YP_001718610.1_1 target sequence
AVKHSKNVVLSEPLKTLYQACGSPFVTNGSTLREAVPKPVFAHAYVACKCGRKAWSVGDWSGYKSTCCGVFGKPQCVVFGEVVPG

SEQ ID NO: 16572 - protein, 85 aa, unidentified
  REGION 1..85: note = Description of Unknown:cds_NC_010438.1_cds_YP_001718610.1_1 target sequence
DVFITTSSVGSGTRYYNGLTVKHVVTVDGLACWRVLKTQSVDGLTATPSFDDYSDAAFDCCVYHNNTQLAVAYKMGLLSGNFDET

SEQ ID NO: 16573 - protein, 85 aa, unidentified
  REGION 1..85: note = Description of Unknown:cds_NC_010438.1_cds_YP_001718610.1_1 target sequence
VIDGVLAGAIDVGSAVLDVIDRICDAQPWFIQKFGALFESAWAAFVATLKKIPALSSEFVQLCSALQKAILTVRDGVIDFYVENV

SEQ ID NO: 16574 - protein, 85 aa, unidentified
  REGION 1..85: note = Description of Unknown:cds_NC_010438.1_cds_YP_001718610.1_1 target sequence
APKFVAAVEAFKMLVVGVFDFSVDTYKVVGETFKRVGDYVLLGNAVAKLVTTKVKGVRQAGAKKVTFATPVIGVAKRVTSTRTEI

SEQ ID NO: 16575 - protein, 85 aa, unidentified
  REGION 1..85: note = Description of Unknown:cds_NC_010438.1_cds_YP_001718610.1_1 target sequence
DSVQLVACASTPLVENGCTVIVDGIAFFKSGGVYRLMADTDLVYETPVYCQQATCKPVFKCAKPDGFPDVTSVNPDTLAHEVKKI

SEQ ID NO: 16576 - protein, 85 aa, unidentified
  REGION 1..85: note = Description of Unknown:cds_NC_010438.1_cds_YP_001718610.1_1 target sequence
LGGIARPYDKYTCSVINGECQVDHSYNFKAPAYITDKQQFVMLCKDFVVDAKFEEFYVKALEAKSLDGFEPYYEAFTIFKGELKC

SEQ ID NO: 16577 - protein, 85 aa, unidentified
  REGION 1..85: note = Description of Unknown:cds_NC_010438.1_cds_YP_001718610.1_1 target sequence
PAELIELDDGGLFNTFIKTVNSAYDFVKNLKVSVTVKGVICTAAKRFKRWANALAKIYTEFITGACKTVVIGGLEFAYYCFAKPA

SEQ ID NO: 16578 - protein, 85 aa, unidentified
  REGION 1..85: note = Description of Unknown:cds_NC_010438.1_cds_YP_001718610.1_1 target sequence
IALGDIFVRVSKNALSAFNRPTEAGAVDALVFEGGDIETVCSRVQFDTVALEPVQEVPVPSDGYVAVVDGYTFFTDGTHYFPTGL

SEQ ID NO: 16579 - protein, 85 aa, unidentified
  REGION 1..85: note = Description of Unknown:cds_NC_010438.1_cds_YP_001718610.1_1 target sequence
SRCYTTCFKRGGGTVEFSEVVEVKEIDPVYKVRLEYEFEDENIAIVCKKAIGKIITFEGTDWSEFEQTLINAVSVVGEFVDLPDF

SEQ ID NO: 16580 - protein, 85 aa, unidentified
  REGION 1..85: note = Description of Unknown:cds_NC_010438.1_cds_YP_001718610.1_1 target sequence
YVYDEEGGTDLSKVVMVSQWPLKSSPEPQNFDPSPLAAFVVSCGLECDFSGCGDPVSCFQTVEGAALCISMERSCKCGTDQAVCE

SEQ ID NO: 16581 - protein, 85 aa, unidentified
  REGION 1..85: note = Description of Unknown:cds_NC_010438.1_cds_YP_001718610.1_1 target sequence
GFYVPVKPCASTDTCDECGCDRISTITSMVGTGFVDLCDNPVVPFDCVECGFGGYNGVCFVNVDVAIPPPEDLPPPPEPEPEPPV

SEQ ID NO: 16582 - protein, 85 aa, unidentified
  REGION 1..85: note = Description of Unknown:cds_NC_010438.1_cds_YP_001718610.1_1 target sequence
DAMQEVAEALSFIVDEPSAFVDPFKFEYYDHAGVRVLKQEVNNCWVASTLVQLQLYGFDSDAMSLFKAGSVSPMVRRCYEAVGAI

SEQ ID NO: 16583 - protein, 85 aa, unidentified
  REGION 1..85: note = Description of Unknown:cds_NC_010438.1_cds_YP_001718610.1_1 target sequence
RGSLGDVSQCLEKLLSDSHTMFMTFDVKCDCGASVAEMSGAVFRFMPTRDSFNYGACPTCRSVMVYKIKSMQGTGFFCQDPKPFN

SEQ ID NO: 16584 - protein, 85 aa, unidentified
  REGION 1..85: note = Description of Unknown:cds_NC_010438.1_cds_YP_001718610.1_1 target sequence
TARSLVRPVSASVYSGRTDGGHYKTNIYDARVCVDGFGVTSITTGNVNVILLHDVSYGLVETVPAVVNDVVTTTVESVTSAATPS

SEQ ID NO: 16585 - protein, 85 aa, unidentified
  REGION 1..85: note = Description of Unknown:cds_NC_010438.1_cds_YP_001718610.1_1 target sequence
VEPFATFGSVEFYQGDVKALSALPCDFVVNAANENLQHAGGVAKAINDLTGGVLQRLSDDYTRANGKVKVGCGVMLECPLRVFNV

SEQ ID NO: 16586 - protein, 85 aa, unidentified
  REGION 1..85: note = Description of Unknown:cds_NC_010438.1_cds_YP_001718610.1_1 target sequence
VGPRKGKHARSLLVKCYKSVLSNPGVPLTPLVSVGIFGVPLSDSFIALTSVVGERRVLCFCYSDTERKAILKLIEQRSSVDQPTV

SEQ ID NO: 16587 - protein, 85 aa, unidentified
  REGION 1..85: note = Description of Unknown:cds_NC_010438.1_cds_YP_001718610.1_1 target sequence
PIVPPTADVEVATVVQCVSETEAATVVMDVVAEPQPTEVIATQPCVPEALEVVGSVTYYPVDVGVVGVRPDNIILHTTQDLGLCA

SEQ ID NO: 16588 - protein, 85 aa, unidentified
  REGION 1..85: note = Description of Unknown:cds_NC_010438.1_cds_YP_001718610.1_1 target sequence
FGKLLDEQACGALSASIDAYKQNTAVVPPGNIVTFKCEGQPTVVLAVFPPADDAAYLKNVKRAVSKLAKLKGVSVSTFSTIDVHK

SEQ ID NO: 16589 - protein, 85 aa, unidentified
  REGION 1..85: note = Description of Unknown:cds_NC_010438.1_cds_YP_001718610.1_1 target sequence
RLLAFVKLFCVASMDVVGDVHTTPSVVKVTEDGRTVKDVVVSTTTTAGDQLGPCAVEGASLTTSVVTDVVNSVVAVAPNVDWDSH

SEQ ID NO: 16590 - protein, 85 aa, unidentified
  REGION 1..85: note = Description of Unknown:cds_NC_010438.1_cds_YP_001718610.1_1 target sequence
YGFKDAGNFHVLDHSAYAYDSDFVDGKRALAGSDNNCWVNATCLQLQFAGVEFLSKGVTAMWNEFLTGDVARFVHWLYWLNGASK

SEQ ID NO: 16591 - protein, 85 aa, unidentified
  REGION 1..85: note = Description of Unknown:cds_NC_010438.1_cds_YP_001718610.1_1 target sequence
GDLGDVETTLNLVAKHAKPKGCVTIEKTTVDGCCVSEKRVNSLVVNASVLRQGVGDGYCQHGNEYIIRVSRVEGTAIIVNVGDPS

SEQ ID NO: 16592 - protein, 85 aa, unidentified
  REGION 1..85: note = Description of Unknown:cds_NC_010438.1_cds_YP_001718610.1_1 target sequence
VKAPNLLISGTAYTAFSGPIDAGHYRVYCSATSKVFDGKSIVGGDLCNLAVTSVVVVNKFFKAEVCNAKSSEPTAVKIMSKLDDA

SEQ ID NO: 16593 - protein, 85 aa, unidentified
  REGION 1..85: note = Description of Unknown:cds_NC_010438.1_cds_YP_001718610.1_1 target sequence
SDKFFTAGDVVSHNIANSVVWFFTMLSILFKAFKTRDFKVFALAPERTGIIFTRSLKYNIKAARDMLKRKQKWVFWFLKFCLLLY

SEQ ID NO: 16594 - protein, 85 aa, unidentified
  REGION 1..85: note = Description of Unknown:cds_NC_010438.1_cds_YP_001718610.1_1 target sequence
TAYAVLFMFIRFGPPNETLCKDHVDGYANSTFVKDDYCNSALCRVCLFGYQELADLPHTNVVWRHVGMPLFVNWMPLFYLAFLFI

SEQ ID NO: 16595 - protein, 85 aa, unidentified
  REGION 1..85: note = Description of Unknown:cds_NC_010438.1_cds_YP_001718610.1_1 target sequence
FGGFVTKGFVLYFVAQYVNAFGVHFGMQDLFWPLHLIPFSTFGDEMVVLFLVGRFLMFVKHVCFGCDKASCVACSKSARLTRVPM

SEQ ID NO: 16596 - protein, 85 aa, unidentified
  REGION 1..85: note = Description of Unknown:cds_NC_010438.1_cds_YP_001718610.1_1 target sequence
QTIVCGANKSFYVTANGGKNFCSRHNFFCVNCDSHGPGNTFINEVVARELSNVVKSSVKPTDVAYLEVDKVEFNDGFYYLYSGET

SEQ ID NO: 16597 - protein, 85 aa, unidentified
  REGION 1..85: note = Description of Unknown:cds_NC_010438.1_cds_YP_001718610.1_1 target sequence
FWRYNFDITDNKYSCKEALKSCNVLSDFIVYNDAGSNITQVRNACVYFSQLLCKPIKLVNASLLSTLNVDFNGALHSAFVNVLSD

SEQ ID NO: 16598 - protein, 85 aa, unidentified
  REGION 1..85: note = Description of Unknown:cds_NC_010438.1_cds_YP_001718610.1_1 target sequence
SFSRDLSNCSTMNECKQALGFEVSDDEFLNGVSDAHRYNVLLSDTSCNNLVTSYAKPEEKLSVHDLGTCMRFGAKVVNHNVLIKE

SEQ ID NO: 16599 - protein, 85 aa, unidentified
  REGION 1..85: note = Description of Unknown:cds_NC_010438.1_cds_YP_001718610.1_1 target sequence
NVPVVWLASEFHLLSEEGRKYIVKTTKAKGVTFLLTFNSNPMQLNIPSTSIVNKRAAGVGSKFFWWVCLAIVAFFLLLNASEFGY

SEQ ID NO: 16600 - protein, 85 aa, unidentified
  REGION 1..85: note = Description of Unknown:cds_NC_010438.1_cds_YP_001718610.1_1 target sequence
VATSFEDFGFKYIEHGVLKDFDGPLSCVHNVFDNFNAWHEARYGVVPINRRICPIVVGTIDNIRFVPNVPSGIVLIGKTLVFAVK

SEQ ID NO: 16601 - protein, 85 aa, unidentified
  REGION 1..85: note = Description of Unknown:cds_NC_010438.1_cds_YP_001718610.1_1 target sequence
AVFTETGNCFNLNGLTTLGSCIFNSACTNMDGLGGPATYCYKEGLFENSKLYSDLVPHSHYKLEDGNFIKLPETLARGLGFVTIK

SEQ ID NO: 16602 - protein, 85 aa, unidentified
  REGION 1..85: note = Description of Unknown:cds_NC_010438.1_cds_YP_001718610.1_1 target sequence
TMETTYCRVGECLDSKAGVCFGLDRFFVYNTEFGGDYICGSGFLSFFRNVLSIFTSSFSVMALSGQVMFNCIVAAIAVVVCFLVI

SEQ ID NO: 16603 - protein, 85 aa, unidentified
  REGION 1..85: note = Description of Unknown:cds_NC_010438.1_cds_YP_001718610.1_1 target sequence
KFKRMFGDLSMGVCTVVAVVLINNVSYIITQNMLFMFLYAIFYFLAVKGLKYAWIWHIGYVVAYFTLAPWFLVAWYLGATAVDVL

SEQ ID NO: 16604 - protein, 85 aa, unidentified
  REGION 1..85: note = Description of Unknown:cds_NC_010438.1_cds_YP_001718610.1_1 target sequence
PAILKLKISTQLFEGDKFVGTFETAAYGTFVLDMRSYEKLVNSMPMDKIKQYAATYNKYKYYSGSASEADYRCACFAHLAKALLA

SEQ ID NO: 16605 - protein, 85 aa, unidentified
  REGION 1..85: note = Description of Unknown:cds_NC_010438.1_cds_YP_001718610.1_1 target sequence
YADNHQDLLYTPPSVSYNSTLQSGLKKMAQPSGIVEKCVVRVCYGNMTLNGLWLGDIVVCPRHVMASSTTNTIDYEYEYSMMRLH

SEQ ID NO: 16606 - protein, 85 aa, unidentified
  REGION 1..85: note = Description of Unknown:cds_NC_010438.1_cds_YP_001718610.1_1 target sequence
NFSVSVGNVFLGVNGVTMEGVNLHIKVNQSNPHTPKHTFRTLKPGDSFNILACYDGTPAGVYGITMRPNYTIRGSFINGACGSPG

SEQ ID NO: 16607 - protein, 85 aa, unidentified
  REGION 1..85: note = Description of Unknown:cds_NC_010438.1_cds_YP_001718610.1_1 target sequence
YNVVNGNVEFCYLHQLELGSGCHVGSNFDGIMYGNFQDQPSLQIEGADQLVTPNVVAFLYGALLNGVNWFVSPERLSVEAFNEWA

SEQ ID NO: 16608 - protein, 85 aa, unidentified
  REGION 1..85: note = Description of Unknown:cds_NC_010438.1_cds_YP_001718610.1_1 target sequence
HNNGFTDMSGAECFTMLAAKTGVDVQRVLASIQKIAKSFGGRNILGFTSLTDEFTAAEVIKQMYGVNLQSRKLPSVFNNIMLVGV

SEQ ID NO: 16609 - protein, 85 aa, unidentified
  REGION 1..85: note = Description of Unknown:cds_NC_010438.1_cds_YP_001718610.1_1 target sequence
FWFMFISEMLYYTSSYWIKPDLITPIFIILFAIAVFLTAFVKHKVLFLYTFLVPGIVITATSNLAWDCYVRDLLAKYLDYHMSIF

SEQ ID NO: 16610 - protein, 85 aa, unidentified
  REGION 1..85: note = Description of Unknown:cds_NC_010438.1_cds_YP_001718610.1_1 target sequence
NMDIQGVFNIAACFMVNALHTWRYMRSGYTTRVTYVASLIVSVYNYWYVGDALSLAMMLLLNVNNNWYIGACAYRFVLIVANYMN

SEQ ID NO: 16611 - protein, 85 aa, unidentified
  REGION 1..85: note = Description of Unknown:cds_NC_010438.1_cds_YP_001718610.1_1 target sequence
PAVIGFLGSFKVIMFLYVAVGYLCCIYYGILYWLNKFFKCTLGVYDFKVSAAEFKYMVANDLRAPCGVFDSLLLSFRLMGIGGEK

SEQ ID NO: 16612 - protein, 85 aa, unidentified
  REGION 1..85: note = Description of Unknown:cds_NC_010438.1_cds_YP_001718610.1_1 target sequence
TIKISTVQSKLTEIKCTNVVLMGVLTSMNIEANSKDWAFCVDLHNKINLSTDAEKAMEYLLALLTFFLSRQKDFNCTELLDSYFA

SEQ ID NO: 16613 - protein, 85 aa, unidentified
  REGION 1..85: note = Description of Unknown:cds_NC_010438.1_cds_YP_001718610.1_1 target sequence
DSSILQSVASTFVNMPSFIAYETARQNYEDATNNGSSPQLVKQLKRAMNIAKAEFDHEAAVQRKIQRMAEQAASQMYKEARAVNR

SEQ ID NO: 16614 - protein, 85 aa, unidentified
  REGION 1..85: note = Description of Unknown:cds_NC_010438.1_cds_YP_001718610.1_1 target sequence
KSKVISSMHALLFGMLRKLDMSAIDTILNLARGGVVPLNIIPAACATKLVVVASDHESFTRVYQQGAVHYAGAVWTLSEVKDNDG

SEQ ID NO: 16615 - protein, 85 aa, unidentified
  REGION 1..85: note = Description of Unknown:cds_NC_010438.1_cds_YP_001718610.1_1 target sequence
KPVHVKEITKDNTALTWPLVLNCERVVKLQNNEIIPGKLKQRPVKGEGDGGVAADGKALYNTEGGRTFMYAFVADKPDLKVVKWE

SEQ ID NO: 16616 - protein, 85 aa, unidentified
  REGION 1..85: note = Description of Unknown:cds_NC_010438.1_cds_YP_001718610.1_1 target sequence
FEGGRNTIELEPPCRFAVSNSNGTTSIKYLYFVKNLNTLRRGAVLGYIGATVRLQAGTQTELVANSSLLTMCSFAVDPRKCYLDA

SEQ ID NO: 16617 - protein, 85 aa, unidentified
  REGION 1..85: note = Description of Unknown:cds_NC_010438.1_cds_YP_001718610.1_1 target sequence
VKNGVKPVTNCVKMLSNGSGTGQAVTVGVEANTNQDSYGGASVCLYCRAHIDHPSMDGFCQFKGRYVQVPIGTVDPIRYCLENDI

SEQ ID NO: 16618 - protein, 85 aa, unidentified
  REGION 1..85: note = Description of Unknown:cds_NC_010438.1_cds_YP_001718610.1_1 target sequence
CKVCHCWLNNGCTCDRTTVVQSLDNNYLNRVRGSSAARLEPCNGTEPEHVIRAFDIYNKDVACIGKFVKVNCVRFKNADKHDAFY

SEQ ID NO: 16619 - protein, 85 aa, unidentified
  REGION 1..85: note = Description of Unknown:cds_NC_010438.1_cds_YP_001718610.1_1 target sequence
VVKRCTKSVMEHEQSIYDALKDCGAVSPHDFFVWKDGRSVYGNIARHDLTKYTMMDLVHALRNFDEKNCETLKEILVISGACDSS

SEQ ID NO: 16620 - protein, 85 aa, unidentified
  REGION 1..85: note = Description of Unknown:cds_NC_010438.1_cds_YP_001718610.1_1 target sequence
YFDNKNWYDPVENEDIHRVYAKLGCVVANAMLKCVALCDAMVAKGVVGVLTLDNQDLNGNFYDFGDFTIGIPGVGVPLATSYYSY

SEQ ID NO: 16621 - protein, 85 aa, unidentified
  REGION 1..85: note = Description of Unknown:cds_NC_010438.1_cds_YP_001718610.1_1 target sequence
LMPVMGMTNCLARECFVKSEIFGSDFKTYDLLEYDFTEHKLGLFNKYFKHWDLDYHPNCSDCYDEMCVIHCANFNALFATTIPDT

SEQ ID NO: 16622 - protein, 85 aa, unidentified
  REGION 1..85: note = Description of Unknown:cds_NC_010438.1_cds_YP_001718610.1_1 target sequence
SFGPLCRKVFIDGVPVVTTAGYHFKQLGLVWNKDLNTHSTRLTINELLRFVTDPALLVASSPALFDQRTVCFSVAALGTGLTKQT

SEQ ID NO: 16623 - protein, 85 aa, unidentified
  REGION 1..85: note = Description of Unknown:cds_NC_010438.1_cds_YP_001718610.1_1 target sequence
VKPGHFNKEFYDFLCAQGFFDEGSELTLKHFFFAQKGDAAIRDFDFYRYNRPTVLDICQARVAYHVVKRYFDIYEGGCIAARDVV

SEQ ID NO: 16624 - protein, 85 aa, unidentified
  REGION 1..85: note = Description of Unknown:cds_NC_010438.1_cds_YP_001718610.1_1 target sequence
VTNLNKSAGYPLNKFGKASLYYESLSYEEQDALYALTKRNVLPTMTQLNLKYAISGKERARTVGGVSLLSTMTTRQFHQKHLKSI

SEQ ID NO: 16625 - protein, 85 aa, unidentified
  REGION 1..85: note = Description of Unknown:cds_NC_010438.1_cds_YP_001718610.1_1 target sequence
VNTRNATVVIGTTKFYGGWDNMLRNLMDGVDNACLMGWDYPKCDRALPNMIRMISAMILGSKHVNCCTNSDRYYRLCNELAQVLT

SEQ ID NO: 16626 - protein, 85 aa, unidentified
  REGION 1..85: note = Description of Unknown:cds_NC_010438.1_cds_YP_001718610.1_1 target sequence
EVVYSNGGFYMKPGGTTSGDATTAYANSVFNIFQAVSANINRILGINSNTCNNLAVKSLQRMLYDNCYRSSAVDPGFVDTFYGYL

SEQ ID NO: 16627 - protein, 85 aa, unidentified
  REGION 1..85: note = Description of Unknown:cds_NC_010438.1_cds_YP_001718610.1_1 target sequence
RKHFSMMILSDDGVVCYNKEYASLGYVADINAFKATLYYQNNVFMSTSKCWVEEDLTKGPHEFCSQHTMQIVDGDGTYYLPYPDP

SEQ ID NO: 16628 - protein, 85 aa, unidentified
  REGION 1..85: note = Description of Unknown:cds_NC_010438.1_cds_YP_001718610.1_1 target sequence
SRILSAGVFVDDVIKTDAVVLLERYVSLAIDAYPLSKHPNPEYRKVFYVLLDWVKHLNNTLNQGVLESFSVTLLEDASSKFWDES

SEQ ID NO: 16629 - protein, 85 aa, unidentified
  REGION 1..85: note = Description of Unknown:cds_NC_010438.1_cds_YP_001718610.1_1 target sequence
FYANLYEKSAVLQAAGLCVVCNSQTVLRRGDCLRRPMLCTKCAYDHVVGTNHKFILAITPYVCNAAGCAVNDVTKLYLGGLSYYC

SEQ ID NO: 16630 - protein, 85 aa, unidentified
  REGION 1..85: note = Description of Unknown:cds_NC_010438.1_cds_YP_001718610.1_1 target sequence
VDRKPQLSFPLCSGGNVFGLYKNSATGSPDVEVFNTLATSDWTDAKDYRLANEVKDSLRLFAAETVKAKEECVTSSYAAATLKEI

SEQ ID NO: 16631 - protein, 85 aa, unidentified
  REGION 1..85: note = Description of Unknown:cds_NC_010438.1_cds_YP_001718610.1_1 target sequence
IGPKELLLSWEPGKIKPPLNRNSVFTCFQVTKDSKFQVGEFTFEKLDYGSDTVCYKSTATCKLQPGMIFVLTSHNIQPLRAPTIA

SEQ ID NO: 16632 - protein, 85 aa, unidentified
  REGION 1..85: note = Description of Unknown:cds_NC_010438.1_cds_YP_001718610.1_1 target sequence
NQERYAAICKLKPTFNISDAYSTLVPYYQMIGRQKITTIQGPPGSGKSHCVIGLGLYYPGARIVFAACSHAAVDSLCVKASTTYV

SEQ ID NO: 16633 - protein, 85 aa, unidentified
  REGION 1..85: note = Description of Unknown:cds_NC_010438.1_cds_YP_001718610.1_1 target sequence
VEHCTRIIPARARVECFSGFKANNNSAQYIFSTVNALPECTADIVVIDEVSMCTNYDLSIVNQRVAYKHIVYVGDPQQLPAPRTM

SEQ ID NO: 16634 - protein, 85 aa, unidentified
  REGION 1..85: note = Description of Unknown:cds_NC_010438.1_cds_YP_001718610.1_1 target sequence
ITRGVLEPKDYNVVTQRMCAVGPDVFLHKCYRCPAEIVKTVSELVYENKFVPVHSESKQCFKIFCKGAVQVDNGSSINRRQLEVV

SEQ ID NO: 16635 - protein, 85 aa, unidentified
  REGION 1..85: note = Description of Unknown:cds_NC_010438.1_cds_YP_001718610.1_1 target sequence
KMFLAKNPSWSKAVFISPYNSQNYVASRSLGLQIQTVDSSQGSEYDYVIFAQTSDTAHACNINRFNVAITRAKKGIFCIMCDKLL

SEQ ID NO: 16636 - protein, 85 aa, unidentified
  REGION 1..85: note = Description of Unknown:cds_NC_010438.1_cds_YP_001718610.1_1 target sequence
YEALKFFEVKLTDLQAGDTCGLFKDCSKFDDPPLPPSHAPTYVALSDRFKTEGDLAVQIGSKTPCTYERVISFMGFRFDLNIPGY

SEQ ID NO: 16637 - protein, 85 aa, unidentified
  REGION 1..85: note = Description of Unknown:cds_NC_010438.1_cds_YP_001718610.1_1 target sequence
HTLFCTRDFAMRHVRGWLGMDVEGAHVCGSNVGTNVPLQIGFSNGVDFVVNPEGCVMTNVNDVIAPVKARAPPGEQFAHLIPLMR

SEQ ID NO: 16638 - protein, 85 aa, unidentified
  REGION 1..85: note = Description of Unknown:cds_NC_010438.1_cds_YP_001718610.1_1 target sequence
RGQPWTVIRKRIVQMCCDYVSPSSDILIFVLWAGGLELTTMRYFVKVGPRCDCHCGKVATCYNSAEHAFYCFRHALGCDYLYNPY

SEQ ID NO: 16639 - protein, 85 aa, unidentified
  REGION 1..85: note = Description of Unknown:cds_NC_010438.1_cds_YP_001718610.1_1 target sequence
VIDIQQWGYTGSLSSNHHEHCNVHRNEHVASGDAIMTRCLAIYDCFVKNVDWSITYPFIGNEAAINRSGRIVQSHAVKAALKVYN

SEQ ID NO: 16640 - protein, 85 aa, unidentified
  REGION 1..85: note = Description of Unknown:cds_NC_010438.1_cds_YP_001718610.1_1 target sequence
PKAIHDIGNPKGIRCAVTDASWYCYDKNPISSNVKTLEYDYLVHGQFDGLCLFWNCNVDMYPEFSVVCRFDTRCKSAFNLEGVNG

SEQ ID NO: 16641 - protein, 85 aa, unidentified
  REGION 1..85: note = Description of Unknown:cds_NC_010438.1_cds_YP_001718610.1_1 target sequence
GSLYVNNHAFHTPAFDKRAFAKLKAIPFFFYDDGECDSCQGSINYVPLHASNCVTRCNIGGAVCSKHANMYYAYVNAYNTFTQAG

SEQ ID NO: 16642 - protein, 85 aa, unidentified
  REGION 1..85: note = Description of Unknown:cds_NC_010438.1_cds_YP_001718610.1_1 target sequence
FTIWVPNSFDVYNLWQTLVTPKLQSLENVAFNVVKHGSFIGVDGELPVAIVADKVFVREGTVDNVLFVNKTTLPTNVAFELYAKR

SEQ ID NO: 16643 - protein, 85 aa, unidentified
  REGION 1..85: note = Description of Unknown:cds_NC_010438.1_cds_YP_001718610.1_1 target sequence
KTGNTPSLTILRNLGVTRTYKFVLWDYEAERPFTSYTKDVCGYTDFDADVCTCYDNSIAGSFERFSMCRDGVLISTSAVKKLSAI

SEQ ID NO: 16644 - protein, 85 aa, unidentified
  REGION 1..85: note = Description of Unknown:cds_NC_010438.1_cds_YP_001718610.1_1 target sequence
KLNYGYLNGEPVTTSEDKPITWYFYVRKDGQFLDQCDSIFTQGRSAENFVPRTQMETDFLELDMGLFISKYGLENFAFEHIVYGD

SEQ ID NO: 16645 - protein, 85 aa, unidentified
  REGION 1..85: note = Description of Unknown:cds_NC_010438.1_cds_YP_001718610.1_1 target sequence
VSKTTLGGLHLLISQVRLSKMGILKVEEFVHTGDSSLRCASVTYVDNPSSKMVCSYMDILLDDFVTLLKTLDLSVVSKVHEVIVD

SEQ ID NO: 16646 - protein, 85 aa, unidentified
  REGION 1..85: note = Description of Unknown:cds_NC_010438.1_cds_YP_001718610.1_1 target sequence
CKVYRWMLWCKDHKVQTFYPQLQSAEWKCGYSMPSLYKIQRMCLEPCNLYNYGASIKLPDGIMFNVVKYTQLCQYLNSTTMCVPH

SEQ ID NO: 16647 - protein, 85 aa, unidentified
  REGION 1..85: note = Description of Unknown:cds_NC_010438.1_cds_YP_001718610.1_1 target sequence
NMRVLHLGAGSDKGVAPGTTVLRRWLPDDAVIVDNDVNDYVSDADMSVVGDCTTLYLQDKFDLVISDMYDGRIKHIDGENVSKDG

SEQ ID NO: 16648 - protein, 85 aa, unidentified
  REGION 1..85: note = Description of Unknown:cds_NC_010438.1_cds_YP_001718610.1_1 target sequence
FFVYLNGVITEKLALGGSVAIKITEHSWNKRTYELIQKFAYWTLFCTSVNTSSSEAFLIGVNYLGDLNTTPIVDGNVMHANYIFW

SEQ ID NO: 16649 - protein, 85 aa, unidentified
  REGION 1..85: note = Description of Unknown:cds_NC_002645.1_cds_NP_073549.1_1 target sequence
ACNRVTLAVASDSEISANGCSTIAQAVRRYSEAASNGFRACRFVSLDLQDCIVGIADDTYVMGLHGNQTLFCNIMKFSDRPFMLH

SEQ ID NO: 16650 - protein, 85 aa, unidentified
  REGION 1..85: note = Description of Unknown:cds_NC_002645.1_cds_NP_073549.1_1 target sequence
GWLVFSNSNYLLEEFDVVFGKRGGGNVTYTDQYLCGADGKPVMSEDLWQFVDHFGENEEIIINGHTYVCAWLTKRKPLDYKRQNN

SEQ ID NO: 16651 - protein, 85 aa, unidentified
  REGION 1..85: note = Description of Unknown:cds_NC_002645.1_cds_NP_073549.1_1 target sequence
LAIEEIEYVHGDALHTLRNGSVLEMAKEVKTSSKVVLSDALDKLYKVFGSPVMTNGSNILEAFTKPVFISALVQCTCGTKSWSVG

SEQ ID NO: 16652 - protein, 85 aa, unidentified
  REGION 1..85: note = Description of Unknown:cds_NC_002645.1_cds_NP_073549.1_1 target sequence
DWTGFKSSCCNVISNKLCVVPGNVKPGDAVITTQQAGAGIKYFCGMTLKFVANIEGVSVWRVIALQSVDCFVASSTFVEEEHVNR

SEQ ID NO: 16653 - protein, 85 aa, unidentified
  REGION 1..85: note = Description of Unknown:cds_NC_002645.1_cds_NP_073549.1_1 target sequence
MDTFCFNVRNSVTDECRLAMLGAEMTSNVRRQVASGVIDISTGWFDVYDDIFAESKPWFVRKAEDIFGPCWSALASALKQLKVTT

SEQ ID NO: 16654 - protein, 85 aa, unidentified
  REGION 1..85: note = Description of Unknown:cds_NC_002645.1_cds_NP_073549.1_1 target sequence
GELVRFVKSICNSAVAVVGGTIQILASVPEKFLNAFDVFVTAIQTVFDCAVETCTIAGKAFDKVFDYVLLDNALVKLVTTKLKGV

SEQ ID NO: 16655 - protein, 85 aa, unidentified
  REGION 1..85: note = Description of Unknown:cds_NC_002645.1_cds_NP_073549.1_1 target sequence
RERGLNKVKYATVVVGSTEEVKSSRVERSTAVLTIANNYSKLFDEGYTVVIGDVAYFVSDGYFRLMASPNSVLTTAVYKPLFAFN

SEQ ID NO: 16656 - protein, 85 aa, unidentified
  REGION 1..85: note = Description of Unknown:cds_NC_002645.1_cds_NP_073549.1_1 target sequence
VNVMGTRPEKFPTTVTCENLESAVLFVNDKITEFQLDYSIDVIDNEIIVKPNISLCVPLYVRDYVDKWDDFCRQYSNESWFEDDY

SEQ ID NO: 16657 - protein, 85 aa, unidentified
  REGION 1..85: note = Description of Unknown:cds_NC_002645.1_cds_NP_073549.1_1 target sequence
RAFISVLDITDAAVKAAESKAFVDTIVPPCPSILKVIDGGKIWNGVIKNVNSVRDWLKSLKLNLTQQGLLGTCAKRFKRWLGILL

SEQ ID NO: 16658 - protein, 85 aa, unidentified
  REGION 1..85: note = Description of Unknown:cds_NC_002645.1_cds_NP_073549.1_1 target sequence
EAYNAFLDTVVSTVKIGGLTFKTYAFDKPYIVIRDIVCKVENKTEAEWIELFPHNDRIKSFSTFESAYMPIADPTHFDIEEVELL

SEQ ID NO: 16659 - protein, 85 aa, unidentified
  REGION 1..85: note = Description of Unknown:cds_NC_002645.1_cds_NP_073549.1_1 target sequence
DAEFVEPGCGGILAVIDEHVFYKKDGVYYPSNGTNILPVAFTKAAGGKVSFSDDVEVKDIEPVYRVKLCFEFEDEKLVDVCEKAI

SEQ ID NO: 16660 - protein, 85 aa, unidentified
  REGION 1..85: note = Description of Unknown:cds_NC_002645.1_cds_NP_073549.1_1 target sequence
GKKIKHEGDWDSFCKTIQSALSVVSCYVNLPTYYIYDEEGGNDLSLPVMISEWPLSVQQAQQEATLPDIAEDVVDQVEEVNSIFD

SEQ ID NO: 16661 - protein, 85 aa, unidentified
  REGION 1..85: note = Description of Unknown:cds_NC_002645.1_cds_NP_073549.1_1 target sequence
IETVDVKHDVSPFEMPFEELNGLKILKQLDNNCWVNSVMLQIQLTGILDGDYAMQFFKMGRVAKMIERCYTAEQCIRGAMGDVGL

SEQ ID NO: 16662 - protein, 85 aa, unidentified
  REGION 1..85: note = Description of Unknown:cds_NC_002645.1_cds_NP_073549.1_1 target sequence
CMYRLLKDLHTGFMVMDYKCSCTSGRLEESGAVLFCTPTKKAFPYGTCLNCNAPRMCTIRQLQGTIIFVQQKPEPVNPVSFVVKP

SEQ ID NO: 16663 - protein, 85 aa, unidentified
  REGION 1..85: note = Description of Unknown:cds_NC_002645.1_cds_NP_073549.1_1 target sequence
VCSSIFRGAVSCGHYQTNIYSQNLCVDGFGVNKIQPWTNDALNTICIKDADYNAKVEISVTPIKNTVDTTPKEEFVVKEKLNAFL

SEQ ID NO: 16664 - protein, 85 aa, unidentified
  REGION 1..85: note = Description of Unknown:cds_NC_002645.1_cds_NP_073549.1_1 target sequence
VHDNVAFYQGDVDTVVNGVDFDFIVNAANENLAHGGGLAKALDVYTKGKLQRLSKEHIGLAGKVKVGTGVMVECDSLRIFNVVGP

SEQ ID NO: 16665 - protein, 85 aa, unidentified
  REGION 1..85: note = Description of Unknown:cds_NC_002645.1_cds_NP_073549.1_1 target sequence
RKGKHERDLLIKAYNTINNEQGTPLTPILSCGIFGIKLETSLEVLLDVCNTKEVKVFVYTDTEVCKVKDFVSGLVNVQKVEQPKI

SEQ ID NO: 16666 - protein, 85 aa, unidentified
  REGION 1..85: note = Description of Unknown:cds_NC_002645.1_cds_NP_073549.1_1 target sequence
EPKPVSVIKVAPKPYRVDGKFSYFTEDLLCVADDKPIVLFTDSMLTLDDRGLALDNALSGVLSAAIKDCVDINKAIPSGNLIKFD

SEQ ID NO: 16667 - protein, 85 aa, unidentified
  REGION 1..85: note = Description of Unknown:cds_NC_002645.1_cds_NP_073549.1_1 target sequence
IGSVVVYMCVVPSEKDKHLDNNVQRCTRKLNRLMCDIVCTIPADYILPLVLSSLTCNVSFVGELKAAEAKVITIKVTEDGVNVHD

SEQ ID NO: 16668 - protein, 85 aa, unidentified
  REGION 1..85: note = Description of Unknown:cds_NC_002645.1_cds_NP_073549.1_1 target sequence
VTVTTDKSFEQQVGVIADKDKDLSGAVPSDLNTSELLTKAIDVDWVEFYGFKDAVTFATVDHSAFAYESAVVNGIRVLKTSDNNC

SEQ ID NO: 16669 - protein, 85 aa, unidentified
  REGION 1..85: note = Description of Unknown:cds_NC_002645.1_cds_NP_073549.1_1 target sequence
WVNAVCIALQYSKPHFISQGLDAAWNKFVLGDVEIFVAFVYYVARLMKGDKGDAEDTLTKLSKYLANEAQVQLEHYSSCVECDAK

SEQ ID NO: 16670 - protein, 85 aa, unidentified
  REGION 1..85: note = Description of Unknown:cds_NC_002645.1_cds_NP_073549.1_1 target sequence
FKNSVASINSAIVCASVKRDGVQVGYCVHGIKYYSRVRSVRGRAIIVSVEQLEPCAQSRLLSGVAYTAFSGPVDKGHYTVYDTAK

SEQ ID NO: 16671 - protein, 85 aa, unidentified
  REGION 1..85: note = Description of Unknown:cds_NC_002645.1_cds_NP_073549.1_1 target sequence
KSMYDGDRFVKHDLSLLSVTSVVMVGGYVAPVNTVKPKPVINQLDEKAQKFFDFGDFLIHNFVIFFTWLLSMFTLCKTAVTTGDV

SEQ ID NO: 16672 - protein, 85 aa, unidentified
  REGION 1..85: note = Description of Unknown:cds_NC_002645.1_cds_NP_073549.1_1 target sequence
KIMAKAPQRTGVVLKRSLKYNLKASAAVLKSKWWLLAKFTKLLLLIYTLYSVVLLCVRFGPFNFCSETVNGYAKSNFVKDDYCDG

SEQ ID NO: 16673 - protein, 85 aa, unidentified
  REGION 1..85: note = Description of Unknown:cds_NC_002645.1_cds_NP_073549.1_1 target sequence
SLGCKMCLFGYQELSQFSHLDVVWKHITDPLFSNMQPFIVMVLLLIFGDNYLRCFLLYFVAQMISTVGVFLGYKETNWFLHFIPF

SEQ ID NO: 16674 - protein, 85 aa, unidentified
  REGION 1..85: note = Description of Unknown:cds_NC_002645.1_cds_NP_073549.1_1 target sequence
DVICDELLVTVIVIKVISFVRHVLFGCENPDCIACSKSARLKRFPVNTIVNGVQRSFYVNANGGSKFCKKHRFFCVDCDSYGYGS

SEQ ID NO: 16675 - protein, 85 aa, unidentified
  REGION 1..85: note = Description of Unknown:cds_NC_002645.1_cds_NP_073549.1_1 target sequence
TFITPEVSRELGNITKTNVQPTGPAYVMIDKVEFENGFYRLYSCETFWRYNFDITESKYSCKEVFKNCNVLDDFIVFNNNGTNVT

SEQ ID NO: 16676 - protein, 85 aa, unidentified
  REGION 1..85: note = Description of Unknown:cds_NC_002645.1_cds_NP_073549.1_1 target sequence
QVKNASVYFSQLLCRPIKLVDSELLSTLSVDFNGVLHKAYIDVLRNSFGKDLNANMSLAECKRALGLSISDHEFTSAISNAHRCD

SEQ ID NO: 16677 - protein, 85 aa, unidentified
  REGION 1..85: note = Description of Unknown:cds_NC_002645.1_cds_NP_073549.1_1 target sequence
VLLSDLSFNNFVSSYAKPEEKLSAYDLACCMRAGAKVVNANVLTKDQTPIVWHAKDFNSLSAEGRKYIVKTSKAKGLTFLLTINE

SEQ ID NO: 16678 - protein, 85 aa, unidentified
  REGION 1..85: note = Description of Unknown:cds_NC_002645.1_cds_NP_073549.1_1 target sequence
NQAVTQIPATSIVAKQGAGDAGHSLTWLWLLCGLVCLIQFYLCFFMPYFMYDIVSSFEGYDFKYIENGQLKNFEAPLKCVRNVFE

SEQ ID NO: 16679 - protein, 85 aa, unidentified
  REGION 1..85: note = Description of Unknown:cds_NC_002645.1_cds_NP_073549.1_1 target sequence
NFEDWHYAKFGFTPLNKQSCPIVVGVSEIVNTVAGIPSNVYLVGKTLIFTLQAAFGNAGVCYDIFGVTTPEKCIFTSACTRLEGL

SEQ ID NO: 16680 - protein, 85 aa, unidentified
  REGION 1..85: note = Description of Unknown:cds_NC_002645.1_cds_NP_073549.1_1 target sequence
GGNNVYCYNTALMEGSLPYSSIQANAYYKYDNGNFIKLPEVIAQGFGFRTVRTIATKYCRVGECVESNAGVCFGFDKWFVNDGRV

SEQ ID NO: 16681 - protein, 85 aa, unidentified
  REGION 1..85: note = Description of Unknown:cds_NC_002645.1_cds_NP_073549.1_1 target sequence
ANGYVCGTGLWNLVFNILSMFSSSFSVAAMSGQILLNCALGAFAIFCCFLVTKFRRMFGDLSVGVCTVVVAVLLNNVSYIVTQNL

SEQ ID NO: 16682 - protein, 85 aa, unidentified
  REGION 1..85: note = Description of Unknown:cds_NC_002645.1_cds_NP_073549.1_1 target sequence
VTMIAYAILYFFATRSLRYAWIWCAAYLIAYISFAPWWLCAWYFLAMLTGLLPSLLKLKVSTNLFEGDKFVGTFESAAAGTFVID

SEQ ID NO: 16683 - protein, 85 aa, unidentified
  REGION 1..85: note = Description of Unknown:cds_NC_002645.1_cds_NP_073549.1_1 target sequence
MRSYEKLANSISPEKLKSYAASYNRYKYYSGNANEADYRCACYAYLAKAMLDFSRDHNDILYTPPTVSYGSTLQAGLRKMAQPSG

SEQ ID NO: 16684 - protein, 85 aa, unidentified
  REGION 1..85: note = Description of Unknown:cds_NC_002645.1_cds_NP_073549.1_1 target sequence
FVEKCVVRVCYGNTVLNGLWLGDIVYCPRHVIASNTTSAIDYDHEYSIMRLHNFSIISGTAFLGVVGATMHGVTLKIKVSQTNMH

SEQ ID NO: 16685 - protein, 85 aa, unidentified
  REGION 1..85: note = Description of Unknown:cds_NC_002645.1_cds_NP_073549.1_1 target sequence
TPRHSFRTLKSGEGFNILACYDGCAQGVFGVNMRTNWTIRGSFINGACGSPGYNLKNGEVEFVYMHQIELGSGSHVGSSFDGVMY

SEQ ID NO: 16686 - protein, 85 aa, unidentified
  REGION 1..85: note = Description of Unknown:cds_NC_002645.1_cds_NP_073549.1_1 target sequence
GGFEDQPNLQVESANQMLTVNVVAFLYAAILNGCTWWLKGEKLFVEHYNEWAQANGFTAMNGEDAFSILAAKTGVCVERLLHAIQ

SEQ ID NO: 16687 - protein, 85 aa, unidentified
  REGION 1..85: note = Description of Unknown:cds_NC_002645.1_cds_NP_073549.1_1 target sequence
VLNNGFGGKQILGYSSLNDEFSINEVVKQMFGVNLQSGKTTSMFKSISLFAGFFVMFWAELFVYTTTIWVNPGFLTPFMILLVAL

SEQ ID NO: 16688 - protein, 85 aa, unidentified
  REGION 1..85: note = Description of Unknown:cds_NC_002645.1_cds_NP_073549.1_1 target sequence
SLCLTFVVKHKVLFLQVFLLPSIIVAAIQNCAWDYHVTKVLAEKFDYNVSVMQMDIQGFVNIFICLFVALLHTWRFAKERCTHWC

SEQ ID NO: 16689 - protein, 85 aa, unidentified
  REGION 1..85: note = Description of Unknown:cds_NC_002645.1_cds_NP_073549.1_1 target sequence
TYLFSLIAVLYTALYSYDYVSLLVMLLCAISNEWYIGAIIFRICRFGVAFLPVEYVSYFDGVKTVLLFYMLLGFVSCMYYGLLYW

SEQ ID NO: 16690 - protein, 85 aa, unidentified
  REGION 1..85: note = Description of Unknown:cds_NC_002645.1_cds_NP_073549.1_1 target sequence
INRFCKCTLGVYDFCVSPAEFKYMVANGLNAPNGPFDALFLSFKLMGIGGPRTIKVSTVQSKLTDLKCTNVVLMGILSNMNIASN

SEQ ID NO: 16691 - protein, 85 aa, unidentified
  REGION 1..85: note = Description of Unknown:cds_NC_002645.1_cds_NP_073549.1_1 target sequence
SKEWAYCVEMHNKINLCDDPETAQELLLALLAFFLSKHSDFGLGDLVDSYFENDSILQSVASSFVGMPSFVAYETARQEYENAVA

SEQ ID NO: 16692 - protein, 85 aa, unidentified
  REGION 1..85: note = Description of Unknown:cds_NC_002645.1_cds_NP_073549.1_1 target sequence
NGSSPQIIKQLKKAMNVAKAEFDRESSVQKKINRMAEQAAAAMYKEARAVNRKSKVVSAMHSLLFGMLRRLDMSSVDTILNMARN

SEQ ID NO: 16693 - protein, 85 aa, unidentified
  REGION 1..85: note = Description of Unknown:cds_NC_002645.1_cds_NP_073549.1_1 target sequence
GVVPLSVIPATSAARLVVVVPDHDSFVKMMVDGFVHYAGVVWTLQEVKDNDGKNVHLKDVTKENQEILVWPLILTCERVVKLQNN

SEQ ID NO: 16694 - protein, 85 aa, unidentified
  REGION 1..85: note = Description of Unknown:cds_NC_002645.1_cds_NP_073549.1_1 target sequence
EIMPGKMKVKATKGEGDGGITSEGNALYNNEGGRAFMYAYVTTKPGMKYVKWEHDSGVVTVELEPPCRFVIDTPTGPQIKYLYFV

SEQ ID NO: 16695 - protein, 85 aa, unidentified
  REGION 1..85: note = Description of Unknown:cds_NC_002645.1_cds_NP_073549.1_1 target sequence
KNLNNLRRGAVLGYIGATVRLQAGKQTEFVSNSHLLTHCSFAVDPAAAYLDAVKQGAKPVGNCVKMLTNGSGSGQAITCTIDSNT

SEQ ID NO: 16696 - protein, 85 aa, unidentified
  REGION 1..85: note = Description of Unknown:cds_NC_002645.1_cds_NP_073549.1_1 target sequence
TQDTYGGASVCIYCRAHVAHPTMDGFCQYKGKWVQVPIGTNDPIRFCLENTVCKVCGCWLNHGCTCDRTAIQSFDNSYLNRVRGS

SEQ ID NO: 16697 - protein, 85 aa, unidentified
  REGION 1..85: note = Description of Unknown:cds_NC_002645.1_cds_NP_073549.1_1 target sequence
SAARLEPCNGTDIDYCVRAFDVYNKDASFIGKNLKSNCVRFKNVDKDDAFYIVKRCIKSVMDHEQSMYNLLKGCNAVAKHDFFTW

SEQ ID NO: 16698 - protein, 85 aa, unidentified
  REGION 1..85: note = Description of Unknown:cds_NC_002645.1_cds_NP_073549.1_1 target sequence
HEGRTIYGNVSRQDLTKYTMMDLCFALRNFDEKDCEVFKEILVLTGCCSTDYFEMKNWFDPIENEDIHRVYAALGKVVANAMLKC

SEQ ID NO: 16699 - protein, 85 aa, unidentified
  REGION 1..85: note = Description of Unknown:cds_NC_002645.1_cds_NP_073549.1_1 target sequence
VAFCDEMVLKGVVGVLTLDNQDLNGNFYDFGDFVLCPPGMGIPYCTSYYSYMMPVMGMTNCLASECFMKSDIFGQDFKTFDLLKY

SEQ ID NO: 16700 - protein, 85 aa, unidentified
  REGION 1..85: note = Description of Unknown:cds_NC_002645.1_cds_NP_073549.1_1 target sequence
DFTEHKEVLFNKYFKYWGQDYHPDCVDCHDEMCILHCSNFNTLFATTIPNTAFGPLCRKVFIDGVPVVATAGYHFKQLGLVWNKD

SEQ ID NO: 16701 - protein, 85 aa, unidentified
  REGION 1..85: note = Description of Unknown:cds_NC_002645.1_cds_NP_073549.1_1 target sequence
VNTHSTRLTITELLQFVTDPTLIVASSPALVDKRTVCFSVAALSTGLTSQTVKPGHFNKEFYDFLRSQGFFDEGSELTLKHFFFT

SEQ ID NO: 16702 - protein, 85 aa, unidentified
  REGION 1..85: note = Description of Unknown:cds_NC_002645.1_cds_NP_073549.1_1 target sequence
QKGDAAIKDFDYYRYNRPTMLDIGQARVAYQVAARYFDCYEGGCITSREVVVTNLNKSAGWPLNKFGKAGLYYESISYEEQDAIF

SEQ ID NO: 16703 - protein, 85 aa, unidentified
  REGION 1..85: note = Description of Unknown:cds_NC_002645.1_cds_NP_073549.1_1 target sequence
SLTKRNILPTMTQLNLKYAISGKERARTVGGVSLLATMTTRQFHQKCLKSIVATRNATVVIGTTKFYGGWDNMLKNLMADVDDPK

SEQ ID NO: 16704 - protein, 85 aa, unidentified
  REGION 1..85: note = Description of Unknown:cds_NC_002645.1_cds_NP_073549.1_1 target sequence
LMGWDYPKCDRAMPSMIRMLSAMILGSKHVTCCTASDKFYRLSNELAQVLTEVVYSNGGFYFKPGGTTSGDATTAYANSVFNIFQ

SEQ ID NO: 16705 - protein, 85 aa, unidentified
  REGION 1..85: note = Description of Unknown:cds_NC_002645.1_cds_NP_073549.1_1 target sequence
AVSSNINCVLSVNSSNCNNFNVKKLQRQLYDNCYRNSNVDESFVDDFYGYLQKHFSMMILSDDSVVCYNKTYAGLGYIADISAFK

SEQ ID NO: 16706 - protein, 85 aa, unidentified
  REGION 1..85: note = Description of Unknown:cds_NC_002645.1_cds_NP_073549.1_1 target sequence
ATLYYQNGVFMSTAKCWTEEDLSIGPHEFCSQHTMQIVDENGKYYLPYPDPSRIISAGVFVDDITKTDAVILLERYVSLAIDAYP

SEQ ID NO: 16707 - protein, 85 aa, unidentified
  REGION 1..85: note = Description of Unknown:cds_NC_002645.1_cds_NP_073549.1_1 target sequence
LSKHPKPEYRKVFYALLDWVKHLNKTLNEGVLESFSVTLLDEHESKFWDESFYASMYEKSTVLQAAGLCVVCGSQTVLRCGDCLR

SEQ ID NO: 16708 - protein, 85 aa, unidentified
  REGION 1..85: note = Description of Unknown:cds_NC_002645.1_cds_NP_073549.1_1 target sequence
RPMLCTKCAYDHVFGTDHKFILAITPYVCNTSGCNVNDVTKLYLGGLNYYCVDHKPHLSFPLCSAGNVFGLYKSSALGSMDIDVF

SEQ ID NO: 16709 - protein, 85 aa, unidentified
  REGION 1..85: note = Description of Unknown:cds_NC_002645.1_cds_NP_073549.1_1 target sequence
NKLSTSDWSDIRDYKLANDAKESLRLFAAETVKAKEESVKSSYAYATLKEIVGPKELLLLWESGKAKPPLNRNSVFTCFQITKDS

SEQ ID NO: 16710 - protein, 85 aa, unidentified
  REGION 1..85: note = Description of Unknown:cds_NC_002645.1_cds_NP_073549.1_1 target sequence
KFQVGEFVFEKVDYGSDTVTYKSTATTKLVPGMLFILTSHNVAPLRAPTMANQEKYSTIYKLHPSFNVSDAYANLVPYYQLIGKQ

SEQ ID NO: 16711 - protein, 85 aa, unidentified
  REGION 1..85: note = Description of Unknown:cds_NC_002645.1_cds_NP_073549.1_1 target sequence
RITTIQGPPGSGKSHCSIGIGVYYPGARIVFTACSHAAVDSLCAKAVTAYSVDKCTRIIPARARVECYSGFKPNNNSAQYVFSTV

SEQ ID NO: 16712 - protein, 85 aa, unidentified
  REGION 1..85: note = Description of Unknown:cds_NC_002645.1_cds_NP_073549.1_1 target sequence
NALPEVNADIVVVDEVSMCTNYDLSVINQRISYKHIVYVGDPQQLPAPRVLISKGVMEPIDYNVVTQRMCAIGPDVFLHKCYRCP

SEQ ID NO: 16713 - protein, 85 aa, unidentified
  REGION 1..85: note = Description of Unknown:cds_NC_002645.1_cds_NP_073549.1_1 target sequence
AEIVNTVSELVYENKFVPVKEASKQCFKIFERGSVQVDNGSSINRRQLDVVKRFIHKNSTWSKAVFISPYNSQNYVAARLLGLQT

SEQ ID NO: 16714 - protein, 85 aa, unidentified
  REGION 1..85: note = Description of Unknown:cds_NC_002645.1_cds_NP_073549.1_1 target sequence
QTVDSAQGSEYDYVIFAQTSDTAHACNANRFNVAITRAKKGIFCIMSDRTLFDALKFFEITMTDLQSESSCGLFKDCARNPIDLP

SEQ ID NO: 16715 - protein, 85 aa, unidentified
  REGION 1..85: note = Description of Unknown:cds_NC_002645.1_cds_NP_073549.1_1 target sequence
PSHATTYLSLSDRFKTSGDLAVQIGNNNVCTYEHVISYMGFRFDVSMPGSHSLFCTRDFAMRHVRGWLGMDVEGAHVTGDNVGTN

SEQ ID NO: 16716 - protein, 85 aa, unidentified
  REGION 1..85: note = Description of Unknown:cds_NC_002645.1_cds_NP_073549.1_1 target sequence
VPLQVGFSNGVDFVAQPEGCVLTNTGSVVKPVRARAPPGEQFTHIVPLLRKGQPWSVLRKRIVQMIADFLAGSSDVLVFVLWAGG

SEQ ID NO: 16717 - protein, 85 aa, unidentified
  REGION 1..85: note = Description of Unknown:cds_NC_002645.1_cds_NP_073549.1_1 target sequence
LELTTMRYFVKIGAVKHCQCGTVATCYNSVSNDYCCFKHALGCDYVYNPYVIDIQQWGYVGSLSTNHHAICNVHRNEHVASGDAI

SEQ ID NO: 16718 - protein, 85 aa, unidentified
  REGION 1..85: note = Description of Unknown:cds_NC_002645.1_cds_NP_073549.1_1 target sequence
MTRCLAVYDCFVKNVDWSITYPMIANENAINKGGRTVQSHIMRAAIKLYNPKAIHDIGNPKGIRCAVTDAKWYCYDKNPINSNVK

SEQ ID NO: 16719 - protein, 85 aa, unidentified
  REGION 1..85: note = Description of Unknown:cds_NC_002645.1_cds_NP_073549.1_1 target sequence
TLEYDYMTHGQMDGLCLFWNCNVDMYPEFSIVCRFDTRTRSTLNLEGVNGGSLYVNNHAFHTPAYDKRAMAKLKPAPFFYYDDGS

SEQ ID NO: 16720 - protein, 85 aa, unidentified
  REGION 1..85: note = Description of Unknown:cds_NC_002645.1_cds_NP_073549.1_1 target sequence
CEVVHDQVNYVPLRATNCITKCNIGGAVCSKHANLYRAYVESYNIFTQAGFNIWVPTTFDCYNLWQTFTEVNLQGLENIAFNVVN

SEQ ID NO: 16721 - protein, 85 aa, unidentified
  REGION 1..85: note = Description of Unknown:cds_NC_002645.1_cds_NP_073549.1_1 target sequence
KGSFVGADGELPVAISGDKVFVRDGNTDNLVFVNKTSLPTNIAFELFAKRKVGLTPPLSILKNLGVVATYKFVLWDYEAERPLTS

SEQ ID NO: 16722 - protein, 85 aa, unidentified
  REGION 1..85: note = Description of Unknown:cds_NC_002645.1_cds_NP_073549.1_1 target sequence
FTKSVCGYTDFAEDVCTCYDNSIQGSYERFTLSTNAVLFSATAVKTGGKSLPAIKLNFGMLNGNAIATVKSEDGNIKNINWFVYV

SEQ ID NO: 16723 - protein, 85 aa, unidentified
  REGION 1..85: note = Description of Unknown:cds_NC_002645.1_cds_NP_073549.1_1 target sequence
RKDGKPVDHYDGFYTQGRNLQDFLPRSTMEEDFLNMDIGVFIQKYGLEDFNFEHVVYGDVSKTTLGGLHLLISQVRLSKMGILKA

SEQ ID NO: 16724 - protein, 85 aa, unidentified
  REGION 1..85: note = Description of Unknown:cds_NC_002645.1_cds_NP_073549.1_1 target sequence
EEFVAASDITLKCCTVTYLNDPSSKTVCTYMDLLLDDFVSVLKSLDLTVVSKVHEVIIDNKPWRWMLWCKDNAVATFYPQLQSAE

SEQ ID NO: 16725 - protein, 85 aa, unidentified
  REGION 1..85: note = Description of Unknown:cds_NC_002645.1_cds_NP_073549.1_1 target sequence
WKCGYSMPGIYKTQRMCLEPCNLYNYGAGLKLPSGIMFNVVKYTQLCQYFNSTTLCVPHNMRVLHLGAGSDYGVAPGTAVLKRWL

SEQ ID NO: 16726 - protein, 85 aa, unidentified
  REGION 1..85: note = Description of Unknown:cds_NC_002645.1_cds_NP_073549.1_1 target sequence
PHDAIVVDNDVVDYVSDADFSVTGDCATVYLEDKFDLLISDMYDGRTKAIDGENVSKEGFFTYINGFICEKLAIGGSIAIKVTEY

SEQ ID NO: 16727 - protein, 85 aa, unidentified
  REGION 1..85: note = Description of Unknown:cds_NC_002645.1_cds_NP_073549.1_1 target sequence
SWNKKLYELVQRFSFWTMFCTSVNTSSSEAFVVGINYLGDFAQGPFIDGNIIHANYVFWRNSTVMSLSYNSVLDLSKFNCKHKAT

SEQ ID NO: 16728 - protein, 84 aa, unidentified
  REGION 1..84: note = Description of Unknown:cds_NC_002645.1_cds_NP_073549.1_1 target sequence
GPFIDGNIIHANYVFWRNSTVMSLSYNSVLDLSKFNCKHKATVVVQLKDSDINEMVLSLVRSGKLLVRGNGKCLSFSNHLVSTK

SEQ ID NO: 16729 - protein, 85 aa, unidentified
  REGION 1..85: note = Description of Unknown:cds_NC_002645.1_cds_NP_073549.1_1 target sequence
RRYSEAASNGFRACRFVSLDLQDCIVGIADDTYVMGLHGNQTLFCNIMKFSDRPFMLHGWLVFSNSNYLLEEFDVVFGKRGGGNV

SEQ ID NO: 16730 - protein, 85 aa, unidentified
  REGION 1..85: note = Description of Unknown:cds_NC_002645.1_cds_NP_073549.1_1 target sequence
TYTDQYLCGADGKPVMSEDLWQFVDHFGENEEIIINGHTYVCAWLTKRKPLDYKRQNNLAIEEIEYVHGDALHTLRNGSVLEMAK

SEQ ID NO: 16731 - protein, 85 aa, unidentified
  REGION 1..85: note = Description of Unknown:cds_NC_002645.1_cds_NP_073549.1_1 target sequence
EVKTSSKVVLSDALDKLYKVFGSPVMTNGSNILEAFTKPVFISALVQCTCGTKSWSVGDWTGFKSSCCNVISNKLCVVPGNVKPG

SEQ ID NO: 16732 - protein, 85 aa, unidentified
  REGION 1..85: note = Description of Unknown:cds_NC_002645.1_cds_NP_073549.1_1 target sequence
DAVITTQQAGAGIKYFCGMTLKFVANIEGVSVWRVIALQSVDCFVASSTFVEEEHVNRMDTFCFNVRNSVTDECRLAMLGAEMTS

SEQ ID NO: 16733 - protein, 85 aa, unidentified
  REGION 1..85: note = Description of Unknown:cds_NC_002645.1_cds_NP_073549.1_1 target sequence
NVRRQVASGVIDISTGWFDVYDDIFAESKPWFVRKAEDIFGPCWSALASALKQLKVTTGELVRFVKSICNSAVAVVGGTIQILAS

SEQ ID NO: 16734 - protein, 85 aa, unidentified
  REGION 1..85: note = Description of Unknown:cds_NC_002645.1_cds_NP_073549.1_1 target sequence
VPEKFLNAFDVFVTAIQTVFDCAVETCTIAGKAFDKVFDYVLLDNALVKLVTTKLKGVRERGLNKVKYATVVVGSTEEVKSSRVE

SEQ ID NO: 16735 - protein, 85 aa, unidentified
  REGION 1..85: note = Description of Unknown:cds_NC_002645.1_cds_NP_073549.1_1 target sequence
RSTAVLTIANNYSKLFDEGYTVVIGDVAYFVSDGYFRLMASPNSVLTTAVYKPLFAFNVNVMGTRPEKFPTTVTCENLESAVLFV

SEQ ID NO: 16736 - protein, 85 aa, unidentified
  REGION 1..85: note = Description of Unknown:cds_NC_002645.1_cds_NP_073549.1_1 target sequence
NDKITEFQLDYSIDVIDNEIIVKPNISLCVPLYVRDYVDKWDDFCRQYSNESWFEDDYRAFISVLDITDAAVKAAESKAFVDTIV

SEQ ID NO: 16737 - protein, 85 aa, unidentified
  REGION 1..85: note = Description of Unknown:cds_NC_002645.1_cds_NP_073549.1_1 target sequence
PPCPSILKVIDGGKIWNGVIKNVNSVRDWLKSLKLNLTQQGLLGTCAKRFKRWLGILLEAYNAFLDTVVSTVKIGGLTFKTYAFD

SEQ ID NO: 16738 - protein, 85 aa, unidentified
  REGION 1..85: note = Description of Unknown:cds_NC_002645.1_cds_NP_073549.1_1 target sequence
KPYIVIRDIVCKVENKTEAEWIELFPHNDRIKSFSTFESAYMPIADPTHFDIEEVELLDAEFVEPGCGGILAVIDEHVFYKKDGV

SEQ ID NO: 16739 - protein, 85 aa, unidentified
  REGION 1..85: note = Description of Unknown:cds_NC_002645.1_cds_NP_073549.1_1 target sequence
YYPSNGTNILPVAFTKAAGGKVSFSDDVEVKDIEPVYRVKLCFEFEDEKLVDVCEKAIGKKIKHEGDWDSFCKTIQSALSVVSCY

SEQ ID NO: 16740 - protein, 85 aa, unidentified
  REGION 1..85: note = Description of Unknown:cds_NC_002645.1_cds_NP_073549.1_1 target sequence
VNLPTYYIYDEEGGNDLSLPVMISEWPLSVQQAQQEATLPDIAEDVVDQVEEVNSIFDIETVDVKHDVSPFEMPFEELNGLKILK

SEQ ID NO: 16741 - protein, 85 aa, unidentified
  REGION 1..85: note = Description of Unknown:cds_NC_002645.1_cds_NP_073549.1_1 target sequence
QLDNNCWVNSVMLQIQLTGILDGDYAMQFFKMGRVAKMIERCYTAEQCIRGAMGDVGLCMYRLLKDLHTGFMVMDYKCSCTSGRL

SEQ ID NO: 16742 - protein, 85 aa, unidentified
  REGION 1..85: note = Description of Unknown:cds_NC_002645.1_cds_NP_073549.1_1 target sequence
EESGAVLFCTPTKKAFPYGTCLNCNAPRMCTIRQLQGTIIFVQQKPEPVNPVSFVVKPVCSSIFRGAVSCGHYQTNIYSQNLCVD

SEQ ID NO: 16743 - protein, 85 aa, unidentified
  REGION 1..85: note = Description of Unknown:cds_NC_002645.1_cds_NP_073549.1_1 target sequence
GFGVNKIQPWTNDALNTICIKDADYNAKVEISVTPIKNTVDTTPKEEFVVKEKLNAFLVHDNVAFYQGDVDTVVNGVDFDFIVNA

SEQ ID NO: 16744 - protein, 85 aa, unidentified
  REGION 1..85: note = Description of Unknown:cds_NC_002645.1_cds_NP_073549.1_1 target sequence
ANENLAHGGGLAKALDVYTKGKLQRLSKEHIGLAGKVKVGTGVMVECDSLRIFNVVGPRKGKHERDLLIKAYNTINNEQGTPLTP

SEQ ID NO: 16745 - protein, 85 aa, unidentified
  REGION 1..85: note = Description of Unknown:cds_NC_002645.1_cds_NP_073549.1_1 target sequence
ILSCGIFGIKLETSLEVLLDVCNTKEVKVFVYTDTEVCKVKDFVSGLVNVQKVEQPKIEPKPVSVIKVAPKPYRVDGKFSYFTED

SEQ ID NO: 16746 - protein, 85 aa, unidentified
  REGION 1..85: note = Description of Unknown:cds_NC_002645.1_cds_NP_073549.1_1 target sequence
LLCVADDKPIVLFTDSMLTLDDRGLALDNALSGVLSAAIKDCVDINKAIPSGNLIKFDIGSVVVYMCVVPSEKDKHLDNNVQRCT

SEQ ID NO: 16747 - protein, 85 aa, unidentified
  REGION 1..85: note = Description of Unknown:cds_NC_002645.1_cds_NP_073549.1_1 target sequence
RKLNRLMCDIVCTIPADYILPLVLSSLTCNVSFVGELKAAEAKVITIKVTEDGVNVHDVTVTTDKSFEQQVGVIADKDKDLSGAV

SEQ ID NO: 16748 - protein, 85 aa, unidentified
  REGION 1..85: note = Description of Unknown:cds_NC_002645.1_cds_NP_073549.1_1 target sequence
PSDLNTSELLTKAIDVDWVEFYGFKDAVTFATVDHSAFAYESAVVNGIRVLKTSDNNCWVNAVCIALQYSKPHFISQGLDAAWNK

SEQ ID NO: 16749 - protein, 85 aa, unidentified
  REGION 1..85: note = Description of Unknown:cds_NC_002645.1_cds_NP_073549.1_1 target sequence
FVLGDVEIFVAFVYYVARLMKGDKGDAEDTLTKLSKYLANEAQVQLEHYSSCVECDAKFKNSVASINSAIVCASVKRDGVQVGYC

SEQ ID NO: 16750 - protein, 85 aa, unidentified
  REGION 1..85: note = Description of Unknown:cds_NC_002645.1_cds_NP_073549.1_1 target sequence
VHGIKYYSRVRSVRGRAIIVSVEQLEPCAQSRLLSGVAYTAFSGPVDKGHYTVYDTAKKSMYDGDRFVKHDLSLLSVTSVVMVGG

SEQ ID NO: 16751 - protein, 85 aa, unidentified
  REGION 1..85: note = Description of Unknown:cds_NC_002645.1_cds_NP_073549.1_1 target sequence
YVAPVNTVKPKPVINQLDEKAQKFFDFGDFLIHNFVIFFTWLLSMFTLCKTAVTTGDVKIMAKAPQRTGVVLKRSLKYNLKASAA

SEQ ID NO: 16752 - protein, 85 aa, unidentified
  REGION 1..85: note = Description of Unknown:cds_NC_002645.1_cds_NP_073549.1_1 target sequence
VLKSKWWLLAKFTKLLLLIYTLYSVVLLCVRFGPFNFCSETVNGYAKSNFVKDDYCDGSLGCKMCLFGYQELSQFSHLDVVWKHI

SEQ ID NO: 16753 - protein, 85 aa, unidentified
  REGION 1..85: note = Description of Unknown:cds_NC_002645.1_cds_NP_073549.1_1 target sequence
TDPLFSNMQPFIVMVLLLIFGDNYLRCFLLYFVAQMISTVGVFLGYKETNWFLHFIPFDVICDELLVTVIVIKVISFVRHVLFGC

SEQ ID NO: 16754 - protein, 85 aa, unidentified
  REGION 1..85: note = Description of Unknown:cds_NC_002645.1_cds_NP_073549.1_1 target sequence
ENPDCIACSKSARLKRFPVNTIVNGVQRSFYVNANGGSKFCKKHRFFCVDCDSYGYGSTFITPEVSRELGNITKTNVQPTGPAYV

SEQ ID NO: 16755 - protein, 85 aa, unidentified
  REGION 1..85: note = Description of Unknown:cds_NC_002645.1_cds_NP_073549.1_1 target sequence
MIDKVEFENGFYRLYSCETFWRYNFDITESKYSCKEVFKNCNVLDDFIVFNNNGTNVTQVKNASVYFSQLLCRPIKLVDSELLST

SEQ ID NO: 16756 - protein, 85 aa, unidentified
  REGION 1..85: note = Description of Unknown:cds_NC_002645.1_cds_NP_073549.1_1 target sequence
LSVDFNGVLHKAYIDVLRNSFGKDLNANMSLAECKRALGLSISDHEFTSAISNAHRCDVLLSDLSFNNFVSSYAKPEEKLSAYDL

SEQ ID NO: 16757 - protein, 85 aa, unidentified
  REGION 1..85: note = Description of Unknown:cds_NC_002645.1_cds_NP_073549.1_1 target sequence
ACCMRAGAKVVNANVLTKDQTPIVWHAKDFNSLSAEGRKYIVKTSKAKGLTFLLTINENQAVTQIPATSIVAKQGAGDAGHSLTW

SEQ ID NO: 16758 - protein, 85 aa, unidentified
  REGION 1..85: note = Description of Unknown:cds_NC_002645.1_cds_NP_073549.1_1 target sequence
LWLLCGLVCLIQFYLCFFMPYFMYDIVSSFEGYDFKYIENGQLKNFEAPLKCVRNVFENFEDWHYAKFGFTPLNKQSCPIVVGVS

SEQ ID NO: 16759 - protein, 85 aa, unidentified
  REGION 1..85: note = Description of Unknown:cds_NC_002645.1_cds_NP_073549.1_1 target sequence
EIVNTVAGIPSNVYLVGKTLIFTLQAAFGNAGVCYDIFGVTTPEKCIFTSACTRLEGLGGNNVYCYNTALMEGSLPYSSIQANAY

SEQ ID NO: 16760 - protein, 85 aa, unidentified
  REGION 1..85: note = Description of Unknown:cds_NC_002645.1_cds_NP_073549.1_1 target sequence
YKYDNGNFIKLPEVIAQGFGFRTVRTIATKYCRVGECVESNAGVCFGFDKWFVNDGRVANGYVCGTGLWNLVFNILSMFSSSFSV

SEQ ID NO: 16761 - protein, 85 aa, unidentified
  REGION 1..85: note = Description of Unknown:cds_NC_002645.1_cds_NP_073549.1_1 target sequence
AAMSGQILLNCALGAFAIFCCFLVTKFRRMFGDLSVGVCTVVVAVLLNNVSYIVTQNLVTMIAYAILYFFATRSLRYAWIWCAAY

SEQ ID NO: 16762 - protein, 85 aa, unidentified
  REGION 1..85: note = Description of Unknown:cds_NC_002645.1_cds_NP_073549.1_1 target sequence
LIAYISFAPWWLCAWYFLAMLTGLLPSLLKLKVSTNLFEGDKFVGTFESAAAGTFVIDMRSYEKLANSISPEKLKSYAASYNRYK

SEQ ID NO: 16763 - protein, 85 aa, unidentified
  REGION 1..85: note = Description of Unknown:cds_NC_002645.1_cds_NP_073549.1_1 target sequence
YYSGNANEADYRCACYAYLAKAMLDFSRDHNDILYTPPTVSYGSTLQAGLRKMAQPSGFVEKCVVRVCYGNTVLNGLWLGDIVYC

SEQ ID NO: 16764 - protein, 85 aa, unidentified
  REGION 1..85: note = Description of Unknown:cds_NC_002645.1_cds_NP_073549.1_1 target sequence
PRHVIASNTTSAIDYDHEYSIMRLHNFSIISGTAFLGVVGATMHGVTLKIKVSQTNMHTPRHSFRTLKSGEGFNILACYDGCAQG

SEQ ID NO: 16765 - protein, 85 aa, unidentified
  REGION 1..85: note = Description of Unknown:cds_NC_002645.1_cds_NP_073549.1_1 target sequence
VFGVNMRTNWTIRGSFINGACGSPGYNLKNGEVEFVYMHQIELGSGSHVGSSFDGVMYGGFEDQPNLQVESANQMLTVNVVAFLY

SEQ ID NO: 16766 - protein, 85 aa, unidentified
  REGION 1..85: note = Description of Unknown:cds_NC_002645.1_cds_NP_073549.1_1 target sequence
AAILNGCTWWLKGEKLFVEHYNEWAQANGFTAMNGEDAFSILAAKTGVCVERLLHAIQVLNNGFGGKQILGYSSLNDEFSINEVV

SEQ ID NO: 16767 - protein, 85 aa, unidentified
  REGION 1..85: note = Description of Unknown:cds_NC_002645.1_cds_NP_073549.1_1 target sequence
KQMFGVNLQSGKTTSMFKSISLFAGFFVMFWAELFVYTTTIWVNPGFLTPFMILLVALSLCLTFVVKHKVLFLQVFLLPSIIVAA

SEQ ID NO: 16768 - protein, 85 aa, unidentified
  REGION 1..85: note = Description of Unknown:cds_NC_002645.1_cds_NP_073549.1_1 target sequence
IQNCAWDYHVTKVLAEKFDYNVSVMQMDIQGFVNIFICLFVALLHTWRFAKERCTHWCTYLFSLIAVLYTALYSYDYVSLLVMLL

SEQ ID NO: 16769 - protein, 85 aa, unidentified
  REGION 1..85: note = Description of Unknown:cds_NC_002645.1_cds_NP_073549.1_1 target sequence
CAISNEWYIGAIIFRICRFGVAFLPVEYVSYFDGVKTVLLFYMLLGFVSCMYYGLLYWINRFCKCTLGVYDFCVSPAEFKYMVAN

SEQ ID NO: 16770 - protein, 85 aa, unidentified
  REGION 1..85: note = Description of Unknown:cds_NC_002645.1_cds_NP_073549.1_1 target sequence
GLNAPNGPFDALFLSFKLMGIGGPRTIKVSTVQSKLTDLKCTNVVLMGILSNMNIASNSKEWAYCVEMHNKINLCDDPETAQELL

SEQ ID NO: 16771 - protein, 85 aa, unidentified
  REGION 1..85: note = Description of Unknown:cds_NC_002645.1_cds_NP_073549.1_1 target sequence
LALLAFFLSKHSDFGLGDLVDSYFENDSILQSVASSFVGMPSFVAYETARQEYENAVANGSSPQIIKQLKKAMNVAKAEFDRESS

SEQ ID NO: 16772 - protein, 85 aa, unidentified
  REGION 1..85: note = Description of Unknown:cds_NC_002645.1_cds_NP_073549.1_1 target sequence
VQKKINRMAEQAAAAMYKEARAVNRKSKVVSAMHSLLFGMLRRLDMSSVDTILNMARNGVVPLSVIPATSAARLVVVVPDHDSFV

SEQ ID NO: 16773 - protein, 85 aa, unidentified
  REGION 1..85: note = Description of Unknown:cds_NC_002645.1_cds_NP_073549.1_1 target sequence
KMMVDGFVHYAGVVWTLQEVKDNDGKNVHLKDVTKENQEILVWPLILTCERVVKLQNNEIMPGKMKVKATKGEGDGGITSEGNAL

SEQ ID NO: 16774 - protein, 85 aa, unidentified
  REGION 1..85: note = Description of Unknown:cds_NC_002645.1_cds_NP_073549.1_1 target sequence
YNNEGGRAFMYAYVTTKPGMKYVKWEHDSGVVTVELEPPCRFVIDTPTGPQIKYLYFVKNLNNLRRGAVLGYIGATVRLQAGKQT

SEQ ID NO: 16775 - protein, 85 aa, unidentified
  REGION 1..85: note = Description of Unknown:cds_NC_002645.1_cds_NP_073549.1_1 target sequence
EFVSNSHLLTHCSFAVDPAAAYLDAVKQGAKPVGNCVKMLTNGSGSGQAITCTIDSNTTQDTYGGASVCIYCRAHVAHPTMDGFC

SEQ ID NO: 16776 - protein, 85 aa, unidentified
  REGION 1..85: note = Description of Unknown:cds_NC_002645.1_cds_NP_073549.1_1 target sequence
QYKGKWVQVPIGTNDPIRFCLENTVCKVCGCWLNHGCTCDRTAIQSFDNSYLNRVRGSSAARLEPCNGTDIDYCVRAFDVYNKDA

SEQ ID NO: 16777 - protein, 85 aa, unidentified
  REGION 1..85: note = Description of Unknown:cds_NC_002645.1_cds_NP_073549.1_1 target sequence
SFIGKNLKSNCVRFKNVDKDDAFYIVKRCIKSVMDHEQSMYNLLKGCNAVAKHDFFTWHEGRTIYGNVSRQDLTKYTMMDLCFAL

SEQ ID NO: 16778 - protein, 85 aa, unidentified
  REGION 1..85: note = Description of Unknown:cds_NC_002645.1_cds_NP_073549.1_1 target sequence
RNFDEKDCEVFKEILVLTGCCSTDYFEMKNWFDPIENEDIHRVYAALGKVVANAMLKCVAFCDEMVLKGVVGVLTLDNQDLNGNF

SEQ ID NO: 16779 - protein, 85 aa, unidentified
  REGION 1..85: note = Description of Unknown:cds_NC_002645.1_cds_NP_073549.1_1 target sequence
YDFGDFVLCPPGMGIPYCTSYYSYMMPVMGMTNCLASECFMKSDIFGQDFKTFDLLKYDFTEHKEVLFNKYFKYWGQDYHPDCVD

SEQ ID NO: 16780 - protein, 85 aa, unidentified
  REGION 1..85: note = Description of Unknown:cds_NC_002645.1_cds_NP_073549.1_1 target sequence
CHDEMCILHCSNFNTLFATTIPNTAFGPLCRKVFIDGVPVVATAGYHFKQLGLVWNKDVNTHSTRLTITELLQFVTDPTLIVASS

SEQ ID NO: 16781 - protein, 85 aa, unidentified
  REGION 1..85: note = Description of Unknown:cds_NC_002645.1_cds_NP_073549.1_1 target sequence
PALVDKRTVCFSVAALSTGLTSQTVKPGHFNKEFYDFLRSQGFFDEGSELTLKHFFFTQKGDAAIKDFDYYRYNRPTMLDIGQAR

SEQ ID NO: 16782 - protein, 85 aa, unidentified
  REGION 1..85: note = Description of Unknown:cds_NC_002645.1_cds_NP_073549.1_1 target sequence
VAYQVAARYFDCYEGGCITSREVVVTNLNKSAGWPLNKFGKAGLYYESISYEEQDAIFSLTKRNILPTMTQLNLKYAISGKERAR

SEQ ID NO: 16783 - protein, 85 aa, unidentified
  REGION 1..85: note = Description of Unknown:cds_NC_002645.1_cds_NP_073549.1_1 target sequence
TVGGVSLLATMTTRQFHQKCLKSIVATRNATVVIGTTKFYGGWDNMLKNLMADVDDPKLMGWDYPKCDRAMPSMIRMLSAMILGS

SEQ ID NO: 16784 - protein, 85 aa, unidentified
  REGION 1..85: note = Description of Unknown:cds_NC_002645.1_cds_NP_073549.1_1 target sequence
KHVTCCTASDKFYRLSNELAQVLTEVVYSNGGFYFKPGGTTSGDATTAYANSVFNIFQAVSSNINCVLSVNSSNCNNFNVKKLQR

SEQ ID NO: 16785 - protein, 85 aa, unidentified
  REGION 1..85: note = Description of Unknown:cds_NC_002645.1_cds_NP_073549.1_1 target sequence
QLYDNCYRNSNVDESFVDDFYGYLQKHFSMMILSDDSVVCYNKTYAGLGYIADISAFKATLYYQNGVFMSTAKCWTEEDLSIGPH

SEQ ID NO: 16786 - protein, 85 aa, unidentified
  REGION 1..85: note = Description of Unknown:cds_NC_002645.1_cds_NP_073549.1_1 target sequence
EFCSQHTMQIVDENGKYYLPYPDPSRIISAGVFVDDITKTDAVILLERYVSLAIDAYPLSKHPKPEYRKVFYALLDWVKHLNKTL

SEQ ID NO: 16787 - protein, 85 aa, unidentified
  REGION 1..85: note = Description of Unknown:cds_NC_002645.1_cds_NP_073549.1_1 target sequence
NEGVLESFSVTLLDEHESKFWDESFYASMYEKSTVLQAAGLCVVCGSQTVLRCGDCLRRPMLCTKCAYDHVFGTDHKFILAITPY

SEQ ID NO: 16788 - protein, 85 aa, unidentified
  REGION 1..85: note = Description of Unknown:cds_NC_002645.1_cds_NP_073549.1_1 target sequence
VCNTSGCNVNDVTKLYLGGLNYYCVDHKPHLSFPLCSAGNVFGLYKSSALGSMDIDVFNKLSTSDWSDIRDYKLANDAKESLRLF

SEQ ID NO: 16789 - protein, 85 aa, unidentified
  REGION 1..85: note = Description of Unknown:cds_NC_002645.1_cds_NP_073549.1_1 target sequence
AAETVKAKEESVKSSYAYATLKEIVGPKELLLLWESGKAKPPLNRNSVFTCFQITKDSKFQVGEFVFEKVDYGSDTVTYKSTATT

SEQ ID NO: 16790 - protein, 85 aa, unidentified
  REGION 1..85: note = Description of Unknown:cds_NC_002645.1_cds_NP_073549.1_1 target sequence
KLVPGMLFILTSHNVAPLRAPTMANQEKYSTIYKLHPSFNVSDAYANLVPYYQLIGKQRITTIQGPPGSGKSHCSIGIGVYYPGA

SEQ ID NO: 16791 - protein, 85 aa, unidentified
  REGION 1..85: note = Description of Unknown:cds_NC_002645.1_cds_NP_073549.1_1 target sequence
RIVFTACSHAAVDSLCAKAVTAYSVDKCTRIIPARARVECYSGFKPNNNSAQYVFSTVNALPEVNADIVVVDEVSMCTNYDLSVI

SEQ ID NO: 16792 - protein, 85 aa, unidentified
  REGION 1..85: note = Description of Unknown:cds_NC_002645.1_cds_NP_073549.1_1 target sequence
NQRISYKHIVYVGDPQQLPAPRVLISKGVMEPIDYNVVTQRMCAIGPDVFLHKCYRCPAEIVNTVSELVYENKFVPVKEASKQCF

SEQ ID NO: 16793 - protein, 85 aa, unidentified
  REGION 1..85: note = Description of Unknown:cds_NC_002645.1_cds_NP_073549.1_1 target sequence
KIFERGSVQVDNGSSINRRQLDVVKRFIHKNSTWSKAVFISPYNSQNYVAARLLGLQTQTVDSAQGSEYDYVIFAQTSDTAHACN

SEQ ID NO: 16794 - protein, 85 aa, unidentified
  REGION 1..85: note = Description of Unknown:cds_NC_002645.1_cds_NP_073549.1_1 target sequence
ANRFNVAITRAKKGIFCIMSDRTLFDALKFFEITMTDLQSESSCGLFKDCARNPIDLPPSHATTYLSLSDRFKTSGDLAVQIGNN

SEQ ID NO: 16795 - protein, 85 aa, unidentified
  REGION 1..85: note = Description of Unknown:cds_NC_002645.1_cds_NP_073549.1_1 target sequence
NVCTYEHVISYMGFRFDVSMPGSHSLFCTRDFAMRHVRGWLGMDVEGAHVTGDNVGTNVPLQVGFSNGVDFVAQPEGCVLTNTGS

SEQ ID NO: 16796 - protein, 85 aa, unidentified
  REGION 1..85: note = Description of Unknown:cds_NC_002645.1_cds_NP_073549.1_1 target sequence
VVKPVRARAPPGEQFTHIVPLLRKGQPWSVLRKRIVQMIADFLAGSSDVLVFVLWAGGLELTTMRYFVKIGAVKHCQCGTVATCY

SEQ ID NO: 16797 - protein, 85 aa, unidentified
  REGION 1..85: note = Description of Unknown:cds_NC_002645.1_cds_NP_073549.1_1 target sequence
NSVSNDYCCFKHALGCDYVYNPYVIDIQQWGYVGSLSTNHHAICNVHRNEHVASGDAIMTRCLAVYDCFVKNVDWSITYPMIANE

SEQ ID NO: 16798 - protein, 85 aa, unidentified
  REGION 1..85: note = Description of Unknown:cds_NC_002645.1_cds_NP_073549.1_1 target sequence
NAINKGGRTVQSHIMRAAIKLYNPKAIHDIGNPKGIRCAVTDAKWYCYDKNPINSNVKTLEYDYMTHGQMDGLCLFWNCNVDMYP

SEQ ID NO: 16799 - protein, 85 aa, unidentified
  REGION 1..85: note = Description of Unknown:cds_NC_002645.1_cds_NP_073549.1_1 target sequence
EFSIVCRFDTRTRSTLNLEGVNGGSLYVNNHAFHTPAYDKRAMAKLKPAPFFYYDDGSCEVVHDQVNYVPLRATNCITKCNIGGA

SEQ ID NO: 16800 - protein, 85 aa, unidentified
  REGION 1..85: note = Description of Unknown:cds_NC_002645.1_cds_NP_073549.1_1 target sequence
VCSKHANLYRAYVESYNIFTQAGFNIWVPTTFDCYNLWQTFTEVNLQGLENIAFNVVNKGSFVGADGELPVAISGDKVFVRDGNT

SEQ ID NO: 16801 - protein, 85 aa, unidentified
  REGION 1..85: note = Description of Unknown:cds_NC_002645.1_cds_NP_073549.1_1 target sequence
DNLVFVNKTSLPTNIAFELFAKRKVGLTPPLSILKNLGVVATYKFVLWDYEAERPLTSFTKSVCGYTDFAEDVCTCYDNSIQGSY

SEQ ID NO: 16802 - protein, 85 aa, unidentified
  REGION 1..85: note = Description of Unknown:cds_NC_002645.1_cds_NP_073549.1_1 target sequence
ERFTLSTNAVLFSATAVKTGGKSLPAIKLNFGMLNGNAIATVKSEDGNIKNINWFVYVRKDGKPVDHYDGFYTQGRNLQDFLPRS

SEQ ID NO: 16803 - protein, 85 aa, unidentified
  REGION 1..85: note = Description of Unknown:cds_NC_002645.1_cds_NP_073549.1_1 target sequence
TMEEDFLNMDIGVFIQKYGLEDFNFEHVVYGDVSKTTLGGLHLLISQVRLSKMGILKAEEFVAASDITLKCCTVTYLNDPSSKTV

SEQ ID NO: 16804 - protein, 85 aa, unidentified
  REGION 1..85: note = Description of Unknown:cds_NC_002645.1_cds_NP_073549.1_1 target sequence
CTYMDLLLDDFVSVLKSLDLTVVSKVHEVIIDNKPWRWMLWCKDNAVATFYPQLQSAEWKCGYSMPGIYKTQRMCLEPCNLYNYG

SEQ ID NO: 16805 - protein, 85 aa, unidentified
  REGION 1..85: note = Description of Unknown:cds_NC_002645.1_cds_NP_073549.1_1 target sequence
AGLKLPSGIMFNVVKYTQLCQYFNSTTLCVPHNMRVLHLGAGSDYGVAPGTAVLKRWLPHDAIVVDNDVVDYVSDADFSVTGDCA

SEQ ID NO: 16806 - protein, 85 aa, unidentified
  REGION 1..85: note = Description of Unknown:cds_NC_002645.1_cds_NP_073549.1_1 target sequence
TVYLEDKFDLLISDMYDGRTKAIDGENVSKEGFFTYINGFICEKLAIGGSIAIKVTEYSWNKKLYELVQRFSFWTMFCTSVNTSS

SEQ ID NO: 16807 - protein, 85 aa, unidentified
  REGION 1..85: note = Description of Unknown:cds_NC_002645.1_cds_NP_073549.1_1 target sequence
SEAFVVGINYLGDFAQGPFIDGNIIHANYVFWRNSTVMSLSYNSVLDLSKFNCKHKATVVVQLKDSDINEMVLSLVRSGKLLVRG

SEQ ID NO: 16808 - protein, 84 aa, unidentified
  REGION 1..84: note = Description of Unknown:cds_NC_019843.3_cds_YP_009047203.1_2 target sequence
ASVCLYCRAHIEHPDVSGVCKYKGKFVQIPAQCVRDPVGFCLSNTPCNVCQYWIGYGCNCDSLRQAALPQSKDSNFLNESGVLL

SEQ ID NO: 16809 - protein, 84 aa, unidentified
  REGION 1..84: note = Description of Unknown:cds_NC_034440.1_cds_YP_009361855.1_2 target sequence
ASVCLYCRAHIEHPDVSGVCKYKGKFVQIPSQCTRDPVGFCLTNTPCNVCQYWIGYGCNCDSLRQAALPQSKDSNFLNESGVLL

SEQ ID NO: 16810 - protein, 84 aa, unidentified
  REGION 1..84: note = Description of Unknown:cds_NC_010438.1_cds_YP_001718611.1_2 target sequence
GASVCLYCRAHIDHPSMDGFCQFKGRYVQVPIGTVDPIRYCLENDICKVCHCWLNNGCTCDRTTVVQSLDNNYLNECGALVQLD

SEQ ID NO: 16811 - protein, 85 aa, unidentified
  REGION 1..85: note = Description of Unknown:cds_NC_002645.1_cds_NP_073550.1_2 target sequence
TQDTYGGASVCIYCRAHVAHPTMDGFCQYKGKWVQVPIGTNDPIRFCLENTVCKVCGCWLNHGCTCDRTAIQSFDNSYLNESGAL

SEQ ID NO: 16812 - protein, 84 aa, unidentified
  REGION 1..84: note = Description of Unknown:cds_NC_002645.1_cds_NP_073550.1_2 target sequence
GGASVCIYCRAHVAHPTMDGFCQYKGKWVQVPIGTNDPIRFCLENTVCKVCGCWLNHGCTCDRTAIQSFDNSYLNESGALVPLD

SEQ ID NO: 16813 - protein, 85 aa, unidentified
  REGION 1..85: note = Description of Unknown:cds_NC_024711.1_cds_YP_009052522.2_44 target sequence
SCGNIKLVGYNNLNNIIIKEHGSNNADYYSLIAMVEDPIFKKIVADRGINVKTSGRQAYNALLEARTIKLRNMDDVASIAEKEER

SEQ ID NO: 16814 - protein, 85 aa, unidentified
  REGION 1..85: note = Description of Unknown:cds_NC_024711.1_cds_YP_009052522.2_44 target sequence
GLFSTIKARDTAITYMADIMNKLSFNFLYNGAPLNFNEIKKRTNETVINAGLKRAKKLAGSDEAKNNELNSFINNPSPAIKINGL

SEQ ID NO: 16815 - protein, 85 aa, unidentified
  REGION 1..85: note = Description of Unknown:cds_NC_024711.1_cds_YP_009052522.2_44 target sequence
GAFLRKYSNAQDFNYGALLRSLTNTEFNEALFNNKNVAKLIKRDELYQTTDYEELGGYLDETSTEGDENSIDDGIDLMTQLWNLS

SEQ ID NO: 16816 - protein, 85 aa, unidentified
  REGION 1..85: note = Description of Unknown:cds_NC_024711.1_cds_YP_009052522.2_44 target sequence
IGEVKDFNKHVEEIIKYHLASLPKLTAASQLDNGSYPFDTNNELGVVTFSDANYLSKILYASADTSNVDNFIASLKRISETIPNC

SEQ ID NO: 16817 - protein, 85 aa, unidentified
  REGION 1..85: note = Description of Unknown:cds_NC_024711.1_cds_YP_009052522.2_44 target sequence
ECLIQLHDLLSKNKVFANKYMMVFNKPIISKIETYIQTDSNGNSYVRARVTNPNTDSRTILQNTFYNNVKNNIITNRVPAAREKF

SEQ ID NO: 16818 - protein, 85 aa, unidentified
  REGION 1..85: note = Description of Unknown:cds_NC_024711.1_cds_YP_009052522.2_44 target sequence
RIYDRYKNTPHANLYLYDAFKEIFPDINQASFNLAIAKIGRVAMANNLINFANVINRTVENYNKYVEAFKKDKGTKMPDSFINRG

SEQ ID NO: 16819 - protein, 85 aa, unidentified
  REGION 1..85: note = Description of Unknown:cds_NC_024711.1_cds_YP_009052522.2_44 target sequence
DTSIIYQMADVFKDIIYIPVELNSRNPEGNLSSDVINRSFITNIAKIINDDKSTVEEQNAMVEAYAKQKFASHQYDYSNLLLEHR

SEQ ID NO: 16820 - protein, 85 aa, unidentified
  REGION 1..85: note = Description of Unknown:cds_NC_024711.1_cds_YP_009052522.2_44 target sequence
DSNGNIINYGLFRRVGNGTPKLTEYARSMFKTSLLNGISELDNNNNDLYRSMSDGDYLITAMGLFMTDINNSETPTANYLLPIPS

SEQ ID NO: 16821 - protein, 85 aa, unidentified
  REGION 1..85: note = Description of Unknown:cds_NC_024711.1_cds_YP_009052522.2_44 target sequence
DAPKNFTITAPRYSLAGLRSQLEDGTKIINKEHPLFKQYYNIVIQELTNMAQAVNVMFKTNANGNPILTNGDFEFSDIYNNKPEH

SEQ ID NO: 16822 - protein, 85 aa, unidentified
  REGION 1..85: note = Description of Unknown:cds_NC_024711.1_cds_YP_009052522.2_44 target sequence
FYNQYHKDGKGNVFTTKDGHKVLAGRVFSFKRLVSKITPNSNGAFNELIGYGKTIDILYGGSTRGLSYVNNQVVLNGEQRVALED

SEQ ID NO: 16823 - protein, 85 aa, unidentified
  REGION 1..85: note = Description of Unknown:cds_NC_024711.1_cds_YP_009052522.2_44 target sequence
AVADWLNEYITNGYKELKNKYGTFIDDRINNESLAEFLVNDYLVRDSMYDMYGGDQSFYKNGQAILKRIKEVQASGNPFGNTDFT

SEQ ID NO: 16824 - protein, 85 aa, unidentified
  REGION 1..85: note = Description of Unknown:cds_NC_024711.1_cds_YP_009052522.2_44 target sequence
KNDLDIATDLYDITIKGNAVTVPYTVNGVTKRKKVVLQDKFRGVTIYNTFKASDKVVIDRLDDQLKKAGLDKKDRERILEPFKGG

SEQ ID NO: 16825 - protein, 85 aa, unidentified
  REGION 1..85: note = Description of Unknown:cds_NC_024711.1_cds_YP_009052522.2_44 target sequence
VNTNDAQSYITLEEWIRRITAAGELDKYAGLIQSLTDDTPIDKIDWTKFANKVQIQKNFYYDLYYDTTVGIEVSRQVKNAEFVLI

SEQ ID NO: 16826 - protein, 85 aa, unidentified
  REGION 1..85: note = Description of Unknown:cds_NC_024711.1_cds_YP_009052522.2_44 target sequence
PKLIKGTELEKVYNIMTNRGIHQINTVETVKVAQHNRMTLWNNDGVLTDEALKKFDNNVFDNSELFSYNYLYRQQEVPQHMVDAS

SEQ ID NO: 16827 - protein, 85 aa, unidentified
  REGION 1..85: note = Description of Unknown:cds_NC_024711.1_cds_YP_009052522.2_44 target sequence
NKAAIQIMKKMLDNLPNRTELNELKDKVFNNYVANIRNSFEKTCAELGIGLDDNGHIDLNSNGTIKNLNRFVFFDRFKENAQQQG

SEQ ID NO: 16828 - protein, 85 aa, unidentified
  REGION 1..85: note = Description of Unknown:cds_NC_024711.1_cds_YP_009052522.2_44 target sequence
VEKALLEFFDLDSAGFNNLPLFLSNINSKLESIANSYFNTNITRQLISGWHAAQLSDFGFKVDKQTQTDSKLQYKKIGEVDGTPV

SEQ ID NO: 16829 - protein, 85 aa, unidentified
  REGION 1..85: note = Description of Unknown:cds_NC_024711.1_cds_YP_009052522.2_44 target sequence
YYTEIKLPRWSSKLKGLNIEQVPDSLRTMIGYRIPTEGKQSICIMYVKEFLPDAYGSTVVVPDEWVTQTGSDFDVDSVYGMSKTF

SEQ ID NO: 16830 - protein, 85 aa, unidentified
  REGION 1..85: note = Description of Unknown:cds_NC_024711.1_cds_YP_009052522.2_44 target sequence
NLVKGIPTEITHARYTKDEVGYINYVKDNVDKASRKILGRTYNKQGNIRASLKNSEDAINATLEGYNGNLKVVEKIANDGGLKSY

SEQ ID NO: 16831 - protein, 85 aa, unidentified
  REGION 1..85: note = Description of Unknown:cds_NC_024711.1_cds_YP_009052522.2_44 target sequence
ESYLKLPVEDTSSQAARTNAIIQSFIDILNNPAAFEENTTTSNFENVKEANEIYAEIVGANKTTVAPSDFFTQLDWFDAATSGIK

SEQ ID NO: 16832 - protein, 85 aa, unidentified
  REGION 1..85: note = Description of Unknown:cds_NC_024711.1_cds_YP_009052522.2_44 target sequence
LKGISVNRDTFMSIGNVTKANHSEGIKVMYTTDVISEQEAVNRYSKENVETIGNKHIRITHKNFGWSGDDKNVDGYLINPYSSQT

SEQ ID NO: 16833 - protein, 85 aa, unidentified
  REGION 1..85: note = Description of Unknown:cds_NC_024711.1_cds_YP_009052522.2_44 target sequence
TAHILDVMKEGAIHNENTYTFNAFKTIVDFGSNYDTAIGFMWQPAIDILVRKWKETNSVLAEGTKNPLTEAIREVAHNLGFGEKI

SEQ ID NO: 16834 - protein, 85 aa, unidentified
  REGION 1..85: note = Description of Unknown:cds_NC_024711.1_cds_YP_009052522.2_44 target sequence
NFAGRKKLIETIDKSYGETFKKLFNLSVSDAFSSPDLIFSSDAYKSRLRGEMNGVQQALFDLYVLAQFNRLNSIGQDISNNLNIL

SEQ ID NO: 16835 - protein, 85 aa, unidentified
  REGION 1..85: note = Description of Unknown:cds_NC_024711.1_cds_YP_009052522.2_44 target sequence
SADKYGAKQSFYASDKVFRDARTVIENSNIYAPSSTGGQTLLLESVFPDISGGIDAFIKSDISKSSYPSLAAFLQMSTALSVKAT

SEQ ID NO: 16836 - protein, 85 aa, unidentified
  REGION 1..85: note = Description of Unknown:cds_NC_024711.1_cds_YP_009052522.2_44 target sequence
QQVFETANPVFIDYVYRIAEWTKGGIMTEKLYNDYKDYLINKLEVGNNGSSYLNLPVTVVNGDFVHPKYIKEYGTGQSRALEVGR

SEQ ID NO: 16837 - protein, 85 aa, unidentified
  REGION 1..85: note = Description of Unknown:cds_NC_024711.1_cds_YP_009052522.2_44 target sequence
VSGTLVNIKTDDVVVKNIFEPTQTEIDVFARLTPAQKVDWIKRNFSQDGSIFEHIEIVANDERNNRRNVNIQYINYIQGDITNDE

SEQ ID NO: 16838 - protein, 85 aa, unidentified
  REGION 1..85: note = Description of Unknown:cds_NC_024711.1_cds_YP_009052522.2_44 target sequence
THRLFDRAWNHPNPLIKLTALDLVKYAFIVEGHKFRTRNISRLISNTPLRGLSEGGIAIGDIAMKGINNYGFIDKDNVEDIIGFI

SEQ ID NO: 16839 - protein, 85 aa, unidentified
  REGION 1..85: note = Description of Unknown:cds_NC_024711.1_cds_YP_009052522.2_44 target sequence
RKNYNSFNCPSYTFKRLTNNKINYSLKRSGIITFNGQENLDNVGIIRNGDAVNVIRINRNLYIKGTYDGTLAYYPIDRLESFETY

SEQ ID NO: 16840 - protein, 85 aa, unidentified
  REGION 1..85: note = Description of Unknown:cds_NC_024711.1_cds_YP_009052522.2_44 target sequence
NSIEPSIIANNNIHKPLAVLLYKGLTQQEKRDKFIDGIKDNINEAVNKGYKEVPELYGKYISDEYFQPFMNTPFENNTIYTINDK

SEQ ID NO: 16841 - protein, 85 aa, unidentified
  REGION 1..85: note = Description of Unknown:cds_NC_024711.1_cds_YP_009052522.2_44 target sequence
FYLNINGTTAINLSDDLKQYKAKYPNIEDNKLGLFIEINENEIDRVTSNTDRYSSVDDQTPIGRFAKNASLIISRVVRHGQPAAQ

SEQ ID NO: 16842 - protein, 85 aa, unidentified
  REGION 1..85: note = Description of Unknown:cds_NC_024711.1_cds_YP_009052522.2_44 target sequence
NVLNALNNAEINYLDSSSLSDNSEFSLSVIANYIDVEANNILNDINRFIKIDGIDKPINDKDVIGKVLKDEQLQNRFLDVILSAN

SEQ ID NO: 16843 - protein, 85 aa, unidentified
  REGION 1..85: note = Description of Unknown:cds_NC_024711.1_cds_YP_009052522.2_44 target sequence
TFKNKYKLISEIDIDSTNLDDKTKENIRKIQKLVNQVDSNTTVHSARKDWFERWIQLRTTNPNYISGLMKEFDAYGDTGFMDYWI

SEQ ID NO: 16844 - protein, 85 aa, unidentified
  REGION 1..85: note = Description of Unknown:cds_NC_024711.1_cds_YP_009052522.2_44 target sequence
QDIRANRNFVLQNILKDVMGTVEEGRLNGIKESNDFKNYLKELKSRAAKDGKSVSLDSIIDDDGRLIQPNNPVWEEKMKKYRNAA

SEQ ID NO: 16845 - protein, 85 aa, unidentified
  REGION 1..85: note = Description of Unknown:cds_NC_024711.1_cds_YP_009052522.2_44 target sequence
IEAEQKFGINSVEHLIALSNKAKFIDMTTIHQLKPITVQDEDGNDVTIEYSTYIINLERSLLGLKKGDDGIPKEFAEYKRLNGRI

SEQ ID NO: 16846 - protein, 85 aa, unidentified
  REGION 1..85: note = Description of Unknown:cds_NC_024711.1_cds_YP_009052522.2_44 target sequence
RDILSQATDNVTTQSQDEELGRIYAQMDSLTSLYDEDGNKKIGHDLNVAERLRAYQTNIRKVKEMFYDKQAKEGFDSKLKEQLSI

SEQ ID NO: 16847 - protein, 85 aa, unidentified
  REGION 1..85: note = Description of Unknown:cds_NC_024711.1_cds_YP_009052522.2_44 target sequence
ISKYESQRDANGNLLISMEELMKVPEYREAKEWIRKNTRYILDIKDIEDLNWAFEELKDANKGNSVLNLAIKEFQAKDEFNVVDG

SEQ ID NO: 16848 - protein, 85 aa, unidentified
  REGION 1..85: note = Description of Unknown:cds_NC_024711.1_cds_YP_009052522.2_44 target sequence
RKIPEERAALIKAETVRKYKYTKGNGMPYVGIIRSAEDELRIYRADFYNYLTGNKSKSEEEINVGEAINKILEKYFDNATRTLNT

SEQ ID NO: 16849 - protein, 85 aa, unidentified
  REGION 1..85: note = Description of Unknown:cds_NC_024711.1_cds_YP_009052522.2_44 target sequence
ADISQEDLEQLKTGFEVFNEITRGEKSTDKAKAKRVAEFIKSECDVTYNWKQYELDKNRAFAKGKKYYDKWLEVFSEQVEENGTI

SEQ ID NO: 16850 - protein, 85 aa, unidentified
  REGION 1..85: note = Description of Unknown:cds_NC_024711.1_cds_YP_009052522.2_44 target sequence
AERPNRTIYGIIKPKDLDKWTDIDRTAAINILQKRTRETTTQYYYMKEREILDKYGIDSVEYKQWYRDNHYFDPYTRTIKPIRIW

SEQ ID NO: 16851 - protein, 85 aa, unidentified
  REGION 1..85: note = Description of Unknown:cds_NC_024711.1_cds_YP_009052522.2_44 target sequence
TTMQMIKDDGSAVVGNYEPRINQMHITPKEELVNPEYSSFVNKYKVGTGYDNTNYTNLNEYQLELMNKVNELMKKYCFTNSNKRY

SEQ ID NO: 16852 - protein, 85 aa, unidentified
  REGION 1..85: note = Description of Unknown:cds_NC_024711.1_cds_YP_009052522.2_44 target sequence
VDMGYLPALPKSKDMTVKDYFEQALSFLGWTANVPNNTSWRNNEDLTFDKDYDIPNPRLIQLVNKDTQQLPTIPKFKEPNESDEE

SEQ ID NO: 16853 - protein, 85 aa, unidentified
  REGION 1..85: note = Description of Unknown:cds_NC_024711.1_cds_YP_009052522.2_44 target sequence
FSKRKAAAIKARDEIIEKNNKIHNDILNRNWEEVFNSFLIESNRYNAIKTVKNLLYTADQIITSNTAYDINYKGSISENREASAG

SEQ ID NO: 16854 - protein, 85 aa, unidentified
  REGION 1..85: note = Description of Unknown:cds_NC_024711.1_cds_YP_009052522.2_44 target sequence
GEIEYKQEQQTRTSAHLRSFIRRLVFEQYKDNKTPNLVKLGSLAQNIAGSKYMMMNITGGIANVLTGSSNIFMERAAGEYINLKD

SEQ ID NO: 16855 - protein, 85 aa, unidentified
  REGION 1..85: note = Description of Unknown:cds_NC_024711.1_cds_YP_009052522.2_44 target sequence
WEAGKSEWIKGTISYMANMYSENSSTLQDAIIKLSHVVDFDRVTEVSTAEGLKENIRRVRGLLFSPQSVGEHYMQNTMLFAMLKS

SEQ ID NO: 16856 - protein, 85 aa, unidentified
  REGION 1..85: note = Description of Unknown:cds_NC_024711.1_cds_YP_009052522.2_44 target sequence
HRLVDNGRGGYDIMSKEMYHRKAEQDALMSVINTPRGGENQALLEQFNKFIDDAKADNKKRAKYNLFKANPIFDFVKTYLNEEQQ

SEQ ID NO: 16857 - protein, 85 aa, unidentified
  REGION 1..85: note = Description of Unknown:cds_NC_024711.1_cds_YP_009052522.2_44 target sequence
REYIAKRKELIKNIDKKFAKLPDIYNQFELKDGIAQIKSDSKLTLKEYAKFIDKVREVNKKVHGVYDKLGSANIEQHWWGGMVMQ

SEQ ID NO: 16858 - protein, 85 aa, unidentified
  REGION 1..85: note = Description of Unknown:cds_NC_024711.1_cds_YP_009052522.2_44 target sequence
YHKHLYPGFKKRYRWNGYYNETLGTIEKGSYTSLYDYLTIPFKETNIGEINNVSDVLKAFQTYGKNLLSFAVNFKLNYELLPEHE

SEQ ID NO: 16859 - protein, 85 aa, unidentified
  REGION 1..85: note = Description of Unknown:cds_NC_024711.1_cds_YP_009052522.2_44 target sequence
KANIRRNLGDLLYVGAAIIGAIAITGMGGDDDEGIMYNLMLYHADRLASEAASFTPFGAYSEGKKLWSSPVAIGQTINDLLGTTA

SEQ ID NO: 16860 - protein, 84 aa, unidentified
  REGION 1..84: note = Description of Unknown:cds_NC_024711.1_cds_YP_009052522.2_44 target sequence
TINDLLGTTAMAARFLIEEDFTEEYTTGRYKGMNKFEVMAVRNIPVVRSINRVLDLPNNNSYYKVDENILSIIPYKDIGKDIFE

SEQ ID NO: 16861 - protein, 85 aa, unidentified
  REGION 1..85: note = Description of Unknown:cds_NC_024711.1_cds_YP_009052522.2_44 target sequence
YYSLIAMVEDPIFKKIVADRGINVKTSGRQAYNALLEARTIKLRNMDDVASIAEKEERGLFSTIKARDTAITYMADIMNKLSFNF

SEQ ID NO: 16862 - protein, 85 aa, unidentified
  REGION 1..85: note = Description of Unknown:cds_NC_024711.1_cds_YP_009052522.2_44 target sequence
LYNGAPLNFNEIKKRTNETVINAGLKRAKKLAGSDEAKNNELNSFINNPSPAIKINGLGAFLRKYSNAQDFNYGALLRSLTNTEF

SEQ ID NO: 16863 - protein, 85 aa, unidentified
  REGION 1..85: note = Description of Unknown:cds_NC_024711.1_cds_YP_009052522.2_44 target sequence
NEALFNNKNVAKLIKRDELYQTTDYEELGGYLDETSTEGDENSIDDGIDLMTQLWNLSIGEVKDFNKHVEEIIKYHLASLPKLTA

SEQ ID NO: 16864 - protein, 85 aa, unidentified
  REGION 1..85: note = Description of Unknown:cds_NC_024711.1_cds_YP_009052522.2_44 target sequence
ASQLDNGSYPFDTNNELGVVTFSDANYLSKILYASADTSNVDNFIASLKRISETIPNCECLIQLHDLLSKNKVFANKYMMVFNKP

SEQ ID NO: 16865 - protein, 85 aa, unidentified
  REGION 1..85: note = Description of Unknown:cds_NC_024711.1_cds_YP_009052522.2_44 target sequence
IISKIETYIQTDSNGNSYVRARVTNPNTDSRTILQNTFYNNVKNNIITNRVPAAREKFRIYDRYKNTPHANLYLYDAFKEIFPDI

SEQ ID NO: 16866 - protein, 85 aa, unidentified
  REGION 1..85: note = Description of Unknown:cds_NC_024711.1_cds_YP_009052522.2_44 target sequence
NQASFNLAIAKIGRVAMANNLINFANVINRTVENYNKYVEAFKKDKGTKMPDSFINRGDTSIIYQMADVFKDIIYIPVELNSRNP

SEQ ID NO: 16867 - protein, 85 aa, unidentified
  REGION 1..85: note = Description of Unknown:cds_NC_024711.1_cds_YP_009052522.2_44 target sequence
EGNLSSDVINRSFITNIAKIINDDKSTVEEQNAMVEAYAKQKFASHQYDYSNLLLEHRDSNGNIINYGLFRRVGNGTPKLTEYAR

SEQ ID NO: 16868 - protein, 85 aa, unidentified
  REGION 1..85: note = Description of Unknown:cds_NC_024711.1_cds_YP_009052522.2_44 target sequence
SMFKTSLLNGISELDNNNNDLYRSMSDGDYLITAMGLFMTDINNSETPTANYLLPIPSDAPKNFTITAPRYSLAGLRSQLEDGTK

SEQ ID NO: 16869 - protein, 85 aa, unidentified
  REGION 1..85: note = Description of Unknown:cds_NC_024711.1_cds_YP_009052522.2_44 target sequence
IINKEHPLFKQYYNIVIQELTNMAQAVNVMFKTNANGNPILTNGDFEFSDIYNNKPEHFYNQYHKDGKGNVFTTKDGHKVLAGRV

SEQ ID NO: 16870 - protein, 85 aa, unidentified
  REGION 1..85: note = Description of Unknown:cds_NC_024711.1_cds_YP_009052522.2_44 target sequence
FSFKRLVSKITPNSNGAFNELIGYGKTIDILYGGSTRGLSYVNNQVVLNGEQRVALEDAVADWLNEYITNGYKELKNKYGTFIDD

SEQ ID NO: 16871 - protein, 85 aa, unidentified
  REGION 1..85: note = Description of Unknown:cds_NC_024711.1_cds_YP_009052522.2_44 target sequence
RINNESLAEFLVNDYLVRDSMYDMYGGDQSFYKNGQAILKRIKEVQASGNPFGNTDFTKNDLDIATDLYDITIKGNAVTVPYTVN

SEQ ID NO: 16872 - protein, 85 aa, unidentified
  REGION 1..85: note = Description of Unknown:cds_NC_024711.1_cds_YP_009052522.2_44 target sequence
GVTKRKKVVLQDKFRGVTIYNTFKASDKVVIDRLDDQLKKAGLDKKDRERILEPFKGGVNTNDAQSYITLEEWIRRITAAGELDK

SEQ ID NO: 16873 - protein, 85 aa, unidentified
  REGION 1..85: note = Description of Unknown:cds_NC_024711.1_cds_YP_009052522.2_44 target sequence
YAGLIQSLTDDTPIDKIDWTKFANKVQIQKNFYYDLYYDTTVGIEVSRQVKNAEFVLIPKLIKGTELEKVYNIMTNRGIHQINTV

SEQ ID NO: 16874 - protein, 85 aa, unidentified
  REGION 1..85: note = Description of Unknown:cds_NC_024711.1_cds_YP_009052522.2_44 target sequence
ETVKVAQHNRMTLWNNDGVLTDEALKKFDNNVFDNSELFSYNYLYRQQEVPQHMVDASNKAAIQIMKKMLDNLPNRTELNELKDK

SEQ ID NO: 16875 - protein, 85 aa, unidentified
  REGION 1..85: note = Description of Unknown:cds_NC_024711.1_cds_YP_009052522.2_44 target sequence
VFNNYVANIRNSFEKTCAELGIGLDDNGHIDLNSNGTIKNLNRFVFFDRFKENAQQQGVEKALLEFFDLDSAGFNNLPLFLSNIN

SEQ ID NO: 16876 - protein, 85 aa, unidentified
  REGION 1..85: note = Description of Unknown:cds_NC_024711.1_cds_YP_009052522.2_44 target sequence
SKLESIANSYFNTNITRQLISGWHAAQLSDFGFKVDKQTQTDSKLQYKKIGEVDGTPVYYTEIKLPRWSSKLKGLNIEQVPDSLR

SEQ ID NO: 16877 - protein, 85 aa, unidentified
  REGION 1..85: note = Description of Unknown:cds_NC_024711.1_cds_YP_009052522.2_44 target sequence
TMIGYRIPTEGKQSICIMYVKEFLPDAYGSTVVVPDEWVTQTGSDFDVDSVYGMSKTFNLVKGIPTEITHARYTKDEVGYINYVK

SEQ ID NO: 16878 - protein, 85 aa, unidentified
  REGION 1..85: note = Description of Unknown:cds_NC_024711.1_cds_YP_009052522.2_44 target sequence
DNVDKASRKILGRTYNKQGNIRASLKNSEDAINATLEGYNGNLKVVEKIANDGGLKSYESYLKLPVEDTSSQAARTNAIIQSFID

SEQ ID NO: 16879 - protein, 85 aa, unidentified
  REGION 1..85: note = Description of Unknown:cds_NC_024711.1_cds_YP_009052522.2_44 target sequence
ILNNPAAFEENTTTSNFENVKEANEIYAEIVGANKTTVAPSDFFTQLDWFDAATSGIKLKGISVNRDTFMSIGNVTKANHSEGIK

SEQ ID NO: 16880 - protein, 85 aa, unidentified
  REGION 1..85: note = Description of Unknown:cds_NC_024711.1_cds_YP_009052522.2_44 target sequence
VMYTTDVISEQEAVNRYSKENVETIGNKHIRITHKNFGWSGDDKNVDGYLINPYSSQTTAHILDVMKEGAIHNENTYTFNAFKTI

SEQ ID NO: 16881 - protein, 85 aa, unidentified
  REGION 1..85: note = Description of Unknown:cds_NC_024711.1_cds_YP_009052522.2_44 target sequence
VDFGSNYDTAIGFMWQPAIDILVRKWKETNSVLAEGTKNPLTEAIREVAHNLGFGEKINFAGRKKLIETIDKSYGETFKKLFNLS

SEQ ID NO: 16882 - protein, 85 aa, unidentified
  REGION 1..85: note = Description of Unknown:cds_NC_024711.1_cds_YP_009052522.2_44 target sequence
VSDAFSSPDLIFSSDAYKSRLRGEMNGVQQALFDLYVLAQFNRLNSIGQDISNNLNILSADKYGAKQSFYASDKVFRDARTVIEN

SEQ ID NO: 16883 - protein, 85 aa, unidentified
  REGION 1..85: note = Description of Unknown:cds_NC_024711.1_cds_YP_009052522.2_44 target sequence
SNIYAPSSTGGQTLLLESVFPDISGGIDAFIKSDISKSSYPSLAAFLQMSTALSVKATQQVFETANPVFIDYVYRIAEWTKGGIM

SEQ ID NO: 16884 - protein, 85 aa, unidentified
  REGION 1..85: note = Description of Unknown:cds_NC_024711.1_cds_YP_009052522.2_44 target sequence
TEKLYNDYKDYLINKLEVGNNGSSYLNLPVTVVNGDFVHPKYIKEYGTGQSRALEVGRVSGTLVNIKTDDVVVKNIFEPTQTEID

SEQ ID NO: 16885 - protein, 85 aa, unidentified
  REGION 1..85: note = Description of Unknown:cds_NC_024711.1_cds_YP_009052522.2_44 target sequence
VFARLTPAQKVDWIKRNFSQDGSIFEHIEIVANDERNNRRNVNIQYINYIQGDITNDETHRLFDRAWNHPNPLIKLTALDLVKYA

SEQ ID NO: 16886 - protein, 85 aa, unidentified
  REGION 1..85: note = Description of Unknown:cds_NC_024711.1_cds_YP_009052522.2_44 target sequence
FIVEGHKFRTRNISRLISNTPLRGLSEGGIAIGDIAMKGINNYGFIDKDNVEDIIGFIRKNYNSFNCPSYTFKRLTNNKINYSLK

SEQ ID NO: 16887 - protein, 85 aa, unidentified
  REGION 1..85: note = Description of Unknown:cds_NC_024711.1_cds_YP_009052522.2_44 target sequence
RSGIITFNGQENLDNVGIIRNGDAVNVIRINRNLYIKGTYDGTLAYYPIDRLESFETYNSIEPSIIANNNIHKPLAVLLYKGLTQ

SEQ ID NO: 16888 - protein, 85 aa, unidentified
  REGION 1..85: note = Description of Unknown:cds_NC_024711.1_cds_YP_009052522.2_44 target sequence
QEKRDKFIDGIKDNINEAVNKGYKEVPELYGKYISDEYFQPFMNTPFENNTIYTINDKFYLNINGTTAINLSDDLKQYKAKYPNI

SEQ ID NO: 16889 - protein, 85 aa, unidentified
  REGION 1..85: note = Description of Unknown:cds_NC_024711.1_cds_YP_009052522.2_44 target sequence
EDNKLGLFIEINENEIDRVTSNTDRYSSVDDQTPIGRFAKNASLIISRVVRHGQPAAQNVLNALNNAEINYLDSSSLSDNSEFSL

SEQ ID NO: 16890 - protein, 85 aa, unidentified
  REGION 1..85: note = Description of Unknown:cds_NC_024711.1_cds_YP_009052522.2_44 target sequence
SVIANYIDVEANNILNDINRFIKIDGIDKPINDKDVIGKVLKDEQLQNRFLDVILSANTFKNKYKLISEIDIDSTNLDDKTKENI

SEQ ID NO: 16891 - protein, 85 aa, unidentified
  REGION 1..85: note = Description of Unknown:cds_NC_024711.1_cds_YP_009052522.2_44 target sequence
RKIQKLVNQVDSNTTVHSARKDWFERWIQLRTTNPNYISGLMKEFDAYGDTGFMDYWIQDIRANRNFVLQNILKDVMGTVEEGRL

SEQ ID NO: 16892 - protein, 85 aa, unidentified
  REGION 1..85: note = Description of Unknown:cds_NC_024711.1_cds_YP_009052522.2_44 target sequence
NGIKESNDFKNYLKELKSRAAKDGKSVSLDSIIDDDGRLIQPNNPVWEEKMKKYRNAAIEAEQKFGINSVEHLIALSNKAKFIDM

SEQ ID NO: 16893 - protein, 85 aa, unidentified
  REGION 1..85: note = Description of Unknown:cds_NC_024711.1_cds_YP_009052522.2_44 target sequence
TTIHQLKPITVQDEDGNDVTIEYSTYIINLERSLLGLKKGDDGIPKEFAEYKRLNGRIRDILSQATDNVTTQSQDEELGRIYAQM

SEQ ID NO: 16894 - protein, 85 aa, unidentified
  REGION 1..85: note = Description of Unknown:cds_NC_024711.1_cds_YP_009052522.2_44 target sequence
DSLTSLYDEDGNKKIGHDLNVAERLRAYQTNIRKVKEMFYDKQAKEGFDSKLKEQLSIISKYESQRDANGNLLISMEELMKVPEY

SEQ ID NO: 16895 - protein, 85 aa, unidentified
  REGION 1..85: note = Description of Unknown:cds_NC_024711.1_cds_YP_009052522.2_44 target sequence
REAKEWIRKNTRYILDIKDIEDLNWAFEELKDANKGNSVLNLAIKEFQAKDEFNVVDGRKIPEERAALIKAETVRKYKYTKGNGM

SEQ ID NO: 16896 - protein, 85 aa, unidentified
  REGION 1..85: note = Description of Unknown:cds_NC_024711.1_cds_YP_009052522.2_44 target sequence
PYVGIIRSAEDELRIYRADFYNYLTGNKSKSEEEINVGEAINKILEKYFDNATRTLNTADISQEDLEQLKTGFEVFNEITRGEKS

SEQ ID NO: 16897 - protein, 85 aa, unidentified
  REGION 1..85: note = Description of Unknown:cds_NC_024711.1_cds_YP_009052522.2_44 target sequence
TDKAKAKRVAEFIKSECDVTYNWKQYELDKNRAFAKGKKYYDKWLEVFSEQVEENGTIAERPNRTIYGIIKPKDLDKWTDIDRTA

SEQ ID NO: 16898 - protein, 85 aa, unidentified
  REGION 1..85: note = Description of Unknown:cds_NC_024711.1_cds_YP_009052522.2_44 target sequence
AINILQKRTRETTTQYYYMKEREILDKYGIDSVEYKQWYRDNHYFDPYTRTIKPIRIWTTMQMIKDDGSAVVGNYEPRINQMHIT

SEQ ID NO: 16899 - protein, 85 aa, unidentified
  REGION 1..85: note = Description of Unknown:cds_NC_024711.1_cds_YP_009052522.2_44 target sequence
PKEELVNPEYSSFVNKYKVGTGYDNTNYTNLNEYQLELMNKVNELMKKYCFTNSNKRYVDMGYLPALPKSKDMTVKDYFEQALSF

SEQ ID NO: 16900 - protein, 85 aa, unidentified
  REGION 1..85: note = Description of Unknown:cds_NC_024711.1_cds_YP_009052522.2_44 target sequence
LGWTANVPNNTSWRNNEDLTFDKDYDIPNPRLIQLVNKDTQQLPTIPKFKEPNESDEEFSKRKAAAIKARDEIIEKNNKIHNDIL

SEQ ID NO: 16901 - protein, 85 aa, unidentified
  REGION 1..85: note = Description of Unknown:cds_NC_024711.1_cds_YP_009052522.2_44 target sequence
NRNWEEVFNSFLIESNRYNAIKTVKNLLYTADQIITSNTAYDINYKGSISENREASAGGEIEYKQEQQTRTSAHLRSFIRRLVFE

SEQ ID NO: 16902 - protein, 85 aa, unidentified
  REGION 1..85: note = Description of Unknown:cds_NC_024711.1_cds_YP_009052522.2_44 target sequence
QYKDNKTPNLVKLGSLAQNIAGSKYMMMNITGGIANVLTGSSNIFMERAAGEYINLKDWEAGKSEWIKGTISYMANMYSENSSTL

SEQ ID NO: 16903 - protein, 85 aa, unidentified
  REGION 1..85: note = Description of Unknown:cds_NC_024711.1_cds_YP_009052522.2_44 target sequence
QDAIIKLSHVVDFDRVTEVSTAEGLKENIRRVRGLLFSPQSVGEHYMQNTMLFAMLKSHRLVDNGRGGYDIMSKEMYHRKAEQDA

SEQ ID NO: 16904 - protein, 85 aa, unidentified
  REGION 1..85: note = Description of Unknown:cds_NC_024711.1_cds_YP_009052522.2_44 target sequence
LMSVINTPRGGENQALLEQFNKFIDDAKADNKKRAKYNLFKANPIFDFVKTYLNEEQQREYIAKRKELIKNIDKKFAKLPDIYNQ

SEQ ID NO: 16905 - protein, 85 aa, unidentified
  REGION 1..85: note = Description of Unknown:cds_NC_024711.1_cds_YP_009052522.2_44 target sequence
FELKDGIAQIKSDSKLTLKEYAKFIDKVREVNKKVHGVYDKLGSANIEQHWWGGMVMQYHKHLYPGFKKRYRWNGYYNETLGTIE

SEQ ID NO: 16906 - protein, 85 aa, unidentified
  REGION 1..85: note = Description of Unknown:cds_NC_024711.1_cds_YP_009052522.2_44 target sequence
KGSYTSLYDYLTIPFKETNIGEINNVSDVLKAFQTYGKNLLSFAVNFKLNYELLPEHEKANIRRNLGDLLYVGAAIIGAIAITGM

SEQ ID NO: 16907 - protein, 85 aa, unidentified
  REGION 1..85: note = Description of Unknown:cds_NC_024711.1_cds_YP_009052522.2_44 target sequence
GGDDDEGIMYNLMLYHADRLASEAASFTPFGAYSEGKKLWSSPVAIGQTINDLLGTTAMAARFLIEEDFTEEYTTGRYKGMNKFE

SEQ ID NO: 16908 - protein, 85 aa, unidentified
  REGION 1..85: note = Description of Unknown:hvTR_P27958 target sequence
STNPKPQRKTKRNTNRRPQDVKFPGGGQIVGGVYLLPRRGPRLGVRATRKTSERSQPRGRRQPIPKARRPEGRTWAQPGYPWPLY

SEQ ID NO: 16909 - protein, 85 aa, unidentified
  REGION 1..85: note = Description of Unknown:hvTR_P27958 target sequence
GNEGCGWAGWLLSPRGSRPSWGPTDPRRRSRNLGKVIDTLTCGFADLMGYIPLVGAPLGGAARALAHGVRVLEDGVNYATGNLPG

SEQ ID NO: 16910 - protein, 85 aa, unidentified
  REGION 1..85: note = Description of Unknown:hvTR_P27958 target sequence
CSFSIFLLALLSCLTVPASAYQVRNSSGLYHVTNDCPNSSVVYEAADAILHTPGCVPCVREGNASRCWVAVTPTVATRDGKLPTT

SEQ ID NO: 16911 - protein, 85 aa, unidentified
  REGION 1..85: note = Description of Unknown:hvTR_P27958 target sequence
QLRRHIDLLVGSATLCSALYVGDLCGSVFLVGQLFTFSPRHHWTTQDCNCSIYPGHITGHRMAWNMMMNWSPTAALVVAQLLRIP

SEQ ID NO: 16912 - protein, 85 aa, unidentified
  REGION 1..85: note = Description of Unknown:hvTR_P27958 target sequence
QAIMDMIAGAHWGVLAGIKYFSMVGNWAKVLVVLLLFAGVDAETHVTGGNAGRTTAGLVGLLTPGAKQNIQLINTNGSWHINSTA

SEQ ID NO: 16913 - protein, 85 aa, unidentified
  REGION 1..85: note = Description of Unknown:hvTR_P27958 target sequence
LNCNESLNTGWLAGLFYQHKFNSSGCPERLASCRRLTDFAQGWGPISYANGSGLDERPYCWHYPPRPCGIVPAKSVCGPVYCFTP

SEQ ID NO: 16914 - protein, 85 aa, unidentified
  REGION 1..85: note = Description of Unknown:hvTR_P27958 target sequence
SPVVVGTTDRSGAPTYSWGANDTDVFVLNNTRPPLGNWFGCTWMNSTGFTKVCGAPPCVIGGVGNNTLLCPTDCFRKYPEATYSR

SEQ ID NO: 16915 - protein, 85 aa, unidentified
  REGION 1..85: note = Description of Unknown:hvTR_P27958 target sequence
CGSGPRITPRCMVDYPYRLWHYPCTINYTIFKVRMYVGGVEHRLEAACNWTRGERCDLEDRDRSELSPLLLSTTQWQVLPCSFTT

SEQ ID NO: 16916 - protein, 85 aa, unidentified
  REGION 1..85: note = Description of Unknown:hvTR_P27958 target sequence
LPALSTGLIHLHQNIVDVQYLYGVGSSIASWAIKWEYVVLLFLLLADARVCSCLWMMLLISQAEAALENLVILNAASLAGTHGLV

SEQ ID NO: 16917 - protein, 85 aa, unidentified
  REGION 1..85: note = Description of Unknown:hvTR_P27958 target sequence
SFLVFFCFAWYLKGRWVPGAVYALYGMWPLLLLLLALPQRAYALDTEVAASCGGVVLVGLMALTLSPYYKRYISWCMWWLQYFLT

SEQ ID NO: 16918 - protein, 85 aa, unidentified
  REGION 1..85: note = Description of Unknown:hvTR_P27958 target sequence
RVEAQLHVWVPPLNVRGGRDAVILLTCVVHPALVFDITKLLLAIFGPLWILQASLLKVPYFVRVQGLLRICALARKIAGGHYVQM

SEQ ID NO: 16919 - protein, 85 aa, unidentified
  REGION 1..85: note = Description of Unknown:hvTR_P27958 target sequence
AIIKLGALTGTCVYNHLAPLRDWAHNGLRDLAVAVEPVVFSRMETKLITWGADTAACGDIINGLPVSARRGQEILLGPADGMVSK

SEQ ID NO: 16920 - protein, 85 aa, unidentified
  REGION 1..85: note = Description of Unknown:hvTR_P27958 target sequence
GWRLLAPITAYAQQTRGLLGCIITSLTGRDKNQVEGEVQIVSTATQTFLATCINGVCWTVYHGAGTRTIASPKGPVIQTYTNVDQ

SEQ ID NO: 16921 - protein, 85 aa, unidentified
  REGION 1..85: note = Description of Unknown:hvTR_P27958 target sequence
DLVGWPAPQGSRSLTPCTCGSSDLYLVTRHADVIPVRRRGDSRGSLLSPRPISYLKGSSGGPLLCPTGHAVGLFRAAVCTRGVAK

SEQ ID NO: 16922 - protein, 85 aa, unidentified
  REGION 1..85: note = Description of Unknown:hvTR_P27958 target sequence
AVDFIPVENLETTMRSPVFTDNSSPPAVPQSFQVAHLHAPTGSGKSTKVPAAYAAKGYKVLVLNPSVAATLGFGAYMSKAHGVDP

SEQ ID NO: 16923 - protein, 85 aa, unidentified
  REGION 1..85: note = Description of Unknown:hvTR_P27958 target sequence
NIRTGVRTITTGSPITYSTYGKFLADAGCSGGAYDIIICDECHSTDATSISGIGTVLDQAETAGARLVVLATATPPGSVTVSHPN

SEQ ID NO: 16924 - protein, 85 aa, unidentified
  REGION 1..85: note = Description of Unknown:hvTR_P27958 target sequence
IEEVALSTTGEIPFYGKAIPLEVIKGGRHLIFCHSKKKCDELAAKLVALGINAVAYYRGLDVSVIPTSGDVVVVSTDALMTGFTG

SEQ ID NO: 16925 - protein, 85 aa, unidentified
  REGION 1..85: note = Description of Unknown:hvTR_P27958 target sequence
DFDSVIDCNTCVTQTVDFSLDPTFTIETTTLPQDAVSRTQRRGRTGRGKPGIYRFVAPGERPSGMFDSSVLCECYDAGCAWYELT

SEQ ID NO: 16926 - protein, 85 aa, unidentified
  REGION 1..85: note = Description of Unknown:hvTR_P27958 target sequence
PAETTVRLRAYMNTPGLPVCQDHLGFWEGVFTGLTHIDAHFLSQTKQSGENFPYLVAYQATVCARAQAPPPSWDQMRKCLIRLKP

SEQ ID NO: 16927 - protein, 85 aa, unidentified
  REGION 1..85: note = Description of Unknown:hvTR_P27958 target sequence
TLHGPTPLLYRLGAVQNEVTLTHPITKYIMTCMSADLEVVTSTWVLVGGVLAALAAYCLSTGCVVIVGRIVLSGKPAIIPDREVL

SEQ ID NO: 16928 - protein, 85 aa, unidentified
  REGION 1..85: note = Description of Unknown:hvTR_P27958 target sequence
YQEFDEMEECSQHLPYIEQGMMLAEQFKQKALGLLQTASRHAEVITPAVQTNWQKLEVFWAKHMWNFISGIQYLAGLSTLPGNPA

SEQ ID NO: 16929 - protein, 85 aa, unidentified
  REGION 1..85: note = Description of Unknown:hvTR_P27958 target sequence
IASLMAFTAAVTSPLTTGQTLLFNILGGWVAAQLAAPGAATAFVGAGLAGAALDSVGLGKVLVDILAGYGAGVAGALVAFKIMSG

SEQ ID NO: 16930 - protein, 85 aa, unidentified
  REGION 1..85: note = Description of Unknown:hvTR_P27958 target sequence
EVPSTEDLVNLLPAILSPGALAVGVVFASILRRRVGPGEGAVQWMNRLIAFASRGNHVSPTHYVPESDAAARVTAILSSLTVTQL

SEQ ID NO: 16931 - protein, 85 aa, unidentified
  REGION 1..85: note = Description of Unknown:hvTR_P27958 target sequence
LRRLHQWISSECTTPCSGSWLRDIWDWICEVLSDFKTWLKAKLMPQLPGIPFVSCQRGYRGVWRGDGIMHTRCHCGAEITGHVKN

SEQ ID NO: 16932 - protein, 85 aa, unidentified
  REGION 1..85: note = Description of Unknown:hvTR_P27958 target sequence
GTMRIVGPRTCKNMWSGTFFINAYTTGPCTPLPAPNYKFALWRVSAEEYVEIRRVGDFHYVSGMTTDNLKCPCQIPSPEFFTELD

SEQ ID NO: 16933 - protein, 85 aa, unidentified
  REGION 1..85: note = Description of Unknown:hvTR_P27958 target sequence
GVRLHRFAPPCKPLLREEVSFRVGLHEYPVGSQLPCEPEPDVAVLTSMLTDPSHITAEAAGRRLARGSPPSMASSSASQLSAPSL

SEQ ID NO: 16934 - protein, 85 aa, unidentified
  REGION 1..85: note = Description of Unknown:hvTR_P27958 target sequence
KATCTANHDSPDAELIEANLLWRQEMGGNITRVESENKVVILDSFDPLVAEEDEREVSVPAEILRKSRRFAPALPVWARPDYNPL

SEQ ID NO: 16935 - protein, 85 aa, unidentified
  REGION 1..85: note = Description of Unknown:hvTR_P27958 target sequence
LVETWKKPDYEPPVVHGCPLPPPRSPPVPPPRKKRTVVLTESTLPTALAELATKSFGSSSTSGITGDNTTTSSEPAPSGCPPDSD

SEQ ID NO: 16936 - protein, 85 aa, unidentified
  REGION 1..85: note = Description of Unknown:hvTR_P27958 target sequence
VESYSSMPPLEGEPGDPDLSDGSWSTVSSGADTEDVVCCSMSYSWTGALVTPCAAEEQKLPINALSNSLLRHHNLVYSTTSRSAC

SEQ ID NO: 16937 - protein, 85 aa, unidentified
  REGION 1..85: note = Description of Unknown:hvTR_P27958 target sequence
QRKKKVTFDRLQVLDSHYQDVLKEVKAAASKVKANLLSVEEACSLAPPHSAKSKFGYGAKDVRCHARKAVAHINSVWKDLLEDSV

SEQ ID NO: 16938 - protein, 85 aa, unidentified
  REGION 1..85: note = Description of Unknown:hvTR_P27958 target sequence
TPIDTTIMAKNEVFCVQPEKGGRKPARLIVFPDLGVRVCEKMALYDVVSKLPLAVMGSSYGFQYSPGQRVEFLVQAWKSKKTPMG

SEQ ID NO: 16939 - protein, 85 aa, unidentified
  REGION 1..85: note = Description of Unknown:hvTR_P27958 target sequence
LSYDTRCFDSTVTESDIRTEEAIYQCCDLDPQARVAIKSLTERLYVGGPLTNSRGENCGYRRCRASRVLTTSCGNTLTRYIKARA

SEQ ID NO: 16940 - protein, 85 aa, unidentified
  REGION 1..85: note = Description of Unknown:hvTR_P27958 target sequence
ACRAAGLQDCTMLVCGDDLVVICESAGVQEDAASLRAFTEAMTRYSAPPGDPPQPEYDLELITSCSSNVSVAHDGAGKRVYYLTR

SEQ ID NO: 16941 - protein, 85 aa, unidentified
  REGION 1..85: note = Description of Unknown:hvTR_P27958 target sequence
DPTTPLARAAWETARHTPVNSWLGNIIMFAPTLWARMILMTHFFSVLIARDQLEQALNCEIYGACYSIEPLDLPPIIQRLHGLSA

SEQ ID NO: 16942 - protein, 85 aa, unidentified
  REGION 1..85: note = Description of Unknown:hvTR_P27958 target sequence
FSLHSYSPGEINRVAACLRKLGVPPLRAWRHRAWSVRARLLARGGKAAICGKYLFNWAVRTKLKLTPITAAGRLDLSGWFTAGYS

SEQ ID NO: 16943 - protein, 84 aa, unidentified
  REGION 1..84: note = Description of Unknown:hvTR_P27958 target sequence
RARLLARGGKAAICGKYLFNWAVRTKLKLTPITAAGRLDLSGWFTAGYSGGDIYHSVSHARPRWFWFCLLLLAAGVGIYLLPNR

SEQ ID NO: 16944 - protein, 85 aa, unidentified
  REGION 1..85: note = Description of Unknown:hvTR_P27958 target sequence
QIVGGVYLLPRRGPRLGVRATRKTSERSQPRGRRQPIPKARRPEGRTWAQPGYPWPLYGNEGCGWAGWLLSPRGSRPSWGPTDPR

SEQ ID NO: 16945 - protein, 85 aa, unidentified
  REGION 1..85: note = Description of Unknown:hvTR_P27958 target sequence
RRSRNLGKVIDTLTCGFADLMGYIPLVGAPLGGAARALAHGVRVLEDGVNYATGNLPGCSFSIFLLALLSCLTVPASAYQVRNSS

SEQ ID NO: 16946 - protein, 85 aa, unidentified
  REGION 1..85: note = Description of Unknown:hvTR_P27958 target sequence
GLYHVTNDCPNSSVVYEAADAILHTPGCVPCVREGNASRCWVAVTPTVATRDGKLPTTQLRRHIDLLVGSATLCSALYVGDLCGS

SEQ ID NO: 16947 - protein, 85 aa, unidentified
  REGION 1..85: note = Description of Unknown:hvTR_P27958 target sequence
VFLVGQLFTFSPRHHWTTQDCNCSIYPGHITGHRMAWNMMMNWSPTAALVVAQLLRIPQAIMDMIAGAHWGVLAGIKYFSMVGNW

SEQ ID NO: 16948 - protein, 85 aa, unidentified
  REGION 1..85: note = Description of Unknown:hvTR_P27958 target sequence
AKVLVVLLLFAGVDAETHVTGGNAGRTTAGLVGLLTPGAKQNIQLINTNGSWHINSTALNCNESLNTGWLAGLFYQHKFNSSGCP

SEQ ID NO: 16949 - protein, 85 aa, unidentified
  REGION 1..85: note = Description of Unknown:hvTR_P27958 target sequence
ERLASCRRLTDFAQGWGPISYANGSGLDERPYCWHYPPRPCGIVPAKSVCGPVYCFTPSPVVVGTTDRSGAPTYSWGANDTDVFV

SEQ ID NO: 16950 - protein, 85 aa, unidentified
  REGION 1..85: note = Description of Unknown:hvTR_P27958 target sequence
LNNTRPPLGNWFGCTWMNSTGFTKVCGAPPCVIGGVGNNTLLCPTDCFRKYPEATYSRCGSGPRITPRCMVDYPYRLWHYPCTIN

SEQ ID NO: 16951 - protein, 85 aa, unidentified
  REGION 1..85: note = Description of Unknown:hvTR_P27958 target sequence
YTIFKVRMYVGGVEHRLEAACNWTRGERCDLEDRDRSELSPLLLSTTQWQVLPCSFTTLPALSTGLIHLHQNIVDVQYLYGVGSS

SEQ ID NO: 16952 - protein, 85 aa, unidentified
  REGION 1..85: note = Description of Unknown:hvTR_P27958 target sequence
IASWAIKWEYVVLLFLLLADARVCSCLWMMLLISQAEAALENLVILNAASLAGTHGLVSFLVFFCFAWYLKGRWVPGAVYALYGM

SEQ ID NO: 16953 - protein, 85 aa, unidentified
  REGION 1..85: note = Description of Unknown:hvTR_P27958 target sequence
WPLLLLLLALPQRAYALDTEVAASCGGVVLVGLMALTLSPYYKRYISWCMWWLQYFLTRVEAQLHVWVPPLNVRGGRDAVILLTC

SEQ ID NO: 16954 - protein, 85 aa, unidentified
  REGION 1..85: note = Description of Unknown:hvTR_P27958 target sequence
VVHPALVFDITKLLLAIFGPLWILQASLLKVPYFVRVQGLLRICALARKIAGGHYVQMAIIKLGALTGTCVYNHLAPLRDWAHNG

SEQ ID NO: 16955 - protein, 85 aa, unidentified
  REGION 1..85: note = Description of Unknown:hvTR_P27958 target sequence
LRDLAVAVEPVVFSRMETKLITWGADTAACGDIINGLPVSARRGQEILLGPADGMVSKGWRLLAPITAYAQQTRGLLGCIITSLT

SEQ ID NO: 16956 - protein, 85 aa, unidentified
  REGION 1..85: note = Description of Unknown:hvTR_P27958 target sequence
GRDKNQVEGEVQIVSTATQTFLATCINGVCWTVYHGAGTRTIASPKGPVIQTYTNVDQDLVGWPAPQGSRSLTPCTCGSSDLYLV

SEQ ID NO: 16957 - protein, 85 aa, unidentified
  REGION 1..85: note = Description of Unknown:hvTR_P27958 target sequence
TRHADVIPVRRRGDSRGSLLSPRPISYLKGSSGGPLLCPTGHAVGLFRAAVCTRGVAKAVDFIPVENLETTMRSPVFTDNSSPPA

SEQ ID NO: 16958 - protein, 85 aa, unidentified
  REGION 1..85: note = Description of Unknown:hvTR_P27958 target sequence
VPQSFQVAHLHAPTGSGKSTKVPAAYAAKGYKVLVLNPSVAATLGFGAYMSKAHGVDPNIRTGVRTITTGSPITYSTYGKFLADA

SEQ ID NO: 16959 - protein, 85 aa, unidentified
  REGION 1..85: note = Description of Unknown:hvTR_P27958 target sequence
GCSGGAYDIIICDECHSTDATSISGIGTVLDQAETAGARLVVLATATPPGSVTVSHPNIEEVALSTTGEIPFYGKAIPLEVIKGG

SEQ ID NO: 16960 - protein, 85 aa, unidentified
  REGION 1..85: note = Description of Unknown:hvTR_P27958 target sequence
RHLIFCHSKKKCDELAAKLVALGINAVAYYRGLDVSVIPTSGDVVVVSTDALMTGFTGDFDSVIDCNTCVTQTVDFSLDPTFTIE

SEQ ID NO: 16961 - protein, 85 aa, unidentified
  REGION 1..85: note = Description of Unknown:hvTR_P27958 target sequence
TTTLPQDAVSRTQRRGRTGRGKPGIYRFVAPGERPSGMFDSSVLCECYDAGCAWYELTPAETTVRLRAYMNTPGLPVCQDHLGFW

SEQ ID NO: 16962 - protein, 85 aa, unidentified
  REGION 1..85: note = Description of Unknown:hvTR_P27958 target sequence
EGVFTGLTHIDAHFLSQTKQSGENFPYLVAYQATVCARAQAPPPSWDQMRKCLIRLKPTLHGPTPLLYRLGAVQNEVTLTHPITK

SEQ ID NO: 16963 - protein, 85 aa, unidentified
  REGION 1..85: note = Description of Unknown:hvTR_P27958 target sequence
YIMTCMSADLEVVTSTWVLVGGVLAALAAYCLSTGCVVIVGRIVLSGKPAIIPDREVLYQEFDEMEECSQHLPYIEQGMMLAEQF

SEQ ID NO: 16964 - protein, 85 aa, unidentified
  REGION 1..85: note = Description of Unknown:hvTR_P27958 target sequence
KQKALGLLQTASRHAEVITPAVQTNWQKLEVFWAKHMWNFISGIQYLAGLSTLPGNPAIASLMAFTAAVTSPLTTGQTLLFNILG

SEQ ID NO: 16965 - protein, 85 aa, unidentified
  REGION 1..85: note = Description of Unknown:hvTR_P27958 target sequence
GWVAAQLAAPGAATAFVGAGLAGAALDSVGLGKVLVDILAGYGAGVAGALVAFKIMSGEVPSTEDLVNLLPAILSPGALAVGVVF

SEQ ID NO: 16966 - protein, 85 aa, unidentified
  REGION 1..85: note = Description of Unknown:hvTR_P27958 target sequence
ASILRRRVGPGEGAVQWMNRLIAFASRGNHVSPTHYVPESDAAARVTAILSSLTVTQLLRRLHQWISSECTTPCSGSWLRDIWDW

SEQ ID NO: 16967 - protein, 85 aa, unidentified
  REGION 1..85: note = Description of Unknown:hvTR_P27958 target sequence
ICEVLSDFKTWLKAKLMPQLPGIPFVSCQRGYRGVWRGDGIMHTRCHCGAEITGHVKNGTMRIVGPRTCKNMWSGTFFINAYTTG

SEQ ID NO: 16968 - protein, 85 aa, unidentified
  REGION 1..85: note = Description of Unknown:hvTR_P27958 target sequence
PCTPLPAPNYKFALWRVSAEEYVEIRRVGDFHYVSGMTTDNLKCPCQIPSPEFFTELDGVRLHRFAPPCKPLLREEVSFRVGLHE

SEQ ID NO: 16969 - protein, 85 aa, unidentified
  REGION 1..85: note = Description of Unknown:hvTR_P27958 target sequence
YPVGSQLPCEPEPDVAVLTSMLTDPSHITAEAAGRRLARGSPPSMASSSASQLSAPSLKATCTANHDSPDAELIEANLLWRQEMG

SEQ ID NO: 16970 - protein, 85 aa, unidentified
  REGION 1..85: note = Description of Unknown:hvTR_P27958 target sequence
GNITRVESENKVVILDSFDPLVAEEDEREVSVPAEILRKSRRFAPALPVWARPDYNPLLVETWKKPDYEPPVVHGCPLPPPRSPP

SEQ ID NO: 16971 - protein, 85 aa, unidentified
  REGION 1..85: note = Description of Unknown:hvTR_P27958 target sequence
VPPPRKKRTVVLTESTLPTALAELATKSFGSSSTSGITGDNTTTSSEPAPSGCPPDSDVESYSSMPPLEGEPGDPDLSDGSWSTV

SEQ ID NO: 16972 - protein, 85 aa, unidentified
  REGION 1..85: note = Description of Unknown:hvTR_P27958 target sequence
SSGADTEDVVCCSMSYSWTGALVTPCAAEEQKLPINALSNSLLRHHNLVYSTTSRSACQRKKKVTFDRLQVLDSHYQDVLKEVKA

SEQ ID NO: 16973 - protein, 85 aa, unidentified
  REGION 1..85: note = Description of Unknown:hvTR_P27958 target sequence
AASKVKANLLSVEEACSLAPPHSAKSKFGYGAKDVRCHARKAVAHINSVWKDLLEDSVTPIDTTIMAKNEVFCVQPEKGGRKPAR

SEQ ID NO: 16974 - protein, 85 aa, unidentified
  REGION 1..85: note = Description of Unknown:hvTR_P27958 target sequence
LIVFPDLGVRVCEKMALYDVVSKLPLAVMGSSYGFQYSPGQRVEFLVQAWKSKKTPMGLSYDTRCFDSTVTESDIRTEEAIYQCC

SEQ ID NO: 16975 - protein, 85 aa, unidentified
  REGION 1..85: note = Description of Unknown:hvTR_P27958 target sequence
DLDPQARVAIKSLTERLYVGGPLTNSRGENCGYRRCRASRVLTTSCGNTLTRYIKARAACRAAGLQDCTMLVCGDDLVVICESAG

SEQ ID NO: 16976 - protein, 85 aa, unidentified
  REGION 1..85: note = Description of Unknown:hvTR_P27958 target sequence
VQEDAASLRAFTEAMTRYSAPPGDPPQPEYDLELITSCSSNVSVAHDGAGKRVYYLTRDPTTPLARAAWETARHTPVNSWLGNII

SEQ ID NO: 16977 - protein, 85 aa, unidentified
  REGION 1..85: note = Description of Unknown:hvTR_P27958 target sequence
MFAPTLWARMILMTHFFSVLIARDQLEQALNCEIYGACYSIEPLDLPPIIQRLHGLSAFSLHSYSPGEINRVAACLRKLGVPPLR

SEQ ID NO: 16978 - protein, 85 aa, unidentified
  REGION 1..85: note = Description of Unknown:hvTR_P27958 target sequence
AWRHRAWSVRARLLARGGKAAICGKYLFNWAVRTKLKLTPITAAGRLDLSGWFTAGYSGGDIYHSVSHARPRWFWFCLLLLAAGV

SEQ ID NO: 16979 - protein, 85 aa, unidentified
  REGION 1..85: note = Description of Unknown:cds_NC_025351.1_cds_YP_009094087.1_7 target sequence
ESDFDISVSDVLYPECHLDSPIVGGKLITSLEYANLTHNQPHEDQTLLTNINVNKKKKIKSPLISQQSLFGNEVNKEIFDLKNYY

SEQ ID NO: 16980 - protein, 85 aa, unidentified
  REGION 1..85: note = Description of Unknown:cds_NC_025351.1_cds_YP_009094087.1_7 target sequence
HVPYPECNRDLFLISDDKIAFKLSKIMDNSNKLFDGLERKLSRLISNVDNQLLNATSLHNNSEMDRKGKEHPCFPEKSTIDDVRQ

SEQ ID NO: 16981 - protein, 85 aa, unidentified
  REGION 1..85: note = Description of Unknown:cds_NC_025351.1_cds_YP_009094087.1_7 target sequence
QRQTRDFPKNSTREGRSPKHPDAGPTPENSAKNDLHRDNTDNMPTGHSSTSMKKPKISGEEYLSMWLDSEDLGSKRISAQLGKDV

SEQ ID NO: 16982 - protein, 85 aa, unidentified
  REGION 1..85: note = Description of Unknown:cds_NC_025351.1_cds_YP_009094087.1_7 target sequence
SCKGHLHTTEDKPIIVPDTRYIQNHESNNDIFPKKEKKFCKLPPSSDNLTKIMVNSKWYNPFLFWFTVKTELRACQKENYKRKNR

SEQ ID NO: 16983 - protein, 85 aa, unidentified
  REGION 1..85: note = Description of Unknown:cds_NC_025351.1_cds_YP_009094087.1_7 target sequence
KLGIITSIKGSCYKLILNQNLVAIFEEDSSGYSDHKKRKKRCYYLTPEMVLMFSDVTEGRLMIDVAMRFDKKYKTLEKKALKLWF

SEQ ID NO: 16984 - protein, 85 aa, unidentified
  REGION 1..85: note = Description of Unknown:cds_NC_025351.1_cds_YP_009094087.1_7 target sequence
LIDELFPSMGNRVYNIISMLEPLTLAILQVKDESRLLRGAFMHHCLGDLFEELRESKNYPEDEIKRFANDLINVMTCRDIHLVAE

SEQ ID NO: 16985 - protein, 85 aa, unidentified
  REGION 1..85: note = Description of Unknown:cds_NC_025351.1_cds_YP_009094087.1_7 target sequence
FFSFFRTFGHPILNAQTAARKVREYMLADKILEYEPIMKGHAIFCAIIINGFRDRHGGVWPPLDLPKHCSKNIISLKNTGEGVTY

SEQ ID NO: 16986 - protein, 85 aa, unidentified
  REGION 1..85: note = Description of Unknown:cds_NC_025351.1_cds_YP_009094087.1_7 target sequence
EVAINNWRSFVGLKFKCFMGLNLDNDLSMYMKDKALSPLRDLWDSIYSREVMSYQPPRNKKSRRLVEVFVDDQDFDPVDMINYVL

SEQ ID NO: 16987 - protein, 85 aa, unidentified
  REGION 1..85: note = Description of Unknown:cds_NC_025351.1_cds_YP_009094087.1_7 target sequence
TGEYLRDDDFNASYSLKEKETKQVGRLFAKMTYKMRACQVIAENLIAHGIGRYFHENGMVKDEHELSKSLFQLSISGIPRGNKNN

SEQ ID NO: 16988 - protein, 85 aa, unidentified
  REGION 1..85: note = Description of Unknown:cds_NC_025351.1_cds_YP_009094087.1_7 target sequence
KSTNDTIHESKIENNHSFKNIQNRSFRKTDNPYNRFNIDNPTFLSPNCNPKYNRKNSETIGIFSRAETKSMIREQKSHREVKINK

SEQ ID NO: 16989 - protein, 85 aa, unidentified
  REGION 1..85: note = Description of Unknown:cds_NC_025351.1_cds_YP_009094087.1_7 target sequence
LDIGSDNEEQGKEIDAAKYKITDNPNPHINPQDQPGICQEDKGKEGAKSDLTEGMSFLEMHTLFNPSKSDIRTNLELEKSSLSNP

SEQ ID NO: 16990 - protein, 85 aa, unidentified
  REGION 1..85: note = Description of Unknown:cds_NC_025351.1_cds_YP_009094087.1_7 target sequence
GFISQKEKRGKTYNESHSLGKFSKEDEERYDVISAFLTTDLRKFCLNWRHESIGIFARRMDEIYGLPGFFNWMHRRLERSVLYVA

SEQ ID NO: 16991 - protein, 85 aa, unidentified
  REGION 1..85: note = Description of Unknown:cds_NC_025351.1_cds_YP_009094087.1_7 target sequence
DPHCPPSINEHIDLNDSPERDIFIHHPKGGIEGYSQKLWTIATIPFLFLSAHETNTRIAAVVQGDNQSIAITHKVHPHLPYKMKK

SEQ ID NO: 16992 - protein, 85 aa, unidentified
  REGION 1..85: note = Description of Unknown:cds_NC_025351.1_cds_YP_009094087.1_7 target sequence
ELSAMQAKKYFSRLRHNMKALGHELKATETIISTHFFIYSKKIHYDGAVLSQSLKSMARCVFWSETLVDETRAACSNISTTIAKA

SEQ ID NO: 16993 - protein, 85 aa, unidentified
  REGION 1..85: note = Description of Unknown:cds_NC_025351.1_cds_YP_009094087.1_7 target sequence
IENGYSRRSGYLINVLKTIQQINISLSFNINECMTDDIIRPFRDNPNWIKHAALIPASLGGLNYMNMSRLYVRNIGDPVTASIAD

SEQ ID NO: 16994 - protein, 85 aa, unidentified
  REGION 1..85: note = Description of Unknown:cds_NC_025351.1_cds_YP_009094087.1_7 target sequence
VKRMILGGVLPIGILHNIMLQEPGDATYLDWCSDPYSINLKQTQSITKVIKNITARVILRNSVNPLLKGLFHEGAYEEDTELATF

SEQ ID NO: 16995 - protein, 85 aa, unidentified
  REGION 1..85: note = Description of Unknown:cds_NC_025351.1_cds_YP_009094087.1_7 target sequence
ILDRRVILPRVGHEILNNSITGAREEISGLLDTTKGLIRIGIAKGGLTQRTLSRISNYDYEQFLNLMNMLKNKEQNSVISLSACS

SEQ ID NO: 16996 - protein, 85 aa, unidentified
  REGION 1..85: note = Description of Unknown:cds_NC_025351.1_cds_YP_009094087.1_7 target sequence
VDFAIALRSRMWRKLAKGRLIYGLEVPDPIEAMIGFLILGSENCLLCDSGSKNYTWFFIPKDVQLDKIDKDHASIRVPYVGSTTE

SEQ ID NO: 16997 - protein, 85 aa, unidentified
  REGION 1..85: note = Description of Unknown:cds_NC_025351.1_cds_YP_009094087.1_7 target sequence
ERSEIKLGSVKNPSKSLKSAIRLATVYTWAFGTSDAEWWEAWYLSNQRANIPLDVLKTITPISTSTNIAHRLRDRSTQVKYASTS

SEQ ID NO: 16998 - protein, 85 aa, unidentified
  REGION 1..85: note = Description of Unknown:cds_NC_025351.1_cds_YP_009094087.1_7 target sequence
LNRVSRHVTISNDNMNFEFDGVKMDTNLIYQQVMLLGLSCLESLFRNRKMTNSYNIVYHLHVQEHCCVKALNDLPYTPSTHPVPN

SEQ ID NO: 16999 - protein, 85 aa, unidentified
  REGION 1..85: note = Description of Unknown:cds_NC_025351.1_cds_YP_009094087.1_7 target sequence
YTEVRDNRLIYDPQPILEFDELRLAIQQTKKVDLEFSLWDTKELHENLAQSLAITVTDIMTKSDKDHIKDQRSIDVDDNIKTLIT

SEQ ID NO: 17000 - protein, 85 aa, unidentified
  REGION 1..85: note = Description of Unknown:cds_NC_025351.1_cds_YP_009094087.1_7 target sequence
EFLLVDPEMFAVNLGLHISIKWSFDIHFKRPRGRYSMIEYLTDLLDNTSSHVYRILTNVLSHPRVMRKFTNAGLLVPKYGPYLTS

SEQ ID NO: 17001 - protein, 85 aa, unidentified
  REGION 1..85: note = Description of Unknown:cds_NC_025351.1_cds_YP_009094087.1_7 target sequence
QDFKKMAVDFIITAYTTFLTNWCNNNKFSILIPEQDPDILELRKDITHARHLCMISDLYCYSFKQPWIKELTPQEKICVMEDFIA

SEQ ID NO: 17002 - protein, 85 aa, unidentified
  REGION 1..85: note = Description of Unknown:cds_NC_025351.1_cds_YP_009094087.1_7 target sequence
NCVANDQTSAGWNITPLRVYNLPASTTYIRRGIIKQLRIRQSNEPIDLEDIRIGQNPDFVNKPIEFCSSEFGITIYNLEEILQSN

SEQ ID NO: 17003 - protein, 85 aa, unidentified
  REGION 1..85: note = Description of Unknown:cds_NC_025351.1_cds_YP_009094087.1_7 target sequence
VHLSVNMNIDSSTSNNTENHLFRRVGLNSTSSYKALSLTPVIKRYHQQNTNRLFIGEGSGSMMYLYQKTLGETICFFNSGVQYNE

SEQ ID NO: 17004 - protein, 85 aa, unidentified
  REGION 1..85: note = Description of Unknown:cds_NC_025351.1_cds_YP_009094087.1_7 target sequence
DLGQREQSLYPSEYSICEQGVKKENPLTGHVIPLFNGRPETTWVGNDDSFKYILEHTINRDIGLVHSDMETGIGKDNYTILNEHA

SEQ ID NO: 17005 - protein, 85 aa, unidentified
  REGION 1..85: note = Description of Unknown:cds_NC_025351.1_cds_YP_009094087.1_7 target sequence
HLIALSLTVMIDDGILVSKVAYAPGFCISSLLNMYRTFFSLVLCAFPPYSNFESTEFYLICLQKSIPGPITPARAIQQTTKQSRE

SEQ ID NO: 17006 - protein, 85 aa, unidentified
  REGION 1..85: note = Description of Unknown:cds_NC_025351.1_cds_YP_009094087.1_7 target sequence
EDNSITNNILKIKNLVQKEFIKTVKKKYEIHPSFNCPINFTKDDKYLMSVGFQANGPDMIRKETGYDIGSNVENLRDVLIKLFAD

SEQ ID NO: 17007 - protein, 85 aa, unidentified
  REGION 1..85: note = Description of Unknown:cds_NC_025351.1_cds_YP_009094087.1_7 target sequence
AVTFYDDVTNKKNFLNPYPVYTRTQYKILMDKICKKVTLYTLIISCKGSNQYCWEIKSQIRKHCLILDLKSKVFTKLIPKGLRER

SEQ ID NO: 17008 - protein, 84 aa, unidentified
  REGION 1..84: note = Description of Unknown:cds_NC_025351.1_cds_YP_009094087.1_7 target sequence
VTLYTLIISCKGSNQYCWEIKSQIRKHCLILDLKSKVFTKLIPKGLRERGDSKGMKSIWFTKLTSQEVKRWWKMISYIVIISNP

SEQ ID NO: 17009 - protein, 85 aa, unidentified
  REGION 1..85: note = Description of Unknown:cds_NC_025351.1_cds_YP_009094087.1_7 target sequence
ITSLEYANLTHNQPHEDQTLLTNINVNKKKKIKSPLISQQSLFGNEVNKEIFDLKNYYHVPYPECNRDLFLISDDKIAFKLSKIM

SEQ ID NO: 17010 - protein, 85 aa, unidentified
  REGION 1..85: note = Description of Unknown:cds_NC_025351.1_cds_YP_009094087.1_7 target sequence
DNSNKLFDGLERKLSRLISNVDNQLLNATSLHNNSEMDRKGKEHPCFPEKSTIDDVRQQRQTRDFPKNSTREGRSPKHPDAGPTP

SEQ ID NO: 17011 - protein, 85 aa, unidentified
  REGION 1..85: note = Description of Unknown:cds_NC_025351.1_cds_YP_009094087.1_7 target sequence
ENSAKNDLHRDNTDNMPTGHSSTSMKKPKISGEEYLSMWLDSEDLGSKRISAQLGKDVSCKGHLHTTEDKPIIVPDTRYIQNHES

SEQ ID NO: 17012 - protein, 85 aa, unidentified
  REGION 1..85: note = Description of Unknown:cds_NC_025351.1_cds_YP_009094087.1_7 target sequence
NNDIFPKKEKKFCKLPPSSDNLTKIMVNSKWYNPFLFWFTVKTELRACQKENYKRKNRKLGIITSIKGSCYKLILNQNLVAIFEE

SEQ ID NO: 17013 - protein, 85 aa, unidentified
  REGION 1..85: note = Description of Unknown:cds_NC_025351.1_cds_YP_009094087.1_7 target sequence
DSSGYSDHKKRKKRCYYLTPEMVLMFSDVTEGRLMIDVAMRFDKKYKTLEKKALKLWFLIDELFPSMGNRVYNIISMLEPLTLAI

SEQ ID NO: 17014 - protein, 85 aa, unidentified
  REGION 1..85: note = Description of Unknown:cds_NC_025351.1_cds_YP_009094087.1_7 target sequence
LQVKDESRLLRGAFMHHCLGDLFEELRESKNYPEDEIKRFANDLINVMTCRDIHLVAEFFSFFRTFGHPILNAQTAARKVREYML

SEQ ID NO: 17015 - protein, 85 aa, unidentified
  REGION 1..85: note = Description of Unknown:cds_NC_025351.1_cds_YP_009094087.1_7 target sequence
ADKILEYEPIMKGHAIFCAIIINGFRDRHGGVWPPLDLPKHCSKNIISLKNTGEGVTYEVAINNWRSFVGLKFKCFMGLNLDNDL

SEQ ID NO: 17016 - protein, 85 aa, unidentified
  REGION 1..85: note = Description of Unknown:cds_NC_025351.1_cds_YP_009094087.1_7 target sequence
SMYMKDKALSPLRDLWDSIYSREVMSYQPPRNKKSRRLVEVFVDDQDFDPVDMINYVLTGEYLRDDDFNASYSLKEKETKQVGRL

SEQ ID NO: 17017 - protein, 85 aa, unidentified
  REGION 1..85: note = Description of Unknown:cds_NC_025351.1_cds_YP_009094087.1_7 target sequence
FAKMTYKMRACQVIAENLIAHGIGRYFHENGMVKDEHELSKSLFQLSISGIPRGNKNNKSTNDTIHESKIENNHSFKNIQNRSFR

SEQ ID NO: 17018 - protein, 85 aa, unidentified
  REGION 1..85: note = Description of Unknown:cds_NC_025351.1_cds_YP_009094087.1_7 target sequence
KTDNPYNRFNIDNPTFLSPNCNPKYNRKNSETIGIFSRAETKSMIREQKSHREVKINKLDIGSDNEEQGKEIDAAKYKITDNPNP

SEQ ID NO: 17019 - protein, 85 aa, unidentified
  REGION 1..85: note = Description of Unknown:cds_NC_025351.1_cds_YP_009094087.1_7 target sequence
HINPQDQPGICQEDKGKEGAKSDLTEGMSFLEMHTLFNPSKSDIRTNLELEKSSLSNPGFISQKEKRGKTYNESHSLGKFSKEDE

SEQ ID NO: 17020 - protein, 85 aa, unidentified
  REGION 1..85: note = Description of Unknown:cds_NC_025351.1_cds_YP_009094087.1_7 target sequence
ERYDVISAFLTTDLRKFCLNWRHESIGIFARRMDEIYGLPGFFNWMHRRLERSVLYVADPHCPPSINEHIDLNDSPERDIFIHHP

SEQ ID NO: 17021 - protein, 85 aa, unidentified
  REGION 1..85: note = Description of Unknown:cds_NC_025351.1_cds_YP_009094087.1_7 target sequence
KGGIEGYSQKLWTIATIPFLFLSAHETNTRIAAVVQGDNQSIAITHKVHPHLPYKMKKELSAMQAKKYFSRLRHNMKALGHELKA

SEQ ID NO: 17022 - protein, 85 aa, unidentified
  REGION 1..85: note = Description of Unknown:cds_NC_025351.1_cds_YP_009094087.1_7 target sequence
TETIISTHFFIYSKKIHYDGAVLSQSLKSMARCVFWSETLVDETRAACSNISTTIAKAIENGYSRRSGYLINVLKTIQQINISLS

SEQ ID NO: 17023 - protein, 85 aa, unidentified
  REGION 1..85: note = Description of Unknown:cds_NC_025351.1_cds_YP_009094087.1_7 target sequence
FNINECMTDDIIRPFRDNPNWIKHAALIPASLGGLNYMNMSRLYVRNIGDPVTASIADVKRMILGGVLPIGILHNIMLQEPGDAT

SEQ ID NO: 17024 - protein, 85 aa, unidentified
  REGION 1..85: note = Description of Unknown:cds_NC_025351.1_cds_YP_009094087.1_7 target sequence
YLDWCSDPYSINLKQTQSITKVIKNITARVILRNSVNPLLKGLFHEGAYEEDTELATFILDRRVILPRVGHEILNNSITGAREEI

SEQ ID NO: 17025 - protein, 85 aa, unidentified
  REGION 1..85: note = Description of Unknown:cds_NC_025351.1_cds_YP_009094087.1_7 target sequence
SGLLDTTKGLIRIGIAKGGLTQRTLSRISNYDYEQFLNLMNMLKNKEQNSVISLSACSVDFAIALRSRMWRKLAKGRLIYGLEVP

SEQ ID NO: 17026 - protein, 85 aa, unidentified
  REGION 1..85: note = Description of Unknown:cds_NC_025351.1_cds_YP_009094087.1_7 target sequence
DPIEAMIGFLILGSENCLLCDSGSKNYTWFFIPKDVQLDKIDKDHASIRVPYVGSTTEERSEIKLGSVKNPSKSLKSAIRLATVY

SEQ ID NO: 17027 - protein, 85 aa, unidentified
  REGION 1..85: note = Description of Unknown:cds_NC_025351.1_cds_YP_009094087.1_7 target sequence
TWAFGTSDAEWWEAWYLSNQRANIPLDVLKTITPISTSTNIAHRLRDRSTQVKYASTSLNRVSRHVTISNDNMNFEFDGVKMDTN

SEQ ID NO: 17028 - protein, 85 aa, unidentified
  REGION 1..85: note = Description of Unknown:cds_NC_025351.1_cds_YP_009094087.1_7 target sequence
LIYQQVMLLGLSCLESLFRNRKMTNSYNIVYHLHVQEHCCVKALNDLPYTPSTHPVPNYTEVRDNRLIYDPQPILEFDELRLAIQ

SEQ ID NO: 17029 - protein, 85 aa, unidentified
  REGION 1..85: note = Description of Unknown:cds_NC_025351.1_cds_YP_009094087.1_7 target sequence
QTKKVDLEFSLWDTKELHENLAQSLAITVTDIMTKSDKDHIKDQRSIDVDDNIKTLITEFLLVDPEMFAVNLGLHISIKWSFDIH

SEQ ID NO: 17030 - protein, 85 aa, unidentified
  REGION 1..85: note = Description of Unknown:cds_NC_025351.1_cds_YP_009094087.1_7 target sequence
FKRPRGRYSMIEYLTDLLDNTSSHVYRILTNVLSHPRVMRKFTNAGLLVPKYGPYLTSQDFKKMAVDFIITAYTTFLTNWCNNNK

SEQ ID NO: 17031 - protein, 85 aa, unidentified
  REGION 1..85: note = Description of Unknown:cds_NC_025351.1_cds_YP_009094087.1_7 target sequence
FSILIPEQDPDILELRKDITHARHLCMISDLYCYSFKQPWIKELTPQEKICVMEDFIANCVANDQTSAGWNITPLRVYNLPASTT

SEQ ID NO: 17032 - protein, 85 aa, unidentified
  REGION 1..85: note = Description of Unknown:cds_NC_025351.1_cds_YP_009094087.1_7 target sequence
YIRRGIIKQLRIRQSNEPIDLEDIRIGQNPDFVNKPIEFCSSEFGITIYNLEEILQSNVHLSVNMNIDSSTSNNTENHLFRRVGL

SEQ ID NO: 17033 - protein, 85 aa, unidentified
  REGION 1..85: note = Description of Unknown:cds_NC_025351.1_cds_YP_009094087.1_7 target sequence
NSTSSYKALSLTPVIKRYHQQNTNRLFIGEGSGSMMYLYQKTLGETICFFNSGVQYNEDLGQREQSLYPSEYSICEQGVKKENPL

SEQ ID NO: 17034 - protein, 85 aa, unidentified
  REGION 1..85: note = Description of Unknown:cds_NC_025351.1_cds_YP_009094087.1_7 target sequence
TGHVIPLFNGRPETTWVGNDDSFKYILEHTINRDIGLVHSDMETGIGKDNYTILNEHAHLIALSLTVMIDDGILVSKVAYAPGFC

SEQ ID NO: 17035 - protein, 85 aa, unidentified
  REGION 1..85: note = Description of Unknown:cds_NC_025351.1_cds_YP_009094087.1_7 target sequence
ISSLLNMYRTFFSLVLCAFPPYSNFESTEFYLICLQKSIPGPITPARAIQQTTKQSREEDNSITNNILKIKNLVQKEFIKTVKKK

SEQ ID NO: 17036 - protein, 85 aa, unidentified
  REGION 1..85: note = Description of Unknown:cds_NC_025351.1_cds_YP_009094087.1_7 target sequence
YEIHPSFNCPINFTKDDKYLMSVGFQANGPDMIRKETGYDIGSNVENLRDVLIKLFADAVTFYDDVTNKKNFLNPYPVYTRTQYK

SEQ ID NO: 17037 - protein, 85 aa, unidentified
  REGION 1..85: note = Description of Unknown:cds_NC_025351.1_cds_YP_009094087.1_7 target sequence
ILMDKICKKVTLYTLIISCKGSNQYCWEIKSQIRKHCLILDLKSKVFTKLIPKGLRERGDSKGMKSIWFTKLTSQEVKRWWKMIS

SEQ ID NO: 17038 - protein, 85 aa, unidentified
  REGION 1..85: note = Description of Unknown:cds_NC_001449.1_cds_NP_040822.1_1 target sequence
EKVHVDIEEDSPFLRALQRSFPQFEVEAKQVTDNDHANARAFSHLASKLIETEVDPSDTILDIGSAPARRMYSKHKYHCICPMRC

SEQ ID NO: 17039 - protein, 85 aa, unidentified
  REGION 1..85: note = Description of Unknown:cds_NC_001449.1_cds_NP_040822.1_1 target sequence
AEDPDRLYKYATKLKKNCKEITDKELDKKMKELAAVMSDPDLETETMCLHDDESCRYEGQVAVYQDVYAVDGPTSLYHQANKGVR

SEQ ID NO: 17040 - protein, 85 aa, unidentified
  REGION 1..85: note = Description of Unknown:cds_NC_001449.1_cds_NP_040822.1_1 target sequence
VAYWIGFDTTPFMFKNLAGAYPSYSTNWADETVLTARNIGLCSSDVMERSRRGMSILRKKYLKPSNNVLFSVGSTIYHEKRDLLR

SEQ ID NO: 17041 - protein, 85 aa, unidentified
  REGION 1..85: note = Description of Unknown:cds_NC_001449.1_cds_NP_040822.1_1 target sequence
SWHLPSVFHLRGKQNYTCRCETIVSCDGYVVKRIAISPGLYGKPSGYAATMHREGFLCCKVTDTLNGERVSFPVCTYVPATLCDQ

SEQ ID NO: 17042 - protein, 85 aa, unidentified
  REGION 1..85: note = Description of Unknown:cds_NC_001449.1_cds_NP_040822.1_1 target sequence
MTGILATDVSADDAQKLLVGLNQRIVVNGRTQRNTNTMKNYLLPVVAQAFARWAKEYKEDQEDERPLGLRDRQLVMGCCWAFRRH

SEQ ID NO: 17043 - protein, 85 aa, unidentified
  REGION 1..85: note = Description of Unknown:cds_NC_001449.1_cds_NP_040822.1_1 target sequence
KITSIYKRPDTQTIIKVNSDFHSFVLPRIGSNTLEIGLRTRIRKMLEEHKEPSPLITAEDIQEAKCAADEAKEVREAEELRAALP

SEQ ID NO: 17044 - protein, 85 aa, unidentified
  REGION 1..85: note = Description of Unknown:cds_NC_001449.1_cds_NP_040822.1_1 target sequence
PLAADFEEPTLEADVDLMLQEAGAGSVETPRGLIKVTSYAGEDKIGSYAVLSPQAVLKSEKLSCIHPLAEQVIVITHSGRKGRYA

SEQ ID NO: 17045 - protein, 85 aa, unidentified
  REGION 1..85: note = Description of Unknown:cds_NC_001449.1_cds_NP_040822.1_1 target sequence
VEPYHGKVVVPEGHAIPVQDFQALSESATIVYNEREFVNRYLHHIATHGGALNTDEEYYKTVKPSEHDGEYLYDIDRKQCVKKEL

SEQ ID NO: 17046 - protein, 85 aa, unidentified
  REGION 1..85: note = Description of Unknown:cds_NC_001449.1_cds_NP_040822.1_1 target sequence
VTGLGLTGELVDPPFHEFAYESLRTRPAAPYQVPTIGVYGVPGSGKSGIIKSAVTKKDLVVSAKKENCAEIIRDVKKMKGLDVNA

SEQ ID NO: 17047 - protein, 85 aa, unidentified
  REGION 1..85: note = Description of Unknown:cds_NC_001449.1_cds_NP_040822.1_1 target sequence
RTVDSVLLNGCKHPVETLYIDEAFACHAGTLRALIAIIRPKKAVLCGDPKQCGFFNMMCLKVHFNHEICTQVFHKSISRRCTKSV

SEQ ID NO: 17048 - protein, 85 aa, unidentified
  REGION 1..85: note = Description of Unknown:cds_NC_001449.1_cds_NP_040822.1_1 target sequence
TSVVSTLFYDKRMRTTNPKETKIVIDTTGSTKPKQDDLILTCFRGWVKQLQIDYKGNEIMTAAASQGLTRKGVYAVRYKVNENPL

SEQ ID NO: 17049 - protein, 85 aa, unidentified
  REGION 1..85: note = Description of Unknown:cds_NC_001449.1_cds_NP_040822.1_1 target sequence
YAPTSEHVNVLLTRTEDRIVWKTLAGDPWIKILTAKYPGNFTATIEEWQAEHDAIMRHILERPDPTDVFQNKANVCWAKALVPVL

SEQ ID NO: 17050 - protein, 85 aa, unidentified
  REGION 1..85: note = Description of Unknown:cds_NC_001449.1_cds_NP_040822.1_1 target sequence
KTAGIDMTTEQWNTVDYFETDKAHSAEIVLNQLCVRFFGLDLDSGLFSAPTVPLSIRNNHWDNSPSPNMYGLNKEVVRQLSRRYP

SEQ ID NO: 17051 - protein, 85 aa, unidentified
  REGION 1..85: note = Description of Unknown:cds_NC_001449.1_cds_NP_040822.1_1 target sequence
QLPRAVATGRVYDMNTGTLRNYDPRINLVPVNRRLPHALVLHHNEHPQSDFSSFVSKLKGRTVLVVGEKLSVPGKKVDWLSDQPE

SEQ ID NO: 17052 - protein, 85 aa, unidentified
  REGION 1..85: note = Description of Unknown:cds_NC_001449.1_cds_NP_040822.1_1 target sequence
ATFRARLDLGIPGDVPKYDIVFINVRTPYKYHHYQQCEDHAIKLSMLTKKACLHLNPGGTCVSIGYGYADRASESIIGAIARQFK

SEQ ID NO: 17053 - protein, 85 aa, unidentified
  REGION 1..85: note = Description of Unknown:cds_NC_001449.1_cds_NP_040822.1_1 target sequence
FSRVCKPKSSHEETEVLFVFIGYDRKARTHNPYKLSSTLTNIYTGSRLHEAGCAPSYHVVRGDIATATEGVIINAANSKGQPGGG

SEQ ID NO: 17054 - protein, 85 aa, unidentified
  REGION 1..85: note = Description of Unknown:cds_NC_001449.1_cds_NP_040822.1_1 target sequence
VCGALYKKFPESFDLQPIEVGKARLVKGAAKHIIHAVGPNFNKVSEVEGDKQLAEAYESIAKIVNDNNYKSVAIPLLSTGIFSGN

SEQ ID NO: 17055 - protein, 85 aa, unidentified
  REGION 1..85: note = Description of Unknown:cds_NC_001449.1_cds_NP_040822.1_1 target sequence
KDRLTQSLNHLLTALDTTDADVAIYCRDKKWEMTLKEAVARREAVEEICISDDSSVTEPDAELVRVHPKSSLAGRKGYSTSDGKT

SEQ ID NO: 17056 - protein, 85 aa, unidentified
  REGION 1..85: note = Description of Unknown:cds_NC_001449.1_cds_NP_040822.1_1 target sequence
FSYLEGTKFHQAAKDIAEINAMWPVATEANEQVCMYILGESMSSIRSKCPVEESEASTPPSTLPCLCIHAMTPERVQRLKASRPE

SEQ ID NO: 17057 - protein, 85 aa, unidentified
  REGION 1..85: note = Description of Unknown:cds_NC_001449.1_cds_NP_040822.1_1 target sequence
QITVCSSFPLPKYRITGVQKIQCSQPILFSPKVPAYIHPRKYLVETPPVEETPESPAENQSTEGTPEQPALVNVDATRTRMPEPI

SEQ ID NO: 17058 - protein, 85 aa, unidentified
  REGION 1..85: note = Description of Unknown:cds_NC_001449.1_cds_NP_040822.1_1 target sequence
IIEEEEEDSISLLSDGPTHQVLQVEADIHGSPSVSSSSWSIPHASDFDVDSLSILDTLDGASVTSGAVSAETNSYFARSMEFRAR

SEQ ID NO: 17059 - protein, 85 aa, unidentified
  REGION 1..85: note = Description of Unknown:cds_NC_001449.1_cds_NP_040822.1_1 target sequence
PVPAPRTVFRNPPHPAPRTRTPPLAHSRASSRTSLVSTPPGVNRVITREELEALTPSRAPSRSASRTSLVSNPPGVNRVITREEF

SEQ ID NO: 17060 - protein, 8 aa, unidentified
  REGION 1..8: note = Description of Unknown:cds_NC_001449.1_cds_NP_040822.1_1 target sequence
EAFVAQQQ

SEQ ID NO: 17061 - protein, 85 aa, unidentified
  REGION 1..85: note = Description of Unknown:cds_NC_001449.1_cds_NP_040822.1_1 target sequence
NMKAITARRILQGLGHYLKAEGKVECYRTLHPVPLYSSSVNRAFSSPKVAVEACNAMLKENFPTVASYCIIPEYDAYLDMVDGAS

SEQ ID NO: 17062 - protein, 85 aa, unidentified
  REGION 1..85: note = Description of Unknown:cds_NC_001449.1_cds_NP_040822.1_1 target sequence
CCLDTASFCPAKLRSFPKKHSYLEPTIRSAVPSAIQNTLQNVLAAATKRNCNVTQMRELPVLDSAAFNVECFKKYACNNEYWETF

SEQ ID NO: 17063 - protein, 85 aa, unidentified
  REGION 1..85: note = Description of Unknown:cds_NC_001449.1_cds_NP_040822.1_1 target sequence
KENPIRLTEENVVNYITKLKGPKAAALFAKTHNLNMLQDIPMDRFVMDLKRDVKVTPGTKHTEERPKVQVIQAADPLATADLCGI

SEQ ID NO: 17064 - protein, 85 aa, unidentified
  REGION 1..85: note = Description of Unknown:cds_NC_001449.1_cds_NP_040822.1_1 target sequence
HRELVRRLNAVLLPNIHTLFDMSAEDFDAIIAEHFQPGDCVLETDIASFDKSEDDAMALTALMILEDLGVDAELLTLIEAAFGEI

SEQ ID NO: 17065 - protein, 85 aa, unidentified
  REGION 1..85: note = Description of Unknown:cds_NC_001449.1_cds_NP_040822.1_1 target sequence
SSIHLPTKTKFKFGAMMKSGMFLTLFVNTVINIVIASRVLRERLTGSPCAAFIGDDNIVKGVKSDKLMADRCATWLNMEVKIIDA

SEQ ID NO: 17066 - protein, 85 aa, unidentified
  REGION 1..85: note = Description of Unknown:cds_NC_001449.1_cds_NP_040822.1_1 target sequence
VVGEKAPYFCGGFILCDSVTGTACRVADPLKRLFKLGKPLAVDDEHDDDRRRALHEESTRWNRVGILPELCKAVESRYETVGTSI

SEQ ID NO: 17067 - protein, 84 aa, unidentified
  REGION 1..84: note = Description of Unknown:cds_NC_001449.1_cds_NP_040822.1_1 target sequence
PLKRLFKLGKPLAVDDEHDDDRRRALHEESTRWNRVGILPELCKAVESRYETVGTSIIVMAMTTLASSVKSFSYLRGAPITLYG

SEQ ID NO: 17068 - protein, 85 aa, unidentified
  REGION 1..85: note = Description of Unknown:cds_NC_001449.1_cds_NP_040822.1_1 target sequence
AKQVTDNDHANARAFSHLASKLIETEVDPSDTILDIGSAPARRMYSKHKYHCICPMRCAEDPDRLYKYATKLKKNCKEITDKELD

SEQ ID NO: 17069 - protein, 85 aa, unidentified
  REGION 1..85: note = Description of Unknown:cds_NC_001449.1_cds_NP_040822.1_1 target sequence
KKMKELAAVMSDPDLETETMCLHDDESCRYEGQVAVYQDVYAVDGPTSLYHQANKGVRVAYWIGFDTTPFMFKNLAGAYPSYSTN

SEQ ID NO: 17070 - protein, 85 aa, unidentified
  REGION 1..85: note = Description of Unknown:cds_NC_001449.1_cds_NP_040822.1_1 target sequence
WADETVLTARNIGLCSSDVMERSRRGMSILRKKYLKPSNNVLFSVGSTIYHEKRDLLRSWHLPSVFHLRGKQNYTCRCETIVSCD

SEQ ID NO: 17071 - protein, 85 aa, unidentified
  REGION 1..85: note = Description of Unknown:cds_NC_001449.1_cds_NP_040822.1_1 target sequence
GYVVKRIAISPGLYGKPSGYAATMHREGFLCCKVTDTLNGERVSFPVCTYVPATLCDQMTGILATDVSADDAQKLLVGLNQRIVV

SEQ ID NO: 17072 - protein, 85 aa, unidentified
  REGION 1..85: note = Description of Unknown:cds_NC_001449.1_cds_NP_040822.1_1 target sequence
NGRTQRNTNTMKNYLLPVVAQAFARWAKEYKEDQEDERPLGLRDRQLVMGCCWAFRRHKITSIYKRPDTQTIIKVNSDFHSFVLP

SEQ ID NO: 17073 - protein, 85 aa, unidentified
  REGION 1..85: note = Description of Unknown:cds_NC_001449.1_cds_NP_040822.1_1 target sequence
RIGSNTLEIGLRTRIRKMLEEHKEPSPLITAEDIQEAKCAADEAKEVREAEELRAALPPLAADFEEPTLEADVDLMLQEAGAGSV

SEQ ID NO: 17074 - protein, 85 aa, unidentified
  REGION 1..85: note = Description of Unknown:cds_NC_001449.1_cds_NP_040822.1_1 target sequence
ETPRGLIKVTSYAGEDKIGSYAVLSPQAVLKSEKLSCIHPLAEQVIVITHSGRKGRYAVEPYHGKVVVPEGHAIPVQDFQALSES

SEQ ID NO: 17075 - protein, 85 aa, unidentified
  REGION 1..85: note = Description of Unknown:cds_NC_001449.1_cds_NP_040822.1_1 target sequence
ATIVYNEREFVNRYLHHIATHGGALNTDEEYYKTVKPSEHDGEYLYDIDRKQCVKKELVTGLGLTGELVDPPFHEFAYESLRTRP

SEQ ID NO: 17076 - protein, 85 aa, unidentified
  REGION 1..85: note = Description of Unknown:cds_NC_001449.1_cds_NP_040822.1_1 target sequence
AAPYQVPTIGVYGVPGSGKSGIIKSAVTKKDLVVSAKKENCAEIIRDVKKMKGLDVNARTVDSVLLNGCKHPVETLYIDEAFACH

SEQ ID NO: 17077 - protein, 85 aa, unidentified
  REGION 1..85: note = Description of Unknown:cds_NC_001449.1_cds_NP_040822.1_1 target sequence
AGTLRALIAIIRPKKAVLCGDPKQCGFFNMMCLKVHFNHEICTQVFHKSISRRCTKSVTSVVSTLFYDKRMRTTNPKETKIVIDT

SEQ ID NO: 17078 - protein, 85 aa, unidentified
  REGION 1..85: note = Description of Unknown:cds_NC_001449.1_cds_NP_040822.1_1 target sequence
TGSTKPKQDDLILTCFRGWVKQLQIDYKGNEIMTAAASQGLTRKGVYAVRYKVNENPLYAPTSEHVNVLLTRTEDRIVWKTLAGD

SEQ ID NO: 17079 - protein, 85 aa, unidentified
  REGION 1..85: note = Description of Unknown:cds_NC_001449.1_cds_NP_040822.1_1 target sequence
PWIKILTAKYPGNFTATIEEWQAEHDAIMRHILERPDPTDVFQNKANVCWAKALVPVLKTAGIDMTTEQWNTVDYFETDKAHSAE

SEQ ID NO: 17080 - protein, 85 aa, unidentified
  REGION 1..85: note = Description of Unknown:cds_NC_001449.1_cds_NP_040822.1_1 target sequence
IVLNQLCVRFFGLDLDSGLFSAPTVPLSIRNNHWDNSPSPNMYGLNKEVVRQLSRRYPQLPRAVATGRVYDMNTGTLRNYDPRIN

SEQ ID NO: 17081 - protein, 85 aa, unidentified
  REGION 1..85: note = Description of Unknown:cds_NC_001449.1_cds_NP_040822.1_1 target sequence
LVPVNRRLPHALVLHHNEHPQSDFSSFVSKLKGRTVLVVGEKLSVPGKKVDWLSDQPEATFRARLDLGIPGDVPKYDIVFINVRT

SEQ ID NO: 17082 - protein, 85 aa, unidentified
  REGION 1..85: note = Description of Unknown:cds_NC_001449.1_cds_NP_040822.1_1 target sequence
PYKYHHYQQCEDHAIKLSMLTKKACLHLNPGGTCVSIGYGYADRASESIIGAIARQFKFSRVCKPKSSHEETEVLFVFIGYDRKA

SEQ ID NO: 17083 - protein, 85 aa, unidentified
  REGION 1..85: note = Description of Unknown:cds_NC_001449.1_cds_NP_040822.1_1 target sequence
RTHNPYKLSSTLTNIYTGSRLHEAGCAPSYHVVRGDIATATEGVIINAANSKGQPGGGVCGALYKKFPESFDLQPIEVGKARLVK

SEQ ID NO: 17084 - protein, 85 aa, unidentified
  REGION 1..85: note = Description of Unknown:cds_NC_001449.1_cds_NP_040822.1_1 target sequence
GAAKHIIHAVGPNFNKVSEVEGDKQLAEAYESIAKIVNDNNYKSVAIPLLSTGIFSGNKDRLTQSLNHLLTALDTTDADVAIYCR

SEQ ID NO: 17085 - protein, 85 aa, unidentified
  REGION 1..85: note = Description of Unknown:cds_NC_001449.1_cds_NP_040822.1_1 target sequence
DKKWEMTLKEAVARREAVEEICISDDSSVTEPDAELVRVHPKSSLAGRKGYSTSDGKTFSYLEGTKFHQAAKDIAEINAMWPVAT

SEQ ID NO: 17086 - protein, 85 aa, unidentified
  REGION 1..85: note = Description of Unknown:cds_NC_001449.1_cds_NP_040822.1_1 target sequence
EANEQVCMYILGESMSSIRSKCPVEESEASTPPSTLPCLCIHAMTPERVQRLKASRPEQITVCSSFPLPKYRITGVQKIQCSQPI

SEQ ID NO: 17087 - protein, 85 aa, unidentified
  REGION 1..85: note = Description of Unknown:cds_NC_001449.1_cds_NP_040822.1_1 target sequence
LFSPKVPAYIHPRKYLVETPPVEETPESPAENQSTEGTPEQPALVNVDATRTRMPEPIIIEEEEEDSISLLSDGPTHQVLQVEAD

SEQ ID NO: 17088 - protein, 85 aa, unidentified
  REGION 1..85: note = Description of Unknown:cds_NC_001449.1_cds_NP_040822.1_1 target sequence
IHGSPSVSSSSWSIPHASDFDVDSLSILDTLDGASVTSGAVSAETNSYFARSMEFRARPVPAPRTVFRNPPHPAPRTRTPPLAHS

SEQ ID NO: 17089 - protein, 66 aa, unidentified
  REGION 1..66: note = Description of Unknown:cds_NC_001449.1_cds_NP_040822.1_1 target sequence
RASSRTSLVSTPPGVNRVITREELEALTPSRAPSRSASRTSLVSNPPGVNRVITREEFEAFVAQQQ

SEQ ID NO: 17090 - protein, 85 aa, unidentified
  REGION 1..85: note = Description of Unknown:cds_NC_001449.1_cds_NP_040822.1_1 target sequence
QQKSVRQTVLSEVVLERTELEISYAPRLDQEKEELLRKKLQLNPTPANRSRYQSRRVENMKAITARRILQGLGHYLKAEGKVECY

SEQ ID NO: 17091 - protein, 85 aa, unidentified
  REGION 1..85: note = Description of Unknown:cds_NC_001449.1_cds_NP_040822.1_1 target sequence
RTLHPVPLYSSSVNRAFSSPKVAVEACNAMLKENFPTVASYCIIPEYDAYLDMVDGASCCLDTASFCPAKLRSFPKKHSYLEPTI

SEQ ID NO: 17092 - protein, 85 aa, unidentified
  REGION 1..85: note = Description of Unknown:cds_NC_001449.1_cds_NP_040822.1_1 target sequence
RSAVPSAIQNTLQNVLAAATKRNCNVTQMRELPVLDSAAFNVECFKKYACNNEYWETFKENPIRLTEENVVNYITKLKGPKAAAL

SEQ ID NO: 17093 - protein, 85 aa, unidentified
  REGION 1..85: note = Description of Unknown:cds_NC_001449.1_cds_NP_040822.1_1 target sequence
FAKTHNLNMLQDIPMDRFVMDLKRDVKVTPGTKHTEERPKVQVIQAADPLATADLCGIHRELVRRLNAVLLPNIHTLFDMSAEDF

SEQ ID NO: 17094 - protein, 85 aa, unidentified
  REGION 1..85: note = Description of Unknown:cds_NC_001449.1_cds_NP_040822.1_1 target sequence
DAIIAEHFQPGDCVLETDIASFDKSEDDAMALTALMILEDLGVDAELLTLIEAAFGEISSIHLPTKTKFKFGAMMKSGMFLTLFV

SEQ ID NO: 17095 - protein, 85 aa, unidentified
  REGION 1..85: note = Description of Unknown:cds_NC_001449.1_cds_NP_040822.1_1 target sequence
NTVINIVIASRVLRERLTGSPCAAFIGDDNIVKGVKSDKLMADRCATWLNMEVKIIDAVVGEKAPYFCGGFILCDSVTGTACRVA

SEQ ID NO: 17096 - protein, 85 aa, unidentified
  REGION 1..85: note = Description of Unknown:cds_NC_001449.1_cds_NP_040822.1_1 target sequence
DPLKRLFKLGKPLAVDDEHDDDRRRALHEESTRWNRVGILPELCKAVESRYETVGTSIIVMAMTTLASSVKSFSYLRGAPITLYG

SEQ ID NO: 17097 - protein, 85 aa, unidentified
  REGION 1..85: note = Description of Unknown:cds_NC_004162.2_cds_NP_690588.1_1 target sequence
DPVYVDIDADSAFLKALQRAYPMFEVEPRQVTPNDHANARAFSHLAIKLIEQEIDPDSTILDIGSAPARRMMSDRKYHCVCPMRS

SEQ ID NO: 17098 - protein, 85 aa, unidentified
  REGION 1..85: note = Description of Unknown:cds_NC_004162.2_cds_NP_690588.1_1 target sequence
AEDPERLANYARKLASAAGKVLDRNISGKIGDLQAVMAVPDTETPTFCLHTDVSCRQRADVAIYQDVYAVHAPTSLYHQAIKGVR

SEQ ID NO: 17099 - protein, 85 aa, unidentified
  REGION 1..85: note = Description of Unknown:cds_NC_004162.2_cds_NP_690588.1_1 target sequence
LAYWVGFDTTPFMYNAMAGAYPSYSTNWADEQVLKAKNIGLCSTDLTEGRRGKLSIMRGKKLEPCDRVLFSVGSTLYPESRKLLK

SEQ ID NO: 17100 - protein, 85 aa, unidentified
  REGION 1..85: note = Description of Unknown:cds_NC_004162.2_cds_NP_690588.1_1 target sequence
SWHLPSVFHLKGKLSFTCRCDTVVSCEGYVVKRITMSPGLYGKTTGYAVTHHADGFLMCKTTDTVDGERVSFSVCTYVPATICDQ

SEQ ID NO: 17101 - protein, 85 aa, unidentified
  REGION 1..85: note = Description of Unknown:cds_NC_004162.2_cds_NP_690588.1_1 target sequence
MTGILATEVTPEDAQKLLVGLNQRIVVNGRTQRNTNTMKNYMIPVVAQAFSKWAKECRKDMEDEKLLGVRERTLTCCCLWAFKKQ

SEQ ID NO: 17102 - protein, 85 aa, unidentified
  REGION 1..85: note = Description of Unknown:cds_NC_004162.2_cds_NP_690588.1_1 target sequence
KTHTVYKRPDTQSIQKVQAEFDSFVVPSLWSSGLSIPLRTRIKWLLSKVPKTDLTPYSGDAQEARDAEKEAEEEREAELTLEALP

SEQ ID NO: 17103 - protein, 85 aa, unidentified
  REGION 1..85: note = Description of Unknown:cds_NC_004162.2_cds_NP_690588.1_1 target sequence
PLQAAQEDVQVEIDVEQLEDRAGAGIIETPRGAIKVTAQPTDHVVGEYLVLSPQTVLRSQKLSLIHALAEQVKTCTHSGRAGRYA

SEQ ID NO: 17104 - protein, 85 aa, unidentified
  REGION 1..85: note = Description of Unknown:cds_NC_004162.2_cds_NP_690588.1_1 target sequence
VEAYDGRVLVPSGYAISPEDFQSLSESATMVYNEREFVNRKLHHIAMHGPALNTDEESYELVRAERTEHEYVYDVDQRRCCKKEE

SEQ ID NO: 17105 - protein, 85 aa, unidentified
  REGION 1..85: note = Description of Unknown:cds_NC_004162.2_cds_NP_690588.1_1 target sequence
AAGLVLVGDLTNPPYHEFAYEGLKIRPACPYKIAVIGVFGVPGSGKSAIIKNLVTRQDLVTSGKKENCQEITTDVMRQRGLEISA

SEQ ID NO: 17106 - protein, 85 aa, unidentified
  REGION 1..85: note = Description of Unknown:cds_NC_004162.2_cds_NP_690588.1_1 target sequence
RTVDSLLLNGCNRPVDVLYVDEAFACHSGTLLALIALVRPRQKVVLCGDPKQCGFFNMMQMKVNYNHNICTQVYHKSISRRCTLP

SEQ ID NO: 17107 - protein, 85 aa, unidentified
  REGION 1..85: note = Description of Unknown:cds_NC_004162.2_cds_NP_690588.1_1 target sequence
VTAIVSSLHYEGKMRTTNEYNKPIVVDTTGSTKPDPGDLVLTCFRGWVKQLQIDYRGHEVMTAAASQGLTRKGVYAVRQKVNENP

SEQ ID NO: 17108 - protein, 85 aa, unidentified
  REGION 1..85: note = Description of Unknown:cds_NC_004162.2_cds_NP_690588.1_1 target sequence
LYASTSEHVNVLLTRTEGKLVWKTLSGDPWIKTLQNPPKGNFKATIKEWEVEHASIMAGICSHQMTFDTFQNKANVCWAKSLVPI

SEQ ID NO: 17109 - protein, 85 aa, unidentified
  REGION 1..85: note = Description of Unknown:cds_NC_004162.2_cds_NP_690588.1_1 target sequence
LETAGIKLNDRQWSQIIQAFKEDKAYSPEVALNEICTRMYGVDLDSGLFSKPLVSVYYADNHWDNRPGGKMFGFNPEAASILERK

SEQ ID NO: 17110 - protein, 85 aa, unidentified
  REGION 1..85: note = Description of Unknown:cds_NC_004162.2_cds_NP_690588.1_1 target sequence
YPFTKGKWNINKQICVTTRRIEDFNPTTNIIPANRRLPHSLVAEHRPVKGERMEWLVNKINGHHVLLVSGCSLALPTKRVTWVAP

SEQ ID NO: 17111 - protein, 85 aa, unidentified
  REGION 1..85: note = Description of Unknown:cds_NC_004162.2_cds_NP_690588.1_1 target sequence
LGVRGADYTYNLELGLPATLGRYDLVVINIHTPFRIHHYQQCVDHAMKLQMLGGDSLRLLKPGGSLLIRAYGYADRTSERVICVL

SEQ ID NO: 17112 - protein, 85 aa, unidentified
  REGION 1..85: note = Description of Unknown:cds_NC_004162.2_cds_NP_690588.1_1 target sequence
GRKFRSSRALKPPCVTSNTEMFFLFSNFDNGRRNFTTHVMNNQLNAAFVGQATRAGCAPSYRVKRMDIAKNDEECVVNAANPRGL

SEQ ID NO: 17113 - protein, 85 aa, unidentified
  REGION 1..85: note = Description of Unknown:cds_NC_004162.2_cds_NP_690588.1_1 target sequence
PGDGVCKAVYKKWPESFKNSATPVGTAKTVMCGTYPVIHAVGPNFSNYSESEGDRELAAAYREVAKEVTRLGVNSVAIPLLSTGV

SEQ ID NO: 17114 - protein, 85 aa, unidentified
  REGION 1..85: note = Description of Unknown:cds_NC_004162.2_cds_NP_690588.1_1 target sequence
YSGGKDRLTQSLNHLFTAMDSTDADVVIYCRDKEWEKKISEAIQMRTQVELLDEHISIDCDVVRVHPDSSLAGRKGYSTTEGALY

SEQ ID NO: 17115 - protein, 85 aa, unidentified
  REGION 1..85: note = Description of Unknown:cds_NC_004162.2_cds_NP_690588.1_1 target sequence
SYLEGTRFHQTAVDMAEIYTMWPKQTEANEQVCLYALGESIESIRQKCPVDDADASSPPKTVPCLCRYAMTPERVTRLRMNHVTS

SEQ ID NO: 17116 - protein, 85 aa, unidentified
  REGION 1..85: note = Description of Unknown:cds_NC_004162.2_cds_NP_690588.1_1 target sequence
IIVCSSFPLPKYKIEGVQKVKCSKVMLFDHNVPSRVSPREYRPSQESVQEASTTTSLTHSQFDLSVDGKILPVPSDLDADAPALE

SEQ ID NO: 17117 - protein, 85 aa, unidentified
  REGION 1..85: note = Description of Unknown:cds_NC_004162.2_cds_NP_690588.1_1 target sequence
PALDDGAIHTLPSATGNLAAVSDWVMSTVPVAPPRRRRGRNLTVTCDEREGNITPMASVRFFRAELCPVVQETAETRDTAMSLQA

SEQ ID NO: 17118 - protein, 85 aa, unidentified
  REGION 1..85: note = Description of Unknown:cds_NC_004162.2_cds_NP_690588.1_1 target sequence
PPSTATELSHPPISFGAPSETFPITFGDFNEGEIESLSSELLTFGDFLPGEVDDLTDSDWSTCSDTDDELRLDRAGGYIFSSDTG

SEQ ID NO: 17119 - protein, 85 aa, unidentified
  REGION 1..85: note = Description of Unknown:cds_NC_004162.2_cds_NP_690588.1_1 target sequence
PGHLQQKSVRQSVLPVNTLEEVHEEKCYPPKLDEAKEQLLLKKLQESASMANRSRYQSRKVENMKATIIQRLKRGCRLYLMSETP

SEQ ID NO: 17120 - protein, 85 aa, unidentified
  REGION 1..85: note = Description of Unknown:cds_NC_004162.2_cds_NP_690588.1_1 target sequence
KVPTYRTTYPAPVYSPPINVRLSNPESAVAACNEFLARNYPTVSSYQITDEYDAYLDMVDGSESCLDRATFNPSKLRSYPKQHAY

SEQ ID NO: 17121 - protein, 85 aa, unidentified
  REGION 1..85: note = Description of Unknown:cds_NC_004162.2_cds_NP_690588.1_1 target sequence
HAPSIRSAVPSPFQNTLQNVLAAATKRNCNVTQMRELPTLDSAVFNVECFKKFACNQEYWEEFAASPIRITTENLTTYVTKLKGP

SEQ ID NO: 17122 - protein, 85 aa, unidentified
  REGION 1..85: note = Description of Unknown:cds_NC_004162.2_cds_NP_690588.1_1 target sequence
KAAALFAKTHNLLPLQEVPMDRFTVDMKRDVKVTPGTKHTEERPKVQVIQAAEPLATAYLCGIHRELVRRLNAVLLPNVHTLFDM

SEQ ID NO: 17123 - protein, 85 aa, unidentified
  REGION 1..85: note = Description of Unknown:cds_NC_004162.2_cds_NP_690588.1_1 target sequence
SAEDFDAIIAAHFKPGDTVLETDIASFDKSQDDSLALTALMLLEDLGVDHSLLDLIEAAFGEISSCHLPTGTRFKFGAMMKSGMF

SEQ ID NO: 17124 - protein, 85 aa, unidentified
  REGION 1..85: note = Description of Unknown:cds_NC_004162.2_cds_NP_690588.1_1 target sequence
LTLFVNTLLNITIASRVLEDRLTKSACAAFIGDDNIIHGVVSDELMAARCATWMNMEVKIIDAVVSQKAPYFCGGFILHDIVTGT

SEQ ID NO: 17125 - protein, 85 aa, unidentified
  REGION 1..85: note = Description of Unknown:cds_NC_004162.2_cds_NP_690588.1_1 target sequence
ACRVADPLKRLFKLGKPLAAGDEQDEDRRRALADEVVRWQRTGLIDELEKAVYSRYEVQGISVVVMSMATFASSRSNFEKLRGPV

SEQ ID NO: 17126 - protein, 84 aa, unidentified
  REGION 1..84: note = Description of Unknown:cds_NC_004162.2_cds_NP_690588.1_1 target sequence
RLFKLGKPLAAGDEQDEDRRRALADEVVRWQRTGLIDELEKAVYSRYEVQGISVVVMSMATFASSRSNFEKLRGPVVTLYGGPK

SEQ ID NO: 17127 - protein, 85 aa, unidentified
  REGION 1..85: note = Description of Unknown:cds_NC_004162.2_cds_NP_690588.1_1 target sequence
PRQVTPNDHANARAFSHLAIKLIEQEIDPDSTILDIGSAPARRMMSDRKYHCVCPMRSAEDPERLANYARKLASAAGKVLDRNIS

SEQ ID NO: 17128 - protein, 85 aa, unidentified
  REGION 1..85: note = Description of Unknown:cds_NC_004162.2_cds_NP_690588.1_1 target sequence
GKIGDLQAVMAVPDTETPTFCLHTDVSCRQRADVAIYQDVYAVHAPTSLYHQAIKGVRLAYWVGFDTTPFMYNAMAGAYPSYSTN

SEQ ID NO: 17129 - protein, 85 aa, unidentified
  REGION 1..85: note = Description of Unknown:cds_NC_004162.2_cds_NP_690588.1_1 target sequence
WADEQVLKAKNIGLCSTDLTEGRRGKLSIMRGKKLEPCDRVLFSVGSTLYPESRKLLKSWHLPSVFHLKGKLSFTCRCDTVVSCE

SEQ ID NO: 17130 - protein, 85 aa, unidentified
  REGION 1..85: note = Description of Unknown:cds_NC_004162.2_cds_NP_690588.1_1 target sequence
GYVVKRITMSPGLYGKTTGYAVTHHADGFLMCKTTDTVDGERVSFSVCTYVPATICDQMTGILATEVTPEDAQKLLVGLNQRIVV

SEQ ID NO: 17131 - protein, 85 aa, unidentified
  REGION 1..85: note = Description of Unknown:cds_NC_004162.2_cds_NP_690588.1_1 target sequence
NGRTQRNTNTMKNYMIPVVAQAFSKWAKECRKDMEDEKLLGVRERTLTCCCLWAFKKQKTHTVYKRPDTQSIQKVQAEFDSFVVP

SEQ ID NO: 17132 - protein, 85 aa, unidentified
  REGION 1..85: note = Description of Unknown:cds_NC_004162.2_cds_NP_690588.1_1 target sequence
SLWSSGLSIPLRTRIKWLLSKVPKTDLTPYSGDAQEARDAEKEAEEEREAELTLEALPPLQAAQEDVQVEIDVEQLEDRAGAGII

SEQ ID NO: 17133 - protein, 85 aa, unidentified
  REGION 1..85: note = Description of Unknown:cds_NC_004162.2_cds_NP_690588.1_1 target sequence
ETPRGAIKVTAQPTDHVVGEYLVLSPQTVLRSQKLSLIHALAEQVKTCTHSGRAGRYAVEAYDGRVLVPSGYAISPEDFQSLSES

SEQ ID NO: 17134 - protein, 85 aa, unidentified
  REGION 1..85: note = Description of Unknown:cds_NC_004162.2_cds_NP_690588.1_1 target sequence
ATMVYNEREFVNRKLHHIAMHGPALNTDEESYELVRAERTEHEYVYDVDQRRCCKKEEAAGLVLVGDLTNPPYHEFAYEGLKIRP

SEQ ID NO: 17135 - protein, 85 aa, unidentified
  REGION 1..85: note = Description of Unknown:cds_NC_004162.2_cds_NP_690588.1_1 target sequence
ACPYKIAVIGVFGVPGSGKSAIIKNLVTRQDLVTSGKKENCQEITTDVMRQRGLEISARTVDSLLLNGCNRPVDVLYVDEAFACH

SEQ ID NO: 17136 - protein, 85 aa, unidentified
  REGION 1..85: note = Description of Unknown:cds_NC_004162.2_cds_NP_690588.1_1 target sequence
SGTLLALIALVRPRQKVVLCGDPKQCGFFNMMQMKVNYNHNICTQVYHKSISRRCTLPVTAIVSSLHYEGKMRTTNEYNKPIVVD

SEQ ID NO: 17137 - protein, 85 aa, unidentified
  REGION 1..85: note = Description of Unknown:cds_NC_004162.2_cds_NP_690588.1_1 target sequence
TTGSTKPDPGDLVLTCFRGWVKQLQIDYRGHEVMTAAASQGLTRKGVYAVRQKVNENPLYASTSEHVNVLLTRTEGKLVWKTLSG

SEQ ID NO: 17138 - protein, 85 aa, unidentified
  REGION 1..85: note = Description of Unknown:cds_NC_004162.2_cds_NP_690588.1_1 target sequence
DPWIKTLQNPPKGNFKATIKEWEVEHASIMAGICSHQMTFDTFQNKANVCWAKSLVPILETAGIKLNDRQWSQIIQAFKEDKAYS

SEQ ID NO: 17139 - protein, 85 aa, unidentified
  REGION 1..85: note = Description of Unknown:cds_NC_004162.2_cds_NP_690588.1_1 target sequence
PEVALNEICTRMYGVDLDSGLFSKPLVSVYYADNHWDNRPGGKMFGFNPEAASILERKYPFTKGKWNINKQICVTTRRIEDFNPT

SEQ ID NO: 17140 - protein, 85 aa, unidentified
  REGION 1..85: note = Description of Unknown:cds_NC_004162.2_cds_NP_690588.1_1 target sequence
TNIIPANRRLPHSLVAEHRPVKGERMEWLVNKINGHHVLLVSGCSLALPTKRVTWVAPLGVRGADYTYNLELGLPATLGRYDLVV

SEQ ID NO: 17141 - protein, 85 aa, unidentified
  REGION 1..85: note = Description of Unknown:cds_NC_004162.2_cds_NP_690588.1_1 target sequence
INIHTPFRIHHYQQCVDHAMKLQMLGGDSLRLLKPGGSLLIRAYGYADRTSERVICVLGRKFRSSRALKPPCVTSNTEMFFLFSN

SEQ ID NO: 17142 - protein, 85 aa, unidentified
  REGION 1..85: note = Description of Unknown:cds_NC_004162.2_cds_NP_690588.1_1 target sequence
FDNGRRNFTTHVMNNQLNAAFVGQATRAGCAPSYRVKRMDIAKNDEECVVNAANPRGLPGDGVCKAVYKKWPESFKNSATPVGTA

SEQ ID NO: 17143 - protein, 85 aa, unidentified
  REGION 1..85: note = Description of Unknown:cds_NC_004162.2_cds_NP_690588.1_1 target sequence
KTVMCGTYPVIHAVGPNFSNYSESEGDRELAAAYREVAKEVTRLGVNSVAIPLLSTGVYSGGKDRLTQSLNHLFTAMDSTDADVV

SEQ ID NO: 17144 - protein, 85 aa, unidentified
  REGION 1..85: note = Description of Unknown:cds_NC_004162.2_cds_NP_690588.1_1 target sequence
IYCRDKEWEKKISEAIQMRTQVELLDEHISIDCDVVRVHPDSSLAGRKGYSTTEGALYSYLEGTRFHQTAVDMAEIYTMWPKQTE

SEQ ID NO: 17145 - protein, 85 aa, unidentified
  REGION 1..85: note = Description of Unknown:cds_NC_004162.2_cds_NP_690588.1_1 target sequence
ANEQVCLYALGESIESIRQKCPVDDADASSPPKTVPCLCRYAMTPERVTRLRMNHVTSIIVCSSFPLPKYKIEGVQKVKCSKVML

SEQ ID NO: 17146 - protein, 85 aa, unidentified
  REGION 1..85: note = Description of Unknown:cds_NC_004162.2_cds_NP_690588.1_1 target sequence
FDHNVPSRVSPREYRPSQESVQEASTTTSLTHSQFDLSVDGKILPVPSDLDADAPALEPALDDGAIHTLPSATGNLAAVSDWVMS

SEQ ID NO: 17147 - protein, 85 aa, unidentified
  REGION 1..85: note = Description of Unknown:cds_NC_004162.2_cds_NP_690588.1_1 target sequence
TVPVAPPRRRRGRNLTVTCDEREGNITPMASVRFFRAELCPVVQETAETRDTAMSLQAPPSTATELSHPPISFGAPSETFPITFG

SEQ ID NO: 17148 - protein, 85 aa, unidentified
  REGION 1..85: note = Description of Unknown:cds_NC_004162.2_cds_NP_690588.1_1 target sequence
DFNEGEIESLSSELLTFGDFLPGEVDDLTDSDWSTCSDTDDELRLDRAGGYIFSSDTGPGHLQQKSVRQSVLPVNTLEEVHEEKC

SEQ ID NO: 17149 - protein, 85 aa, unidentified
  REGION 1..85: note = Description of Unknown:cds_NC_004162.2_cds_NP_690588.1_1 target sequence
YPPKLDEAKEQLLLKKLQESASMANRSRYQSRKVENMKATIIQRLKRGCRLYLMSETPKVPTYRTTYPAPVYSPPINVRLSNPES

SEQ ID NO: 17150 - protein, 85 aa, unidentified
  REGION 1..85: note = Description of Unknown:cds_NC_004162.2_cds_NP_690588.1_1 target sequence
AVAACNEFLARNYPTVSSYQITDEYDAYLDMVDGSESCLDRATFNPSKLRSYPKQHAYHAPSIRSAVPSPFQNTLQNVLAAATKR

SEQ ID NO: 17151 - protein, 85 aa, unidentified
  REGION 1..85: note = Description of Unknown:cds_NC_004162.2_cds_NP_690588.1_1 target sequence
NCNVTQMRELPTLDSAVFNVECFKKFACNQEYWEEFAASPIRITTENLTTYVTKLKGPKAAALFAKTHNLLPLQEVPMDRFTVDM

SEQ ID NO: 17152 - protein, 85 aa, unidentified
  REGION 1..85: note = Description of Unknown:cds_NC_004162.2_cds_NP_690588.1_1 target sequence
KRDVKVTPGTKHTEERPKVQVIQAAEPLATAYLCGIHRELVRRLNAVLLPNVHTLFDMSAEDFDAIIAAHFKPGDTVLETDIASF

SEQ ID NO: 17153 - protein, 85 aa, unidentified
  REGION 1..85: note = Description of Unknown:cds_NC_004162.2_cds_NP_690588.1_1 target sequence
DKSQDDSLALTALMLLEDLGVDHSLLDLIEAAFGEISSCHLPTGTRFKFGAMMKSGMFLTLFVNTLLNITIASRVLEDRLTKSAC

SEQ ID NO: 17154 - protein, 85 aa, unidentified
  REGION 1..85: note = Description of Unknown:cds_NC_004162.2_cds_NP_690588.1_1 target sequence
AAFIGDDNIIHGVVSDELMAARCATWMNMEVKIIDAVVSQKAPYFCGGFILHDIVTGTACRVADPLKRLFKLGKPLAAGDEQDED

SEQ ID NO: 17155 - protein, 85 aa, unidentified
  REGION 1..85: note = Description of Unknown:cds_NC_001608.3_cds_YP_001531159.1_7 target sequence
QHPTQYPDARLSSPIILDQCDLLARSLGLYSHYSHNPKLRNCRIPHHIYRLRNSTALKTFLQNCSILTVPFHSIWDHILTSIQYD

SEQ ID NO: 17156 - protein, 85 aa, unidentified
  REGION 1..85: note = Description of Unknown:cds_NC_001608.3_cds_YP_001531159.1_7 target sequence
AINHVDDFKYLLPSELVKYANWDNEFLKAYLNKILGLDHVFSASARSQCEDFSPKENPYYWGMLLLVHLSQLARRIKGQRGSLRS

SEQ ID NO: 17157 - protein, 85 aa, unidentified
  REGION 1..85: note = Description of Unknown:cds_NC_001608.3_cds_YP_001531159.1_7 target sequence
NWKFIGTDLELFGIADFVIFKVPVKTIIRNAVSLQASKPGLRIWYRDQNLTPYLCDDEFIVSVASYECFIMIKDVFIERYNTWEI

SEQ ID NO: 17158 - protein, 85 aa, unidentified
  REGION 1..85: note = Description of Unknown:cds_NC_001608.3_cds_YP_001531159.1_7 target sequence
CARAWLEDSDGADYPPLDVLGELYNQGDQIIAMYLEDGFKLIKHLEPLCVSCIQTHGIFTPRKYWFQSQMIKSYYDELHDLNLKL

SEQ ID NO: 17159 - protein, 85 aa, unidentified
  REGION 1..85: note = Description of Unknown:cds_NC_001608.3_cds_YP_001531159.1_7 target sequence
QISDNKAECAQNFIKTIVQAKLTPQQYCELFSLQKHWGHPVLYNDVALDKVKKHAQSTKILKPKVMFETFCVFKFIVAKNHYHSQ

SEQ ID NO: 17160 - protein, 85 aa, unidentified
  REGION 1..85: note = Description of Unknown:cds_NC_001608.3_cds_YP_001531159.1_7 target sequence
GSWYKTTHDLHLTPYLRQHIVSNSFPSQAEIYQHLWEWYFVEHEPLFSTKIISDLSIFIKDRATAVNQECWDSVFDRSVLGYNPP

SEQ ID NO: 17161 - protein, 85 aa, unidentified
  REGION 1..85: note = Description of Unknown:cds_NC_001608.3_cds_YP_001531159.1_7 target sequence
VRFQSKRVPEQFLGQADFSLNQILEFAEKLEYLAPSYRNFSFSLKEKELNIGRTFGKLPYRVRNVQTLAEALLADGLAKAFPSNM

SEQ ID NO: 17162 - protein, 85 aa, unidentified
  REGION 1..85: note = Description of Unknown:cds_NC_001608.3_cds_YP_001531159.1_7 target sequence
MVVTEREQKEALLHQASWHHNSASIGENAIVRGASFVTDLEKYNLAFRYEFTRHFIDYCNRCYGVKNLFDWMHFLIPLCYMHVSD

SEQ ID NO: 17163 - protein, 85 aa, unidentified
  REGION 1..85: note = Description of Unknown:cds_NC_001608.3_cds_YP_001531159.1_7 target sequence
FYSPPHCVTEDNRNNPPDCANAYHYHLGGIEGLQQKLWTCISCAQITLVELKTKLKLKSSVMGDNQCITTLSLFPIDAPNDYQEN

SEQ ID NO: 17164 - protein, 85 aa, unidentified
  REGION 1..85: note = Description of Unknown:cds_NC_001608.3_cds_YP_001531159.1_7 target sequence
EAELNAARVAVELAITTGYSGIFLKPEETFVHSGFIYFGKKQYLNGVQLPQSLKTMARCGPLSDSIFDDLQGSLASIGTSFERGT

SEQ ID NO: 17165 - protein, 85 aa, unidentified
  REGION 1..85: note = Description of Unknown:cds_NC_001608.3_cds_YP_001531159.1_7 target sequence
SETRHIFPSRWIASFHSMLAINLLNQNHLGFPLGFNIDISCFKKPLTFSEKLIALITPQVLGGLSFLNPEKLFYRNISDPLTSGL

SEQ ID NO: 17166 - protein, 85 aa, unidentified
  REGION 1..85: note = Description of Unknown:cds_NC_001608.3_cds_YP_001531159.1_7 target sequence
FQLKNALEFLEKEELFYILISKKPGLADASDFVMNPLGLNVPGSKEIITFLRQTVRENITITSQNRIINSLFHIGSDLEDQRVCE

SEQ ID NO: 17167 - protein, 85 aa, unidentified
  REGION 1..85: note = Description of Unknown:cds_NC_001608.3_cds_YP_001531159.1_7 target sequence
WLLSSNPVMSRFAADIFSRTPSGKRLQVLGYLEGTRTLLASRTISLTTEGTMLMKLRELTRNRWKSWFSYIDALDDDLSESLEKF

SEQ ID NO: 17168 - protein, 85 aa, unidentified
  REGION 1..85: note = Description of Unknown:cds_NC_001608.3_cds_YP_001531159.1_7 target sequence
TCTVDVANFLRAYSWSDVLKGKRLIGATLPCLLEQFEVKWINLSEDLREQFNLSSDSKSTINLLPYDCKELRLEGSNDTELNYVS

SEQ ID NO: 17169 - protein, 85 aa, unidentified
  REGION 1..85: note = Description of Unknown:cds_NC_001608.3_cds_YP_001531159.1_7 target sequence
CALDRKVVQKHPSVNRLAWTIGNRAPYIGSRTEDKIGYPPLRVNCPSAALKEAIEMVSRLLWVTQGTADREKLLIPLLNSRVNLD

SEQ ID NO: 17170 - protein, 85 aa, unidentified
  REGION 1..85: note = Description of Unknown:cds_NC_001608.3_cds_YP_001531159.1_7 target sequence
YQTVLNFLPTHYSGNIVHRYNDQYGQHSFMANRMSNTSTRAIISTNTLGKYAGGGQAAIDSNIIFQNTINLGVAVLDIALSLAKL

SEQ ID NO: 17171 - protein, 85 aa, unidentified
  REGION 1..85: note = Description of Unknown:cds_NC_001608.3_cds_YP_001531159.1_7 target sequence
SSASNVTFRLMLNKCCTRHVPSEYLYFDKPLDVDLNKYMDNELVYDNDPLCSGIKGRLGRVSRSTLTLSLNVSDIGSYDFPTIAA

SEQ ID NO: 17172 - protein, 85 aa, unidentified
  REGION 1..85: note = Description of Unknown:cds_NC_001608.3_cds_YP_001531159.1_7 target sequence
WTLGETIVGSIFSDESSQSTDPISSGCTKTFVTHFLVYPVESIFYAFGANLIVESLSLSRIKSIKNLSDLTFLISSTIRNLSHRS

SEQ ID NO: 17173 - protein, 85 aa, unidentified
  REGION 1..85: note = Description of Unknown:cds_NC_001608.3_cds_YP_001531159.1_7 target sequence
LRILQSTFRHELVLTRLAHHIPLISLMLGGSAGEKSSSDAVRLFLTASYQNFINNFSCLMKKGQSSLPVWLYFPSEGQQLKPILK

SEQ ID NO: 17174 - protein, 85 aa, unidentified
  REGION 1..85: note = Description of Unknown:cds_NC_001608.3_cds_YP_001531159.1_7 target sequence
ILQRLSDLLSPDKIQKRKILADTCCPIGSFWVYPSKSTRTNHYYASLNYWRDKANKVKNTPFSHLINCSFPEFSSHTSSVSSNQQ

SEQ ID NO: 17175 - protein, 85 aa, unidentified
  REGION 1..85: note = Description of Unknown:cds_NC_001608.3_cds_YP_001531159.1_7 target sequence
VTNSKYIVYPENITEINARTRLINYGSTALQGMDTKMPLSEQNLVENCRPSEGIRFKDNQKITKHDQRCEREESSPQQMFPEDNM

SEQ ID NO: 17176 - protein, 85 aa, unidentified
  REGION 1..85: note = Description of Unknown:cds_NC_001608.3_cds_YP_001531159.1_7 target sequence
QTPAHIHSSSPFQILIKSLDAHEDFDASKIILNSEINNLNLTEYTLNTKLLTTPTRTEILDTSPLQSSRYSSTSRERSLLSREQA

SEQ ID NO: 17177 - protein, 85 aa, unidentified
  REGION 1..85: note = Description of Unknown:cds_NC_001608.3_cds_YP_001531159.1_7 target sequence
SYLYVDCSNIPSISLDPGFRSMSDQNQVQMLINTYKRDLHACFDSNQFCRFTGVVSSMHYKLYDLLPPGKLKKAICLAEGEGSGA

SEQ ID NO: 17178 - protein, 85 aa, unidentified
  REGION 1..85: note = Description of Unknown:cds_NC_001608.3_cds_YP_001531159.1_7 target sequence
RLLLKWKETDYLFFNTLATDSQQEAEILSGRVIPRMLYNIDRLSALLESRRLILNNLTIQITDITNPLWLDSVIQYLPEDSDILT

SEQ ID NO: 17179 - protein, 85 aa, unidentified
  REGION 1..85: note = Description of Unknown:cds_NC_001608.3_cds_YP_001531159.1_7 target sequence
MDAETTKDETREQLYKTIVNIWTRTSPNIPKISIIKVFLLDYEGTLFLMKNAIQYYGQVQLKKPYSSNAKNSEWYLCCGKRRIQR

SEQ ID NO: 17180 - protein, 85 aa, unidentified
  REGION 1..85: note = Description of Unknown:cds_NC_001608.3_cds_YP_001531159.1_7 target sequence
LQIDFSDQVGIFLICKAMSRQRQAIPYWLKHIEKNYPASLHEFFLTLGFPSLESSFCHRYTIPFSEGKALFHKVQSYVRQGKQHL

SEQ ID NO: 17181 - protein, 85 aa, unidentified
  REGION 1..85: note = Description of Unknown:cds_NC_001608.3_cds_YP_001531159.1_7 target sequence
HSLMLDYENNSPLLDLRNHFICSLRGKITKYYNDILKLNLVIKAVEKGKNWSQLVEILPNMHSVCIVHVDHECSGCEKRLLLKLD

SEQ ID NO: 17182 - protein, 84 aa, unidentified
  REGION 1..84: note = Description of Unknown:cds_NC_001608.3_cds_YP_001531159.1_7 target sequence
KLNLVIKAVEKGKNWSQLVEILPNMHSVCIVHVDHECSGCEKRLLLKLDFIRNTKIAEQKLLNRVIGYILFFPFGLFKSGSLRA

SEQ ID NO: 17183 - protein, 85 aa, unidentified
  REGION 1..85: note = Description of Unknown:cds_NC_001608.3_cds_YP_001531159.1_7 target sequence
GLYSHYSHNPKLRNCRIPHHIYRLRNSTALKTFLQNCSILTVPFHSIWDHILTSIQYDAINHVDDFKYLLPSELVKYANWDNEFL

SEQ ID NO: 17184 - protein, 85 aa, unidentified
  REGION 1..85: note = Description of Unknown:cds_NC_001608.3_cds_YP_001531159.1_7 target sequence
KAYLNKILGLDHVFSASARSQCEDFSPKENPYYWGMLLLVHLSQLARRIKGQRGSLRSNWKFIGTDLELFGIADFVIFKVPVKTI

SEQ ID NO: 17185 - protein, 85 aa, unidentified
  REGION 1..85: note = Description of Unknown:cds_NC_001608.3_cds_YP_001531159.1_7 target sequence
IRNAVSLQASKPGLRIWYRDQNLTPYLCDDEFIVSVASYECFIMIKDVFIERYNTWEICARAWLEDSDGADYPPLDVLGELYNQG

SEQ ID NO: 17186 - protein, 85 aa, unidentified
  REGION 1..85: note = Description of Unknown:cds_NC_001608.3_cds_YP_001531159.1_7 target sequence
DQIIAMYLEDGFKLIKHLEPLCVSCIQTHGIFTPRKYWFQSQMIKSYYDELHDLNLKLQISDNKAECAQNFIKTIVQAKLTPQQY

SEQ ID NO: 17187 - protein, 85 aa, unidentified
  REGION 1..85: note = Description of Unknown:cds_NC_001608.3_cds_YP_001531159.1_7 target sequence
CELFSLQKHWGHPVLYNDVALDKVKKHAQSTKILKPKVMFETFCVFKFIVAKNHYHSQGSWYKTTHDLHLTPYLRQHIVSNSFPS

SEQ ID NO: 17188 - protein, 85 aa, unidentified
  REGION 1..85: note = Description of Unknown:cds_NC_001608.3_cds_YP_001531159.1_7 target sequence
QAEIYQHLWEWYFVEHEPLFSTKIISDLSIFIKDRATAVNQECWDSVFDRSVLGYNPPVRFQSKRVPEQFLGQADFSLNQILEFA

SEQ ID NO: 17189 - protein, 85 aa, unidentified
  REGION 1..85: note = Description of Unknown:cds_NC_001608.3_cds_YP_001531159.1_7 target sequence
EKLEYLAPSYRNFSFSLKEKELNIGRTFGKLPYRVRNVQTLAEALLADGLAKAFPSNMMVVTEREQKEALLHQASWHHNSASIGE

SEQ ID NO: 17190 - protein, 85 aa, unidentified
  REGION 1..85: note = Description of Unknown:cds_NC_001608.3_cds_YP_001531159.1_7 target sequence
NAIVRGASFVTDLEKYNLAFRYEFTRHFIDYCNRCYGVKNLFDWMHFLIPLCYMHVSDFYSPPHCVTEDNRNNPPDCANAYHYHL

SEQ ID NO: 17191 - protein, 85 aa, unidentified
  REGION 1..85: note = Description of Unknown:cds_NC_001608.3_cds_YP_001531159.1_7 target sequence
GGIEGLQQKLWTCISCAQITLVELKTKLKLKSSVMGDNQCITTLSLFPIDAPNDYQENEAELNAARVAVELAITTGYSGIFLKPE

SEQ ID NO: 17192 - protein, 85 aa, unidentified
  REGION 1..85: note = Description of Unknown:cds_NC_001608.3_cds_YP_001531159.1_7 target sequence
ETFVHSGFIYFGKKQYLNGVQLPQSLKTMARCGPLSDSIFDDLQGSLASIGTSFERGTSETRHIFPSRWIASFHSMLAINLLNQN

SEQ ID NO: 17193 - protein, 85 aa, unidentified
  REGION 1..85: note = Description of Unknown:cds_NC_001608.3_cds_YP_001531159.1_7 target sequence
HLGFPLGFNIDISCFKKPLTFSEKLIALITPQVLGGLSFLNPEKLFYRNISDPLTSGLFQLKNALEFLEKEELFYILISKKPGLA

SEQ ID NO: 17194 - protein, 85 aa, unidentified
  REGION 1..85: note = Description of Unknown:cds_NC_001608.3_cds_YP_001531159.1_7 target sequence
DASDFVMNPLGLNVPGSKEIITFLRQTVRENITITSQNRIINSLFHIGSDLEDQRVCEWLLSSNPVMSRFAADIFSRTPSGKRLQ

SEQ ID NO: 17195 - protein, 85 aa, unidentified
  REGION 1..85: note = Description of Unknown:cds_NC_001608.3_cds_YP_001531159.1_7 target sequence
VLGYLEGTRTLLASRTISLTTEGTMLMKLRELTRNRWKSWFSYIDALDDDLSESLEKFTCTVDVANFLRAYSWSDVLKGKRLIGA

SEQ ID NO: 17196 - protein, 85 aa, unidentified
  REGION 1..85: note = Description of Unknown:cds_NC_001608.3_cds_YP_001531159.1_7 target sequence
TLPCLLEQFEVKWINLSEDLREQFNLSSDSKSTINLLPYDCKELRLEGSNDTELNYVSCALDRKVVQKHPSVNRLAWTIGNRAPY

SEQ ID NO: 17197 - protein, 85 aa, unidentified
  REGION 1..85: note = Description of Unknown:cds_NC_001608.3_cds_YP_001531159.1_7 target sequence
IGSRTEDKIGYPPLRVNCPSAALKEAIEMVSRLLWVTQGTADREKLLIPLLNSRVNLDYQTVLNFLPTHYSGNIVHRYNDQYGQH

SEQ ID NO: 17198 - protein, 85 aa, unidentified
  REGION 1..85: note = Description of Unknown:cds_NC_001608.3_cds_YP_001531159.1_7 target sequence
SFMANRMSNTSTRAIISTNTLGKYAGGGQAAIDSNIIFQNTINLGVAVLDIALSLAKLSSASNVTFRLMLNKCCTRHVPSEYLYF

SEQ ID NO: 17199 - protein, 85 aa, unidentified
  REGION 1..85: note = Description of Unknown:cds_NC_001608.3_cds_YP_001531159.1_7 target sequence
DKPLDVDLNKYMDNELVYDNDPLCSGIKGRLGRVSRSTLTLSLNVSDIGSYDFPTIAAWTLGETIVGSIFSDESSQSTDPISSGC

SEQ ID NO: 17200 - protein, 85 aa, unidentified
  REGION 1..85: note = Description of Unknown:cds_NC_001608.3_cds_YP_001531159.1_7 target sequence
TKTFVTHFLVYPVESIFYAFGANLIVESLSLSRIKSIKNLSDLTFLISSTIRNLSHRSLRILQSTFRHELVLTRLAHHIPLISLM

SEQ ID NO: 17201 - protein, 85 aa, unidentified
  REGION 1..85: note = Description of Unknown:cds_NC_001608.3_cds_YP_001531159.1_7 target sequence
LGGSAGEKSSSDAVRLFLTASYQNFINNFSCLMKKGQSSLPVWLYFPSEGQQLKPILKILQRLSDLLSPDKIQKRKILADTCCPI

SEQ ID NO: 17202 - protein, 85 aa, unidentified
  REGION 1..85: note = Description of Unknown:cds_NC_001608.3_cds_YP_001531159.1_7 target sequence
GSFWVYPSKSTRTNHYYASLNYWRDKANKVKNTPFSHLINCSFPEFSSHTSSVSSNQQVTNSKYIVYPENITEINARTRLINYGS

SEQ ID NO: 17203 - protein, 85 aa, unidentified
  REGION 1..85: note = Description of Unknown:cds_NC_001608.3_cds_YP_001531159.1_7 target sequence
TALQGMDTKMPLSEQNLVENCRPSEGIRFKDNQKITKHDQRCEREESSPQQMFPEDNMQTPAHIHSSSPFQILIKSLDAHEDFDA

SEQ ID NO: 17204 - protein, 85 aa, unidentified
  REGION 1..85: note = Description of Unknown:cds_NC_001608.3_cds_YP_001531159.1_7 target sequence
SKIILNSEINNLNLTEYTLNTKLLTTPTRTEILDTSPLQSSRYSSTSRERSLLSREQASYLYVDCSNIPSISLDPGFRSMSDQNQ

SEQ ID NO: 17205 - protein, 85 aa, unidentified
  REGION 1..85: note = Description of Unknown:cds_NC_001608.3_cds_YP_001531159.1_7 target sequence
VQMLINTYKRDLHACFDSNQFCRFTGVVSSMHYKLYDLLPPGKLKKAICLAEGEGSGARLLLKWKETDYLFFNTLATDSQQEAEI

SEQ ID NO: 17206 - protein, 85 aa, unidentified
  REGION 1..85: note = Description of Unknown:cds_NC_001608.3_cds_YP_001531159.1_7 target sequence
LSGRVIPRMLYNIDRLSALLESRRLILNNLTIQITDITNPLWLDSVIQYLPEDSDILTMDAETTKDETREQLYKTIVNIWTRTSP

SEQ ID NO: 17207 - protein, 85 aa, unidentified
  REGION 1..85: note = Description of Unknown:cds_NC_001608.3_cds_YP_001531159.1_7 target sequence
NIPKISIIKVFLLDYEGTLFLMKNAIQYYGQVQLKKPYSSNAKNSEWYLCCGKRRIQRLQIDFSDQVGIFLICKAMSRQRQAIPY

SEQ ID NO: 17208 - protein, 85 aa, unidentified
  REGION 1..85: note = Description of Unknown:cds_NC_001608.3_cds_YP_001531159.1_7 target sequence
WLKHIEKNYPASLHEFFLTLGFPSLESSFCHRYTIPFSEGKALFHKVQSYVRQGKQHLHSLMLDYENNSPLLDLRNHFICSLRGK

SEQ ID NO: 17209 - protein, 85 aa, unidentified
  REGION 1..85: note = Description of Unknown:cds_NC_001608.3_cds_YP_001531159.1_7 target sequence
ITKYYNDILKLNLVIKAVEKGKNWSQLVEILPNMHSVCIVHVDHECSGCEKRLLLKLDFIRNTKIAEQKLLNRVIGYILFFPFGL

SEQ ID NO: 17210 - protein, 85 aa, unidentified
  REGION 1..85: note = Description of Unknown:cds_NC_025410.1_cds_YP_009094498.1_7 target sequence
AAPSQIILPEVHLDSPIVKNKLIYFVKLAGLPLPDEDLEDDPFPAVDWARIRREENRLSDRLNQVKSRLYSEIIDSFPKSEFSLF

SEQ ID NO: 17211 - protein, 85 aa, unidentified
  REGION 1..85: note = Description of Unknown:cds_NC_025410.1_cds_YP_009094498.1_7 target sequence
VSKLNVLLWPKVLPIVTTWTIPELTERFSDVYTIIQRSCDIISSGASNLLRDISYQLSKSTELFTRNSLHCSIHDQHTRPSDLSQ

SEQ ID NO: 17212 - protein, 85 aa, unidentified
  REGION 1..85: note = Description of Unknown:cds_NC_025410.1_cds_YP_009094498.1_7 target sequence
LALLESNSDYMHQFNVWFIIRLKMRQQILANQDSSQHLQLVELGKKDHKIYITPEIVCIWIREKKIITYFTFEMVLMVCDMIEGR

SEQ ID NO: 17213 - protein, 85 aa, unidentified
  REGION 1..85: note = Description of Unknown:cds_NC_025410.1_cds_YP_009094498.1_7 target sequence
RNVLALTKYSCYLAPLLPRLKRIFSIVDELCEHLGNSVYSVVASLESLVYAELQLADPVPELRGEFHAFISQELINAITSKGIIS

SEQ ID NO: 17214 - protein, 85 aa, unidentified
  REGION 1..85: note = Description of Unknown:cds_NC_025410.1_cds_YP_009094498.1_7 target sequence
DQEANIICTRLLECYHNLPPDLVAELLCTMRLWGHPMLNAETAAKKVRASMCAPKMLDLTIILKVKAFFHGIIVNGYRRKHNGIW

SEQ ID NO: 17215 - protein, 85 aa, unidentified
  REGION 1..85: note = Description of Unknown:cds_NC_025410.1_cds_YP_009094498.1_7 target sequence
PKVILPPFASPSLTEFFHDNSELPYHYILAHWKEIAFLQFDKSFDADPGEDLSIFMKDKAISTPKKNWMSVFRKSLIKPTCDKLK

SEQ ID NO: 17216 - protein, 85 aa, unidentified
  REGION 1..85: note = Description of Unknown:cds_NC_025410.1_cds_YP_009094498.1_7 target sequence
VPYPEPFNRRLLINFLQDNNFDPTEELKYVTTGEYLDDNEFCASYSMKEKEIKEDGRIFAKLTKRMRSCQVICESLLASHAGKLF

SEQ ID NO: 17217 - protein, 85 aa, unidentified
  REGION 1..85: note = Description of Unknown:cds_NC_025410.1_cds_YP_009094498.1_7 target sequence
KENGVTLDQLSLTKSLLTMSQIGLISKSSRRAARDNIDIIHHVADIRKGNQYAKVNVKPSTHAIPKPDEISEIAACFLTTDLKKY

SEQ ID NO: 17218 - protein, 85 aa, unidentified
  REGION 1..85: note = Description of Unknown:cds_NC_025410.1_cds_YP_009094498.1_7 target sequence
CLQWRYQSIIPFATSLNQLYGYNHLFEWIHLRLMRSTLYVGDPFSPPRDLDTPDLDNVQNKGIFIVSARGGIEGLCQKMWTMISI

SEQ ID NO: 17219 - protein, 85 aa, unidentified
  REGION 1..85: note = Description of Unknown:cds_NC_025410.1_cds_YP_009094498.1_7 target sequence
AVIILSATESNTRVMCMVQGDNQAIAITSKVPRTLSYEHKKQIAFNHSKLFIERLRINNHGIGHHLKDQETIVSSELFIYSKRVL

SEQ ID NO: 17220 - protein, 85 aa, unidentified
  REGION 1..85: note = Description of Unknown:cds_NC_025410.1_cds_YP_009094498.1_7 target sequence
YKGRILNQALKNASKLCLIADVLSECTQTSASNLTTTIMRLTENGIEKDICYYWSVYYTIRQLVHDLMFPLTQLFEEDVVTTYLN

SEQ ID NO: 17221 - protein, 85 aa, unidentified
  REGION 1..85: note = Description of Unknown:cds_NC_025410.1_cds_YP_009094498.1_7 target sequence
NPGLIAKLAILPSQLGGLNYYAISRLFCRNIGDPLTSSISDVKRFMRAGILPRWILKNILSRPSGDGSWVTLAADPYSINIPYLY

SEQ ID NO: 17222 - protein, 85 aa, unidentified
  REGION 1..85: note = Description of Unknown:cds_NC_025410.1_cds_YP_009094498.1_7 target sequence
PPTTMLKKHTQRVLMESSTNPMLRGVFYDGALQEESELAKFLLDRPVVMPRVAHIIIEQSSCGRRKQIQGYLDTTRTIIRYALKL

SEQ ID NO: 17223 - protein, 85 aa, unidentified
  REGION 1..85: note = Description of Unknown:cds_NC_025410.1_cds_YP_009094498.1_7 target sequence
APLSYKKTTKVLDYNLLYLSYNLELIKHSTKSSAHPLASQDLSDVCSIDISQLLRKLSWTNLLNGRGLQGLETPDPIELLNGFLI

SEQ ID NO: 17224 - protein, 85 aa, unidentified
  REGION 1..85: note = Description of Unknown:cds_NC_025410.1_cds_YP_009094498.1_7 target sequence
TGTTSCIACMEGDSKFTWLFLPAGIDLQAPPDENPPIRVPYVGSRTDERRVASMGYVKGASQALKSSLRLTGVYIWAYGETDYNW

SEQ ID NO: 17225 - protein, 85 aa, unidentified
  REGION 1..85: note = Description of Unknown:cds_NC_025410.1_cds_YP_009094498.1_7 target sequence
DQALMLANTRAAINKEQLQALTPLPTSSNLVHRLDDGLTQLKFTPASSYAFSSYVHISNDSQNLELLERQLDSNLIYQQVMLLGL

SEQ ID NO: 17226 - protein, 85 aa, unidentified
  REGION 1..85: note = Description of Unknown:cds_NC_025410.1_cds_YP_009094498.1_7 target sequence
GIIETWLQFPNEQNQSDLSVHLHTGSSCCIRQVDSCIINESSSNVPILNVPYQNHFVFDPSPLSDEQAIQVKNLTFQTNISALDM

SEQ ID NO: 17227 - protein, 85 aa, unidentified
  REGION 1..85: note = Description of Unknown:cds_NC_025410.1_cds_YP_009094498.1_7 target sequence
IPLNDKFPVLAHLIGIQIAHSLTGLDESTSLINDAVVETDYACNWISECLNTQLDKVFYYAAWHLLLDLAYQLYYLRVLGQHAIL

SEQ ID NO: 17228 - protein, 85 aa, unidentified
  REGION 1..85: note = Description of Unknown:cds_NC_025410.1_cds_YP_009094498.1_7 target sequence
DYYTTILYRIPGLALTGISSTISHPKLLRRMINLGIIIPRNAPYLATLDYQKMSTDALIWGAKHVLSDLMHGIDIEIIVPSEDST

SEQ ID NO: 17229 - protein, 85 aa, unidentified
  REGION 1..85: note = Description of Unknown:cds_NC_025410.1_cds_YP_009094498.1_7 target sequence
EISDRVLNLVARKLSLCALIFNSDSVLPHVRGLAPDEKCRALTDAILHMFNNSLGQSDRIESLQAMIVMPKISAYPNNLYYLTRK

SEQ ID NO: 17230 - protein, 85 aa, unidentified
  REGION 1..85: note = Description of Unknown:cds_NC_025410.1_cds_YP_009094498.1_7 target sequence
LLNWIRDSDEAQLLLATFYDSFGFFETQHSLSMTPSILKEEDADSTLTDYDSVITIQSQGDDLQAISFPATSVYDPVPPNVAVSP

SEQ ID NO: 17231 - protein, 85 aa, unidentified
  REGION 1..85: note = Description of Unknown:cds_NC_025410.1_cds_YP_009094498.1_7 target sequence
PVHHILRPIGLSSTSWYKGLSVLRVLHTYQLPKGNHLYLAEGSGAIMTLMEANYPADVIFYNSYFSSGQCPPQRNFQPLPTQFIE

SEQ ID NO: 17232 - protein, 85 aa, unidentified
  REGION 1..85: note = Description of Unknown:cds_NC_025410.1_cds_YP_009094498.1_7 target sequence
SVVYKNLQLGIPSDNGNVQEFKPLWSGNSVQTDLSTKECVDYIISQVNAHTLSLITLDIEEPTPEGVHDVSPALINSFLIAHFAL

SEQ ID NO: 17233 - protein, 85 aa, unidentified
  REGION 1..85: note = Description of Unknown:cds_NC_025410.1_cds_YP_009094498.1_7 target sequence
KAQGIMIIKTHLSPFHRFSRIITLASKEFGSITAVRSSYSDPNSDELYLILQRVAITNPRDFTLALESMNQLHEAGFTLVSEDKL

SEQ ID NO: 17234 - protein, 85 aa, unidentified
  REGION 1..85: note = Description of Unknown:cds_NC_025410.1_cds_YP_009094498.1_7 target sequence
TELIDGLRENQQQIYNEIEYQNKMASCTSNLTDHITLSQLGSCIQTNKILEKAPAHSMTELLERICTAVTTFLKEMIALTEAAVI

SEQ ID NO: 17235 - protein, 85 aa, unidentified
  REGION 1..85: note = Description of Unknown:cds_NC_025410.1_cds_YP_009094498.1_7 target sequence
DKSALIYNSYNLQLPGKINTSAKLVATQILELYIRNWDLISIDLRLKLIQMIELGYFSVGEILSTNDFIKYTNVPNYLRKVLGMT

SEQ ID NO: 17236 - protein, 84 aa, unidentified
  REGION 1..84: note = Description of Unknown:cds_NC_025410.1_cds_YP_009094498.1_7 target sequence
TNDFIKYTNVPNYLRKVLGMTTIDQELHLRLKVYLSRAQQKRVWKSVGSVILTGTLDGSQLPEFDTQSDKFEDEERDLAGDLID

SEQ ID NO: 17237 - protein, 85 aa, unidentified
  REGION 1..85: note = Description of Unknown:cds_NC_025410.1_cds_YP_009094498.1_7 target sequence
LAGLPLPDEDLEDDPFPAVDWARIRREENRLSDRLNQVKSRLYSEIIDSFPKSEFSLFVSKLNVLLWPKVLPIVTTWTIPELTER

SEQ ID NO: 17238 - protein, 85 aa, unidentified
  REGION 1..85: note = Description of Unknown:cds_NC_025410.1_cds_YP_009094498.1_7 target sequence
FSDVYTIIQRSCDIISSGASNLLRDISYQLSKSTELFTRNSLHCSIHDQHTRPSDLSQLALLESNSDYMHQFNVWFIIRLKMRQQ

SEQ ID NO: 17239 - protein, 85 aa, unidentified
  REGION 1..85: note = Description of Unknown:cds_NC_025410.1_cds_YP_009094498.1_7 target sequence
ILANQDSSQHLQLVELGKKDHKIYITPEIVCIWIREKKIITYFTFEMVLMVCDMIEGRRNVLALTKYSCYLAPLLPRLKRIFSIV

SEQ ID NO: 17240 - protein, 85 aa, unidentified
  REGION 1..85: note = Description of Unknown:cds_NC_025410.1_cds_YP_009094498.1_7 target sequence
DELCEHLGNSVYSVVASLESLVYAELQLADPVPELRGEFHAFISQELINAITSKGIISDQEANIICTRLLECYHNLPPDLVAELL

SEQ ID NO: 17241 - protein, 85 aa, unidentified
  REGION 1..85: note = Description of Unknown:cds_NC_025410.1_cds_YP_009094498.1_7 target sequence
CTMRLWGHPMLNAETAAKKVRASMCAPKMLDLTIILKVKAFFHGIIVNGYRRKHNGIWPKVILPPFASPSLTEFFHDNSELPYHY

SEQ ID NO: 17242 - protein, 85 aa, unidentified
  REGION 1..85: note = Description of Unknown:cds_NC_025410.1_cds_YP_009094498.1_7 target sequence
ILAHWKEIAFLQFDKSFDADPGEDLSIFMKDKAISTPKKNWMSVFRKSLIKPTCDKLKVPYPEPFNRRLLINFLQDNNFDPTEEL

SEQ ID NO: 17243 - protein, 85 aa, unidentified
  REGION 1..85: note = Description of Unknown:cds_NC_025410.1_cds_YP_009094498.1_7 target sequence
KYVTTGEYLDDNEFCASYSMKEKEIKEDGRIFAKLTKRMRSCQVICESLLASHAGKLFKENGVTLDQLSLTKSLLTMSQIGLISK

SEQ ID NO: 17244 - protein, 85 aa, unidentified
  REGION 1..85: note = Description of Unknown:cds_NC_025410.1_cds_YP_009094498.1_7 target sequence
SSRRAARDNIDIIHHVADIRKGNQYAKVNVKPSTHAIPKPDEISEIAACFLTTDLKKYCLQWRYQSIIPFATSLNQLYGYNHLFE

SEQ ID NO: 17245 - protein, 85 aa, unidentified
  REGION 1..85: note = Description of Unknown:cds_NC_025410.1_cds_YP_009094498.1_7 target sequence
WIHLRLMRSTLYVGDPFSPPRDLDTPDLDNVQNKGIFIVSARGGIEGLCQKMWTMISIAVIILSATESNTRVMCMVQGDNQAIAI

SEQ ID NO: 17246 - protein, 85 aa, unidentified
  REGION 1..85: note = Description of Unknown:cds_NC_025410.1_cds_YP_009094498.1_7 target sequence
TSKVPRTLSYEHKKQIAFNHSKLFIERLRINNHGIGHHLKDQETIVSSELFIYSKRVLYKGRILNQALKNASKLCLIADVLSECT

SEQ ID NO: 17247 - protein, 85 aa, unidentified
  REGION 1..85: note = Description of Unknown:cds_NC_025410.1_cds_YP_009094498.1_7 target sequence
QTSASNLTTTIMRLTENGIEKDICYYWSVYYTIRQLVHDLMFPLTQLFEEDVVTTYLNNPGLIAKLAILPSQLGGLNYYAISRLF

SEQ ID NO: 17248 - protein, 85 aa, unidentified
  REGION 1..85: note = Description of Unknown:cds_NC_025410.1_cds_YP_009094498.1_7 target sequence
CRNIGDPLTSSISDVKRFMRAGILPRWILKNILSRPSGDGSWVTLAADPYSINIPYLYPPTTMLKKHTQRVLMESSTNPMLRGVF

SEQ ID NO: 17249 - protein, 85 aa, unidentified
  REGION 1..85: note = Description of Unknown:cds_NC_025410.1_cds_YP_009094498.1_7 target sequence
YDGALQEESELAKFLLDRPVVMPRVAHIIIEQSSCGRRKQIQGYLDTTRTIIRYALKLAPLSYKKTTKVLDYNLLYLSYNLELIK

SEQ ID NO: 17250 - protein, 85 aa, unidentified
  REGION 1..85: note = Description of Unknown:cds_NC_025410.1_cds_YP_009094498.1_7 target sequence
HSTKSSAHPLASQDLSDVCSIDISQLLRKLSWTNLLNGRGLQGLETPDPIELLNGFLITGTTSCIACMEGDSKFTWLFLPAGIDL

SEQ ID NO: 17251 - protein, 85 aa, unidentified
  REGION 1..85: note = Description of Unknown:cds_NC_025410.1_cds_YP_009094498.1_7 target sequence
QAPPDENPPIRVPYVGSRTDERRVASMGYVKGASQALKSSLRLTGVYIWAYGETDYNWDQALMLANTRAAINKEQLQALTPLPTS

SEQ ID NO: 17252 - protein, 85 aa, unidentified
  REGION 1..85: note = Description of Unknown:cds_NC_025410.1_cds_YP_009094498.1_7 target sequence
SNLVHRLDDGLTQLKFTPASSYAFSSYVHISNDSQNLELLERQLDSNLIYQQVMLLGLGIIETWLQFPNEQNQSDLSVHLHTGSS

SEQ ID NO: 17253 - protein, 85 aa, unidentified
  REGION 1..85: note = Description of Unknown:cds_NC_025410.1_cds_YP_009094498.1_7 target sequence
CCIRQVDSCIINESSSNVPILNVPYQNHFVFDPSPLSDEQAIQVKNLTFQTNISALDMIPLNDKFPVLAHLIGIQIAHSLTGLDE

SEQ ID NO: 17254 - protein, 85 aa, unidentified
  REGION 1..85: note = Description of Unknown:cds_NC_025410.1_cds_YP_009094498.1_7 target sequence
STSLINDAVVETDYACNWISECLNTQLDKVFYYAAWHLLLDLAYQLYYLRVLGQHAILDYYTTILYRIPGLALTGISSTISHPKL

SEQ ID NO: 17255 - protein, 85 aa, unidentified
  REGION 1..85: note = Description of Unknown:cds_NC_025410.1_cds_YP_009094498.1_7 target sequence
LRRMINLGIIIPRNAPYLATLDYQKMSTDALIWGAKHVLSDLMHGIDIEIIVPSEDSTEISDRVLNLVARKLSLCALIFNSDSVL

SEQ ID NO: 17256 - protein, 85 aa, unidentified
  REGION 1..85: note = Description of Unknown:cds_NC_025410.1_cds_YP_009094498.1_7 target sequence
PHVRGLAPDEKCRALTDAILHMFNNSLGQSDRIESLQAMIVMPKISAYPNNLYYLTRKLLNWIRDSDEAQLLLATFYDSFGFFET

SEQ ID NO: 17257 - protein, 85 aa, unidentified
  REGION 1..85: note = Description of Unknown:cds_NC_025410.1_cds_YP_009094498.1_7 target sequence
QHSLSMTPSILKEEDADSTLTDYDSVITIQSQGDDLQAISFPATSVYDPVPPNVAVSPPVHHILRPIGLSSTSWYKGLSVLRVLH

SEQ ID NO: 17258 - protein, 85 aa, unidentified
  REGION 1..85: note = Description of Unknown:cds_NC_025410.1_cds_YP_009094498.1_7 target sequence
TYQLPKGNHLYLAEGSGAIMTLMEANYPADVIFYNSYFSSGQCPPQRNFQPLPTQFIESVVYKNLQLGIPSDNGNVQEFKPLWSG

SEQ ID NO: 17259 - protein, 85 aa, unidentified
  REGION 1..85: note = Description of Unknown:cds_NC_025410.1_cds_YP_009094498.1_7 target sequence
NSVQTDLSTKECVDYIISQVNAHTLSLITLDIEEPTPEGVHDVSPALINSFLIAHFALKAQGIMIIKTHLSPFHRFSRIITLASK

SEQ ID NO: 17260 - protein, 85 aa, unidentified
  REGION 1..85: note = Description of Unknown:cds_NC_025410.1_cds_YP_009094498.1_7 target sequence
EFGSITAVRSSYSDPNSDELYLILQRVAITNPRDFTLALESMNQLHEAGFTLVSEDKLTELIDGLRENQQQIYNEIEYQNKMASC

SEQ ID NO: 17261 - protein, 85 aa, unidentified
  REGION 1..85: note = Description of Unknown:cds_NC_025410.1_cds_YP_009094498.1_7 target sequence
TSNLTDHITLSQLGSCIQTNKILEKAPAHSMTELLERICTAVTTFLKEMIALTEAAVIDKSALIYNSYNLQLPGKINTSAKLVAT

SEQ ID NO: 17262 - protein, 85 aa, unidentified
  REGION 1..85: note = Description of Unknown:cds_NC_025410.1_cds_YP_009094498.1_7 target sequence
QILELYIRNWDLISIDLRLKLIQMIELGYFSVGEILSTNDFIKYTNVPNYLRKVLGMTTIDQELHLRLKVYLSRAQQKRVWKSVG

SEQ ID NO: 17263 - protein, 85 aa, unidentified
  REGION 1..85: note = Description of Unknown:cds_NC_039198.1_cds_YP_009512978.1_7 target sequence
ACPEQVILPEVHLDSPIVKNKLYYYLKVGGFPLPDEEFCDTLFPNISWEQVRREESRLSARLLKVRNLAMSRLEPKKRKLQYQNK

SEQ ID NO: 17264 - protein, 85 aa, unidentified
  REGION 1..85: note = Description of Unknown:cds_NC_039198.1_cds_YP_009512978.1_7 target sequence
SESPSVVLWPEIIPELRGYVLASCLSRFADAEKCLISALSPLVTGTQDLLNQMGSKISSKTFLVTHNSSACKHHDNHSRPQSALD

SEQ ID NO: 17265 - protein, 85 aa, unidentified
  REGION 1..85: note = Description of Unknown:cds_NC_039198.1_cds_YP_009512978.1_7 target sequence
FCHIYDSSEYRDSFYTWFLIRHQMRGLILKTQTNLSLDLIVVLDERKFCFIVTPELVTIVDPCSNRLSFFTFEMTLMVTDMLEGR

SEQ ID NO: 17266 - protein, 85 aa, unidentified
  REGION 1..85: note = Description of Unknown:cds_NC_039198.1_cds_YP_009512978.1_7 target sequence
MNILAISSASCYLQPLRTNLSYLFEIVDHLCAILGQNVYSVIANLESMVYAILQLSDPVVELKGEFLSFINSEIYAILSDSGEFN

SEQ ID NO: 17267 - protein, 85 aa, unidentified
  REGION 1..85: note = Description of Unknown:cds_NC_039198.1_cds_YP_009512978.1_7 target sequence
EEEATSVIDKLNSCFLHLPTDLTAELLCIMRLWGHPMLSSATAARKVRESMCAPKVIDLTTNLKTLAFFNGIIINGYRRRHDGIW

SEQ ID NO: 17268 - protein, 85 aa, unidentified
  REGION 1..85: note = Description of Unknown:cds_NC_039198.1_cds_YP_009512978.1_7 target sequence
PNCKLPPFASVSLQELKHDNSELSYQYILNHWKELAMLEFEKSIEADPGEDLSIFMKDKAISAPRKEWLSVFRKSLIKQQCEKNK

SEQ ID NO: 17269 - protein, 85 aa, unidentified
  REGION 1..85: note = Description of Unknown:cds_NC_039198.1_cds_YP_009512978.1_7 target sequence
IPLPQPYNRRLLLNFLSDETFDPEKELEYVTSGAYLDDDTFCASYSLKEKEIKETGRIFAKLTKNMRSCQVIAESLLASHAGKFF

SEQ ID NO: 17270 - protein, 85 aa, unidentified
  REGION 1..85: note = Description of Unknown:cds_NC_039198.1_cds_YP_009512978.1_7 target sequence
KENGVVLDQISITKTLLTMSQIGLISKHARRTTRNNVTVVTKSERLKPGKSAHTRNSSSPQSQGPDETTEIAACFLTTDLSKYCL

SEQ ID NO: 17271 - protein, 85 aa, unidentified
  REGION 1..85: note = Description of Unknown:cds_NC_039198.1_cds_YP_009512978.1_7 target sequence
NWRYQSIVMFAKSMNQLYGYNHLFEWIHQRLMRSTLYVGDPFNPPRNLDETDLDLVENGDIFIVSPRGGIEGLCQKLWTMISIAV

SEQ ID NO: 17272 - protein, 85 aa, unidentified
  REGION 1..85: note = Description of Unknown:cds_NC_039198.1_cds_YP_009512978.1_7 target sequence
IVLSATESGCRVMSLVQGDNQAMAITTMVPRSLPHQEKKRIAYENSQLFIRRLRENNFGMGHHLKEQETIVSSEFLIYSKRIIYN

SEQ ID NO: 17273 - protein, 85 aa, unidentified
  REGION 1..85: note = Description of Unknown:cds_NC_039198.1_cds_YP_009512978.1_7 target sequence
GRILNQSLKNVSKLCLIADILGESTQTSCSNLSTTIMRLTENGVEKDICFFLNQYLTAKQLIFDLLFPLTKLFEDKTTSTYLDHP

SEQ ID NO: 17274 - protein, 85 aa, unidentified
  REGION 1..85: note = Description of Unknown:cds_NC_039198.1_cds_YP_009512978.1_7 target sequence
ILISRIITIPAQLGGLNYYALTRLFNRNIGDPLTSAIADLKRYIRSNMIPKWVLKNLIARESGDGDWNTLASDPYALNINYLYPP

SEQ ID NO: 17275 - protein, 85 aa, unidentified
  REGION 1..85: note = Description of Unknown:cds_NC_039198.1_cds_YP_009512978.1_7 target sequence
TTFLKKHAQKVLMEGSVNPMLNGVFSENNLPEENSLAQFLLDRDVVMPRVAHIILEQSVCGRKKQIQGYLDTTRTIIKYAINKQP

SEQ ID NO: 17276 - protein, 85 aa, unidentified
  REGION 1..85: note = Description of Unknown:cds_NC_039198.1_cds_YP_009512978.1_7 target sequence
VGNAKLCKILDYNIAFLSYNLDYLSAPNTSVIVSMSSSSLLKLCSIDLAKLARRLSWRSLLGGRPLDGLETPDPIELVNGSLLTK

SEQ ID NO: 17277 - protein, 85 aa, unidentified
  REGION 1..85: note = Description of Unknown:cds_NC_039198.1_cds_YP_009512978.1_7 target sequence
GFSCSHCLSGDKKYTWFFMPSGVDINADPSDNPPLRVPYIGSRTDERRVASMSYIKGSSSALKSALRLCGVYIWAFGDTEKNWQD

SEQ ID NO: 17278 - protein, 85 aa, unidentified
  REGION 1..85: note = Description of Unknown:cds_NC_039198.1_cds_YP_009512978.1_7 target sequence
ASQLANTRASLTTEQLHILTPLPTTANLTHRLDDGLTQQKFTPASSYMYSSYVHISNDDQNLEIQDKTVDSNLIYQQIMLLGLGI

SEQ ID NO: 17279 - protein, 85 aa, unidentified
  REGION 1..85: note = Description of Unknown:cds_NC_039198.1_cds_YP_009512978.1_7 target sequence
LETWLQLPNEINMEDITLHLHTGCSCCIKQVDACIINEAEVQLPILSVPQYNKFIYDPNPLTEQDLIDVDRLQFEAKISGIETIP

SEQ ID NO: 17280 - protein, 85 aa, unidentified
  REGION 1..85: note = Description of Unknown:cds_NC_039198.1_cds_YP_009512978.1_7 target sequence
DCDKIRTLGHLTGIQLARSLTGLDEVTSLMNDAIIEADYATNWISECLNTKLDDTFIYAAWNLLLDMSYQLYYLRILGQNAILDY

SEQ ID NO: 17281 - protein, 85 aa, unidentified
  REGION 1..85: note = Description of Unknown:cds_NC_039198.1_cds_YP_009512978.1_7 target sequence
LSVVLSRIPGLALSGIASTISHPKILRRLINLEIIRPYNSPYLATLNYTKLTCDALMWGARHVLNNLRSGFDIEIIVPSECSSEL

SEQ ID NO: 17282 - protein, 85 aa, unidentified
  REGION 1..85: note = Description of Unknown:cds_NC_039198.1_cds_YP_009512978.1_7 target sequence
SNRVLNLVARKLSLLCCLIASHHELPHVRGMSPEQKCGLLTEYLLYKSQNLQYAGFDLRLWERSVKEPKISAFPCNIYYLTRKVL

SEQ ID NO: 17283 - protein, 85 aa, unidentified
  REGION 1..85: note = Description of Unknown:cds_NC_039198.1_cds_YP_009512978.1_7 target sequence
NYIRDSPYLQQQLVDYYEARYALYSDSSLSSKESGQKTPTDLATLCDLDWAIPLFTQDDKIDTFHTPLTDDTVPIKSSIIADPPV

SEQ ID NO: 17284 - protein, 85 aa, unidentified
  REGION 1..85: note = Description of Unknown:cds_NC_039198.1_cds_YP_009512978.1_7 target sequence
HHVLRPIGLSSTSWYKGLSVVSLLETYPLLDGNHLYLAEGSGAMMTIIESRFRGAKAYYNSLFSSGQNPPQRNFQPLPTQFIESI

SEQ ID NO: 17285 - protein, 85 aa, unidentified
  REGION 1..85: note = Description of Unknown:cds_NC_039198.1_cds_YP_009512978.1_7 target sequence
VYQNICHEEDQLDVEEKFFVPLWSGVSEQTDLRCASCVNFMLERIPSRSVSLLNVDLEDISSMHDCELSRATMNILLLSDILIMP

SEQ ID NO: 17286 - protein, 85 aa, unidentified
  REGION 1..85: note = Description of Unknown:cds_NC_039198.1_cds_YP_009512978.1_7 target sequence
GGILIFKTYLSPFAKLSTLCKLLQITFSRCTLLRSAYSDPSSDEIFLIAVKSDNPSLTNYGEELISQFQREDVNFTNIDPKTISA

SEQ ID NO: 17287 - protein, 85 aa, unidentified
  REGION 1..85: note = Description of Unknown:cds_NC_039198.1_cds_YP_009512978.1_7 target sequence
VIEKLVFQQQRVKDIIVNQICSGRCDLNLDDHIRLSQLGTCSQTPKILDLTAASDFNEFLYRVVQLLTMFIKEFISIHEDLSSDR

SEQ ID NO: 17288 - protein, 85 aa, unidentified
  REGION 1..85: note = Description of Unknown:cds_NC_039198.1_cds_YP_009512978.1_7 target sequence
NSLLFSSYNLSYIGKLSTNNQTVTAHMLDLTVRNWPVLPASVNNQVRNDLELGLFQCRSVIPWDVFLDLTPIRKHILNRMNHQVV

SEQ ID NO: 17289 - protein, 84 aa, unidentified
  REGION 1..84: note = Description of Unknown:cds_NC_039198.1_cds_YP_009512978.1_7 target sequence
PWDVFLDLTPIRKHILNRMNHQVVKDLFTHHLIVQLDRAEQKRVWKAVGSVILTNTLDSDTPEDFSLLFDDRENLDFDIFGDEI

SEQ ID NO: 17290 - protein, 85 aa, unidentified
  REGION 1..85: note = Description of Unknown:cds_NC_039198.1_cds_YP_009512978.1_7 target sequence
VGGFPLPDEEFCDTLFPNISWEQVRREESRLSARLLKVRNLAMSRLEPKKRKLQYQNKSESPSVVLWPEIIPELRGYVLASCLSR

SEQ ID NO: 17291 - protein, 85 aa, unidentified
  REGION 1..85: note = Description of Unknown:cds_NC_039198.1_cds_YP_009512978.1_7 target sequence
FADAEKCLISALSPLVTGTQDLLNQMGSKISSKTFLVTHNSSACKHHDNHSRPQSALDFCHIYDSSEYRDSFYTWFLIRHQMRGL

SEQ ID NO: 17292 - protein, 85 aa, unidentified
  REGION 1..85: note = Description of Unknown:cds_NC_039198.1_cds_YP_009512978.1_7 target sequence
ILKTQTNLSLDLIVVLDERKFCFIVTPELVTIVDPCSNRLSFFTFEMTLMVTDMLEGRMNILAISSASCYLQPLRTNLSYLFEIV

SEQ ID NO: 17293 - protein, 85 aa, unidentified
  REGION 1..85: note = Description of Unknown:cds_NC_039198.1_cds_YP_009512978.1_7 target sequence
DHLCAILGQNVYSVIANLESMVYAILQLSDPVVELKGEFLSFINSEIYAILSDSGEFNEEEATSVIDKLNSCFLHLPTDLTAELL

SEQ ID NO: 17294 - protein, 85 aa, unidentified
  REGION 1..85: note = Description of Unknown:cds_NC_039198.1_cds_YP_009512978.1_7 target sequence
CIMRLWGHPMLSSATAARKVRESMCAPKVIDLTTNLKTLAFFNGIIINGYRRRHDGIWPNCKLPPFASVSLQELKHDNSELSYQY

SEQ ID NO: 17295 - protein, 85 aa, unidentified
  REGION 1..85: note = Description of Unknown:cds_NC_039198.1_cds_YP_009512978.1_7 target sequence
ILNHWKELAMLEFEKSIEADPGEDLSIFMKDKAISAPRKEWLSVFRKSLIKQQCEKNKIPLPQPYNRRLLLNFLSDETFDPEKEL

SEQ ID NO: 17296 - protein, 85 aa, unidentified
  REGION 1..85: note = Description of Unknown:cds_NC_039198.1_cds_YP_009512978.1_7 target sequence
EYVTSGAYLDDDTFCASYSLKEKEIKETGRIFAKLTKNMRSCQVIAESLLASHAGKFFKENGVVLDQISITKTLLTMSQIGLISK

SEQ ID NO: 17297 - protein, 85 aa, unidentified
  REGION 1..85: note = Description of Unknown:cds_NC_039198.1_cds_YP_009512978.1_7 target sequence
HARRTTRNNVTVVTKSERLKPGKSAHTRNSSSPQSQGPDETTEIAACFLTTDLSKYCLNWRYQSIVMFAKSMNQLYGYNHLFEWI

SEQ ID NO: 17298 - protein, 85 aa, unidentified
  REGION 1..85: note = Description of Unknown:cds_NC_039198.1_cds_YP_009512978.1_7 target sequence
HQRLMRSTLYVGDPFNPPRNLDETDLDLVENGDIFIVSPRGGIEGLCQKLWTMISIAVIVLSATESGCRVMSLVQGDNQAMAITT

SEQ ID NO: 17299 - protein, 85 aa, unidentified
  REGION 1..85: note = Description of Unknown:cds_NC_039198.1_cds_YP_009512978.1_7 target sequence
MVPRSLPHQEKKRIAYENSQLFIRRLRENNFGMGHHLKEQETIVSSEFLIYSKRIIYNGRILNQSLKNVSKLCLIADILGESTQT

SEQ ID NO: 17300 - protein, 85 aa, unidentified
  REGION 1..85: note = Description of Unknown:cds_NC_039198.1_cds_YP_009512978.1_7 target sequence
SCSNLSTTIMRLTENGVEKDICFFLNQYLTAKQLIFDLLFPLTKLFEDKTTSTYLDHPILISRIITIPAQLGGLNYYALTRLFNR

SEQ ID NO: 17301 - protein, 85 aa, unidentified
  REGION 1..85: note = Description of Unknown:cds_NC_039198.1_cds_YP_009512978.1_7 target sequence
NIGDPLTSAIADLKRYIRSNMIPKWVLKNLIARESGDGDWNTLASDPYALNINYLYPPTTFLKKHAQKVLMEGSVNPMLNGVFSE

SEQ ID NO: 17302 - protein, 85 aa, unidentified
  REGION 1..85: note = Description of Unknown:cds_NC_039198.1_cds_YP_009512978.1_7 target sequence
NNLPEENSLAQFLLDRDVVMPRVAHIILEQSVCGRKKQIQGYLDTTRTIIKYAINKQPVGNAKLCKILDYNIAFLSYNLDYLSAP

SEQ ID NO: 17303 - protein, 85 aa, unidentified
  REGION 1..85: note = Description of Unknown:cds_NC_039198.1_cds_YP_009512978.1_7 target sequence
NTSVIVSMSSSSLLKLCSIDLAKLARRLSWRSLLGGRPLDGLETPDPIELVNGSLLTKGFSCSHCLSGDKKYTWFFMPSGVDINA

SEQ ID NO: 17304 - protein, 85 aa, unidentified
  REGION 1..85: note = Description of Unknown:cds_NC_039198.1_cds_YP_009512978.1_7 target sequence
DPSDNPPLRVPYIGSRTDERRVASMSYIKGSSSALKSALRLCGVYIWAFGDTEKNWQDASQLANTRASLTTEQLHILTPLPTTAN

SEQ ID NO: 17305 - protein, 85 aa, unidentified
  REGION 1..85: note = Description of Unknown:cds_NC_039198.1_cds_YP_009512978.1_7 target sequence
LTHRLDDGLTQQKFTPASSYMYSSYVHISNDDQNLEIQDKTVDSNLIYQQIMLLGLGILETWLQLPNEINMEDITLHLHTGCSCC

SEQ ID NO: 17306 - protein, 85 aa, unidentified
  REGION 1..85: note = Description of Unknown:cds_NC_039198.1_cds_YP_009512978.1_7 target sequence
IKQVDACIINEAEVQLPILSVPQYNKFIYDPNPLTEQDLIDVDRLQFEAKISGIETIPDCDKIRTLGHLTGIQLARSLTGLDEVT

SEQ ID NO: 17307 - protein, 85 aa, unidentified
  REGION 1..85: note = Description of Unknown:cds_NC_039198.1_cds_YP_009512978.1_7 target sequence
SLMNDAIIEADYATNWISECLNTKLDDTFIYAAWNLLLDMSYQLYYLRILGQNAILDYLSVVLSRIPGLALSGIASTISHPKILR

SEQ ID NO: 17308 - protein, 85 aa, unidentified
  REGION 1..85: note = Description of Unknown:cds_NC_039198.1_cds_YP_009512978.1_7 target sequence
RLINLEIIRPYNSPYLATLNYTKLTCDALMWGARHVLNNLRSGFDIEIIVPSECSSELSNRVLNLVARKLSLLCCLIASHHELPH

SEQ ID NO: 17309 - protein, 85 aa, unidentified
  REGION 1..85: note = Description of Unknown:cds_NC_039198.1_cds_YP_009512978.1_7 target sequence
VRGMSPEQKCGLLTEYLLYKSQNLQYAGFDLRLWERSVKEPKISAFPCNIYYLTRKVLNYIRDSPYLQQQLVDYYEARYALYSDS

SEQ ID NO: 17310 - protein, 85 aa, unidentified
  REGION 1..85: note = Description of Unknown:cds_NC_039198.1_cds_YP_009512978.1_7 target sequence
SLSSKESGQKTPTDLATLCDLDWAIPLFTQDDKIDTFHTPLTDDTVPIKSSIIADPPVHHVLRPIGLSSTSWYKGLSVVSLLETY

SEQ ID NO: 17311 - protein, 85 aa, unidentified
  REGION 1..85: note = Description of Unknown:cds_NC_039198.1_cds_YP_009512978.1_7 target sequence
PLLDGNHLYLAEGSGAMMTIIESRFRGAKAYYNSLFSSGQNPPQRNFQPLPTQFIESIVYQNICHEEDQLDVEEKFFVPLWSGVS

SEQ ID NO: 17312 - protein, 85 aa, unidentified
  REGION 1..85: note = Description of Unknown:cds_NC_039198.1_cds_YP_009512978.1_7 target sequence
EQTDLRCASCVNFMLERIPSRSVSLLNVDLEDISSMHDCELSRATMNILLLSDILIMPGGILIFKTYLSPFAKLSTLCKLLQITF

SEQ ID NO: 17313 - protein, 85 aa, unidentified
  REGION 1..85: note = Description of Unknown:cds_NC_039198.1_cds_YP_009512978.1_7 target sequence
SRCTLLRSAYSDPSSDEIFLIAVKSDNPSLTNYGEELISQFQREDVNFTNIDPKTISAVIEKLVFQQQRVKDIIVNQICSGRCDL

SEQ ID NO: 17314 - protein, 85 aa, unidentified
  REGION 1..85: note = Description of Unknown:cds_NC_039198.1_cds_YP_009512978.1_7 target sequence
NLDDHIRLSQLGTCSQTPKILDLTAASDFNEFLYRVVQLLTMFIKEFISIHEDLSSDRNSLLFSSYNLSYIGKLSTNNQTVTAHM

SEQ ID NO: 17315 - protein, 85 aa, unidentified
  REGION 1..85: note = Description of Unknown:cds_NC_039198.1_cds_YP_009512978.1_7 target sequence
LDLTVRNWPVLPASVNNQVRNDLELGLFQCRSVIPWDVFLDLTPIRKHILNRMNHQVVKDLFTHHLIVQLDRAEQKRVWKAVGSV

SEQ ID NO: 17316 - protein, 85 aa, unidentified
  REGION 1..85: note = Description of Unknown:cds_NC_004074.1_cds_NP_665871.1_8 target sequence
ACPEQVILPEVHLDSPIVRNKLLYYLKVGGLPTSDEGICDTLFPNISWDRVRREESRLSARLQKVRQLSYARLSSSVNSPRSPTA

SEQ ID NO: 17317 - protein, 85 aa, unidentified
  REGION 1..85: note = Description of Unknown:cds_NC_004074.1_cds_NP_665871.1_8 target sequence
NLDVEVILWPEIIPNLKRYILTSCLNRFADAEKCLISAMSPLVQGTKLLLSEMCKKVSGKDTLVTNNVKACRFHGQHTRPQSALD

SEQ ID NO: 17318 - protein, 85 aa, unidentified
  REGION 1..85: note = Description of Unknown:cds_NC_004074.1_cds_NP_665871.1_8 target sequence
FCHIYDANEYKDAFYTWFLIRHQMRALILKTQTNLSVDLITILDERDYCFIVTPELVTLVDRKETRMSYFTFEMTLMVTDMIEGR

SEQ ID NO: 17319 - protein, 85 aa, unidentified
  REGION 1..85: note = Description of Unknown:cds_NC_004074.1_cds_NP_665871.1_8 target sequence
MNILAISSASCYLQPLKVNLRYLFDIVDQLCAILGQNVYSLIANLESMVYAVLQLSDPVPDLKGEFLSFINSEIYTILTDSGEFT

SEQ ID NO: 17320 - protein, 85 aa, unidentified
  REGION 1..85: note = Description of Unknown:cds_NC_004074.1_cds_NP_665871.1_8 target sequence
DCEAYAVIDKLNSCYLHLPADLVAELLCIMRLWGHPMLTSATAARKVRESMCAPKVIDLTTNLKTLAFFNGIIINGYRRRHDGIW

SEQ ID NO: 17321 - protein, 85 aa, unidentified
  REGION 1..85: note = Description of Unknown:cds_NC_004074.1_cds_NP_665871.1_8 target sequence
PNCTLPPFASLSLQELRHDNSELSYPYILAHWKEIAMLEFGKSIDADPGEDLSIFMKDKAISAPRKDWLSVFRKSLIKQQCEQCR

SEQ ID NO: 17322 - protein, 85 aa, unidentified
  REGION 1..85: note = Description of Unknown:cds_NC_004074.1_cds_NP_665871.1_8 target sequence
ISLPQPYNRRLLLNFLADETFDPSKELEYVTSGAYLDDDSFCASYSLKEKEIKETGRIFAKLTKNMRSCQVIAESLLAAHAGKFF

SEQ ID NO: 17323 - protein, 85 aa, unidentified
  REGION 1..85: note = Description of Unknown:cds_NC_004074.1_cds_NP_665871.1_8 target sequence
KENGVVLDQISITKTLLTMSQIGIISKHSRRTTRNNITVLNKSERHHLGRHETNANLSSGKREVPNETTEITACFLTTDLSKYCL

SEQ ID NO: 17324 - protein, 85 aa, unidentified
  REGION 1..85: note = Description of Unknown:cds_NC_004074.1_cds_NP_665871.1_8 target sequence
NWRYQSIILFAKSMNQLYGYNHLFEWIHLRLMRSTLYVGDPFNPPRNLTSADLDLVENGDIFIVSPRGGIEGLCQKLWTMISIAV

SEQ ID NO: 17325 - protein, 85 aa, unidentified
  REGION 1..85: note = Description of Unknown:cds_NC_004074.1_cds_NP_665871.1_8 target sequence
IVLSATEAGTRVMSLVQGDNQAMAITTMVPRGLPHHEKKRIAYENSQTFIRRLRENNLGMGHHLKEQETIVSSEFLIYSKRIIYN

SEQ ID NO: 17326 - protein, 85 aa, unidentified
  REGION 1..85: note = Description of Unknown:cds_NC_004074.1_cds_NP_665871.1_8 target sequence
GRILNQSLKNVSKLCLIADILGESTQTSCSNLATTVMRLTENGIEKDICFFLNQYLTAKQLVFDLLFPLTKLFEDQTSSAFLDHP

SEQ ID NO: 17327 - protein, 85 aa, unidentified
  REGION 1..85: note = Description of Unknown:cds_NC_004074.1_cds_NP_665871.1_8 target sequence
ILVSRLITIPAQLGGLNYYALTRLFNRNIGDPLTSAIADLKRYIIAGMLPRWILKNLIAREPGDGDWNTLASDPYALNIDYLYPP

SEQ ID NO: 17328 - protein, 85 aa, unidentified
  REGION 1..85: note = Description of Unknown:cds_NC_004074.1_cds_NP_665871.1_8 target sequence
TTFLKKHAQRVLMEGSVNPMLSGVFSESNLPEENSLARFLLDRDIVMPRVAHIVLEQSVCGRKKQIQGYLDTTRTIIRYAINRQP

SEQ ID NO: 17329 - protein, 85 aa, unidentified
  REGION 1..85: note = Description of Unknown:cds_NC_004074.1_cds_NP_665871.1_8 target sequence
IGNAKLCKILDYNTSYLSYNLDYISTPVTCVTMSMSSSSLLKLCSIDLARLVRRLSWKSLLGGRQLDGLETPDPIELVEGALLTR

SEQ ID NO: 17330 - protein, 85 aa, unidentified
  REGION 1..85: note = Description of Unknown:cds_NC_004074.1_cds_NP_665871.1_8 target sequence
GSACTHCMSGNRKYTWFFVPAGIDITADPADNPPVRVPYIGSRTDERRVASMSYVKGSSSALKAALRLCGVYIWAFGDTEKNWAD

SEQ ID NO: 17331 - protein, 85 aa, unidentified
  REGION 1..85: note = Description of Unknown:cds_NC_004074.1_cds_NP_665871.1_8 target sequence
AAQLANTRAQLSLDQLHVLTPLPTTANLTHRLDDGLTQQKFTPASSYMYSSYVHISNDDQNLEIQDRTVDSNLIYQQIMLLGLGI

SEQ ID NO: 17332 - protein, 85 aa, unidentified
  REGION 1..85: note = Description of Unknown:cds_NC_004074.1_cds_NP_665871.1_8 target sequence
IETWLQLPNEINIEDSTLHLHTECSCCIKQVDACIINQVEGNVPTLSIPQYNKFIYDTNPLTDQDLQDIDKLQFEAEISGIDAIP

SEQ ID NO: 17333 - protein, 85 aa, unidentified
  REGION 1..85: note = Description of Unknown:cds_NC_004074.1_cds_NP_665871.1_8 target sequence
DQDKVRVLGHLTGLQLARSITGLDEVTSLMNDAIVEADYSANWISECLNTKLDDTFLYAAWNLLLDLSYQLYYLRILGQNAILDY

SEQ ID NO: 17334 - protein, 85 aa, unidentified
  REGION 1..85: note = Description of Unknown:cds_NC_004074.1_cds_NP_665871.1_8 target sequence
LSIVLSRIPGLALSGIAATISHPKILRRLINLEIVRPYNSPYLATLNYTKMTCDALMWGARHVLSNIRSGFDIEIIIPSECSSEL

SEQ ID NO: 17335 - protein, 85 aa, unidentified
  REGION 1..85: note = Description of Unknown:cds_NC_004074.1_cds_NP_665871.1_8 target sequence
SDRVLNLIARKLSLLCCLTASHHELPHVRGLSPELKCKVLTEYLISKKNEYSITVGDVRGWETSILEPKISAFPCNIYYLTRKVL

SEQ ID NO: 17336 - protein, 85 aa, unidentified
  REGION 1..85: note = Description of Unknown:cds_NC_004074.1_cds_NP_665871.1_8 target sequence
NYIRDSPFLQQQLADYYDIRSSVYSNIPVINNSTEGSDSEFPSTLCILDWLTPLFSQADKVTKFHTPLTDSSPMVKDLTLVDPPI

SEQ ID NO: 17337 - protein, 85 aa, unidentified
  REGION 1..85: note = Description of Unknown:cds_NC_004074.1_cds_NP_665871.1_8 target sequence
HHVLRPVGLSSTSWYKGLSVIKVLDTLPILSGNHLYLAEGSGAMMTVIESKYCGTKAFYNSLFSSGQNPPQRNFQPLPTQFMESI

SEQ ID NO: 17338 - protein, 85 aa, unidentified
  REGION 1..85: note = Description of Unknown:cds_NC_004074.1_cds_NP_665871.1_8 target sequence
VYQNIRYEEDQIGTDEPFFVPLWSGSSEETDLSCAACVNLILKSIPSRSVSIMNVDLEDITQMQNPEVSRAAINVILLSDILLMP

SEQ ID NO: 17339 - protein, 85 aa, unidentified
  REGION 1..85: note = Description of Unknown:cds_NC_004074.1_cds_NP_665871.1_8 target sequence
GGVLIFKTYLSPFAKLSNFCKLLQIAFSRCVLLRSAYSDPASDEVFLVAIKSDLRSLTGSFDEIANQSRTDDKSFTCIDPEILTQ

SEQ ID NO: 17340 - protein, 85 aa, unidentified
  REGION 1..85: note = Description of Unknown:cds_NC_004074.1_cds_NP_665871.1_8 target sequence
IIVNLNNQQQRVKNIINDQVRTGRCDVNIDDHIQLSRLGTSSQTPKILDLEIAFDFNDFLTRVVQLLTTFLKEFISIHDDLATDR

SEQ ID NO: 17341 - protein, 85 aa, unidentified
  REGION 1..85: note = Description of Unknown:cds_NC_004074.1_cds_NP_665871.1_8 target sequence
NSLLFDSYNLDRKGKLSTNNQIVTTHIMNLTARNWPLLPPAVNGQVRNNLELGIFQCSSIVSWEVFLDLTPIRKHILKRIGSQIV

SEQ ID NO: 17342 - protein, 84 aa, unidentified
  REGION 1..84: note = Description of Unknown:cds_NC_004074.1_cds_NP_665871.1_8 target sequence
SWEVFLDLTPIRKHILKRIGSQIVRDLFTYHLIIKLDRSEQKRIWKAIGSVILSFTLDNDIPDHHPVLFEDPDTPEFDIFGEEL

SEQ ID NO: 17343 - protein, 85 aa, unidentified
  REGION 1..85: note = Description of Unknown:cds_NC_004074.1_cds_NP_665871.1_8 target sequence
VGGLPTSDEGICDTLFPNISWDRVRREESRLSARLQKVRQLSYARLSSSVNSPRSPTANLDVEVILWPEIIPNLKRYILTSCLNR

SEQ ID NO: 17344 - protein, 85 aa, unidentified
  REGION 1..85: note = Description of Unknown:cds_NC_004074.1_cds_NP_665871.1_8 target sequence
FADAEKCLISAMSPLVQGTKLLLSEMCKKVSGKDTLVTNNVKACRFHGQHTRPQSALDFCHIYDANEYKDAFYTWFLIRHQMRAL

SEQ ID NO: 17345 - protein, 85 aa, unidentified
  REGION 1..85: note = Description of Unknown:cds_NC_004074.1_cds_NP_665871.1_8 target sequence
ILKTQTNLSVDLITILDERDYCFIVTPELVTLVDRKETRMSYFTFEMTLMVTDMIEGRMNILAISSASCYLQPLKVNLRYLFDIV

SEQ ID NO: 17346 - protein, 85 aa, unidentified
  REGION 1..85: note = Description of Unknown:cds_NC_004074.1_cds_NP_665871.1_8 target sequence
DQLCAILGQNVYSLIANLESMVYAVLQLSDPVPDLKGEFLSFINSEIYTILTDSGEFTDCEAYAVIDKLNSCYLHLPADLVAELL

SEQ ID NO: 17347 - protein, 85 aa, unidentified
  REGION 1..85: note = Description of Unknown:cds_NC_004074.1_cds_NP_665871.1_8 target sequence
CIMRLWGHPMLTSATAARKVRESMCAPKVIDLTTNLKTLAFFNGIIINGYRRRHDGIWPNCTLPPFASLSLQELRHDNSELSYPY

SEQ ID NO: 17348 - protein, 85 aa, unidentified
  REGION 1..85: note = Description of Unknown:cds_NC_004074.1_cds_NP_665871.1_8 target sequence
ILAHWKEIAMLEFGKSIDADPGEDLSIFMKDKAISAPRKDWLSVFRKSLIKQQCEQCRISLPQPYNRRLLLNFLADETFDPSKEL

SEQ ID NO: 17349 - protein, 85 aa, unidentified
  REGION 1..85: note = Description of Unknown:cds_NC_004074.1_cds_NP_665871.1_8 target sequence
EYVTSGAYLDDDSFCASYSLKEKEIKETGRIFAKLTKNMRSCQVIAESLLAAHAGKFFKENGVVLDQISITKTLLTMSQIGIISK

SEQ ID NO: 17350 - protein, 85 aa, unidentified
  REGION 1..85: note = Description of Unknown:cds_NC_004074.1_cds_NP_665871.1_8 target sequence
HSRRTTRNNITVLNKSERHHLGRHETNANLSSGKREVPNETTEITACFLTTDLSKYCLNWRYQSIILFAKSMNQLYGYNHLFEWI

SEQ ID NO: 17351 - protein, 85 aa, unidentified
  REGION 1..85: note = Description of Unknown:cds_NC_004074.1_cds_NP_665871.1_8 target sequence
HLRLMRSTLYVGDPFNPPRNLTSADLDLVENGDIFIVSPRGGIEGLCQKLWTMISIAVIVLSATEAGTRVMSLVQGDNQAMAITT

SEQ ID NO: 17352 - protein, 85 aa, unidentified
  REGION 1..85: note = Description of Unknown:cds_NC_004074.1_cds_NP_665871.1_8 target sequence
MVPRGLPHHEKKRIAYENSQTFIRRLRENNLGMGHHLKEQETIVSSEFLIYSKRIIYNGRILNQSLKNVSKLCLIADILGESTQT

SEQ ID NO: 17353 - protein, 85 aa, unidentified
  REGION 1..85: note = Description of Unknown:cds_NC_004074.1_cds_NP_665871.1_8 target sequence
SCSNLATTVMRLTENGIEKDICFFLNQYLTAKQLVFDLLFPLTKLFEDQTSSAFLDHPILVSRLITIPAQLGGLNYYALTRLFNR

SEQ ID NO: 17354 - protein, 85 aa, unidentified
  REGION 1..85: note = Description of Unknown:cds_NC_004074.1_cds_NP_665871.1_8 target sequence
NIGDPLTSAIADLKRYIIAGMLPRWILKNLIAREPGDGDWNTLASDPYALNIDYLYPPTTFLKKHAQRVLMEGSVNPMLSGVFSE

SEQ ID NO: 17355 - protein, 85 aa, unidentified
  REGION 1..85: note = Description of Unknown:cds_NC_004074.1_cds_NP_665871.1_8 target sequence
SNLPEENSLARFLLDRDIVMPRVAHIVLEQSVCGRKKQIQGYLDTTRTIIRYAINRQPIGNAKLCKILDYNTSYLSYNLDYISTP

SEQ ID NO: 17356 - protein, 85 aa, unidentified
  REGION 1..85: note = Description of Unknown:cds_NC_004074.1_cds_NP_665871.1_8 target sequence
VTCVTMSMSSSSLLKLCSIDLARLVRRLSWKSLLGGRQLDGLETPDPIELVEGALLTRGSACTHCMSGNRKYTWFFVPAGIDITA

SEQ ID NO: 17357 - protein, 85 aa, unidentified
  REGION 1..85: note = Description of Unknown:cds_NC_004074.1_cds_NP_665871.1_8 target sequence
DPADNPPVRVPYIGSRTDERRVASMSYVKGSSSALKAALRLCGVYIWAFGDTEKNWADAAQLANTRAQLSLDQLHVLTPLPTTAN

SEQ ID NO: 17358 - protein, 85 aa, unidentified
  REGION 1..85: note = Description of Unknown:cds_NC_004074.1_cds_NP_665871.1_8 target sequence
LTHRLDDGLTQQKFTPASSYMYSSYVHISNDDQNLEIQDRTVDSNLIYQQIMLLGLGIIETWLQLPNEINIEDSTLHLHTECSCC

SEQ ID NO: 17359 - protein, 85 aa, unidentified
  REGION 1..85: note = Description of Unknown:cds_NC_004074.1_cds_NP_665871.1_8 target sequence
IKQVDACIINQVEGNVPTLSIPQYNKFIYDTNPLTDQDLQDIDKLQFEAEISGIDAIPDQDKVRVLGHLTGLQLARSITGLDEVT

SEQ ID NO: 17360 - protein, 85 aa, unidentified
  REGION 1..85: note = Description of Unknown:cds_NC_004074.1_cds_NP_665871.1_8 target sequence
SLMNDAIVEADYSANWISECLNTKLDDTFLYAAWNLLLDLSYQLYYLRILGQNAILDYLSIVLSRIPGLALSGIAATISHPKILR

SEQ ID NO: 17361 - protein, 85 aa, unidentified
  REGION 1..85: note = Description of Unknown:cds_NC_004074.1_cds_NP_665871.1_8 target sequence
RLINLEIVRPYNSPYLATLNYTKMTCDALMWGARHVLSNIRSGFDIEIIIPSECSSELSDRVLNLIARKLSLLCCLTASHHELPH

SEQ ID NO: 17362 - protein, 85 aa, unidentified
  REGION 1..85: note = Description of Unknown:cds_NC_004074.1_cds_NP_665871.1_8 target sequence
VRGLSPELKCKVLTEYLISKKNEYSITVGDVRGWETSILEPKISAFPCNIYYLTRKVLNYIRDSPFLQQQLADYYDIRSSVYSNI

SEQ ID NO: 17363 - protein, 85 aa, unidentified
  REGION 1..85: note = Description of Unknown:cds_NC_004074.1_cds_NP_665871.1_8 target sequence
PVINNSTEGSDSEFPSTLCILDWLTPLFSQADKVTKFHTPLTDSSPMVKDLTLVDPPIHHVLRPVGLSSTSWYKGLSVIKVLDTL

SEQ ID NO: 17364 - protein, 85 aa, unidentified
  REGION 1..85: note = Description of Unknown:cds_NC_004074.1_cds_NP_665871.1_8 target sequence
PILSGNHLYLAEGSGAMMTVIESKYCGTKAFYNSLFSSGQNPPQRNFQPLPTQFMESIVYQNIRYEEDQIGTDEPFFVPLWSGSS

SEQ ID NO: 17365 - protein, 85 aa, unidentified
  REGION 1..85: note = Description of Unknown:cds_NC_004074.1_cds_NP_665871.1_8 target sequence
EETDLSCAACVNLILKSIPSRSVSIMNVDLEDITQMQNPEVSRAAINVILLSDILLMPGGVLIFKTYLSPFAKLSNFCKLLQIAF

SEQ ID NO: 17366 - protein, 85 aa, unidentified
  REGION 1..85: note = Description of Unknown:cds_NC_004074.1_cds_NP_665871.1_8 target sequence
SRCVLLRSAYSDPASDEVFLVAIKSDLRSLTGSFDEIANQSRTDDKSFTCIDPEILTQIIVNLNNQQQRVKNIINDQVRTGRCDV

SEQ ID NO: 17367 - protein, 85 aa, unidentified
  REGION 1..85: note = Description of Unknown:cds_NC_004074.1_cds_NP_665871.1_8 target sequence
NIDDHIQLSRLGTSSQTPKILDLEIAFDFNDFLTRVVQLLTTFLKEFISIHDDLATDRNSLLFDSYNLDRKGKLSTNNQIVTTHI

SEQ ID NO: 17368 - protein, 85 aa, unidentified
  REGION 1..85: note = Description of Unknown:cds_NC_004074.1_cds_NP_665871.1_8 target sequence
MNLTARNWPLLPPAVNGQVRNNLELGIFQCSSIVSWEVFLDLTPIRKHILKRIGSQIVRDLFTYHLIIKLDRSEQKRIWKAIGSV

SEQ ID NO: 17369 - protein, 85 aa, unidentified
  REGION 1..85: note = Description of Unknown:cds_NC_025350.1_cds_YP_009094080.1_7 target sequence
AATSQIILPEVHLDSPIVENKLLYLLQLGELPIFDSYYEHDFFPEVDWPRVRREENKLFSRLNEVRDRLLSKTLSATTRKLHHSL

SEQ ID NO: 17370 - protein, 85 aa, unidentified
  REGION 1..85: note = Description of Unknown:cds_NC_025350.1_cds_YP_009094080.1_7 target sequence
LPTPIPWPRCMPELHSVTIKHSLQRFTDAELTITHAAESISQGLSSVINELADKLTGKSDLFSRNIQSCMDHSSHTRPNGLIDIA

SEQ ID NO: 17371 - protein, 85 aa, unidentified
  REGION 1..85: note = Description of Unknown:cds_NC_025350.1_cds_YP_009094080.1_7 target sequence
QIAQSTDWKDNFNQWFLIRHLMRQLIMDNNTGKISIPPIEIDDRQMSVIITPELVTIWIGKTNHVFYFTFEMTLMVCDMYEGRMN

SEQ ID NO: 17372 - protein, 85 aa, unidentified
  REGION 1..85: note = Description of Unknown:cds_NC_025350.1_cds_YP_009094080.1_7 target sequence
AIMLTTMSCYLSPLRNRLQRLYYLVDSLCEIIGNNVYSIVASMESLVYGKIQLADPVPDVAGEFYSFIITEMLSALIETKMFTIQ

SEQ ID NO: 17373 - protein, 85 aa, unidentified
  REGION 1..85: note = Description of Unknown:cds_NC_025350.1_cds_YP_009094080.1_7 target sequence
EATTVVERISECYDNLSPDLIAELLCLMRMWGHPSLSAEKAADKVRKSMCAAKVIDLETNLKTLAFFHGILINGYRRKHNGIWPK

SEQ ID NO: 17374 - protein, 85 aa, unidentified
  REGION 1..85: note = Description of Unknown:cds_NC_025350.1_cds_YP_009094080.1_7 target sequence
CTLPPNASLSLAELKHDNSELPHHYILQHWKEVAFIQFEKSFDADPGEELSIFMKDKAISAPKKDWMSVFRRSLIKPICEKLGAP

SEQ ID NO: 17375 - protein, 85 aa, unidentified
  REGION 1..85: note = Description of Unknown:cds_NC_025350.1_cds_YP_009094080.1_7 target sequence
LPNAFNRRLLLNFLSDSNFDPDKELEYVTTGRYLDDDSFCASYSLKEKEIKETGRIFAKLTKNMRSCQVMSESLLANHAGKLFKE

SEQ ID NO: 17376 - protein, 85 aa, unidentified
  REGION 1..85: note = Description of Unknown:cds_NC_025350.1_cds_YP_009094080.1_7 target sequence
NGVVLDNLNLTKSLLTMSQIGLISKQSRRNVRENVTVMTKVHKRSNLANTKIQSSHGPSSPTTDEQLEIAAFFLTTDLEKYCLNW

SEQ ID NO: 17377 - protein, 85 aa, unidentified
  REGION 1..85: note = Description of Unknown:cds_NC_025350.1_cds_YP_009094080.1_7 target sequence
RYQSIAMFANSMNQLYGYPHLFEWIHPRLMRSTLYVGDPYNPPRNIHSTDLDEMKNEGIFIVSPRGGIEGLCQKLWTMISISIII

SEQ ID NO: 17378 - protein, 85 aa, unidentified
  REGION 1..85: note = Description of Unknown:cds_NC_025350.1_cds_YP_009094080.1_7 target sequence
LSAAESGTRVMSMVQGDNQTIAITTKVPRSIPHKDKKRIAYENSKAFIERLRVNNHHMGHHLKSQETILSSNFFVYSKRIFINGR

SEQ ID NO: 17379 - protein, 85 aa, unidentified
  REGION 1..85: note = Description of Unknown:cds_NC_025350.1_cds_YP_009094080.1_7 target sequence
ILNQSLKNMSKANLISDVLGECTQSSCSNLTTTIMRLTENGVEKDICYWLSFYLSIKQLTFDLLFPLTSQFEDPVTAAYLNHPHL

SEQ ID NO: 17380 - protein, 85 aa, unidentified
  REGION 1..85: note = Description of Unknown:cds_NC_025350.1_cds_YP_009094080.1_7 target sequence
IGRICAIPSQLGGLNYYAMSRLFCRNIGDPLTSATSDLKRLITHKVIPEWYLSNLINRHPGEGGWNTLASDPYALNIDYIYPPTS

SEQ ID NO: 17381 - protein, 85 aa, unidentified
  REGION 1..85: note = Description of Unknown:cds_NC_025350.1_cds_YP_009094080.1_7 target sequence
FLKRHTQKVLMENSINPMLSGVFSENSSDEEAALARFLLDRPLVMPRVAHIVIEQTSCGRRRQIQGYLDTTRTMMKHALNKQPPG

SEQ ID NO: 17382 - protein, 85 aa, unidentified
  REGION 1..85: note = Description of Unknown:cds_NC_025350.1_cds_YP_009094080.1_7 target sequence
YQKVERIIEYNRLYLNYNLEIIKKPIKKKTKIIIKASMLDLCSIDISKLLRRLSWSPLLGGRPLEGLETPDPIELIFGSLVDGCN

SEQ ID NO: 17383 - protein, 85 aa, unidentified
  REGION 1..85: note = Description of Unknown:cds_NC_025350.1_cds_YP_009094080.1_7 target sequence
ICHYCLAGDKKFTWFFIPSGILLDSPPEDNPPMRVPYVGSRTDERRVASIGYVKGASVSLKSALRCAGIYIWAFGDTETNWEDAL

SEQ ID NO: 17384 - protein, 85 aa, unidentified
  REGION 1..85: note = Description of Unknown:cds_NC_025350.1_cds_YP_009094080.1_7 target sequence
ELANTRVNINMDQLRTLTPMPTSANLTHRLDDGLSQMKFTPASSYAFSCYVHISNDNQNLEQLDKLLDSNLIYQQVMILGLGLIE

SEQ ID NO: 17385 - protein, 85 aa, unidentified
  REGION 1..85: note = Description of Unknown:cds_NC_025350.1_cds_YP_009094080.1_7 target sequence
TWLAAPNTENEEDISVHLHTGSSCCIRPVDMCVLNETEAEVPHLLVPRANKFVFDDNPLDNEQIEIIDNVMIQSRLSGVDCLTIQ

SEQ ID NO: 17386 - protein, 85 aa, unidentified
  REGION 1..85: note = Description of Unknown:cds_NC_025350.1_cds_YP_009094080.1_7 target sequence
EKIPLLAHLIALQFAHSLIGLDESTSLVNDAVVDADYAANWISECLNTYLDRVFYYTAWNILLDLSYQMYYMRITSVNSVLDYLG

SEQ ID NO: 17387 - protein, 85 aa, unidentified
  REGION 1..85: note = Description of Unknown:cds_NC_025350.1_cds_YP_009094080.1_7 target sequence
IVLARIPGLALSGIASTINHPKILRRMINLGILVPSNSPYLATLNYHKLTTDAIMWGAHQVLADLQSGRDIEIIIPSEDSTELSD

SEQ ID NO: 17388 - protein, 85 aa, unidentified
  REGION 1..85: note = Description of Unknown:cds_NC_025350.1_cds_YP_009094080.1_7 target sequence
RTLNLIARKLTLMALVVAPDSALPYVRGLPPDQKCKVLTDYLVQLVLTMTSDPEIINSWRSVIQMPKLSAFPHNLFYLTRKMLNA

SEQ ID NO: 17389 - protein, 85 aa, unidentified
  REGION 1..85: note = Description of Unknown:cds_NC_025350.1_cds_YP_009094080.1_7 target sequence
VRDSSEGQALLEQFYGSFGFLESDLNVQLMDLASGSQGDSKSLTVFDVVQELFNSAHNVERLCFPTGDIQLDLEPIGHVTPPTHH

SEQ ID NO: 17390 - protein, 85 aa, unidentified
  REGION 1..85: note = Description of Unknown:cds_NC_025350.1_cds_YP_009094080.1_7 target sequence
VLRPIGLSSTSWYKGITLINYLKGLKLPIGDHLYLAEGSGAIMTIIEAYFPGEHIFYNSFFTSGQCPPQRNFQPMPTQFTESIVY

SEQ ID NO: 17391 - protein, 85 aa, unidentified
  REGION 1..85: note = Description of Unknown:cds_NC_025350.1_cds_YP_009094080.1_7 target sequence
QHLQNDIPCDMGFVQDFIPLWSGNSKQTDLSRKECVNFILDRIPSSTVSILSCDLEEGFISNPNELSSALLHVLLLSFILVKESG

SEQ ID NO: 17392 - protein, 85 aa, unidentified
  REGION 1..85: note = Description of Unknown:cds_NC_025350.1_cds_YP_009094080.1_7 target sequence
VTILKTDLMPFSKLSKLVTILSHRYTKIDAVRSAYSDPSHHEIFLVCIAGPGMGIGEFNMALHKANTDAQQGFSIINPLRHHELL

SEQ ID NO: 17393 - protein, 85 aa, unidentified
  REGION 1..85: note = Description of Unknown:cds_NC_025350.1_cds_YP_009094080.1_7 target sequence
HMTADSSNNVMDIIDMQIKLAQASENEDDHILLSRLGCRSQTDKLLSIKASKSMDEFLHRVASLITVYLKESINIIESYNEDRTR

SEQ ID NO: 17394 - protein, 85 aa, unidentified
  REGION 1..85: note = Description of Unknown:cds_NC_025350.1_cds_YP_009094080.1_7 target sequence
LIFMAYNVSAYGKIKTSAKICAKTILDITIRNWTLLGFPLRKLVAASLRLGEFSAGLVINAKDFLQRSNARKYIKTSVGLEQLDI

SEQ ID NO: 17395 - protein, 84 aa, unidentified
  REGION 1..84: note = Description of Unknown:cds_NC_025350.1_cds_YP_009094080.1_7 target sequence
KDFLQRSNARKYIKTSVGLEQLDIELSQNLRLLLSRAEQKTVWKQIGAINLVSSLENDSDTLWGDAYLEDEPEQPEFDIAGEEI

SEQ ID NO: 17396 - protein, 85 aa, unidentified
  REGION 1..85: note = Description of Unknown:cds_NC_025350.1_cds_YP_009094080.1_7 target sequence
LGELPIFDSYYEHDFFPEVDWPRVRREENKLFSRLNEVRDRLLSKTLSATTRKLHHSLLPTPIPWPRCMPELHSVTIKHSLQRFT

SEQ ID NO: 17397 - protein, 85 aa, unidentified
  REGION 1..85: note = Description of Unknown:cds_NC_025350.1_cds_YP_009094080.1_7 target sequence
DAELTITHAAESISQGLSSVINELADKLTGKSDLFSRNIQSCMDHSSHTRPNGLIDIAQIAQSTDWKDNFNQWFLIRHLMRQLIM

SEQ ID NO: 17398 - protein, 85 aa, unidentified
  REGION 1..85: note = Description of Unknown:cds_NC_025350.1_cds_YP_009094080.1_7 target sequence
DNNTGKISIPPIEIDDRQMSVIITPELVTIWIGKTNHVFYFTFEMTLMVCDMYEGRMNAIMLTTMSCYLSPLRNRLQRLYYLVDS

SEQ ID NO: 17399 - protein, 85 aa, unidentified
  REGION 1..85: note = Description of Unknown:cds_NC_025350.1_cds_YP_009094080.1_7 target sequence
LCEIIGNNVYSIVASMESLVYGKIQLADPVPDVAGEFYSFIITEMLSALIETKMFTIQEATTVVERISECYDNLSPDLIAELLCL

SEQ ID NO: 17400 - protein, 85 aa, unidentified
  REGION 1..85: note = Description of Unknown:cds_NC_025350.1_cds_YP_009094080.1_7 target sequence
MRMWGHPSLSAEKAADKVRKSMCAAKVIDLETNLKTLAFFHGILINGYRRKHNGIWPKCTLPPNASLSLAELKHDNSELPHHYIL

SEQ ID NO: 17401 - protein, 85 aa, unidentified
  REGION 1..85: note = Description of Unknown:cds_NC_025350.1_cds_YP_009094080.1_7 target sequence
QHWKEVAFIQFEKSFDADPGEELSIFMKDKAISAPKKDWMSVFRRSLIKPICEKLGAPLPNAFNRRLLLNFLSDSNFDPDKELEY

SEQ ID NO: 17402 - protein, 85 aa, unidentified
  REGION 1..85: note = Description of Unknown:cds_NC_025350.1_cds_YP_009094080.1_7 target sequence
VTTGRYLDDDSFCASYSLKEKEIKETGRIFAKLTKNMRSCQVMSESLLANHAGKLFKENGVVLDNLNLTKSLLTMSQIGLISKQS

SEQ ID NO: 17403 - protein, 85 aa, unidentified
  REGION 1..85: note = Description of Unknown:cds_NC_025350.1_cds_YP_009094080.1_7 target sequence
RRNVRENVTVMTKVHKRSNLANTKIQSSHGPSSPTTDEQLEIAAFFLTTDLEKYCLNWRYQSIAMFANSMNQLYGYPHLFEWIHP

SEQ ID NO: 17404 - protein, 85 aa, unidentified
  REGION 1..85: note = Description of Unknown:cds_NC_025350.1_cds_YP_009094080.1_7 target sequence
RLMRSTLYVGDPYNPPRNIHSTDLDEMKNEGIFIVSPRGGIEGLCQKLWTMISISIIILSAAESGTRVMSMVQGDNQTIAITTKV

SEQ ID NO: 17405 - protein, 85 aa, unidentified
  REGION 1..85: note = Description of Unknown:cds_NC_025350.1_cds_YP_009094080.1_7 target sequence
PRSIPHKDKKRIAYENSKAFIERLRVNNHHMGHHLKSQETILSSNFFVYSKRIFINGRILNQSLKNMSKANLISDVLGECTQSSC

SEQ ID NO: 17406 - protein, 85 aa, unidentified
  REGION 1..85: note = Description of Unknown:cds_NC_025350.1_cds_YP_009094080.1_7 target sequence
SNLTTTIMRLTENGVEKDICYWLSFYLSIKQLTFDLLFPLTSQFEDPVTAAYLNHPHLIGRICAIPSQLGGLNYYAMSRLFCRNI

SEQ ID NO: 17407 - protein, 85 aa, unidentified
  REGION 1..85: note = Description of Unknown:cds_NC_025350.1_cds_YP_009094080.1_7 target sequence
GDPLTSATSDLKRLITHKVIPEWYLSNLINRHPGEGGWNTLASDPYALNIDYIYPPTSFLKRHTQKVLMENSINPMLSGVFSENS

SEQ ID NO: 17408 - protein, 85 aa, unidentified
  REGION 1..85: note = Description of Unknown:cds_NC_025350.1_cds_YP_009094080.1_7 target sequence
SDEEAALARFLLDRPLVMPRVAHIVIEQTSCGRRRQIQGYLDTTRTMMKHALNKQPPGYQKVERIIEYNRLYLNYNLEIIKKPIK

SEQ ID NO: 17409 - protein, 85 aa, unidentified
  REGION 1..85: note = Description of Unknown:cds_NC_025350.1_cds_YP_009094080.1_7 target sequence
KKTKIIIKASMLDLCSIDISKLLRRLSWSPLLGGRPLEGLETPDPIELIFGSLVDGCNICHYCLAGDKKFTWFFIPSGILLDSPP

SEQ ID NO: 17410 - protein, 85 aa, unidentified
  REGION 1..85: note = Description of Unknown:cds_NC_025350.1_cds_YP_009094080.1_7 target sequence
EDNPPMRVPYVGSRTDERRVASIGYVKGASVSLKSALRCAGIYIWAFGDTETNWEDALELANTRVNINMDQLRTLTPMPTSANLT

SEQ ID NO: 17411 - protein, 85 aa, unidentified
  REGION 1..85: note = Description of Unknown:cds_NC_025350.1_cds_YP_009094080.1_7 target sequence
HRLDDGLSQMKFTPASSYAFSCYVHISNDNQNLEQLDKLLDSNLIYQQVMILGLGLIETWLAAPNTENEEDISVHLHTGSSCCIR

SEQ ID NO: 17412 - protein, 85 aa, unidentified
  REGION 1..85: note = Description of Unknown:cds_NC_025350.1_cds_YP_009094080.1_7 target sequence
PVDMCVLNETEAEVPHLLVPRANKFVFDDNPLDNEQIEIIDNVMIQSRLSGVDCLTIQEKIPLLAHLIALQFAHSLIGLDESTSL

SEQ ID NO: 17413 - protein, 85 aa, unidentified
  REGION 1..85: note = Description of Unknown:cds_NC_025350.1_cds_YP_009094080.1_7 target sequence
VNDAVVDADYAANWISECLNTYLDRVFYYTAWNILLDLSYQMYYMRITSVNSVLDYLGIVLARIPGLALSGIASTINHPKILRRM

SEQ ID NO: 17414 - protein, 85 aa, unidentified
  REGION 1..85: note = Description of Unknown:cds_NC_025350.1_cds_YP_009094080.1_7 target sequence
INLGILVPSNSPYLATLNYHKLTTDAIMWGAHQVLADLQSGRDIEIIIPSEDSTELSDRTLNLIARKLTLMALVVAPDSALPYVR

SEQ ID NO: 17415 - protein, 85 aa, unidentified
  REGION 1..85: note = Description of Unknown:cds_NC_025350.1_cds_YP_009094080.1_7 target sequence
GLPPDQKCKVLTDYLVQLVLTMTSDPEIINSWRSVIQMPKLSAFPHNLFYLTRKMLNAVRDSSEGQALLEQFYGSFGFLESDLNV

SEQ ID NO: 17416 - protein, 85 aa, unidentified
  REGION 1..85: note = Description of Unknown:cds_NC_025350.1_cds_YP_009094080.1_7 target sequence
QLMDLASGSQGDSKSLTVFDVVQELFNSAHNVERLCFPTGDIQLDLEPIGHVTPPTHHVLRPIGLSSTSWYKGITLINYLKGLKL

SEQ ID NO: 17417 - protein, 85 aa, unidentified
  REGION 1..85: note = Description of Unknown:cds_NC_025350.1_cds_YP_009094080.1_7 target sequence
PIGDHLYLAEGSGAIMTIIEAYFPGEHIFYNSFFTSGQCPPQRNFQPMPTQFTESIVYQHLQNDIPCDMGFVQDFIPLWSGNSKQ

SEQ ID NO: 17418 - protein, 85 aa, unidentified
  REGION 1..85: note = Description of Unknown:cds_NC_025350.1_cds_YP_009094080.1_7 target sequence
TDLSRKECVNFILDRIPSSTVSILSCDLEEGFISNPNELSSALLHVLLLSFILVKESGVTILKTDLMPFSKLSKLVTILSHRYTK

SEQ ID NO: 17419 - protein, 85 aa, unidentified
  REGION 1..85: note = Description of Unknown:cds_NC_025350.1_cds_YP_009094080.1_7 target sequence
IDAVRSAYSDPSHHEIFLVCIAGPGMGIGEFNMALHKANTDAQQGFSIINPLRHHELLHMTADSSNNVMDIIDMQIKLAQASENE

SEQ ID NO: 17420 - protein, 85 aa, unidentified
  REGION 1..85: note = Description of Unknown:cds_NC_025350.1_cds_YP_009094080.1_7 target sequence
DDHILLSRLGCRSQTDKLLSIKASKSMDEFLHRVASLITVYLKESINIIESYNEDRTRLIFMAYNVSAYGKIKTSAKICAKTILD

SEQ ID NO: 17421 - protein, 85 aa, unidentified
  REGION 1..85: note = Description of Unknown:cds_NC_025350.1_cds_YP_009094080.1_7 target sequence
ITIRNWTLLGFPLRKLVAASLRLGEFSAGLVINAKDFLQRSNARKYIKTSVGLEQLDIELSQNLRLLLSRAEQKTVWKQIGAINL

SEQ ID NO: 17422 - protein, 85 aa, unidentified
  REGION 1..85: note = Description of Unknown:cds_NC_025348.1_cds_YP_009094067.1_7 target sequence
AAPQQIILPEVHLDSPIVQNKLLYFVRLGGLPLPDLFFEDDFFPDVDWDRVRREENRLSSRLETIRSRILAKTQTGSGLNPINKT

SEQ ID NO: 17423 - protein, 85 aa, unidentified
  REGION 1..85: note = Description of Unknown:cds_NC_025348.1_cds_YP_009094067.1_7 target sequence
APLILLWPSCLTRLHQFTFPEALSRFHDANKIMQAACNYLSAGLTTVLTSVSEKLTNKTNLFTHNESQCLHVRSHDRPQDLKQIC

SEQ ID NO: 17424 - protein, 85 aa, unidentified
  REGION 1..85: note = Description of Unknown:cds_NC_025348.1_cds_YP_009094067.1_7 target sequence
EQMTNAQWKSQFDLWFLVRHQMRTLINKNNNQSTDKLVIEMDRRVQSIIITPELVALWDREDNFLTYLTFEMVLMVCDLYEGRLN

SEQ ID NO: 17425 - protein, 85 aa, unidentified
  REGION 1..85: note = Description of Unknown:cds_NC_025348.1_cds_YP_009094067.1_7 target sequence
ILGVAKMSCYLSPLTSRLNKLFEIVDELCTLLGNQVYAIVASLESLVYARLQLLDPVEEVCGDFYSFICKELIDGLTANDVISIP

SEQ ID NO: 17426 - protein, 85 aa, unidentified
  REGION 1..85: note = Description of Unknown:cds_NC_025348.1_cds_YP_009094067.1_7 target sequence
EAELIADKLLDCYNNLTPDLIAELLCVMRMWGHPMLTSEKAAAKVRESMCAPKVIDFETTLKTLAFFNEIIINGYRRKHNGIWPK

SEQ ID NO: 17427 - protein, 85 aa, unidentified
  REGION 1..85: note = Description of Unknown:cds_NC_025348.1_cds_YP_009094067.1_7 target sequence
CKLPPYASLSLQELKHDNSEISHQYTLTHWKEIAFIEFEKSFDADPGSDLSIFMKDKAISAPKKDWLSVFRKSLIKPLCERLHQP

SEQ ID NO: 17428 - protein, 85 aa, unidentified
  REGION 1..85: note = Description of Unknown:cds_NC_025348.1_cds_YP_009094067.1_7 target sequence
MPSSYNRRLLLNFLDDDQFDPVKELEYVTSGAYLDDEDFCASYSLKEKEIKETGRIFAKLTKKMRSCQVICESLLANHAGKLFKE

SEQ ID NO: 17429 - protein, 85 aa, unidentified
  REGION 1..85: note = Description of Unknown:cds_NC_025348.1_cds_YP_009094067.1_7 target sequence
NGVVVDHLNLTKSLLTMSQIGLISTKSRRAARENITVVSHLKSRNNNPTQSIQKQADQPTIDETTEIAAFFLTTDLKKYCLNWRY

SEQ ID NO: 17430 - protein, 85 aa, unidentified
  REGION 1..85: note = Description of Unknown:cds_NC_025348.1_cds_YP_009094067.1_7 target sequence
QSIILFATSLNKLYGYPHLFEWIHLRLMRSTLYVGDPFNPPRFLNTLDLDEVQNDGIFIVSPRGGIEGLCQKMWTMISIAVITLS

SEQ ID NO: 17431 - protein, 85 aa, unidentified
  REGION 1..85: note = Description of Unknown:cds_NC_025348.1_cds_YP_009094067.1_7 target sequence
ATESSTRVMSMVQGDNQAIAMTTKVPRSLNHRQKKEIAYNNSKLFVERLRYNNRGLGHHLKEQETIMSSDFFVYSKRIVFRGRIL

SEQ ID NO: 17432 - protein, 85 aa, unidentified
  REGION 1..85: note = Description of Unknown:cds_NC_025348.1_cds_YP_009094067.1_7 target sequence
NQALKNVSKLNLIADVLSECTQTSCSNLTTTIMRLTENGVEKDICYNLSFFFSIKQLVYDLLFPITTIFEDEVTALYLNHPILIS

SEQ ID NO: 17433 - protein, 85 aa, unidentified
  REGION 1..85: note = Description of Unknown:cds_NC_025348.1_cds_YP_009094067.1_7 target sequence
RLCLLPSQLGGLNFYSISRLFNRNIGDPLTSAIADLKRFLAADLLPKWTIANLLGRNPGKGTWSTLAADPYSLNIDYLYPPTTYL

SEQ ID NO: 17434 - protein, 85 aa, unidentified
  REGION 1..85: note = Description of Unknown:cds_NC_025348.1_cds_YP_009094067.1_7 target sequence
KKHTQRVLMEGSVNPMLQGIFTDNAIEEENAIAKFLLDRPIVMPRVAHIVLEQTSCGRRKQIQGFLDTTRTIIRHALAKQPPSYK

SEQ ID NO: 17435 - protein, 85 aa, unidentified
  REGION 1..85: note = Description of Unknown:cds_NC_025348.1_cds_YP_009094067.1_7 target sequence
KLEKIIDYNRLYLAYNLELISKPNDKKAERKAREDLVNVCSIDLAKLLRRMSWSQLLSGRPIDGLETPDPTELIQGYIINGNDNC

SEQ ID NO: 17436 - protein, 85 aa, unidentified
  REGION 1..85: note = Description of Unknown:cds_NC_025348.1_cds_YP_009094067.1_7 target sequence
LACLQGDRKFTWFYIPGNITLDAPPEDNPPIRVPYIGSRTDERRVASLGYVKGATQALKSALRLAGVYIWAFGDTDDNWNDALNL

SEQ ID NO: 17437 - protein, 85 aa, unidentified
  REGION 1..85: note = Description of Unknown:cds_NC_025348.1_cds_YP_009094067.1_7 target sequence
ASTRVNITLEQLRTLTPMPTSTNLTHRLDDGLTQMKFTPASSYAISSYVHISNDNQNLEIMDKQLDCNLIYQQIMLLGLGIIETW

SEQ ID NO: 17438 - protein, 85 aa, unidentified
  REGION 1..85: note = Description of Unknown:cds_NC_025348.1_cds_YP_009094067.1_7 target sequence
LQLPQYQNIDDFSVHLHTEGSCCIRAVDMCVINETSDEVPPMSVPYGNKFVYDDSPLDHDQQVKIENLSFQANITGLDIIPTEEK

SEQ ID NO: 17439 - protein, 85 aa, unidentified
  REGION 1..85: note = Description of Unknown:cds_NC_025348.1_cds_YP_009094067.1_7 target sequence
IPLLAHFVGLQFAHSLTGLDEATSLVNDAVIETDYANNWISECLNTYMDKVFYYTAWNMLLDLSYQMYYLRVTGITAILDYMTLI

SEQ ID NO: 17440 - protein, 85 aa, unidentified
  REGION 1..85: note = Description of Unknown:cds_NC_025348.1_cds_YP_009094067.1_7 target sequence
LDRIPGLALTGIASTISHPKILRRLINLGIVIPSNSPYLATLDYHKMSTLSIMWGVQSVLSDISSGLDIELIIPSEDSTELSDRV

SEQ ID NO: 17441 - protein, 85 aa, unidentified
  REGION 1..85: note = Description of Unknown:cds_NC_025348.1_cds_YP_009094067.1_7 target sequence
LNLVARKLSLISLVIGHGSALSYVRGLTPDVKCKTLTEKLIVIIETTITDPEQRGKLSTLVTEPKISAFPSNLYYLMRKLLNWIR

SEQ ID NO: 17442 - protein, 85 aa, unidentified
  REGION 1..85: note = Description of Unknown:cds_NC_025348.1_cds_YP_009094067.1_7 target sequence
DSDKAQQLIAMFYDSFGYMEFQTSDISPINHSIDTCTSNSLTIHDKVSNILDYDTVAEKYAYPKCDPSLQYHMKPVADPPVHHIL

SEQ ID NO: 17443 - protein, 85 aa, unidentified
  REGION 1..85: note = Description of Unknown:cds_NC_025348.1_cds_YP_009094067.1_7 target sequence
RPIGLSSTSWYKGLSILNVLSCSKVPTGNHLYLAEGSGALMTLIESYIPAQKIYYNSLFSSGQCPPQRNFQPMPTQFTESMVYMN

SEQ ID NO: 17444 - protein, 85 aa, unidentified
  REGION 1..85: note = Description of Unknown:cds_NC_025348.1_cds_YP_009094067.1_7 target sequence
IQNGYGNSDLIDQEFIALWSGVERQTDLSKKDCIEFILQQIPSQSLSLISSDIEEGIGSNLTQLSKATINSVLLSYVLLKDGGLL

SEQ ID NO: 17445 - protein, 85 aa, unidentified
  REGION 1..85: note = Description of Unknown:cds_NC_025348.1_cds_YP_009094067.1_7 target sequence
IMKINLTPFCKFSQLITLLSSKFKNIKAVRSSYSDPSTDELYLVATASGDSSVGDFNAARYNSDILDSESFTLVSPQLLLDLHHG

SEQ ID NO: 17446 - protein, 85 aa, unidentified
  REGION 1..85: note = Description of Unknown:cds_NC_025348.1_cds_YP_009094067.1_7 target sequence
ITENQKTVYDIIEMQISTGQCFENIEDHETLIKLGSSTQRNRLMTSPAAESRSELLERISDIITLYLKETINIIESSQLDRNRLL

SEQ ID NO: 17447 - protein, 85 aa, unidentified
  REGION 1..85: note = Description of Unknown:cds_NC_025348.1_cds_YP_009094067.1_7 target sequence
YNSYNVSSYGKIRTSAKLSAKLVLDIFIRNWINLGVPLRKRIAGMIEKGYFCVGETISCKDYLSFCKARKYLLKTIGIDQLAVEL

SEQ ID NO: 17448 - protein, 84 aa, unidentified
  REGION 1..84: note = Description of Unknown:cds_NC_025348.1_cds_YP_009094067.1_7 target sequence
SCKDYLSFCKARKYLLKTIGIDQLAVELEQNLSCEFQRSEQKKLWKNIGCIAFIESIEPGDFNSPEQIFQDDEIEERDIGGELL

SEQ ID NO: 17449 - protein, 85 aa, unidentified
  REGION 1..85: note = Description of Unknown:cds_NC_025348.1_cds_YP_009094067.1_7 target sequence
LGGLPLPDLFFEDDFFPDVDWDRVRREENRLSSRLETIRSRILAKTQTGSGLNPINKTAPLILLWPSCLTRLHQFTFPEALSRFH

SEQ ID NO: 17450 - protein, 85 aa, unidentified
  REGION 1..85: note = Description of Unknown:cds_NC_025348.1_cds_YP_009094067.1_7 target sequence
DANKIMQAACNYLSAGLTTVLTSVSEKLTNKTNLFTHNESQCLHVRSHDRPQDLKQICEQMTNAQWKSQFDLWFLVRHQMRTLIN

SEQ ID NO: 17451 - protein, 85 aa, unidentified
  REGION 1..85: note = Description of Unknown:cds_NC_025348.1_cds_YP_009094067.1_7 target sequence
KNNNQSTDKLVIEMDRRVQSIIITPELVALWDREDNFLTYLTFEMVLMVCDLYEGRLNILGVAKMSCYLSPLTSRLNKLFEIVDE

SEQ ID NO: 17452 - protein, 85 aa, unidentified
  REGION 1..85: note = Description of Unknown:cds_NC_025348.1_cds_YP_009094067.1_7 target sequence
LCTLLGNQVYAIVASLESLVYARLQLLDPVEEVCGDFYSFICKELIDGLTANDVISIPEAELIADKLLDCYNNLTPDLIAELLCV

SEQ ID NO: 17453 - protein, 85 aa, unidentified
  REGION 1..85: note = Description of Unknown:cds_NC_025348.1_cds_YP_009094067.1_7 target sequence
MRMWGHPMLTSEKAAAKVRESMCAPKVIDFETTLKTLAFFNEIIINGYRRKHNGIWPKCKLPPYASLSLQELKHDNSEISHQYTL

SEQ ID NO: 17454 - protein, 85 aa, unidentified
  REGION 1..85: note = Description of Unknown:cds_NC_025348.1_cds_YP_009094067.1_7 target sequence
THWKEIAFIEFEKSFDADPGSDLSIFMKDKAISAPKKDWLSVFRKSLIKPLCERLHQPMPSSYNRRLLLNFLDDDQFDPVKELEY

SEQ ID NO: 17455 - protein, 85 aa, unidentified
  REGION 1..85: note = Description of Unknown:cds_NC_025348.1_cds_YP_009094067.1_7 target sequence
VTSGAYLDDEDFCASYSLKEKEIKETGRIFAKLTKKMRSCQVICESLLANHAGKLFKENGVVVDHLNLTKSLLTMSQIGLISTKS

SEQ ID NO: 17456 - protein, 85 aa, unidentified
  REGION 1..85: note = Description of Unknown:cds_NC_025348.1_cds_YP_009094067.1_7 target sequence
RRAARENITVVSHLKSRNNNPTQSIQKQADQPTIDETTEIAAFFLTTDLKKYCLNWRYQSIILFATSLNKLYGYPHLFEWIHLRL

SEQ ID NO: 17457 - protein, 85 aa, unidentified
  REGION 1..85: note = Description of Unknown:cds_NC_025348.1_cds_YP_009094067.1_7 target sequence
MRSTLYVGDPFNPPRFLNTLDLDEVQNDGIFIVSPRGGIEGLCQKMWTMISIAVITLSATESSTRVMSMVQGDNQAIAMTTKVPR

SEQ ID NO: 17458 - protein, 85 aa, unidentified
  REGION 1..85: note = Description of Unknown:cds_NC_025348.1_cds_YP_009094067.1_7 target sequence
SLNHRQKKEIAYNNSKLFVERLRYNNRGLGHHLKEQETIMSSDFFVYSKRIVFRGRILNQALKNVSKLNLIADVLSECTQTSCSN

SEQ ID NO: 17459 - protein, 85 aa, unidentified
  REGION 1..85: note = Description of Unknown:cds_NC_025348.1_cds_YP_009094067.1_7 target sequence
LTTTIMRLTENGVEKDICYNLSFFFSIKQLVYDLLFPITTIFEDEVTALYLNHPILISRLCLLPSQLGGLNFYSISRLFNRNIGD

SEQ ID NO: 17460 - protein, 85 aa, unidentified
  REGION 1..85: note = Description of Unknown:cds_NC_025348.1_cds_YP_009094067.1_7 target sequence
PLTSAIADLKRFLAADLLPKWTIANLLGRNPGKGTWSTLAADPYSLNIDYLYPPTTYLKKHTQRVLMEGSVNPMLQGIFTDNAIE

SEQ ID NO: 17461 - protein, 85 aa, unidentified
  REGION 1..85: note = Description of Unknown:cds_NC_025348.1_cds_YP_009094067.1_7 target sequence
EENAIAKFLLDRPIVMPRVAHIVLEQTSCGRRKQIQGFLDTTRTIIRHALAKQPPSYKKLEKIIDYNRLYLAYNLELISKPNDKK

SEQ ID NO: 17462 - protein, 85 aa, unidentified
  REGION 1..85: note = Description of Unknown:cds_NC_025348.1_cds_YP_009094067.1_7 target sequence
AERKAREDLVNVCSIDLAKLLRRMSWSQLLSGRPIDGLETPDPTELIQGYIINGNDNCLACLQGDRKFTWFYIPGNITLDAPPED

SEQ ID NO: 17463 - protein, 85 aa, unidentified
  REGION 1..85: note = Description of Unknown:cds_NC_025348.1_cds_YP_009094067.1_7 target sequence
NPPIRVPYIGSRTDERRVASLGYVKGATQALKSALRLAGVYIWAFGDTDDNWNDALNLASTRVNITLEQLRTLTPMPTSTNLTHR

SEQ ID NO: 17464 - protein, 85 aa, unidentified
  REGION 1..85: note = Description of Unknown:cds_NC_025348.1_cds_YP_009094067.1_7 target sequence
LDDGLTQMKFTPASSYAISSYVHISNDNQNLEIMDKQLDCNLIYQQIMLLGLGIIETWLQLPQYQNIDDFSVHLHTEGSCCIRAV

SEQ ID NO: 17465 - protein, 85 aa, unidentified
  REGION 1..85: note = Description of Unknown:cds_NC_025348.1_cds_YP_009094067.1_7 target sequence
DMCVINETSDEVPPMSVPYGNKFVYDDSPLDHDQQVKIENLSFQANITGLDIIPTEEKIPLLAHFVGLQFAHSLTGLDEATSLVN

SEQ ID NO: 17466 - protein, 85 aa, unidentified
  REGION 1..85: note = Description of Unknown:cds_NC_025348.1_cds_YP_009094067.1_7 target sequence
DAVIETDYANNWISECLNTYMDKVFYYTAWNMLLDLSYQMYYLRVTGITAILDYMTLILDRIPGLALTGIASTISHPKILRRLIN

SEQ ID NO: 17467 - protein, 85 aa, unidentified
  REGION 1..85: note = Description of Unknown:cds_NC_025348.1_cds_YP_009094067.1_7 target sequence
LGIVIPSNSPYLATLDYHKMSTLSIMWGVQSVLSDISSGLDIELIIPSEDSTELSDRVLNLVARKLSLISLVIGHGSALSYVRGL

SEQ ID NO: 17468 - protein, 85 aa, unidentified
  REGION 1..85: note = Description of Unknown:cds_NC_025348.1_cds_YP_009094067.1_7 target sequence
TPDVKCKTLTEKLIVIIETTITDPEQRGKLSTLVTEPKISAFPSNLYYLMRKLLNWIRDSDKAQQLIAMFYDSFGYMEFQTSDIS

SEQ ID NO: 17469 - protein, 85 aa, unidentified
  REGION 1..85: note = Description of Unknown:cds_NC_025348.1_cds_YP_009094067.1_7 target sequence
PINHSIDTCTSNSLTIHDKVSNILDYDTVAEKYAYPKCDPSLQYHMKPVADPPVHHILRPIGLSSTSWYKGLSILNVLSCSKVPT

SEQ ID NO: 17470 - protein, 85 aa, unidentified
  REGION 1..85: note = Description of Unknown:cds_NC_025348.1_cds_YP_009094067.1_7 target sequence
GNHLYLAEGSGALMTLIESYIPAQKIYYNSLFSSGQCPPQRNFQPMPTQFTESMVYMNIQNGYGNSDLIDQEFIALWSGVERQTD

SEQ ID NO: 17471 - protein, 85 aa, unidentified
  REGION 1..85: note = Description of Unknown:cds_NC_025348.1_cds_YP_009094067.1_7 target sequence
LSKKDCIEFILQQIPSQSLSLISSDIEEGIGSNLTQLSKATINSVLLSYVLLKDGGLLIMKINLTPFCKFSQLITLLSSKFKNIK

SEQ ID NO: 17472 - protein, 85 aa, unidentified
  REGION 1..85: note = Description of Unknown:cds_NC_025348.1_cds_YP_009094067.1_7 target sequence
AVRSSYSDPSTDELYLVATASGDSSVGDFNAARYNSDILDSESFTLVSPQLLLDLHHGITENQKTVYDIIEMQISTGQCFENIED

SEQ ID NO: 17473 - protein, 85 aa, unidentified
  REGION 1..85: note = Description of Unknown:cds_NC_025348.1_cds_YP_009094067.1_7 target sequence
HETLIKLGSSTQRNRLMTSPAAESRSELLERISDIITLYLKETINIIESSQLDRNRLLYNSYNVSSYGKIRTSAKLSAKLVLDIF

SEQ ID NO: 17474 - protein, 85 aa, unidentified
  REGION 1..85: note = Description of Unknown:cds_NC_025348.1_cds_YP_009094067.1_7 target sequence
IRNWINLGVPLRKRIAGMIEKGYFCVGETISCKDYLSFCKARKYLLKTIGIDQLAVELEQNLSCEFQRSEQKKLWKNIGCIAFIE

SEQ ID NO: 17475 - protein, 85 aa, unidentified
  REGION 1..85: note = Description of Unknown:cds_NC_009489.1_cds_YP_001249278.1_9 target sequence
ASQPEIILPEVHLDSPIVKHKLLYLLRLGAFPTLQAFENDGPLAGQNWARIRNEESNLYSRLKTQKFELERRLGIVSTQINQRRH

SEQ ID NO: 17476 - protein, 85 aa, unidentified
  REGION 1..85: note = Description of Unknown:cds_NC_009489.1_cds_YP_001249278.1_9 target sequence
CVLLWPRIIPKLSHIKISEYLEKTKEWKHLIEASIQNASNQLITCTQQISSKLTGRKDLFVRSRVNDSGTLDQYPSPIQLAQAWH

SEQ ID NO: 17477 - protein, 85 aa, unidentified
  REGION 1..85: note = Description of Unknown:cds_NC_009489.1_cds_YP_001249278.1_9 target sequence
ANIWHRQVEAWLLIKHRMRQLISELRQMPAMCEITILDTRSCIILIGPELVVLYLREERVISYFTFEMVLMVSDVMEGRLNVTAL

SEQ ID NO: 17478 - protein, 85 aa, unidentified
  REGION 1..85: note = Description of Unknown:cds_NC_009489.1_cds_YP_001249278.1_9 target sequence
ASISHYLSPLLPRISKLLDLVDQLALIIGDYVFDVIVSLESFCYAQLQLLDPVDELKGDFYAFMCNEILETLESTNAFSQDESML

SEQ ID NO: 17479 - protein, 85 aa, unidentified
  REGION 1..85: note = Description of Unknown:cds_NC_009489.1_cds_YP_001249278.1_9 target sequence
LTMQLTSCYSKLTPDLTAELLCIMRLWGHPSLTATQAADKVRESMCAAKVIKLETVLKTRAFFHTILINGYRRRHNGIWPPHKLP

SEQ ID NO: 17480 - protein, 85 aa, unidentified
  REGION 1..85: note = Description of Unknown:cds_NC_009489.1_cds_YP_001249278.1_9 target sequence
ESAPLSLIELAHDNNEITYQYALKNWKAITYIQFYKCFDSDPGEDLSIFMKDKAISCPKDDWMSVFRRSLIKERFVAARKELPNQ

SEQ ID NO: 17481 - protein, 85 aa, unidentified
  REGION 1..85: note = Description of Unknown:cds_NC_009489.1_cds_YP_001249278.1_9 target sequence
VNRRLLLNFLDDPNFNPEEELKYVTTGEYLTDDQFCASYSLKEKEIKTTGRIFAKLTRRMRSCQVIAESMLANHAGKLMKENGVV

SEQ ID NO: 17482 - protein, 85 aa, unidentified
  REGION 1..85: note = Description of Unknown:cds_NC_009489.1_cds_YP_001249278.1_9 target sequence
HDQLKLTKSLLTMNQIGIISHSQRRFTKDNQTVLSPFKSKSKHPNDADPMSTTTNSHEIAACFLTTDLKKYCLQWRYQTIIPFAQ

SEQ ID NO: 17483 - protein, 85 aa, unidentified
  REGION 1..85: note = Description of Unknown:cds_NC_009489.1_cds_YP_001249278.1_9 target sequence
TLNAMYGYPHLFEWIHLRLMRSTLYVGDPFNPPDSDNPLDLDEVLNGDIFIVSPRGGIEGLCQKLWTMISISTIILSATEANTRV

SEQ ID NO: 17484 - protein, 85 aa, unidentified
  REGION 1..85: note = Description of Unknown:cds_NC_009489.1_cds_YP_001249278.1_9 target sequence
MSMVQGDNQVIAVTTKVPRSIPHKEKKAIALRACQGFFERLRENNYGIGHHLKAQETILSSDFFIYSKRVFFRGRILTQALKNAS

SEQ ID NO: 17485 - protein, 85 aa, unidentified
  REGION 1..85: note = Description of Unknown:cds_NC_009489.1_cds_YP_001249278.1_9 target sequence
KLCLTADILGDCTQSSCSNLATTVMRLAENGIEKDLCIYLNYYLTVRQLTFDLTFPQYANPNTSVNTLYTNHPTWISRLALLPSQ

SEQ ID NO: 17486 - protein, 85 aa, unidentified
  REGION 1..85: note = Description of Unknown:cds_NC_009489.1_cds_YP_001249278.1_9 target sequence
LGGLNYLSCSRLFNRNIGDPLVSAIADLKRLIISQCIEPWILGNLLGRRPGKGTWSTIAADPYALNIDYLYPPTTFLKRHTQSVL

SEQ ID NO: 17487 - protein, 85 aa, unidentified
  REGION 1..85: note = Description of Unknown:cds_NC_009489.1_cds_YP_001249278.1_9 target sequence
MEGSQNPLLAGIFSENAQSEENELAQFLLDREIVMPRVAHVVIAQTSCGRRKQIQGYLDSTRTIIRHALKIQPLSTKRVITIVEY

SEQ ID NO: 17488 - protein, 85 aa, unidentified
  REGION 1..85: note = Description of Unknown:cds_NC_009489.1_cds_YP_001249278.1_9 target sequence
NSLYLAYVLEIIETPREVPPYLLSLSVQDCSIDIARTLRKLSWASLLGGRPIEGLETPDPIELLDGHLLLGDSVCYSCEAGDEKY

SEQ ID NO: 17489 - protein, 85 aa, unidentified
  REGION 1..85: note = Description of Unknown:cds_NC_009489.1_cds_YP_001249278.1_9 target sequence
SWFYLPSGVYLDRDPAENPPIRVPYIGSRTDERRVASMTYIKGASSPLKAALRLAGVYIWAFGESDDSWAEAYQLASSRVDISLD

SEQ ID NO: 17490 - protein, 85 aa, unidentified
  REGION 1..85: note = Description of Unknown:cds_NC_009489.1_cds_YP_001249278.1_9 target sequence
DLQTLTPLPTSANITHRLDDGTTQLKFTPASSYAFSSFVHISNDSQQLEIDERVTDSNLIYQQVMITGLGIIEAWNNPPINCNLT

SEQ ID NO: 17491 - protein, 85 aa, unidentified
  REGION 1..85: note = Description of Unknown:cds_NC_009489.1_cds_YP_001249278.1_9 target sequence
ELTLHLHTGSSCCIRPVDSCFLNPPWVAVPELNVPVENSFVFDSHPIDIHESLRLSDLKYASKINSIDYMPLNLQIPLLAHLTGR

SEQ ID NO: 17492 - protein, 85 aa, unidentified
  REGION 1..85: note = Description of Unknown:cds_NC_009489.1_cds_YP_001249278.1_9 target sequence
AMVNSIIGLDESTSIMNDAIIESDYTSNWISECLHTYIDQVFVFAAWNLLLELSYQMYYLRVRGWDNILDYVYVTLRRIPGMALS

SEQ ID NO: 17493 - protein, 85 aa, unidentified
  REGION 1..85: note = Description of Unknown:cds_NC_009489.1_cds_YP_001249278.1_9 target sequence
GMCATISHPRILRRLIDMQIVVPGNSPYLATLDFTKLCVDALIWGCKQALTNIKEGFDLEIVVPSEISFILSDRILNLVARKLSL

SEQ ID NO: 17494 - protein, 85 aa, unidentified
  REGION 1..85: note = Description of Unknown:cds_NC_009489.1_cds_YP_001249278.1_9 target sequence
LAVTLSESTMPPRVKGMSPEDKCAAITKYLHEFALPLLVEDDRRLRLEKIIDEPQITAYPNNLYYLARKILNNIRSSDEGQFLLE

SEQ ID NO: 17495 - protein, 85 aa, unidentified
  REGION 1..85: note = Description of Unknown:cds_NC_009489.1_cds_YP_001249278.1_9 target sequence
MYYEPFSSQLEIPRSATPETDNPDLRSTLTVNDFYISIVDSATQLEKHDAIDWIDDPSSGKSKFSRPPSHHVLRPLGLSSTSWYK

SEQ ID NO: 17496 - protein, 85 aa, unidentified
  REGION 1..85: note = Description of Unknown:cds_NC_009489.1_cds_YP_001249278.1_9 target sequence
SISIVEYLSRLSLSLGSHLYLAEGSGASMAYIEYYIPAPTIFYNSFFSSSDNPPQRNFEPLPTQFVESVVYKQILAEVITPLGFP

SEQ ID NO: 17497 - protein, 85 aa, unidentified
  REGION 1..85: note = Description of Unknown:cds_NC_009489.1_cds_YP_001249278.1_9 target sequence
QEFRVLWDGHTDHTDLTKSACAQFIISKVGPETCSLVHADWEDNNQAETTRLSNALIHITLISSIVLKPGGYLVLKTRWLPFQPF

SEQ ID NO: 17498 - protein, 85 aa, unidentified
  REGION 1..85: note = Description of Unknown:cds_NC_009489.1_cds_YP_001249278.1_9 target sequence
SHLVALLWSYFSDIVALRSAYSDPNSTEVILCCKLGVDCKSVSFNHALSASGSLTSQKFTIIPPECVKEFFSQLYTQSSRVQDAI

SEQ ID NO: 17499 - protein, 85 aa, unidentified
  REGION 1..85: note = Description of Unknown:cds_NC_009489.1_cds_YP_001249278.1_9 target sequence
DRAIVQCTLAHTHSDTMHLINVGGVPPNSKWNDSSVYQSFSDLIMSIIKIITIHLKEIIEILKTDSSDHESLLLTAYNVGILGRI

SEQ ID NO: 17500 - protein, 85 aa, unidentified
  REGION 1..85: note = Description of Unknown:cds_NC_009489.1_cds_YP_001249278.1_9 target sequence
NTVIQLMTERILVKVVSSWGLFSDHTRSQLRRDLEMGCFSVSTILSSEEFLRKTDNRKYLSKELTTSLIHDVINNRASIQFSRSQ

SEQ ID NO: 17501 - protein, 84 aa, unidentified
  REGION 1..84: note = Description of Unknown:cds_NC_009489.1_cds_YP_001249278.1_9 target sequence
ILSSEEFLRKTDNRKYLSKELTTSLIHDVINNRASIQFSRSQQKQIWKAIGCSALVDQPQEFIDQNAVDRYSEDEERDIHGDEI

SEQ ID NO: 17502 - protein, 85 aa, unidentified
  REGION 1..85: note = Description of Unknown:cds_NC_009489.1_cds_YP_001249278.1_9 target sequence
LGAFPTLQAFENDGPLAGQNWARIRNEESNLYSRLKTQKFELERRLGIVSTQINQRRHCVLLWPRIIPKLSHIKISEYLEKTKEW

SEQ ID NO: 17503 - protein, 85 aa, unidentified
  REGION 1..85: note = Description of Unknown:cds_NC_009489.1_cds_YP_001249278.1_9 target sequence
KHLIEASIQNASNQLITCTQQISSKLTGRKDLFVRSRVNDSGTLDQYPSPIQLAQAWHANIWHRQVEAWLLIKHRMRQLISELRQ

SEQ ID NO: 17504 - protein, 85 aa, unidentified
  REGION 1..85: note = Description of Unknown:cds_NC_009489.1_cds_YP_001249278.1_9 target sequence
MPAMCEITILDTRSCIILIGPELVVLYLREERVISYFTFEMVLMVSDVMEGRLNVTALASISHYLSPLLPRISKLLDLVDQLALI

SEQ ID NO: 17505 - protein, 85 aa, unidentified
  REGION 1..85: note = Description of Unknown:cds_NC_009489.1_cds_YP_001249278.1_9 target sequence
IGDYVFDVIVSLESFCYAQLQLLDPVDELKGDFYAFMCNEILETLESTNAFSQDESMLLTMQLTSCYSKLTPDLTAELLCIMRLW

SEQ ID NO: 17506 - protein, 85 aa, unidentified
  REGION 1..85: note = Description of Unknown:cds_NC_009489.1_cds_YP_001249278.1_9 target sequence
GHPSLTATQAADKVRESMCAAKVIKLETVLKTRAFFHTILINGYRRRHNGIWPPHKLPESAPLSLIELAHDNNEITYQYALKNWK

SEQ ID NO: 17507 - protein, 85 aa, unidentified
  REGION 1..85: note = Description of Unknown:cds_NC_009489.1_cds_YP_001249278.1_9 target sequence
AITYIQFYKCFDSDPGEDLSIFMKDKAISCPKDDWMSVFRRSLIKERFVAARKELPNQVNRRLLLNFLDDPNFNPEEELKYVTTG

SEQ ID NO: 17508 - protein, 85 aa, unidentified
  REGION 1..85: note = Description of Unknown:cds_NC_009489.1_cds_YP_001249278.1_9 target sequence
EYLTDDQFCASYSLKEKEIKTTGRIFAKLTRRMRSCQVIAESMLANHAGKLMKENGVVHDQLKLTKSLLTMNQIGIISHSQRRFT

SEQ ID NO: 17509 - protein, 85 aa, unidentified
  REGION 1..85: note = Description of Unknown:cds_NC_009489.1_cds_YP_001249278.1_9 target sequence
KDNQTVLSPFKSKSKHPNDADPMSTTTNSHEIAACFLTTDLKKYCLQWRYQTIIPFAQTLNAMYGYPHLFEWIHLRLMRSTLYVG

SEQ ID NO: 17510 - protein, 85 aa, unidentified
  REGION 1..85: note = Description of Unknown:cds_NC_009489.1_cds_YP_001249278.1_9 target sequence
DPFNPPDSDNPLDLDEVLNGDIFIVSPRGGIEGLCQKLWTMISISTIILSATEANTRVMSMVQGDNQVIAVTTKVPRSIPHKEKK

SEQ ID NO: 17511 - protein, 85 aa, unidentified
  REGION 1..85: note = Description of Unknown:cds_NC_009489.1_cds_YP_001249278.1_9 target sequence
AIALRACQGFFERLRENNYGIGHHLKAQETILSSDFFIYSKRVFFRGRILTQALKNASKLCLTADILGDCTQSSCSNLATTVMRL

SEQ ID NO: 17512 - protein, 85 aa, unidentified
  REGION 1..85: note = Description of Unknown:cds_NC_009489.1_cds_YP_001249278.1_9 target sequence
AENGIEKDLCIYLNYYLTVRQLTFDLTFPQYANPNTSVNTLYTNHPTWISRLALLPSQLGGLNYLSCSRLFNRNIGDPLVSAIAD

SEQ ID NO: 17513 - protein, 85 aa, unidentified
  REGION 1..85: note = Description of Unknown:cds_NC_009489.1_cds_YP_001249278.1_9 target sequence
LKRLIISQCIEPWILGNLLGRRPGKGTWSTIAADPYALNIDYLYPPTTFLKRHTQSVLMEGSQNPLLAGIFSENAQSEENELAQF

SEQ ID NO: 17514 - protein, 85 aa, unidentified
  REGION 1..85: note = Description of Unknown:cds_NC_009489.1_cds_YP_001249278.1_9 target sequence
LLDREIVMPRVAHVVIAQTSCGRRKQIQGYLDSTRTIIRHALKIQPLSTKRVITIVEYNSLYLAYVLEIIETPREVPPYLLSLSV

SEQ ID NO: 17515 - protein, 85 aa, unidentified
  REGION 1..85: note = Description of Unknown:cds_NC_009489.1_cds_YP_001249278.1_9 target sequence
QDCSIDIARTLRKLSWASLLGGRPIEGLETPDPIELLDGHLLLGDSVCYSCEAGDEKYSWFYLPSGVYLDRDPAENPPIRVPYIG

SEQ ID NO: 17516 - protein, 85 aa, unidentified
  REGION 1..85: note = Description of Unknown:cds_NC_009489.1_cds_YP_001249278.1_9 target sequence
SRTDERRVASMTYIKGASSPLKAALRLAGVYIWAFGESDDSWAEAYQLASSRVDISLDDLQTLTPLPTSANITHRLDDGTTQLKF

SEQ ID NO: 17517 - protein, 85 aa, unidentified
  REGION 1..85: note = Description of Unknown:cds_NC_009489.1_cds_YP_001249278.1_9 target sequence
TPASSYAFSSFVHISNDSQQLEIDERVTDSNLIYQQVMITGLGIIEAWNNPPINCNLTELTLHLHTGSSCCIRPVDSCFLNPPWV

SEQ ID NO: 17518 - protein, 85 aa, unidentified
  REGION 1..85: note = Description of Unknown:cds_NC_009489.1_cds_YP_001249278.1_9 target sequence
AVPELNVPVENSFVFDSHPIDIHESLRLSDLKYASKINSIDYMPLNLQIPLLAHLTGRAMVNSIIGLDESTSIMNDAIIESDYTS

SEQ ID NO: 17519 - protein, 85 aa, unidentified
  REGION 1..85: note = Description of Unknown:cds_NC_009489.1_cds_YP_001249278.1_9 target sequence
NWISECLHTYIDQVFVFAAWNLLLELSYQMYYLRVRGWDNILDYVYVTLRRIPGMALSGMCATISHPRILRRLIDMQIVVPGNSP

SEQ ID NO: 17520 - protein, 85 aa, unidentified
  REGION 1..85: note = Description of Unknown:cds_NC_009489.1_cds_YP_001249278.1_9 target sequence
YLATLDFTKLCVDALIWGCKQALTNIKEGFDLEIVVPSEISFILSDRILNLVARKLSLLAVTLSESTMPPRVKGMSPEDKCAAIT

SEQ ID NO: 17521 - protein, 85 aa, unidentified
  REGION 1..85: note = Description of Unknown:cds_NC_009489.1_cds_YP_001249278.1_9 target sequence
KYLHEFALPLLVEDDRRLRLEKIIDEPQITAYPNNLYYLARKILNNIRSSDEGQFLLEMYYEPFSSQLEIPRSATPETDNPDLRS

SEQ ID NO: 17522 - protein, 85 aa, unidentified
  REGION 1..85: note = Description of Unknown:cds_NC_009489.1_cds_YP_001249278.1_9 target sequence
TLTVNDFYISIVDSATQLEKHDAIDWIDDPSSGKSKFSRPPSHHVLRPLGLSSTSWYKSISIVEYLSRLSLSLGSHLYLAEGSGA

SEQ ID NO: 17523 - protein, 85 aa, unidentified
  REGION 1..85: note = Description of Unknown:cds_NC_009489.1_cds_YP_001249278.1_9 target sequence
SMAYIEYYIPAPTIFYNSFFSSSDNPPQRNFEPLPTQFVESVVYKQILAEVITPLGFPQEFRVLWDGHTDHTDLTKSACAQFIIS

SEQ ID NO: 17524 - protein, 85 aa, unidentified
  REGION 1..85: note = Description of Unknown:cds_NC_009489.1_cds_YP_001249278.1_9 target sequence
KVGPETCSLVHADWEDNNQAETTRLSNALIHITLISSIVLKPGGYLVLKTRWLPFQPFSHLVALLWSYFSDIVALRSAYSDPNST

SEQ ID NO: 17525 - protein, 85 aa, unidentified
  REGION 1..85: note = Description of Unknown:cds_NC_009489.1_cds_YP_001249278.1_9 target sequence
EVILCCKLGVDCKSVSFNHALSASGSLTSQKFTIIPPECVKEFFSQLYTQSSRVQDAIDRAIVQCTLAHTHSDTMHLINVGGVPP

SEQ ID NO: 17526 - protein, 85 aa, unidentified
  REGION 1..85: note = Description of Unknown:cds_NC_009489.1_cds_YP_001249278.1_9 target sequence
NSKWNDSSVYQSFSDLIMSIIKIITIHLKEIIEILKTDSSDHESLLLTAYNVGILGRINTVIQLMTERILVKVVSSWGLFSDHTR

SEQ ID NO: 17527 - protein, 85 aa, unidentified
  REGION 1..85: note = Description of Unknown:cds_NC_009489.1_cds_YP_001249278.1_9 target sequence
SQLRRDLEMGCFSVSTILSSEEFLRKTDNRKYLSKELTTSLIHDVINNRASIQFSRSQQKQIWKAIGCSALVDQPQEFIDQNAVD

SEQ ID NO: 17528 - protein, 85 aa, unidentified
  REGION 1..85: note = Description of Unknown:cds_NC_029316.1_cds_YP_009230346.1_93 target sequence
SEAVANTVLNNINVVDGLLNDYQPIPNPPSLPPSIPQGEVDRILAQYYGSLYKYYYQYEPVASSDIKLLKKVVSILKNTIKLAEN

SEQ ID NO: 17529 - protein, 85 aa, unidentified
  REGION 1..85: note = Description of Unknown:cds_NC_029316.1_cds_YP_009230346.1_93 target sequence
LKNDNLVQTLNQYLSNYENALSGLRSFAKVNPSVFELLSTAYSNLAQIQNFPQLPQSPSNPSLSTLVQYYAELASYYQQVKEIAK

SEQ ID NO: 17530 - protein, 85 aa, unidentified
  REGION 1..85: note = Description of Unknown:cds_NC_029316.1_cds_YP_009230346.1_93 target sequence
EDIQKINNAIMNFQQAGANISKLTSVLSQYKEIYKEAPEFSQFYSALAEVYNFLTQYANIPKPPKPPEIEKSQAIPLHNNPCFEE

SEQ ID NO: 17531 - protein, 85 aa, unidentified
  REGION 1..85: note = Description of Unknown:cds_NC_029316.1_cds_YP_009230346.1_93 target sequence
LAQYYAELSSWFSENEKNIKNNISVLSNAISTLKSAISIGQSLGVDVSSLQQSLECYCNSLKQLESLNNPNYAQFYSALSNAYSC

SEQ ID NO: 17532 - protein, 85 aa, unidentified
  REGION 1..85: note = Description of Unknown:cds_NC_029316.1_cds_YP_009230346.1_93 target sequence
LAKFINLPDLPTQPENPTAEQVSEYYAELSSWFSENEKNIKNNISALSNAIPELNSAISIGQSLGVDVSSLQQSLECYCKIEKSL

SEQ ID NO: 17533 - protein, 85 aa, unidentified
  REGION 1..85: note = Description of Unknown:cds_NC_029316.1_cds_YP_009230346.1_93 target sequence
EKLTSKDYAKIYGKLSKAYEAIAQAEDCMQSGNYQSAYDILTSALQSLFEIETGNIGKHVGRAEMETAQTNPSSYTPPPTPPSVN

SEQ ID NO: 17534 - protein, 85 aa, unidentified
  REGION 1..85: note = Description of Unknown:cds_NC_029316.1_cds_YP_009230346.1_93 target sequence
ECCECAIKLMWNMAGASYHIAVANNIMQGLNVGQIKSLAEASSYFTSLKEALANVIPQLSTANQYLQALNSQPIDIGDYNNAYQI

SEQ ID NO: 17535 - protein, 85 aa, unidentified
  REGION 1..85: note = Description of Unknown:cds_NC_029316.1_cds_YP_009230346.1_93 target sequence
ASILADGFTTLNNVVTELNNTVSKSDPNEAIKTIEQLKEQVAKYTNVTYEASGTVSQQVAQAVPSLTQTAQCVCTTLTALQEIEQ

SEQ ID NO: 17536 - protein, 85 aa, unidentified
  REGION 1..85: note = Description of Unknown:cds_NC_029316.1_cds_YP_009230346.1_93 target sequence
LEAEAQDMLNNLPQPPSNSTYANTANYYQSTSTIFTRVSSLYSQASAIASQVQSLSSASEQLSQYAQYYSVVGKAYSYLAQAYDE

SEQ ID NO: 17537 - protein, 85 aa, unidentified
  REGION 1..85: note = Description of Unknown:cds_NC_029316.1_cds_YP_009230346.1_93 target sequence
LCNTNNTQSFEGLASIYKTANDLVSKAIDCLCNNKINNEQIEQCVQKLAHCLSDFNHHLYYLYEFYSYMHSHHSELNYIINTLNG

SEQ ID NO: 17538 - protein, 85 aa, unidentified
  REGION 1..85: note = Description of Unknown:cds_NC_029316.1_cds_YP_009230346.1_93 target sequence
YMQNVPFSQSEGYNLVKSGNPRQQIINKYLEPVQSKLNSLVSGMNGDIQQIFMQNYGNKLNCLITALSYYLTAVAYLDSAQCSHS

SEQ ID NO: 17539 - protein, 85 aa, unidentified
  REGION 1..85: note = Description of Unknown:cds_NC_029316.1_cds_YP_009230346.1_93 target sequence
SIPTVVSYLQNAESCFKNAVPYFKNIGGDVSQLYSEIQKLNNQVNLLNNLQNRMDNLQNLMNQINTQYTTPQSAESLTSNLMNLS

SEQ ID NO: 17540 - protein, 85 aa, unidentified
  REGION 1..85: note = Description of Unknown:cds_NC_029316.1_cds_YP_009230346.1_93 target sequence
QKAMNCINCIKNIYAQLGQSVPNCLCDMYNKLNSIYTNAKNEYESLTYQNTNSSNILVDLVNAISDTAENVYANLASVVGTAFND

SEQ ID NO: 17541 - protein, 85 aa, unidentified
  REGION 1..85: note = Description of Unknown:cds_NC_029316.1_cds_YP_009230346.1_93 target sequence
AMNDLSNFITSHIPGLLGQIIAGVVIGALFVVAQLVPGLDVAVDVAGVLSIIASIQDLYLQGVSNPIQIASDLAHAFLSPESIAM

SEQ ID NO: 17542 - protein, 85 aa, unidentified
  REGION 1..85: note = Description of Unknown:cds_NC_029316.1_cds_YP_009230346.1_93 target sequence
VITGILGGIGISRVLASRVSPLTTKLSTDIKDVGDDAVTDIGTKVDTLIKSVEDSVKDDIKNNTVVEDIKTTFDDIKAKFDNLTT

SEQ ID NO: 17543 - protein, 85 aa, unidentified
  REGION 1..85: note = Description of Unknown:cds_NC_029316.1_cds_YP_009230346.1_93 target sequence
DLTKTDFAKDVTTKFDEFDAKFKSVIDKISTKLTEPKEVKLSTDDLQISPTELKILQLEKEILSNKEIISVKSLDVSEIKDFLTY

SEQ ID NO: 17544 - protein, 85 aa, unidentified
  REGION 1..85: note = Description of Unknown:cds_NC_029316.1_cds_YP_009230346.1_93 target sequence
ETGEREATLIGKINESIGEGEVSSKLIINKEGEIGVTTPESQALVKPPTETSPGEIITRQANLIRETQGAKVVTANIENGKVIYS

SEQ ID NO: 17545 - protein, 85 aa, unidentified
  REGION 1..85: note = Description of Unknown:cds_NC_029316.1_cds_YP_009230346.1_93 target sequence
EVVQGIGDMIPVLKDDIAKIVTDKYTTLQNLYAEKGVELPDSVSRIILSKLQNLQSEINSLIYTSTDDLNGVLGTLKDIAGKLEG

SEQ ID NO: 17546 - protein, 85 aa, unidentified
  REGION 1..85: note = Description of Unknown:cds_NC_029316.1_cds_YP_009230346.1_93 target sequence
TKFEDLMLQKLEAIEGNFGHEQLFANLITTIEDVKDLINIAIKSDPKLADSLSGDLDDLDSYLSSLEDLSKNLNDVYDRLGDLTN

SEQ ID NO: 17547 - protein, 85 aa, unidentified
  REGION 1..85: note = Description of Unknown:cds_NC_029316.1_cds_YP_009230346.1_93 target sequence
AIKKLSLNTDLLSVMKKLDINDLSNLVSDYLDGKVTIDDLISKVYDEAFNKLKIVGDSLPPDLGKAFMKVVDDIKNTPNKLDALH

SEQ ID NO: 17548 - protein, 85 aa, unidentified
  REGION 1..85: note = Description of Unknown:cds_NC_029316.1_cds_YP_009230346.1_93 target sequence
DIDDLVTKFEKFKDTVTDMENVDPELFRKYLQGNISLFQLLNDVKIYGDDLTTLRQLIKLEGKDAEMLDNLYIKLIEKMENDGEV

SEQ ID NO: 17549 - protein, 85 aa, unidentified
  REGION 1..85: note = Description of Unknown:cds_NC_029316.1_cds_YP_009230346.1_93 target sequence
PLKSRVESLGNDKALQKFLVEAIKSGNSEVVNLLEKYLTGDLTKNDLVDNLGINVKEGELSAQLKLPTQNSIKVYESLEEEVGKI

SEQ ID NO: 17550 - protein, 85 aa, unidentified
  REGION 1..85: note = Description of Unknown:cds_NC_029316.1_cds_YP_009230346.1_93 target sequence
MEKYLDALEILDEKDPNSIYQIFNDAVDRLAQDNNFDVEDFIKDQIMTRLRSYLEDFEDDFRALHLNKLEDFLKGVNVSLEDIIK

SEQ ID NO: 17551 - protein, 85 aa, unidentified
  REGION 1..85: note = Description of Unknown:cds_NC_029316.1_cds_YP_009230346.1_93 target sequence
DIKTLTDFKEVFKDIDEGKIEDAIDKLKGMTYNDVAKDLLEFLTKALDEIKAEKITQIASNLGVDVKSIESYVNSTDVATLTNVL

SEQ ID NO: 17552 - protein, 85 aa, unidentified
  REGION 1..85: note = Description of Unknown:cds_NC_029316.1_cds_YP_009230346.1_93 target sequence
SEISVKNIPINLEDINISTKLDLLFFIRQVLIKLNKLEIEDSAVLTQIATILQKYGILTENATNLTVGQLLSYINDYIYDTDISV

SEQ ID NO: 17553 - protein, 85 aa, unidentified
  REGION 1..85: note = Description of Unknown:cds_NC_029316.1_cds_YP_009230346.1_93 target sequence
LVNDQFGNIINDVNRIPIKLRRKFKLQIYPINVNSSVSSTTPPSSVSETIPQVNTQTTLQNLQTTTTITPPTPTPPPPSPPPNNN

SEQ ID NO: 17554 - protein, 84 aa, unidentified
  REGION 1..84: note = Description of Unknown:cds_NC_029316.1_cds_YP_009230346.1_93 target sequence
VSSTTPPSSVSETIPQVNTQTTLQNLQTTTTITPPTPTPPPPSPPPNNNNNNNNNNENTPVIINAQNNTSTPVSGKQQKQILII

SEQ ID NO: 17555 - protein, 85 aa, unidentified
  REGION 1..85: note = Description of Unknown:cds_NC_029316.1_cds_YP_009230346.1_93 target sequence
PPSLPPSIPQGEVDRILAQYYGSLYKYYYQYEPVASSDIKLLKKVVSILKNTIKLAENLKNDNLVQTLNQYLSNYENALSGLRSF

SEQ ID NO: 17556 - protein, 85 aa, unidentified
  REGION 1..85: note = Description of Unknown:cds_NC_029316.1_cds_YP_009230346.1_93 target sequence
AKVNPSVFELLSTAYSNLAQIQNFPQLPQSPSNPSLSTLVQYYAELASYYQQVKEIAKEDIQKINNAIMNFQQAGANISKLTSVL

SEQ ID NO: 17557 - protein, 85 aa, unidentified
  REGION 1..85: note = Description of Unknown:cds_NC_029316.1_cds_YP_009230346.1_93 target sequence
SQYKEIYKEAPEFSQFYSALAEVYNFLTQYANIPKPPKPPEIEKSQAIPLHNNPCFEELAQYYAELSSWFSENEKNIKNNISVLS

SEQ ID NO: 17558 - protein, 85 aa, unidentified
  REGION 1..85: note = Description of Unknown:cds_NC_029316.1_cds_YP_009230346.1_93 target sequence
NAISTLKSAISIGQSLGVDVSSLQQSLECYCNSLKQLESLNNPNYAQFYSALSNAYSCLAKFINLPDLPTQPENPTAEQVSEYYA

SEQ ID NO: 17559 - protein, 85 aa, unidentified
  REGION 1..85: note = Description of Unknown:cds_NC_029316.1_cds_YP_009230346.1_93 target sequence
ELSSWFSENEKNIKNNISALSNAIPELNSAISIGQSLGVDVSSLQQSLECYCKIEKSLEKLTSKDYAKIYGKLSKAYEAIAQAED

SEQ ID NO: 17560 - protein, 85 aa, unidentified
  REGION 1..85: note = Description of Unknown:cds_NC_029316.1_cds_YP_009230346.1_93 target sequence
CMQSGNYQSAYDILTSALQSLFEIETGNIGKHVGRAEMETAQTNPSSYTPPPTPPSVNECCECAIKLMWNMAGASYHIAVANNIM

SEQ ID NO: 17561 - protein, 85 aa, unidentified
  REGION 1..85: note = Description of Unknown:cds_NC_029316.1_cds_YP_009230346.1_93 target sequence
QGLNVGQIKSLAEASSYFTSLKEALANVIPQLSTANQYLQALNSQPIDIGDYNNAYQIASILADGFTTLNNVVTELNNTVSKSDP

SEQ ID NO: 17562 - protein, 85 aa, unidentified
  REGION 1..85: note = Description of Unknown:cds_NC_029316.1_cds_YP_009230346.1_93 target sequence
NEAIKTIEQLKEQVAKYTNVTYEASGTVSQQVAQAVPSLTQTAQCVCTTLTALQEIEQLEAEAQDMLNNLPQPPSNSTYANTANY

SEQ ID NO: 17563 - protein, 85 aa, unidentified
  REGION 1..85: note = Description of Unknown:cds_NC_029316.1_cds_YP_009230346.1_93 target sequence
YQSTSTIFTRVSSLYSQASAIASQVQSLSSASEQLSQYAQYYSVVGKAYSYLAQAYDELCNTNNTQSFEGLASIYKTANDLVSKA

SEQ ID NO: 17564 - protein, 85 aa, unidentified
  REGION 1..85: note = Description of Unknown:cds_NC_029316.1_cds_YP_009230346.1_93 target sequence
IDCLCNNKINNEQIEQCVQKLAHCLSDFNHHLYYLYEFYSYMHSHHSELNYIINTLNGYMQNVPFSQSEGYNLVKSGNPRQQIIN

SEQ ID NO: 17565 - protein, 85 aa, unidentified
  REGION 1..85: note = Description of Unknown:cds_NC_029316.1_cds_YP_009230346.1_93 target sequence
KYLEPVQSKLNSLVSGMNGDIQQIFMQNYGNKLNCLITALSYYLTAVAYLDSAQCSHSSIPTVVSYLQNAESCFKNAVPYFKNIG

SEQ ID NO: 17566 - protein, 85 aa, unidentified
  REGION 1..85: note = Description of Unknown:cds_NC_029316.1_cds_YP_009230346.1_93 target sequence
GDVSQLYSEIQKLNNQVNLLNNLQNRMDNLQNLMNQINTQYTTPQSAESLTSNLMNLSQKAMNCINCIKNIYAQLGQSVPNCLCD

SEQ ID NO: 17567 - protein, 85 aa, unidentified
  REGION 1..85: note = Description of Unknown:cds_NC_029316.1_cds_YP_009230346.1_93 target sequence
MYNKLNSIYTNAKNEYESLTYQNTNSSNILVDLVNAISDTAENVYANLASVVGTAFNDAMNDLSNFITSHIPGLLGQIIAGVVIG

SEQ ID NO: 17568 - protein, 85 aa, unidentified
  REGION 1..85: note = Description of Unknown:cds_NC_029316.1_cds_YP_009230346.1_93 target sequence
ALFVVAQLVPGLDVAVDVAGVLSIIASIQDLYLQGVSNPIQIASDLAHAFLSPESIAMVITGILGGIGISRVLASRVSPLTTKLS

SEQ ID NO: 17569 - protein, 85 aa, unidentified
  REGION 1..85: note = Description of Unknown:cds_NC_029316.1_cds_YP_009230346.1_93 target sequence
TDIKDVGDDAVTDIGTKVDTLIKSVEDSVKDDIKNNTVVEDIKTTFDDIKAKFDNLTTDLTKTDFAKDVTTKFDEFDAKFKSVID

SEQ ID NO: 17570 - protein, 85 aa, unidentified
  REGION 1..85: note = Description of Unknown:cds_NC_029316.1_cds_YP_009230346.1_93 target sequence
KISTKLTEPKEVKLSTDDLQISPTELKILQLEKEILSNKEIISVKSLDVSEIKDFLTYETGEREATLIGKINESIGEGEVSSKLI

SEQ ID NO: 17571 - protein, 85 aa, unidentified
  REGION 1..85: note = Description of Unknown:cds_NC_029316.1_cds_YP_009230346.1_93 target sequence
INKEGEIGVTTPESQALVKPPTETSPGEIITRQANLIRETQGAKVVTANIENGKVIYSEVVQGIGDMIPVLKDDIAKIVTDKYTT

SEQ ID NO: 17572 - protein, 85 aa, unidentified
  REGION 1..85: note = Description of Unknown:cds_NC_029316.1_cds_YP_009230346.1_93 target sequence
LQNLYAEKGVELPDSVSRIILSKLQNLQSEINSLIYTSTDDLNGVLGTLKDIAGKLEGTKFEDLMLQKLEAIEGNFGHEQLFANL

SEQ ID NO: 17573 - protein, 85 aa, unidentified
  REGION 1..85: note = Description of Unknown:cds_NC_029316.1_cds_YP_009230346.1_93 target sequence
ITTIEDVKDLINIAIKSDPKLADSLSGDLDDLDSYLSSLEDLSKNLNDVYDRLGDLTNAIKKLSLNTDLLSVMKKLDINDLSNLV

SEQ ID NO: 17574 - protein, 85 aa, unidentified
  REGION 1..85: note = Description of Unknown:cds_NC_029316.1_cds_YP_009230346.1_93 target sequence
SDYLDGKVTIDDLISKVYDEAFNKLKIVGDSLPPDLGKAFMKVVDDIKNTPNKLDALHDIDDLVTKFEKFKDTVTDMENVDPELF

SEQ ID NO: 17575 - protein, 85 aa, unidentified
  REGION 1..85: note = Description of Unknown:cds_NC_029316.1_cds_YP_009230346.1_93 target sequence
RKYLQGNISLFQLLNDVKIYGDDLTTLRQLIKLEGKDAEMLDNLYIKLIEKMENDGEVPLKSRVESLGNDKALQKFLVEAIKSGN

SEQ ID NO: 17576 - protein, 85 aa, unidentified
  REGION 1..85: note = Description of Unknown:cds_NC_029316.1_cds_YP_009230346.1_93 target sequence
SEVVNLLEKYLTGDLTKNDLVDNLGINVKEGELSAQLKLPTQNSIKVYESLEEEVGKIMEKYLDALEILDEKDPNSIYQIFNDAV

SEQ ID NO: 17577 - protein, 85 aa, unidentified
  REGION 1..85: note = Description of Unknown:cds_NC_029316.1_cds_YP_009230346.1_93 target sequence
DRLAQDNNFDVEDFIKDQIMTRLRSYLEDFEDDFRALHLNKLEDFLKGVNVSLEDIIKDIKTLTDFKEVFKDIDEGKIEDAIDKL

SEQ ID NO: 17578 - protein, 85 aa, unidentified
  REGION 1..85: note = Description of Unknown:cds_NC_029316.1_cds_YP_009230346.1_93 target sequence
KGMTYNDVAKDLLEFLTKALDEIKAEKITQIASNLGVDVKSIESYVNSTDVATLTNVLSEISVKNIPINLEDINISTKLDLLFFI

SEQ ID NO: 17579 - protein, 85 aa, unidentified
  REGION 1..85: note = Description of Unknown:cds_NC_029316.1_cds_YP_009230346.1_93 target sequence
RQVLIKLNKLEIEDSAVLTQIATILQKYGILTENATNLTVGQLLSYINDYIYDTDISVLVNDQFGNIINDVNRIPIKLRRKFKLQ

SEQ ID NO: 17580 - protein, 85 aa, unidentified
  REGION 1..85: note = Description of Unknown:cds_NC_029316.1_cds_YP_009230346.1_93 target sequence
IYPINVNSSVSSTTPPSSVSETIPQVNTQTTLQNLQTTTTITPPTPTPPPPSPPPNNNNNNNNNNENTPVIINAQNNTSTPVSGK

SEQ ID NO: 17581 - protein, 85 aa, unidentified
  REGION 1..85: note = Description of Unknown:cds_NC_002728.1_cds_NP_112028.1_9 target sequence
ADELSISDIIYPECHLDSPIVSGKLISAIEYAQLRHNQPSDDKRLSENIRLNLHGKRKSLYILRQSKQGDYIRNNIKNLKEFMHI

SEQ ID NO: 17582 - protein, 85 aa, unidentified
  REGION 1..85: note = Description of Unknown:cds_NC_002728.1_cds_NP_112028.1_9 target sequence
AYPECNNILFSITSQGMTSKLDNIMKKSFKAYNIISKKVIGMLQNITRNLITQDRRDEIINIHECRRLGDLGKNMSQSKWYECFL

SEQ ID NO: 17583 - protein, 85 aa, unidentified
  REGION 1..85: note = Description of Unknown:cds_NC_002728.1_cds_NP_112028.1_9 target sequence
FWFTIKTEMRAVIKNSQKPKFRSDSCIIHMRDKSTEIILNPNLICIFKSDKTGKKCYYLTPEMVLMYCDVLEGRMMMETTVKSDI

SEQ ID NO: 17584 - protein, 85 aa, unidentified
  REGION 1..85: note = Description of Unknown:cds_NC_002728.1_cds_NP_112028.1_9 target sequence
KYQPLISRSNALWGLIDPLFPVMGNRIYNIVSMIEPLVLALLQLKDEARILRGAFLHHCIKEMHQELSECGFTDQKIRSMFIDDL

SEQ ID NO: 17585 - protein, 85 aa, unidentified
  REGION 1..85: note = Description of Unknown:cds_NC_002728.1_cds_NP_112028.1_9 target sequence
LSILNIDNIHLLAEFFSFFRTFGHPILEAKVAAEKVREHMLADKVLEYAPIMKAHAIFCGTIINGYRDRHGGAWPPLYLPAHASK

SEQ ID NO: 17586 - protein, 85 aa, unidentified
  REGION 1..85: note = Description of Unknown:cds_NC_002728.1_cds_NP_112028.1_9 target sequence
HIIRLKNSGESLTIDDCVKNWESFCGIQFDCFMELKLDSDLSMYMKDKALSPIKDEWDSVYPREVLSYTPPKSTEPRRLVDVFVN

SEQ ID NO: 17587 - protein, 85 aa, unidentified
  REGION 1..85: note = Description of Unknown:cds_NC_002728.1_cds_NP_112028.1_9 target sequence
DENFDPYNMLEYVLSGAYLEDEQFNVSYSLKEKETKQAGRLFAKMTYKMRACQVIAEALIASGVGKYFKENGMVKDEHELLKTLF

SEQ ID NO: 17588 - protein, 85 aa, unidentified
  REGION 1..85: note = Description of Unknown:cds_NC_002728.1_cds_NP_112028.1_9 target sequence
QLSISSVPRGNSQGNDPQSINNIERDFQYFKGVTTNVKDKKNNSFNKVKSALNNPCQADGVHHNMSPNTRNRYKCSNTSKSFLDY

SEQ ID NO: 17589 - protein, 85 aa, unidentified
  REGION 1..85: note = Description of Unknown:cds_NC_002728.1_cds_NP_112028.1_9 target sequence
HTEFNPHNHYKSDNTEAAVLSRYEDNTGTKFDTVSAFLTTDLKKFCLNWRYESMAIFAERLDEIYGLPGFFNWMHKRLERSVIYV

SEQ ID NO: 17590 - protein, 85 aa, unidentified
  REGION 1..85: note = Description of Unknown:cds_NC_002728.1_cds_NP_112028.1_9 target sequence
ADPNCPPNIDKHMELEKTPEDDIFIHYPKGGIEGYSQKTWTIATIPFLFLSAYETNTRIAAIVQGDNESIAITQKVHPNLPYKVK

SEQ ID NO: 17591 - protein, 85 aa, unidentified
  REGION 1..85: note = Description of Unknown:cds_NC_002728.1_cds_NP_112028.1_9 target sequence
KEICAKQAQLYFERLRMNLRALGHNLKATETIISTHLFIYSKKIHYDGAVLSQALKSMSRCCFWSETLVDETRSACSNISTTIAK

SEQ ID NO: 17592 - protein, 85 aa, unidentified
  REGION 1..85: note = Description of Unknown:cds_NC_002728.1_cds_NP_112028.1_9 target sequence
AIENGLSRNVGYCINILKVIQQLLISTEFSINETLTLDVTSPISNNLDWLITAALIPAPIGGFNYLNLSRIFVRNIGDPVTASLA

SEQ ID NO: 17593 - protein, 85 aa, unidentified
  REGION 1..85: note = Description of Unknown:cds_NC_002728.1_cds_NP_112028.1_9 target sequence
DLKRMIDHSIMTESVLQKVMNQEPGDASFLDWASDPYSGNLPDSQSITKTIKNITARTILRNSPNPMLKGLFHDKSFDEDLELAS

SEQ ID NO: 17594 - protein, 85 aa, unidentified
  REGION 1..85: note = Description of Unknown:cds_NC_002728.1_cds_NP_112028.1_9 target sequence
FLMDRRVILPRAAHEILDNSLTGAREEIAGLLDTTKGLIRSGLRKSGLQPKLVSRLSHHDYNQFLILNKLLSNRRQNDLISSNTC

SEQ ID NO: 17595 - protein, 85 aa, unidentified
  REGION 1..85: note = Description of Unknown:cds_NC_002728.1_cds_NP_112028.1_9 target sequence
SVDLARALRSHMWRELALGRVIYGLEVPDALEAMVGRYITGSLECQICEQGNTMYGWFFVPRDSQLDQVDREHSSIRVPYVGSST

SEQ ID NO: 17596 - protein, 85 aa, unidentified
  REGION 1..85: note = Description of Unknown:cds_NC_002728.1_cds_NP_112028.1_9 target sequence
DERSDIKLGNVKRPTKALRSAIRIATVYTWAYGDNEECWYEAWYLASQRVNIDLDVLKAITPVSTSNNLSHRLRDKSTQFKFAGS

SEQ ID NO: 17597 - protein, 85 aa, unidentified
  REGION 1..85: note = Description of Unknown:cds_NC_002728.1_cds_NP_112028.1_9 target sequence
VLNRVSRYVNISNDNLDFRIEGEKVDTNLIYQQAMLLGLSVLEGKFRLRLETDDYNGIYHLHVKDNCCVKEVADVGQVDAELPIP

SEQ ID NO: 17598 - protein, 85 aa, unidentified
  REGION 1..85: note = Description of Unknown:cds_NC_002728.1_cds_NP_112028.1_9 target sequence
EYTEVDNNHLIYDPDPVSEIDCSRLSNQESKSRELDFPLWSTEELHDVLAKTVAQTVLEIITKADKDVLKQHLAIDSDDNINSLI

SEQ ID NO: 17599 - protein, 85 aa, unidentified
  REGION 1..85: note = Description of Unknown:cds_NC_002728.1_cds_NP_112028.1_9 target sequence
TEFLIVDPELFALYLGQSISIKWAFEIHHRRPRGRHTMVDLLSDLVSNTSKHTYKVLSNALSHPRVFKRFVNCGLLLPTQGPYLH

SEQ ID NO: 17600 - protein, 85 aa, unidentified
  REGION 1..85: note = Description of Unknown:cds_NC_002728.1_cds_NP_112028.1_9 target sequence
QQDFEKLSQNLLVTSYMIYLMNWCDFKKSPFLIAEQDETVISLREDIITSKHLCVIIDLYANHHKPPWIIDLNPQEKICVLRDFI

SEQ ID NO: 17601 - protein, 85 aa, unidentified
  REGION 1..85: note = Description of Unknown:cds_NC_002728.1_cds_NP_112028.1_9 target sequence
SKSRHVDTSSRSWNTSDLDFVIFYASLTYLRRGIIKQLRIRQVTEVIDTTTMLRDNIIVENPPIKTGVLDIRGCIIYNLEEILSM

SEQ ID NO: 17602 - protein, 85 aa, unidentified
  REGION 1..85: note = Description of Unknown:cds_NC_002728.1_cds_NP_112028.1_9 target sequence
NTKSASKKIFNLNSRPSVENHKYRRIGLNSSSCYKALNLSPLIQRYLPSGAQRLFIGEGSGSMMLLYQSTLGQSISFYNSGIDGD

SEQ ID NO: 17603 - protein, 85 aa, unidentified
  REGION 1..85: note = Description of Unknown:cds_NC_002728.1_cds_NP_112028.1_9 target sequence
YIPGQRELKLFPSEYSIAEEDPSLTGKLKGLVVPLFNGRPETTWIGNLDSYEYIINRTAGRSIGLVHSDMESGIDKNVEEILVEH

SEQ ID NO: 17604 - protein, 85 aa, unidentified
  REGION 1..85: note = Description of Unknown:cds_NC_002728.1_cds_NP_112028.1_9 target sequence
SHLISIAINVMMEDGLLVSKIAYTPGFPISRLFNMYRSYFGLVLVCFPVYSNPDSTEVYLLCLQKTVKTIVPPQKVLEHSNLHDE

SEQ ID NO: 17605 - protein, 85 aa, unidentified
  REGION 1..85: note = Description of Unknown:cds_NC_002728.1_cds_NP_112028.1_9 target sequence
VNDQGITSVIFKIKNSQSKQFHDDLKKYYQIDQPFFVPTKITSDEQVLLQAGLKLNGPEILKSEISYDIGSDINTLRDTIIIMLN

SEQ ID NO: 17606 - protein, 85 aa, unidentified
  REGION 1..85: note = Description of Unknown:cds_NC_002728.1_cds_NP_112028.1_9 target sequence
EAMNYFDDNRSPSHHLEPYPVLERTRIKTIMNCVTKKVIVYSLIKFKDTKSSELYHIKNNIRRKVLILDFRSKLMTKTLPKGMQE

SEQ ID NO: 17607 - protein, 84 aa, unidentified
  REGION 1..84: note = Description of Unknown:cds_NC_002728.1_cds_NP_112028.1_9 target sequence
TKKVIVYSLIKFKDTKSSELYHIKNNIRRKVLILDFRSKLMTKTLPKGMQERREKNGFKEVWIVDLSNREVKIWWKIIGYISII

SEQ ID NO: 17608 - protein, 85 aa, unidentified
  REGION 1..85: note = Description of Unknown:cds_NC_002728.1_cds_NP_112028.1_9 target sequence
AIEYAQLRHNQPSDDKRLSENIRLNLHGKRKSLYILRQSKQGDYIRNNIKNLKEFMHIAYPECNNILFSITSQGMTSKLDNIMKK

SEQ ID NO: 17609 - protein, 85 aa, unidentified
  REGION 1..85: note = Description of Unknown:cds_NC_002728.1_cds_NP_112028.1_9 target sequence
SFKAYNIISKKVIGMLQNITRNLITQDRRDEIINIHECRRLGDLGKNMSQSKWYECFLFWFTIKTEMRAVIKNSQKPKFRSDSCI

SEQ ID NO: 17610 - protein, 85 aa, unidentified
  REGION 1..85: note = Description of Unknown:cds_NC_002728.1_cds_NP_112028.1_9 target sequence
IHMRDKSTEIILNPNLICIFKSDKTGKKCYYLTPEMVLMYCDVLEGRMMMETTVKSDIKYQPLISRSNALWGLIDPLFPVMGNRI

SEQ ID NO: 17611 - protein, 85 aa, unidentified
  REGION 1..85: note = Description of Unknown:cds_NC_002728.1_cds_NP_112028.1_9 target sequence
YNIVSMIEPLVLALLQLKDEARILRGAFLHHCIKEMHQELSECGFTDQKIRSMFIDDLLSILNIDNIHLLAEFFSFFRTFGHPIL

SEQ ID NO: 17612 - protein, 85 aa, unidentified
  REGION 1..85: note = Description of Unknown:cds_NC_002728.1_cds_NP_112028.1_9 target sequence
EAKVAAEKVREHMLADKVLEYAPIMKAHAIFCGTIINGYRDRHGGAWPPLYLPAHASKHIIRLKNSGESLTIDDCVKNWESFCGI

SEQ ID NO: 17613 - protein, 85 aa, unidentified
  REGION 1..85: note = Description of Unknown:cds_NC_002728.1_cds_NP_112028.1_9 target sequence
QFDCFMELKLDSDLSMYMKDKALSPIKDEWDSVYPREVLSYTPPKSTEPRRLVDVFVNDENFDPYNMLEYVLSGAYLEDEQFNVS

SEQ ID NO: 17614 - protein, 85 aa, unidentified
  REGION 1..85: note = Description of Unknown:cds_NC_002728.1_cds_NP_112028.1_9 target sequence
YSLKEKETKQAGRLFAKMTYKMRACQVIAEALIASGVGKYFKENGMVKDEHELLKTLFQLSISSVPRGNSQGNDPQSINNIERDF

SEQ ID NO: 17615 - protein, 85 aa, unidentified
  REGION 1..85: note = Description of Unknown:cds_NC_002728.1_cds_NP_112028.1_9 target sequence
QYFKGVTTNVKDKKNNSFNKVKSALNNPCQADGVHHNMSPNTRNRYKCSNTSKSFLDYHTEFNPHNHYKSDNTEAAVLSRYEDNT

SEQ ID NO: 17616 - protein, 85 aa, unidentified
  REGION 1..85: note = Description of Unknown:cds_NC_002728.1_cds_NP_112028.1_9 target sequence
GTKFDTVSAFLTTDLKKFCLNWRYESMAIFAERLDEIYGLPGFFNWMHKRLERSVIYVADPNCPPNIDKHMELEKTPEDDIFIHY

SEQ ID NO: 17617 - protein, 85 aa, unidentified
  REGION 1..85: note = Description of Unknown:cds_NC_002728.1_cds_NP_112028.1_9 target sequence
PKGGIEGYSQKTWTIATIPFLFLSAYETNTRIAAIVQGDNESIAITQKVHPNLPYKVKKEICAKQAQLYFERLRMNLRALGHNLK

SEQ ID NO: 17618 - protein, 85 aa, unidentified
  REGION 1..85: note = Description of Unknown:cds_NC_002728.1_cds_NP_112028.1_9 target sequence
ATETIISTHLFIYSKKIHYDGAVLSQALKSMSRCCFWSETLVDETRSACSNISTTIAKAIENGLSRNVGYCINILKVIQQLLIST

SEQ ID NO: 17619 - protein, 85 aa, unidentified
  REGION 1..85: note = Description of Unknown:cds_NC_002728.1_cds_NP_112028.1_9 target sequence
EFSINETLTLDVTSPISNNLDWLITAALIPAPIGGFNYLNLSRIFVRNIGDPVTASLADLKRMIDHSIMTESVLQKVMNQEPGDA

SEQ ID NO: 17620 - protein, 85 aa, unidentified
  REGION 1..85: note = Description of Unknown:cds_NC_002728.1_cds_NP_112028.1_9 target sequence
SFLDWASDPYSGNLPDSQSITKTIKNITARTILRNSPNPMLKGLFHDKSFDEDLELASFLMDRRVILPRAAHEILDNSLTGAREE

SEQ ID NO: 17621 - protein, 85 aa, unidentified
  REGION 1..85: note = Description of Unknown:cds_NC_002728.1_cds_NP_112028.1_9 target sequence
IAGLLDTTKGLIRSGLRKSGLQPKLVSRLSHHDYNQFLILNKLLSNRRQNDLISSNTCSVDLARALRSHMWRELALGRVIYGLEV

SEQ ID NO: 17622 - protein, 85 aa, unidentified
  REGION 1..85: note = Description of Unknown:cds_NC_002728.1_cds_NP_112028.1_9 target sequence
PDALEAMVGRYITGSLECQICEQGNTMYGWFFVPRDSQLDQVDREHSSIRVPYVGSSTDERSDIKLGNVKRPTKALRSAIRIATV

SEQ ID NO: 17623 - protein, 85 aa, unidentified
  REGION 1..85: note = Description of Unknown:cds_NC_002728.1_cds_NP_112028.1_9 target sequence
YTWAYGDNEECWYEAWYLASQRVNIDLDVLKAITPVSTSNNLSHRLRDKSTQFKFAGSVLNRVSRYVNISNDNLDFRIEGEKVDT

SEQ ID NO: 17624 - protein, 85 aa, unidentified
  REGION 1..85: note = Description of Unknown:cds_NC_002728.1_cds_NP_112028.1_9 target sequence
NLIYQQAMLLGLSVLEGKFRLRLETDDYNGIYHLHVKDNCCVKEVADVGQVDAELPIPEYTEVDNNHLIYDPDPVSEIDCSRLSN

SEQ ID NO: 17625 - protein, 85 aa, unidentified
  REGION 1..85: note = Description of Unknown:cds_NC_002728.1_cds_NP_112028.1_9 target sequence
QESKSRELDFPLWSTEELHDVLAKTVAQTVLEIITKADKDVLKQHLAIDSDDNINSLITEFLIVDPELFALYLGQSISIKWAFEI

SEQ ID NO: 17626 - protein, 85 aa, unidentified
  REGION 1..85: note = Description of Unknown:cds_NC_002728.1_cds_NP_112028.1_9 target sequence
HHRRPRGRHTMVDLLSDLVSNTSKHTYKVLSNALSHPRVFKRFVNCGLLLPTQGPYLHQQDFEKLSQNLLVTSYMIYLMNWCDFK

SEQ ID NO: 17627 - protein, 85 aa, unidentified
  REGION 1..85: note = Description of Unknown:cds_NC_002728.1_cds_NP_112028.1_9 target sequence
KSPFLIAEQDETVISLREDIITSKHLCVIIDLYANHHKPPWIIDLNPQEKICVLRDFISKSRHVDTSSRSWNTSDLDFVIFYASL

SEQ ID NO: 17628 - protein, 85 aa, unidentified
  REGION 1..85: note = Description of Unknown:cds_NC_002728.1_cds_NP_112028.1_9 target sequence
TYLRRGIIKQLRIRQVTEVIDTTTMLRDNIIVENPPIKTGVLDIRGCIIYNLEEILSMNTKSASKKIFNLNSRPSVENHKYRRIG

SEQ ID NO: 17629 - protein, 85 aa, unidentified
  REGION 1..85: note = Description of Unknown:cds_NC_002728.1_cds_NP_112028.1_9 target sequence
LNSSSCYKALNLSPLIQRYLPSGAQRLFIGEGSGSMMLLYQSTLGQSISFYNSGIDGDYIPGQRELKLFPSEYSIAEEDPSLTGK

SEQ ID NO: 17630 - protein, 85 aa, unidentified
  REGION 1..85: note = Description of Unknown:cds_NC_002728.1_cds_NP_112028.1_9 target sequence
LKGLVVPLFNGRPETTWIGNLDSYEYIINRTAGRSIGLVHSDMESGIDKNVEEILVEHSHLISIAINVMMEDGLLVSKIAYTPGF

SEQ ID NO: 17631 - protein, 85 aa, unidentified
  REGION 1..85: note = Description of Unknown:cds_NC_002728.1_cds_NP_112028.1_9 target sequence
PISRLFNMYRSYFGLVLVCFPVYSNPDSTEVYLLCLQKTVKTIVPPQKVLEHSNLHDEVNDQGITSVIFKIKNSQSKQFHDDLKK

SEQ ID NO: 17632 - protein, 85 aa, unidentified
  REGION 1..85: note = Description of Unknown:cds_NC_002728.1_cds_NP_112028.1_9 target sequence
YYQIDQPFFVPTKITSDEQVLLQAGLKLNGPEILKSEISYDIGSDINTLRDTIIIMLNEAMNYFDDNRSPSHHLEPYPVLERTRI

SEQ ID NO: 17633 - protein, 85 aa, unidentified
  REGION 1..85: note = Description of Unknown:cds_NC_002728.1_cds_NP_112028.1_9 target sequence
KTIMNCVTKKVIVYSLIKFKDTKSSELYHIKNNIRRKVLILDFRSKLMTKTLPKGMQERREKNGFKEVWIVDLSNREVKIWWKII

SEQ ID NO: 17634 - protein, 85 aa, unidentified
  REGION 1..85: note = Description of Unknown:cds_NC_001906.3_cds_NP_047113.3_8 target sequence
AHELSISDIIYPECHLDSPIVSGKLISAIEYAQLRHNQPNGDKRLTENIKINLQGKRRSVYISRQSRLGNYIRDNIKNLKEFLHV

SEQ ID NO: 17635 - protein, 85 aa, unidentified
  REGION 1..85: note = Description of Unknown:cds_NC_001906.3_cds_NP_047113.3_8 target sequence
SYPECNKSLFSLKSPGMTSKLSNIMKKSFKAYNIVSRKIIEMLQNITRNLITQDQKDEVLGIYEQDRLSNIGKYMSQSQWYECFL

SEQ ID NO: 17636 - protein, 85 aa, unidentified
  REGION 1..85: note = Description of Unknown:cds_NC_001906.3_cds_NP_047113.3_8 target sequence
FWFTIKTEMRAVIKNSQKPKFRSDSCIIHMKDNNMEIVMNPNLVCIYKNDKDGKRCYYLTPEIVLMCCDVLEGRMMIETSIKSDI

SEQ ID NO: 17637 - protein, 85 aa, unidentified
  REGION 1..85: note = Description of Unknown:cds_NC_001906.3_cds_NP_047113.3_8 target sequence
KYQSLITRSNALWTFIDSLFPIMGNRIYNIVSMIEPLVLALLQLKDEARILRGAFLHHCIKEIHQELIGCGFTDQKTRSIFIDDL

SEQ ID NO: 17638 - protein, 85 aa, unidentified
  REGION 1..85: note = Description of Unknown:cds_NC_001906.3_cds_NP_047113.3_8 target sequence
LSVMNIDNIHLLAEFFSFFRTFGHPILEAKTAADKVREHMLADKVLEYGPIMKAHAVFCGTIINGYRDRHRGAWPPLYLPSHASK

SEQ ID NO: 17639 - protein, 85 aa, unidentified
  REGION 1..85: note = Description of Unknown:cds_NC_001906.3_cds_NP_047113.3_8 target sequence
HIIRLKNSGESLTVDDCVKNWESFCGIQFDCFMELKLDSDLSMYMKDKALSPIKEEWDSVYPREVLNYTPPRSTEPRRLVDVFVN

SEQ ID NO: 17640 - protein, 85 aa, unidentified
  REGION 1..85: note = Description of Unknown:cds_NC_001906.3_cds_NP_047113.3_8 target sequence
DENFDPYNMLEYVLTGDYLTDEQFNVSYSLKEKETKQAGRLFAKMTYKMRACQVIAEALIASGVGKYFKENGMVKDEHELLKTLF

SEQ ID NO: 17641 - protein, 85 aa, unidentified
  REGION 1..85: note = Description of Unknown:cds_NC_001906.3_cds_NP_047113.3_8 target sequence
QLSISSVPRGNSQGRDSEFSNNTEKSLISLKRTTGRLLNNEVPCRMNIMSALIDKNQSDQKKHNILPNTRNRHKCDNTSQTFLDY

SEQ ID NO: 17642 - protein, 85 aa, unidentified
  REGION 1..85: note = Description of Unknown:cds_NC_001906.3_cds_NP_047113.3_8 target sequence
HMEFSPYKSDRMDRTETSDFSKYDDGTGTKFDTVSAFLTTDLKKFCLNWRYESMAIFAERLDEIYGLPGFFNWMHKRLEKSVIYV

SEQ ID NO: 17643 - protein, 85 aa, unidentified
  REGION 1..85: note = Description of Unknown:cds_NC_001906.3_cds_NP_047113.3_8 target sequence
ADPNCPPDIGKHINLDDTPEDDIFIHSPKGGIEGYSQKTWTIATIPFLFLSAYETNTRIAAIVQGDNESIAITQKVHPNLPYKVK

SEQ ID NO: 17644 - protein, 85 aa, unidentified
  REGION 1..85: note = Description of Unknown:cds_NC_001906.3_cds_NP_047113.3_8 target sequence
KEICARQAQLYFDRLRMNLRALGLNLKATETIISTHLFVYSKKIHYDGAVLSQALKSMSRCCFWSETLVDETRSACSNISTTIAK

SEQ ID NO: 17645 - protein, 85 aa, unidentified
  REGION 1..85: note = Description of Unknown:cds_NC_001906.3_cds_NP_047113.3_8 target sequence
AIENGLSRNVGYCINVLKVIQQLLISTEFSINETLTADVTSPISNNLDWLVTASRIPAPIGGFNYLNLSRIFVRNIGDPVTASLA

SEQ ID NO: 17646 - protein, 85 aa, unidentified
  REGION 1..85: note = Description of Unknown:cds_NC_001906.3_cds_NP_047113.3_8 target sequence
DLKRMIEHDLMTDKVLQKVMNQEPGDASFLDWASDPYSGNLPDSQSITKTIKNITARTILRTSPNPMLKGLFHDKSFEEDLELAT

SEQ ID NO: 17647 - protein, 85 aa, unidentified
  REGION 1..85: note = Description of Unknown:cds_NC_001906.3_cds_NP_047113.3_8 target sequence
FLMDRRIILPRAAHEILDNSLTGAREEIAGLLDTTKGLIRSGLKKSGIQPKLVSRLSNHDYNQFLILNRLLSNKKRNDLISPKTC

SEQ ID NO: 17648 - protein, 85 aa, unidentified
  REGION 1..85: note = Description of Unknown:cds_NC_001906.3_cds_NP_047113.3_8 target sequence
SVDLAKALRCHMWRDLALGRSIYGLEVPDALEAMTGRYITGSMECQLCDQGNTMYGWFFVPRDSQLDQVNKEHSSIRVPYVGSST

SEQ ID NO: 17649 - protein, 85 aa, unidentified
  REGION 1..85: note = Description of Unknown:cds_NC_001906.3_cds_NP_047113.3_8 target sequence
DERSDIKLGNVKRPTRALRSAIRIATVYTWAYGDSEESWYEAWYLASQRVNIDIDVLKAITPVSTSNNLSHRLRDRSTQFKLPGS

SEQ ID NO: 17650 - protein, 85 aa, unidentified
  REGION 1..85: note = Description of Unknown:cds_NC_001906.3_cds_NP_047113.3_8 target sequence
VLNRVSRYVNISNDNLDFRVEGEKVDTNLIYQQTMLLGLSVLEGKFRLRTETDDYNGIYHLHVRDNCCVKEVADIGGVNAELPVP

SEQ ID NO: 17651 - protein, 85 aa, unidentified
  REGION 1..85: note = Description of Unknown:cds_NC_001906.3_cds_NP_047113.3_8 target sequence
EYTEVENNRLIYDPDPVSEIDCDRLSKQESKARELDFPLWSTEELHDVLAKTVAQTVLEIITKADKDVLKQHLAIDSDDSINSLI

SEQ ID NO: 17652 - protein, 85 aa, unidentified
  REGION 1..85: note = Description of Unknown:cds_NC_001906.3_cds_NP_047113.3_8 target sequence
TEFLMVDPELFALYLGQSISVKWAFEIHHRRPHGRHTMVDLLSDLISNTSKHTYKVLSNALSHPRVFKRFVNCGLLLPTQGPYLH

SEQ ID NO: 17653 - protein, 85 aa, unidentified
  REGION 1..85: note = Description of Unknown:cds_NC_001906.3_cds_NP_047113.3_8 target sequence
QQDFEKLSQNLLITSYMNYLMNWCDFKKFPFLIAEQDEAVVELREDIITSKHLCMIIDLYANHHKPPWIIDLNPQEKICVLRDFI

SEQ ID NO: 17654 - protein, 85 aa, unidentified
  REGION 1..85: note = Description of Unknown:cds_NC_001906.3_cds_NP_047113.3_8 target sequence
SKCRHTDVSSRSWNITDLDFMVFYASLTYLRRGIIKQLRIRQVTEVIDTTTMLRDNILVENPPIKTGVLDIRGCIIYNLEEILSM

SEQ ID NO: 17655 - protein, 85 aa, unidentified
  REGION 1..85: note = Description of Unknown:cds_NC_001906.3_cds_NP_047113.3_8 target sequence
NTKSTSRKVFNLGSKLSVENHKYRRIGLNSSSCYKALNLSPLIQRYLPAGSQRLFVGEGSGSMMLLYQQTLGCSISFYNSGIDGD

SEQ ID NO: 17656 - protein, 85 aa, unidentified
  REGION 1..85: note = Description of Unknown:cds_NC_001906.3_cds_NP_047113.3_8 target sequence
YIPGQRELRLFPSEYSIAEDDPSQSDKLKGLVVPLFNGRPETTWIGNLDSYEYIINRTAGRNIGLVHSDMESGIDKQVEEIMIEH

SEQ ID NO: 17657 - protein, 85 aa, unidentified
  REGION 1..85: note = Description of Unknown:cds_NC_001906.3_cds_NP_047113.3_8 target sequence
SHLISIAINVMIEDGVLVSKIAFAPGFPISRLLNMYRSYFGLVLVCFPVYSNPESTEVYLICLQKTIKTIIPPQKVLDHSYLSDE

SEQ ID NO: 17658 - protein, 85 aa, unidentified
  REGION 1..85: note = Description of Unknown:cds_NC_001906.3_cds_NP_047113.3_8 target sequence
INDQGITSVIFKIKNIQSKQFHEDLVKHYQVEQPFFVPSHITCDEKLLMQAGLKMNGPEILKNEVGYDIGSDINTLRSTIIILLN

SEQ ID NO: 17659 - protein, 85 aa, unidentified
  REGION 1..85: note = Description of Unknown:cds_NC_001906.3_cds_NP_047113.3_8 target sequence
EAMNYFDDERSPSHHLEPFPVLEKTRVKTIMGRVTRKVTVYSLIKLKETKSPELYNIKNYIRRKVLILDFRSHTMIKLLPKGMKE

SEQ ID NO: 17660 - protein, 84 aa, unidentified
  REGION 1..84: note = Description of Unknown:cds_NC_001906.3_cds_NP_047113.3_8 target sequence
TRKVTVYSLIKLKETKSPELYNIKNYIRRKVLILDFRSHTMIKLLPKGMKERREKSGFKEIWIFDLSNREVKIWWKIIGYLSLV

SEQ ID NO: 17661 - protein, 85 aa, unidentified
  REGION 1..85: note = Description of Unknown:cds_NC_001906.3_cds_NP_047113.3_8 target sequence
AIEYAQLRHNQPNGDKRLTENIKINLQGKRRSVYISRQSRLGNYIRDNIKNLKEFLHVSYPECNKSLFSLKSPGMTSKLSNIMKK

SEQ ID NO: 17662 - protein, 85 aa, unidentified
  REGION 1..85: note = Description of Unknown:cds_NC_001906.3_cds_NP_047113.3_8 target sequence
SFKAYNIVSRKIIEMLQNITRNLITQDQKDEVLGIYEQDRLSNIGKYMSQSQWYECFLFWFTIKTEMRAVIKNSQKPKFRSDSCI

SEQ ID NO: 17663 - protein, 85 aa, unidentified
  REGION 1..85: note = Description of Unknown:cds_NC_001906.3_cds_NP_047113.3_8 target sequence
IHMKDNNMEIVMNPNLVCIYKNDKDGKRCYYLTPEIVLMCCDVLEGRMMIETSIKSDIKYQSLITRSNALWTFIDSLFPIMGNRI

SEQ ID NO: 17664 - protein, 85 aa, unidentified
  REGION 1..85: note = Description of Unknown:cds_NC_001906.3_cds_NP_047113.3_8 target sequence
YNIVSMIEPLVLALLQLKDEARILRGAFLHHCIKEIHQELIGCGFTDQKTRSIFIDDLLSVMNIDNIHLLAEFFSFFRTFGHPIL

SEQ ID NO: 17665 - protein, 85 aa, unidentified
  REGION 1..85: note = Description of Unknown:cds_NC_001906.3_cds_NP_047113.3_8 target sequence
EAKTAADKVREHMLADKVLEYGPIMKAHAVFCGTIINGYRDRHRGAWPPLYLPSHASKHIIRLKNSGESLTVDDCVKNWESFCGI

SEQ ID NO: 17666 - protein, 85 aa, unidentified
  REGION 1..85: note = Description of Unknown:cds_NC_001906.3_cds_NP_047113.3_8 target sequence
QFDCFMELKLDSDLSMYMKDKALSPIKEEWDSVYPREVLNYTPPRSTEPRRLVDVFVNDENFDPYNMLEYVLTGDYLTDEQFNVS

SEQ ID NO: 17667 - protein, 85 aa, unidentified
  REGION 1..85: note = Description of Unknown:cds_NC_001906.3_cds_NP_047113.3_8 target sequence
YSLKEKETKQAGRLFAKMTYKMRACQVIAEALIASGVGKYFKENGMVKDEHELLKTLFQLSISSVPRGNSQGRDSEFSNNTEKSL

SEQ ID NO: 17668 - protein, 85 aa, unidentified
  REGION 1..85: note = Description of Unknown:cds_NC_001906.3_cds_NP_047113.3_8 target sequence
ISLKRTTGRLLNNEVPCRMNIMSALIDKNQSDQKKHNILPNTRNRHKCDNTSQTFLDYHMEFSPYKSDRMDRTETSDFSKYDDGT

SEQ ID NO: 17669 - protein, 85 aa, unidentified
  REGION 1..85: note = Description of Unknown:cds_NC_001906.3_cds_NP_047113.3_8 target sequence
GTKFDTVSAFLTTDLKKFCLNWRYESMAIFAERLDEIYGLPGFFNWMHKRLEKSVIYVADPNCPPDIGKHINLDDTPEDDIFIHS

SEQ ID NO: 17670 - protein, 85 aa, unidentified
  REGION 1..85: note = Description of Unknown:cds_NC_001906.3_cds_NP_047113.3_8 target sequence
PKGGIEGYSQKTWTIATIPFLFLSAYETNTRIAAIVQGDNESIAITQKVHPNLPYKVKKEICARQAQLYFDRLRMNLRALGLNLK

SEQ ID NO: 17671 - protein, 85 aa, unidentified
  REGION 1..85: note = Description of Unknown:cds_NC_001906.3_cds_NP_047113.3_8 target sequence
ATETIISTHLFVYSKKIHYDGAVLSQALKSMSRCCFWSETLVDETRSACSNISTTIAKAIENGLSRNVGYCINVLKVIQQLLIST

SEQ ID NO: 17672 - protein, 85 aa, unidentified
  REGION 1..85: note = Description of Unknown:cds_NC_001906.3_cds_NP_047113.3_8 target sequence
EFSINETLTADVTSPISNNLDWLVTASRIPAPIGGFNYLNLSRIFVRNIGDPVTASLADLKRMIEHDLMTDKVLQKVMNQEPGDA

SEQ ID NO: 17673 - protein, 85 aa, unidentified
  REGION 1..85: note = Description of Unknown:cds_NC_001906.3_cds_NP_047113.3_8 target sequence
SFLDWASDPYSGNLPDSQSITKTIKNITARTILRTSPNPMLKGLFHDKSFEEDLELATFLMDRRIILPRAAHEILDNSLTGAREE

SEQ ID NO: 17674 - protein, 85 aa, unidentified
  REGION 1..85: note = Description of Unknown:cds_NC_001906.3_cds_NP_047113.3_8 target sequence
IAGLLDTTKGLIRSGLKKSGIQPKLVSRLSNHDYNQFLILNRLLSNKKRNDLISPKTCSVDLAKALRCHMWRDLALGRSIYGLEV

SEQ ID NO: 17675 - protein, 85 aa, unidentified
  REGION 1..85: note = Description of Unknown:cds_NC_001906.3_cds_NP_047113.3_8 target sequence
PDALEAMTGRYITGSMECQLCDQGNTMYGWFFVPRDSQLDQVNKEHSSIRVPYVGSSTDERSDIKLGNVKRPTRALRSAIRIATV

SEQ ID NO: 17676 - protein, 85 aa, unidentified
  REGION 1..85: note = Description of Unknown:cds_NC_001906.3_cds_NP_047113.3_8 target sequence
YTWAYGDSEESWYEAWYLASQRVNIDIDVLKAITPVSTSNNLSHRLRDRSTQFKLPGSVLNRVSRYVNISNDNLDFRVEGEKVDT

SEQ ID NO: 17677 - protein, 85 aa, unidentified
  REGION 1..85: note = Description of Unknown:cds_NC_001906.3_cds_NP_047113.3_8 target sequence
NLIYQQTMLLGLSVLEGKFRLRTETDDYNGIYHLHVRDNCCVKEVADIGGVNAELPVPEYTEVENNRLIYDPDPVSEIDCDRLSK

SEQ ID NO: 17678 - protein, 85 aa, unidentified
  REGION 1..85: note = Description of Unknown:cds_NC_001906.3_cds_NP_047113.3_8 target sequence
QESKARELDFPLWSTEELHDVLAKTVAQTVLEIITKADKDVLKQHLAIDSDDSINSLITEFLMVDPELFALYLGQSISVKWAFEI

SEQ ID NO: 17679 - protein, 85 aa, unidentified
  REGION 1..85: note = Description of Unknown:cds_NC_001906.3_cds_NP_047113.3_8 target sequence
HHRRPHGRHTMVDLLSDLISNTSKHTYKVLSNALSHPRVFKRFVNCGLLLPTQGPYLHQQDFEKLSQNLLITSYMNYLMNWCDFK

SEQ ID NO: 17680 - protein, 85 aa, unidentified
  REGION 1..85: note = Description of Unknown:cds_NC_001906.3_cds_NP_047113.3_8 target sequence
KFPFLIAEQDEAVVELREDIITSKHLCMIIDLYANHHKPPWIIDLNPQEKICVLRDFISKCRHTDVSSRSWNITDLDFMVFYASL

SEQ ID NO: 17681 - protein, 85 aa, unidentified
  REGION 1..85: note = Description of Unknown:cds_NC_001906.3_cds_NP_047113.3_8 target sequence
TYLRRGIIKQLRIRQVTEVIDTTTMLRDNILVENPPIKTGVLDIRGCIIYNLEEILSMNTKSTSRKVFNLGSKLSVENHKYRRIG

SEQ ID NO: 17682 - protein, 85 aa, unidentified
  REGION 1..85: note = Description of Unknown:cds_NC_001906.3_cds_NP_047113.3_8 target sequence
LNSSSCYKALNLSPLIQRYLPAGSQRLFVGEGSGSMMLLYQQTLGCSISFYNSGIDGDYIPGQRELRLFPSEYSIAEDDPSQSDK

SEQ ID NO: 17683 - protein, 85 aa, unidentified
  REGION 1..85: note = Description of Unknown:cds_NC_001906.3_cds_NP_047113.3_8 target sequence
LKGLVVPLFNGRPETTWIGNLDSYEYIINRTAGRNIGLVHSDMESGIDKQVEEIMIEHSHLISIAINVMIEDGVLVSKIAFAPGF

SEQ ID NO: 17684 - protein, 85 aa, unidentified
  REGION 1..85: note = Description of Unknown:cds_NC_001906.3_cds_NP_047113.3_8 target sequence
PISRLLNMYRSYFGLVLVCFPVYSNPESTEVYLICLQKTIKTIIPPQKVLDHSYLSDEINDQGITSVIFKIKNIQSKQFHEDLVK

SEQ ID NO: 17685 - protein, 85 aa, unidentified
  REGION 1..85: note = Description of Unknown:cds_NC_001906.3_cds_NP_047113.3_8 target sequence
HYQVEQPFFVPSHITCDEKLLMQAGLKMNGPEILKNEVGYDIGSDINTLRSTIIILLNEAMNYFDDERSPSHHLEPFPVLEKTRV

SEQ ID NO: 17686 - protein, 85 aa, unidentified
  REGION 1..85: note = Description of Unknown:cds_NC_001906.3_cds_NP_047113.3_8 target sequence
KTIMGRVTRKVTVYSLIKLKETKSPELYNIKNYIRRKVLILDFRSHTMIKLLPKGMKERREKSGFKEIWIFDLSNREVKIWWKII

SEQ ID NO: 17687 - protein, 85 aa, unidentified
  REGION 1..85: note = Description of Unknown:cds_NC_002549.1_cds_NP_066251.1_9 target sequence
ATQHTQYPDARLSSPIVLDQCDLVTRACGLYSSYSLNPQLRNCKLPKHIYRLKYDVTVTKFLSDVPVATLPIDFIVPVLLKALSG

SEQ ID NO: 17688 - protein, 85 aa, unidentified
  REGION 1..85: note = Description of Unknown:cds_NC_002549.1_cds_NP_066251.1_9 target sequence
NGFCPVEPRCQQFLDEIIKYTMQDALFLKYYLKNVGAQEDCVDEHFQEKILSSIQGNEFLHQMFFWYDLAILTRRGRLNRGNSRS

SEQ ID NO: 17689 - protein, 85 aa, unidentified
  REGION 1..85: note = Description of Unknown:cds_NC_002549.1_cds_NP_066251.1_9 target sequence
TWFVHDDLIDILGYGDYVFWKIPISMLPLNTQGIPHAAMDWYQASVFKEAVQGHTHIVSVSTADVLIMCKDLITCRFNTTLISKI

SEQ ID NO: 17690 - protein, 85 aa, unidentified
  REGION 1..85: note = Description of Unknown:cds_NC_002549.1_cds_NP_066251.1_9 target sequence
AEIEDPVCSDYPNFKIVSMLYQSGDYLLSILGSDGYKIIKFLEPLCLAKIQLCSKYTERKGRFLTQMHLAVNHTLEEITEMRALK

SEQ ID NO: 17691 - protein, 85 aa, unidentified
  REGION 1..85: note = Description of Unknown:cds_NC_002549.1_cds_NP_066251.1_9 target sequence
PSQAQKIREFHRTLIRLEMTPQQLCELFSIQKHWGHPVLHSETAIQKVKKHATVLKALRPIVIFETYCVFKYSIAKHYFDSQGSW

SEQ ID NO: 17692 - protein, 85 aa, unidentified
  REGION 1..85: note = Description of Unknown:cds_NC_002549.1_cds_NP_066251.1_9 target sequence
YSVTSDRNLTPGLNSYIKRNQFPPLPMIKELLWEFYHLDHPPLFSTKIISDLSIFIKDRATAVERTCWDAVFEPNVLGYNPPHKF

SEQ ID NO: 17693 - protein, 85 aa, unidentified
  REGION 1..85: note = Description of Unknown:cds_NC_002549.1_cds_NP_066251.1_9 target sequence
STKRVPEQFLEQENFSIENVLSYAQKLEYLLPQYRNFSFSLKEKELNVGRTFGKLPYPTRNVQTLCEALLADGLAKAFPSNMMVV

SEQ ID NO: 17694 - protein, 85 aa, unidentified
  REGION 1..85: note = Description of Unknown:cds_NC_002549.1_cds_NP_066251.1_9 target sequence
TEREQKESLLHQASWHHTSDDFGEHATVRGSSFVTDLEKYNLAFRYEFTAPFIEYCNRCYGVKNVFNWMHYTIPQCYMHVSDYYN

SEQ ID NO: 17695 - protein, 85 aa, unidentified
  REGION 1..85: note = Description of Unknown:cds_NC_002549.1_cds_NP_066251.1_9 target sequence
PPHNLTLENRDNPPEGPSSYRGHMGGIEGLQQKLWTSISCAQISLVEIKTGFKLRSAVMGDNQCITVLSVFPLETDADEQEQSAE

SEQ ID NO: 17696 - protein, 85 aa, unidentified
  REGION 1..85: note = Description of Unknown:cds_NC_002549.1_cds_NP_066251.1_9 target sequence
DNAARVAASLAKVTSACGIFLKPDETFVHSGFIYFGKKQYLNGVQLPQSLKTATRMAPLSDAIFDDLQGTLASIGTAFERSISET

SEQ ID NO: 17697 - protein, 85 aa, unidentified
  REGION 1..85: note = Description of Unknown:cds_NC_002549.1_cds_NP_066251.1_9 target sequence
RHIFPCRITAAFHTFFSVRILQYHHLGFNKGFDLGQLTLGKPLDFGTISLALAVPQVLGGLSFLNPEKCFYRNLGDPVTSGLFQL

SEQ ID NO: 17698 - protein, 85 aa, unidentified
  REGION 1..85: note = Description of Unknown:cds_NC_002549.1_cds_NP_066251.1_9 target sequence
KTYLRMIEMDDLFLPLIAKNPGNCTAIDFVLNPSGLNVPGSQDLTSFLRQIVRRTITLSAKNKLINTLFHASADFEDEMVCKWLL

SEQ ID NO: 17699 - protein, 85 aa, unidentified
  REGION 1..85: note = Description of Unknown:cds_NC_002549.1_cds_NP_066251.1_9 target sequence
SSTPVMSRFAADIFSRTPSGKRLQILGYLEGTRTLLASKIINNNTETPVLDRLRKITLQRWSLWFSYLDHCDNILAEALTQITCT

SEQ ID NO: 17700 - protein, 85 aa, unidentified
  REGION 1..85: note = Description of Unknown:cds_NC_002549.1_cds_NP_066251.1_9 target sequence
VDLAQILREYSWAHILEGRPLIGATLPCMIEQFKVFWLKPYEQCPQCSNAKQPGGKPFVSVAVKKHIVSAWPNASRISWTIGDGI

SEQ ID NO: 17701 - protein, 85 aa, unidentified
  REGION 1..85: note = Description of Unknown:cds_NC_002549.1_cds_NP_066251.1_9 target sequence
PYIGSRTEDKIGQPAIKPKCPSAALREAIELASRLTWVTQGSSNSDLLIKPFLEARVNLSVQEILQMTPSHYSGNIVHRYNDQYS

SEQ ID NO: 17702 - protein, 85 aa, unidentified
  REGION 1..85: note = Description of Unknown:cds_NC_002549.1_cds_NP_066251.1_9 target sequence
PHSFMANRMSNSATRLIVSTNTLGEFSGGGQSARDSNIIFQNVINYAVALFDIKFRNTEATDIQYNRAHLHLTKCCTREVPAQYL

SEQ ID NO: 17703 - protein, 85 aa, unidentified
  REGION 1..85: note = Description of Unknown:cds_NC_002549.1_cds_NP_066251.1_9 target sequence
TYTSTLDLDLTRYRENELIYDSNPLKGGLNCNISFDNPFFQGKRLNIIEDDLIRLPHLSGWELAKTIMQSIISDSNNSSTDPISS

SEQ ID NO: 17704 - protein, 85 aa, unidentified
  REGION 1..85: note = Description of Unknown:cds_NC_002549.1_cds_NP_066251.1_9 target sequence
GETRSFTTHFLTYPKIGLLYSFGAFVSYYLGNTILRTKKLTLDNFLYYLTTQIHNLPHRSLRILKPTFKHASVMSRLMSIDPHFS

SEQ ID NO: 17705 - protein, 85 aa, unidentified
  REGION 1..85: note = Description of Unknown:cds_NC_002549.1_cds_NP_066251.1_9 target sequence
IYIGGAAGDRGLSDAARLFLRTSISSFLTFVKEWIINRGTIVPLWIVYPLEGQNPTPVNNFLYQIVELLVHDSSRQQAFKTTISD

SEQ ID NO: 17706 - protein, 85 aa, unidentified
  REGION 1..85: note = Description of Unknown:cds_NC_002549.1_cds_NP_066251.1_9 target sequence
HVHPHDNLVYTCKSTASNFFHASLAYWRSRHRNSNRKYLARDSSTGSSTNNSDGHIERSQEQTTRDPHDGTERNLVLQMSHEIKR

SEQ ID NO: 17707 - protein, 85 aa, unidentified
  REGION 1..85: note = Description of Unknown:cds_NC_002549.1_cds_NP_066251.1_9 target sequence
TTIPQENTHQGPSFQSFLSDSACGTANPKLNFDRSRHNVKFQDHNSASKREGHQIISHRLVLPFFTLSQGTRQLTSSNESQTQDE

SEQ ID NO: 17708 - protein, 85 aa, unidentified
  REGION 1..85: note = Description of Unknown:cds_NC_002549.1_cds_NP_066251.1_9 target sequence
ISKYLRQLRSVIDTTVYCRFTGIVSSMHYKLDEVLWEIESFKSAVTLAEGEGAGALLLIQKYQVKTLFFNTLATESSIESEIVSG

SEQ ID NO: 17709 - protein, 85 aa, unidentified
  REGION 1..85: note = Description of Unknown:cds_NC_002549.1_cds_NP_066251.1_9 target sequence
MTTPRMLLPVMSKFHNDQIEIILNNSASQITDITNPTWFKDQRARLPKQVEVITMDAETTENINRSKLYEAVYKLILHHIDPSVL

SEQ ID NO: 17710 - protein, 85 aa, unidentified
  REGION 1..85: note = Description of Unknown:cds_NC_002549.1_cds_NP_066251.1_9 target sequence
KAVVLKVFLSDTEGMLWLNDNLAPFFATGYLIKPITSSARSSEWYLCLTNFLSTTRKMPHQNHLSCKQVILTALQLQIQRSPYWL

SEQ ID NO: 17711 - protein, 85 aa, unidentified
  REGION 1..85: note = Description of Unknown:cds_NC_002549.1_cds_NP_066251.1_9 target sequence
SHLTQYADCELHLSYIRLGFPSLEKVLYHRYNLVDSKRGPLVSITQHLAHLRAEIRELTNDYNQQRQSRTQTYHFIRTAKGRITK

SEQ ID NO: 17712 - protein, 85 aa, unidentified
  REGION 1..85: note = Description of Unknown:cds_NC_002549.1_cds_NP_066251.1_9 target sequence
LVNDYLKFFLIVQALKHNGTWQAEFKKLPELISVCNRFYHIRDCNCEERFLVQTLYLHRMQDSEVKLIERLTGLLSLFPDGLYRF

SEQ ID NO: 17713 - protein, 84 aa, unidentified
  REGION 1..84: note = Description of Unknown:cds_NC_002549.1_cds_NP_066251.1_9 target sequence
NDYLKFFLIVQALKHNGTWQAEFKKLPELISVCNRFYHIRDCNCEERFLVQTLYLHRMQDSEVKLIERLTGLLSLFPDGLYRFD

SEQ ID NO: 17714 - protein, 85 aa, unidentified
  REGION 1..85: note = Description of Unknown:cds_NC_002549.1_cds_NP_066251.1_9 target sequence
CGLYSSYSLNPQLRNCKLPKHIYRLKYDVTVTKFLSDVPVATLPIDFIVPVLLKALSGNGFCPVEPRCQQFLDEIIKYTMQDALF

SEQ ID NO: 17715 - protein, 85 aa, unidentified
  REGION 1..85: note = Description of Unknown:cds_NC_002549.1_cds_NP_066251.1_9 target sequence
LKYYLKNVGAQEDCVDEHFQEKILSSIQGNEFLHQMFFWYDLAILTRRGRLNRGNSRSTWFVHDDLIDILGYGDYVFWKIPISML

SEQ ID NO: 17716 - protein, 85 aa, unidentified
  REGION 1..85: note = Description of Unknown:cds_NC_002549.1_cds_NP_066251.1_9 target sequence
PLNTQGIPHAAMDWYQASVFKEAVQGHTHIVSVSTADVLIMCKDLITCRFNTTLISKIAEIEDPVCSDYPNFKIVSMLYQSGDYL

SEQ ID NO: 17717 - protein, 85 aa, unidentified
  REGION 1..85: note = Description of Unknown:cds_NC_002549.1_cds_NP_066251.1_9 target sequence
LSILGSDGYKIIKFLEPLCLAKIQLCSKYTERKGRFLTQMHLAVNHTLEEITEMRALKPSQAQKIREFHRTLIRLEMTPQQLCEL

SEQ ID NO: 17718 - protein, 85 aa, unidentified
  REGION 1..85: note = Description of Unknown:cds_NC_002549.1_cds_NP_066251.1_9 target sequence
FSIQKHWGHPVLHSETAIQKVKKHATVLKALRPIVIFETYCVFKYSIAKHYFDSQGSWYSVTSDRNLTPGLNSYIKRNQFPPLPM

SEQ ID NO: 17719 - protein, 85 aa, unidentified
  REGION 1..85: note = Description of Unknown:cds_NC_002549.1_cds_NP_066251.1_9 target sequence
IKELLWEFYHLDHPPLFSTKIISDLSIFIKDRATAVERTCWDAVFEPNVLGYNPPHKFSTKRVPEQFLEQENFSIENVLSYAQKL

SEQ ID NO: 17720 - protein, 85 aa, unidentified
  REGION 1..85: note = Description of Unknown:cds_NC_002549.1_cds_NP_066251.1_9 target sequence
EYLLPQYRNFSFSLKEKELNVGRTFGKLPYPTRNVQTLCEALLADGLAKAFPSNMMVVTEREQKESLLHQASWHHTSDDFGEHAT

SEQ ID NO: 17721 - protein, 85 aa, unidentified
  REGION 1..85: note = Description of Unknown:cds_NC_002549.1_cds_NP_066251.1_9 target sequence
VRGSSFVTDLEKYNLAFRYEFTAPFIEYCNRCYGVKNVFNWMHYTIPQCYMHVSDYYNPPHNLTLENRDNPPEGPSSYRGHMGGI

SEQ ID NO: 17722 - protein, 85 aa, unidentified
  REGION 1..85: note = Description of Unknown:cds_NC_002549.1_cds_NP_066251.1_9 target sequence
EGLQQKLWTSISCAQISLVEIKTGFKLRSAVMGDNQCITVLSVFPLETDADEQEQSAEDNAARVAASLAKVTSACGIFLKPDETF

SEQ ID NO: 17723 - protein, 85 aa, unidentified
  REGION 1..85: note = Description of Unknown:cds_NC_002549.1_cds_NP_066251.1_9 target sequence
VHSGFIYFGKKQYLNGVQLPQSLKTATRMAPLSDAIFDDLQGTLASIGTAFERSISETRHIFPCRITAAFHTFFSVRILQYHHLG

SEQ ID NO: 17724 - protein, 85 aa, unidentified
  REGION 1..85: note = Description of Unknown:cds_NC_002549.1_cds_NP_066251.1_9 target sequence
FNKGFDLGQLTLGKPLDFGTISLALAVPQVLGGLSFLNPEKCFYRNLGDPVTSGLFQLKTYLRMIEMDDLFLPLIAKNPGNCTAI

SEQ ID NO: 17725 - protein, 85 aa, unidentified
  REGION 1..85: note = Description of Unknown:cds_NC_002549.1_cds_NP_066251.1_9 target sequence
DFVLNPSGLNVPGSQDLTSFLRQIVRRTITLSAKNKLINTLFHASADFEDEMVCKWLLSSTPVMSRFAADIFSRTPSGKRLQILG

SEQ ID NO: 17726 - protein, 85 aa, unidentified
  REGION 1..85: note = Description of Unknown:cds_NC_002549.1_cds_NP_066251.1_9 target sequence
YLEGTRTLLASKIINNNTETPVLDRLRKITLQRWSLWFSYLDHCDNILAEALTQITCTVDLAQILREYSWAHILEGRPLIGATLP

SEQ ID NO: 17727 - protein, 85 aa, unidentified
  REGION 1..85: note = Description of Unknown:cds_NC_002549.1_cds_NP_066251.1_9 target sequence
CMIEQFKVFWLKPYEQCPQCSNAKQPGGKPFVSVAVKKHIVSAWPNASRISWTIGDGIPYIGSRTEDKIGQPAIKPKCPSAALRE

SEQ ID NO: 17728 - protein, 85 aa, unidentified
  REGION 1..85: note = Description of Unknown:cds_NC_002549.1_cds_NP_066251.1_9 target sequence
AIELASRLTWVTQGSSNSDLLIKPFLEARVNLSVQEILQMTPSHYSGNIVHRYNDQYSPHSFMANRMSNSATRLIVSTNTLGEFS

SEQ ID NO: 17729 - protein, 85 aa, unidentified
  REGION 1..85: note = Description of Unknown:cds_NC_002549.1_cds_NP_066251.1_9 target sequence
GGGQSARDSNIIFQNVINYAVALFDIKFRNTEATDIQYNRAHLHLTKCCTREVPAQYLTYTSTLDLDLTRYRENELIYDSNPLKG

SEQ ID NO: 17730 - protein, 85 aa, unidentified
  REGION 1..85: note = Description of Unknown:cds_NC_002549.1_cds_NP_066251.1_9 target sequence
GLNCNISFDNPFFQGKRLNIIEDDLIRLPHLSGWELAKTIMQSIISDSNNSSTDPISSGETRSFTTHFLTYPKIGLLYSFGAFVS

SEQ ID NO: 17731 - protein, 85 aa, unidentified
  REGION 1..85: note = Description of Unknown:cds_NC_002549.1_cds_NP_066251.1_9 target sequence
YYLGNTILRTKKLTLDNFLYYLTTQIHNLPHRSLRILKPTFKHASVMSRLMSIDPHFSIYIGGAAGDRGLSDAARLFLRTSISSF

SEQ ID NO: 17732 - protein, 85 aa, unidentified
  REGION 1..85: note = Description of Unknown:cds_NC_002549.1_cds_NP_066251.1_9 target sequence
LTFVKEWIINRGTIVPLWIVYPLEGQNPTPVNNFLYQIVELLVHDSSRQQAFKTTISDHVHPHDNLVYTCKSTASNFFHASLAYW

SEQ ID NO: 17733 - protein, 85 aa, unidentified
  REGION 1..85: note = Description of Unknown:cds_NC_002549.1_cds_NP_066251.1_9 target sequence
RSRHRNSNRKYLARDSSTGSSTNNSDGHIERSQEQTTRDPHDGTERNLVLQMSHEIKRTTIPQENTHQGPSFQSFLSDSACGTAN

SEQ ID NO: 17734 - protein, 85 aa, unidentified
  REGION 1..85: note = Description of Unknown:cds_NC_002549.1_cds_NP_066251.1_9 target sequence
PKLNFDRSRHNVKFQDHNSASKREGHQIISHRLVLPFFTLSQGTRQLTSSNESQTQDEISKYLRQLRSVIDTTVYCRFTGIVSSM

SEQ ID NO: 17735 - protein, 85 aa, unidentified
  REGION 1..85: note = Description of Unknown:cds_NC_002549.1_cds_NP_066251.1_9 target sequence
HYKLDEVLWEIESFKSAVTLAEGEGAGALLLIQKYQVKTLFFNTLATESSIESEIVSGMTTPRMLLPVMSKFHNDQIEIILNNSA

SEQ ID NO: 17736 - protein, 85 aa, unidentified
  REGION 1..85: note = Description of Unknown:cds_NC_002549.1_cds_NP_066251.1_9 target sequence
SQITDITNPTWFKDQRARLPKQVEVITMDAETTENINRSKLYEAVYKLILHHIDPSVLKAVVLKVFLSDTEGMLWLNDNLAPFFA

SEQ ID NO: 17737 - protein, 85 aa, unidentified
  REGION 1..85: note = Description of Unknown:cds_NC_002549.1_cds_NP_066251.1_9 target sequence
TGYLIKPITSSARSSEWYLCLTNFLSTTRKMPHQNHLSCKQVILTALQLQIQRSPYWLSHLTQYADCELHLSYIRLGFPSLEKVL

SEQ ID NO: 17738 - protein, 85 aa, unidentified
  REGION 1..85: note = Description of Unknown:cds_NC_002549.1_cds_NP_066251.1_9 target sequence
YHRYNLVDSKRGPLVSITQHLAHLRAEIRELTNDYNQQRQSRTQTYHFIRTAKGRITKLVNDYLKFFLIVQALKHNGTWQAEFKK

SEQ ID NO: 17739 - protein, 85 aa, unidentified
  REGION 1..85: note = Description of Unknown:cds_NC_039345.1_cds_YP_009513282.1_9 target sequence
ASSHTQYPDARLSSPIVLDQCDLVTRACGIFSAYSLNPQLKSCRLPKHIYRLRYDPTVAQFLSDVPVATLPIDYILPVLLRAISE

SEQ ID NO: 17740 - protein, 85 aa, unidentified
  REGION 1..85: note = Description of Unknown:cds_NC_039345.1_cds_YP_009513282.1_9 target sequence
GEYCPLEPRCKQFQNEILDYTLQDARFLEYYLRTTGSEEKEGNLTANPALKNVILKNEFLPQLYFWYDLAILARRGRLNRGNARS

SEQ ID NO: 17741 - protein, 85 aa, unidentified
  REGION 1..85: note = Description of Unknown:cds_NC_039345.1_cds_YP_009513282.1_9 target sequence
TWFVHDKLIDILGYGDYIFWKFPLSLLPMNENGIPHAAMDWYQRGLFQEAIQGYKYIVSVSTADVLIMCKDIVTCRFNTVLIAAV

SEQ ID NO: 17742 - protein, 85 aa, unidentified
  REGION 1..85: note = Description of Unknown:cds_NC_039345.1_cds_YP_009513282.1_9 target sequence
ARIEDHVHIDYPDVSVISTLYRAGDYLLSILGSEGYKIIKFLEPSCLAKIQLCATYTESKGRFLTQMHLAVIHTLEELLNGRNLK

SEQ ID NO: 17743 - protein, 85 aa, unidentified
  REGION 1..85: note = Description of Unknown:cds_NC_039345.1_cds_YP_009513282.1_9 target sequence
TFQLQKIREFHQIIVRLRSTPQQFCELFSIQKHWGHPILHSERAIQKVKRHATIMKALRPIVIFETYCVFKYSVAKHYFDSQGTW

SEQ ID NO: 17744 - protein, 85 aa, unidentified
  REGION 1..85: note = Description of Unknown:cds_NC_039345.1_cds_YP_009513282.1_9 target sequence
YSVTSDKALTPSLQSYIRRNQFPPLPMIKDLLWEFYHLDHPPLFSTKVISDLSIFIKDRATAVEQTCWDAVFEPNVLGYNPPYRF

SEQ ID NO: 17745 - protein, 85 aa, unidentified
  REGION 1..85: note = Description of Unknown:cds_NC_039345.1_cds_YP_009513282.1_9 target sequence
TTKRVPEQFLEQENFSIDSVLNFAQSLDYLLPQYRNFSFSLKEKELNIGRTFGKLPYLTRNVQTLCEALLADGLAKAFPSNMMVV

SEQ ID NO: 17746 - protein, 85 aa, unidentified
  REGION 1..85: note = Description of Unknown:cds_NC_039345.1_cds_YP_009513282.1_9 target sequence
TEREQKESLLHQASWHHTSDDFGEHATVRGSSFVTDLEKYNLAFRYEFTSPFIEYCNRCYGVRNVFNWMHFIIPQCYMHVSDYYN

SEQ ID NO: 17747 - protein, 85 aa, unidentified
  REGION 1..85: note = Description of Unknown:cds_NC_039345.1_cds_YP_009513282.1_9 target sequence
PPHGLSLENRETPPDGPSAYRGHLGGIEGLQQKLWTSISCSQISLVEIKTGFKLRSAVMGDNQCITVLSVFPLESDPDEQELHAE

SEQ ID NO: 17748 - protein, 85 aa, unidentified
  REGION 1..85: note = Description of Unknown:cds_NC_039345.1_cds_YP_009513282.1_9 target sequence
DNAARVAASLAKVTSACGIFLKPEETFVHSGFIYFGKKQYLNGVQLPQSLKTAARMAPLSDAIFDDLQGTLASIGTAFERSISET

SEQ ID NO: 17749 - protein, 85 aa, unidentified
  REGION 1..85: note = Description of Unknown:cds_NC_039345.1_cds_YP_009513282.1_9 target sequence
RHILPCRIAAAFHTFFSVRILQHHHLGFNKGTDLGQLAISKPLDFGTITLALAVPQVLGGLSFLNPEKCFYRNLGDPVTSGLFQL

SEQ ID NO: 17750 - protein, 85 aa, unidentified
  REGION 1..85: note = Description of Unknown:cds_NC_039345.1_cds_YP_009513282.1_9 target sequence
KKYLQMLDMEDLFLPLIAKNPGNCSAIDFVLNPSGLNVPGSQDLTSFLRQIVRRTITLSAKNSLINTLFHASADFEDEMVCKWLL

SEQ ID NO: 17751 - protein, 85 aa, unidentified
  REGION 1..85: note = Description of Unknown:cds_NC_039345.1_cds_YP_009513282.1_9 target sequence
SSNPVMSRFAADIFSRTPSGKRLQILGYLEGTRTLLASKIINNDSDTPILDRLRKITIQRWGLWFSYLDQCDQALAEALDKIHCT

SEQ ID NO: 17752 - protein, 85 aa, unidentified
  REGION 1..85: note = Description of Unknown:cds_NC_039345.1_cds_YP_009513282.1_9 target sequence
VDLAQILREYSWAHLLEGRRLIGATLPCMLEQFQVWWLKPYEQCPACNSLKDAGASPYVSAAIKQNIVSAWPNRARLSWTIGDGI

SEQ ID NO: 17753 - protein, 85 aa, unidentified
  REGION 1..85: note = Description of Unknown:cds_NC_039345.1_cds_YP_009513282.1_9 target sequence
PYIGSRTEDKIGQPAIKPRCPSAALREAIELASRLTWVTQGGANSDLLIKPFLEARVNLSVEEILQMTPSHYSGNIVHRYNDQYS

SEQ ID NO: 17754 - protein, 85 aa, unidentified
  REGION 1..85: note = Description of Unknown:cds_NC_039345.1_cds_YP_009513282.1_9 target sequence
PHSFMANRMSNSATRLIVSTNTLGEFSGGGQSARDSNIIFQNVINYAVALFDIRFRNKDPSSIPFNRAHLHLTRCCTREVPAQYL

SEQ ID NO: 17755 - protein, 85 aa, unidentified
  REGION 1..85: note = Description of Unknown:cds_NC_039345.1_cds_YP_009513282.1_9 target sequence
TYTTTLKLDLTRYKDNELIYDNDPLRGGLNCNLTFDHPLFKGERLNIIEEDLIRFPHLSGWELAKTILQSIMSDSSNSSTDPISS

SEQ ID NO: 17756 - protein, 85 aa, unidentified
  REGION 1..85: note = Description of Unknown:cds_NC_039345.1_cds_YP_009513282.1_9 target sequence
GETRSFTTHFLTYPIIGLLYSFGALTSFYLGGTIISTKKIKIEEFLYYLTTQIHNLPHRSLRVLKPTFKHASVIARLVDIDPHFS

SEQ ID NO: 17757 - protein, 85 aa, unidentified
  REGION 1..85: note = Description of Unknown:cds_NC_039345.1_cds_YP_009513282.1_9 target sequence
IYIGGSAGDRGLSDAARLFLRISIKTFIDFIQDWIIIRKVATPLWIIYPLEGHSPHPINNYLNRVISLCECQSISRKLPASNDQT

SEQ ID NO: 17758 - protein, 85 aa, unidentified
  REGION 1..85: note = Description of Unknown:cds_NC_039345.1_cds_YP_009513282.1_9 target sequence
GTMITQNLVYMCKSTASNFFHASLAYWRNRQKSQTKKRLNACATKSHKASSQKGLTTDPFNLTTTKLHTNLTPCRWRLDMGSKDP

SEQ ID NO: 17759 - protein, 85 aa, unidentified
  REGION 1..85: note = Description of Unknown:cds_NC_039345.1_cds_YP_009513282.1_9 target sequence
VRSQRAIPTEQMRSSLDNMSEENTTHSTLPNNSLAESWIHPDFSTAPDSGTRCHSRCLAVPFFAQASGRNSQNTAVSTQYISIIS

SEQ ID NO: 17760 - protein, 85 aa, unidentified
  REGION 1..85: note = Description of Unknown:cds_NC_039345.1_cds_YP_009513282.1_9 target sequence
TLLSQIKTMVDTTRYCRFTGIVSSMHYKLDEILCGLGNFPTAITLAEGEGSGALLLIQKYGTRNLFFNTLATEHSIESEIVTGST

SEQ ID NO: 17761 - protein, 85 aa, unidentified
  REGION 1..85: note = Description of Unknown:cds_NC_039345.1_cds_YP_009513282.1_9 target sequence
TPRMLLPIMERFYKDELHIILNNSASQITDITSSCWFTSQKNRLPHNVDIITMDAETIENIDRSRLYEAVKHVIVNHIDTAALRV

SEQ ID NO: 17762 - protein, 85 aa, unidentified
  REGION 1..85: note = Description of Unknown:cds_NC_039345.1_cds_YP_009513282.1_9 target sequence
VVLKVFLSDVKGMIWLNDNLAPYFGAGLLVKPITSNARSSEWYLCLTNFLTLHRVAPHQGHVSCLQVICKALHCQLRRNSYWLSH

SEQ ID NO: 17763 - protein, 85 aa, unidentified
  REGION 1..85: note = Description of Unknown:cds_NC_039345.1_cds_YP_009513282.1_9 target sequence
LMHYGSRDLHIEYINLGFPSLEKVLYHRYNLVDSGRGPLTSVMQHLVHLQSEIRELVSDYHQLRQSRTQTYHFIKTSKGRITKLV

SEQ ID NO: 17764 - protein, 84 aa, unidentified
  REGION 1..84: note = Description of Unknown:cds_NC_039345.1_cds_YP_009513282.1_9 target sequence
DDYLKYYLIIRALKHGKDWRHEFHQLPELVSVCKRFYHVKNCQCDDRFWVQTLYLSRMPESELKLLERVTGFLTLFPEGFQNPP

SEQ ID NO: 17765 - protein, 85 aa, unidentified
  REGION 1..85: note = Description of Unknown:cds_NC_039345.1_cds_YP_009513282.1_9 target sequence
CGIFSAYSLNPQLKSCRLPKHIYRLRYDPTVAQFLSDVPVATLPIDYILPVLLRAISEGEYCPLEPRCKQFQNEILDYTLQDARF

SEQ ID NO: 17766 - protein, 85 aa, unidentified
  REGION 1..85: note = Description of Unknown:cds_NC_039345.1_cds_YP_009513282.1_9 target sequence
LEYYLRTTGSEEKEGNLTANPALKNVILKNEFLPQLYFWYDLAILARRGRLNRGNARSTWFVHDKLIDILGYGDYIFWKFPLSLL

SEQ ID NO: 17767 - protein, 85 aa, unidentified
  REGION 1..85: note = Description of Unknown:cds_NC_039345.1_cds_YP_009513282.1_9 target sequence
PMNENGIPHAAMDWYQRGLFQEAIQGYKYIVSVSTADVLIMCKDIVTCRFNTVLIAAVARIEDHVHIDYPDVSVISTLYRAGDYL

SEQ ID NO: 17768 - protein, 85 aa, unidentified
  REGION 1..85: note = Description of Unknown:cds_NC_039345.1_cds_YP_009513282.1_9 target sequence
LSILGSEGYKIIKFLEPSCLAKIQLCATYTESKGRFLTQMHLAVIHTLEELLNGRNLKTFQLQKIREFHQIIVRLRSTPQQFCEL

SEQ ID NO: 17769 - protein, 85 aa, unidentified
  REGION 1..85: note = Description of Unknown:cds_NC_039345.1_cds_YP_009513282.1_9 target sequence
FSIQKHWGHPILHSERAIQKVKRHATIMKALRPIVIFETYCVFKYSVAKHYFDSQGTWYSVTSDKALTPSLQSYIRRNQFPPLPM

SEQ ID NO: 17770 - protein, 85 aa, unidentified
  REGION 1..85: note = Description of Unknown:cds_NC_039345.1_cds_YP_009513282.1_9 target sequence
IKDLLWEFYHLDHPPLFSTKVISDLSIFIKDRATAVEQTCWDAVFEPNVLGYNPPYRFTTKRVPEQFLEQENFSIDSVLNFAQSL

SEQ ID NO: 17771 - protein, 85 aa, unidentified
  REGION 1..85: note = Description of Unknown:cds_NC_039345.1_cds_YP_009513282.1_9 target sequence
DYLLPQYRNFSFSLKEKELNIGRTFGKLPYLTRNVQTLCEALLADGLAKAFPSNMMVVTEREQKESLLHQASWHHTSDDFGEHAT

SEQ ID NO: 17772 - protein, 85 aa, unidentified
  REGION 1..85: note = Description of Unknown:cds_NC_039345.1_cds_YP_009513282.1_9 target sequence
VRGSSFVTDLEKYNLAFRYEFTSPFIEYCNRCYGVRNVFNWMHFIIPQCYMHVSDYYNPPHGLSLENRETPPDGPSAYRGHLGGI

SEQ ID NO: 17773 - protein, 85 aa, unidentified
  REGION 1..85: note = Description of Unknown:cds_NC_039345.1_cds_YP_009513282.1_9 target sequence
EGLQQKLWTSISCSQISLVEIKTGFKLRSAVMGDNQCITVLSVFPLESDPDEQELHAEDNAARVAASLAKVTSACGIFLKPEETF

SEQ ID NO: 17774 - protein, 85 aa, unidentified
  REGION 1..85: note = Description of Unknown:cds_NC_039345.1_cds_YP_009513282.1_9 target sequence
VHSGFIYFGKKQYLNGVQLPQSLKTAARMAPLSDAIFDDLQGTLASIGTAFERSISETRHILPCRIAAAFHTFFSVRILQHHHLG

SEQ ID NO: 17775 - protein, 85 aa, unidentified
  REGION 1..85: note = Description of Unknown:cds_NC_039345.1_cds_YP_009513282.1_9 target sequence
FNKGTDLGQLAISKPLDFGTITLALAVPQVLGGLSFLNPEKCFYRNLGDPVTSGLFQLKKYLQMLDMEDLFLPLIAKNPGNCSAI

SEQ ID NO: 17776 - protein, 85 aa, unidentified
  REGION 1..85: note = Description of Unknown:cds_NC_039345.1_cds_YP_009513282.1_9 target sequence
DFVLNPSGLNVPGSQDLTSFLRQIVRRTITLSAKNSLINTLFHASADFEDEMVCKWLLSSNPVMSRFAADIFSRTPSGKRLQILG

SEQ ID NO: 17777 - protein, 85 aa, unidentified
  REGION 1..85: note = Description of Unknown:cds_NC_039345.1_cds_YP_009513282.1_9 target sequence
YLEGTRTLLASKIINNDSDTPILDRLRKITIQRWGLWFSYLDQCDQALAEALDKIHCTVDLAQILREYSWAHLLEGRRLIGATLP

SEQ ID NO: 17778 - protein, 85 aa, unidentified
  REGION 1..85: note = Description of Unknown:cds_NC_039345.1_cds_YP_009513282.1_9 target sequence
CMLEQFQVWWLKPYEQCPACNSLKDAGASPYVSAAIKQNIVSAWPNRARLSWTIGDGIPYIGSRTEDKIGQPAIKPRCPSAALRE

SEQ ID NO: 17779 - protein, 85 aa, unidentified
  REGION 1..85: note = Description of Unknown:cds_NC_039345.1_cds_YP_009513282.1_9 target sequence
AIELASRLTWVTQGGANSDLLIKPFLEARVNLSVEEILQMTPSHYSGNIVHRYNDQYSPHSFMANRMSNSATRLIVSTNTLGEFS

SEQ ID NO: 17780 - protein, 85 aa, unidentified
  REGION 1..85: note = Description of Unknown:cds_NC_039345.1_cds_YP_009513282.1_9 target sequence
GGGQSARDSNIIFQNVINYAVALFDIRFRNKDPSSIPFNRAHLHLTRCCTREVPAQYLTYTTTLKLDLTRYKDNELIYDNDPLRG

SEQ ID NO: 17781 - protein, 85 aa, unidentified
  REGION 1..85: note = Description of Unknown:cds_NC_039345.1_cds_YP_009513282.1_9 target sequence
GLNCNLTFDHPLFKGERLNIIEEDLIRFPHLSGWELAKTILQSIMSDSSNSSTDPISSGETRSFTTHFLTYPIIGLLYSFGALTS

SEQ ID NO: 17782 - protein, 85 aa, unidentified
  REGION 1..85: note = Description of Unknown:cds_NC_039345.1_cds_YP_009513282.1_9 target sequence
FYLGGTIISTKKIKIEEFLYYLTTQIHNLPHRSLRVLKPTFKHASVIARLVDIDPHFSIYIGGSAGDRGLSDAARLFLRISIKTF

SEQ ID NO: 17783 - protein, 85 aa, unidentified
  REGION 1..85: note = Description of Unknown:cds_NC_039345.1_cds_YP_009513282.1_9 target sequence
IDFIQDWIIIRKVATPLWIIYPLEGHSPHPINNYLNRVISLCECQSISRKLPASNDQTGTMITQNLVYMCKSTASNFFHASLAYW

SEQ ID NO: 17784 - protein, 85 aa, unidentified
  REGION 1..85: note = Description of Unknown:cds_NC_039345.1_cds_YP_009513282.1_9 target sequence
RNRQKSQTKKRLNACATKSHKASSQKGLTTDPFNLTTTKLHTNLTPCRWRLDMGSKDPVRSQRAIPTEQMRSSLDNMSEENTTHS

SEQ ID NO: 17785 - protein, 85 aa, unidentified
  REGION 1..85: note = Description of Unknown:cds_NC_039345.1_cds_YP_009513282.1_9 target sequence
TLPNNSLAESWIHPDFSTAPDSGTRCHSRCLAVPFFAQASGRNSQNTAVSTQYISIISTLLSQIKTMVDTTRYCRFTGIVSSMHY

SEQ ID NO: 17786 - protein, 85 aa, unidentified
  REGION 1..85: note = Description of Unknown:cds_NC_039345.1_cds_YP_009513282.1_9 target sequence
KLDEILCGLGNFPTAITLAEGEGSGALLLIQKYGTRNLFFNTLATEHSIESEIVTGSTTPRMLLPIMERFYKDELHIILNNSASQ

SEQ ID NO: 17787 - protein, 85 aa, unidentified
  REGION 1..85: note = Description of Unknown:cds_NC_039345.1_cds_YP_009513282.1_9 target sequence
ITDITSSCWFTSQKNRLPHNVDIITMDAETIENIDRSRLYEAVKHVIVNHIDTAALRVVVLKVFLSDVKGMIWLNDNLAPYFGAG

SEQ ID NO: 17788 - protein, 85 aa, unidentified
  REGION 1..85: note = Description of Unknown:cds_NC_039345.1_cds_YP_009513282.1_9 target sequence
LLVKPITSNARSSEWYLCLTNFLTLHRVAPHQGHVSCLQVICKALHCQLRRNSYWLSHLMHYGSRDLHIEYINLGFPSLEKVLYH

SEQ ID NO: 17789 - protein, 85 aa, unidentified
  REGION 1..85: note = Description of Unknown:cds_NC_039345.1_cds_YP_009513282.1_9 target sequence
RYNLVDSGRGPLTSVMQHLVHLQSEIRELVSDYHQLRQSRTQTYHFIKTSKGRITKLVDDYLKYYLIIRALKHGKDWRHEFHQLP

SEQ ID NO: 17790 - protein, 85 aa, unidentified
  REGION 1..85: note = Description of Unknown:cds_NC_039223.1_cds_YP_009513199.1_6 target sequence
AGSGPERAEHQIILPESHLSSPLVKHKLLYYWKLTGLPLPDECDFDHLIISRQWKRILESATPDTERMIKLGRAVHQTLNHNSKI

SEQ ID NO: 17791 - protein, 85 aa, unidentified
  REGION 1..85: note = Description of Unknown:cds_NC_039223.1_cds_YP_009513199.1_6 target sequence
TGVLHPRCLEELANIEVPDSTNKFRKIEKKIQIHNTRYGDLFTKLCTHVEKKLLGSSRSNNVPRSEEFSSIRTDPAFWFHSKWSR

SEQ ID NO: 17792 - protein, 85 aa, unidentified
  REGION 1..85: note = Description of Unknown:cds_NC_039223.1_cds_YP_009513199.1_6 target sequence
AKFAWLHIKQVQRHLIVAARTRSAVNKLVTLSHKIGHVFVTPELVIVTHTDENKFTCLTQELVLMYADMMEGRDMVNIISSTAAH

SEQ ID NO: 17793 - protein, 85 aa, unidentified
  REGION 1..85: note = Description of Unknown:cds_NC_039223.1_cds_YP_009513199.1_6 target sequence
LRNLSEKIDDILRLVDALAKDLGNQVYDVVALMEGFAYGAVQLLEPSGTFAGDFFAFNLQELKDTLIELLPNNIAESVTHAIATV

SEQ ID NO: 17794 - protein, 85 aa, unidentified
  REGION 1..85: note = Description of Unknown:cds_NC_039223.1_cds_YP_009513199.1_6 target sequence
FSGLEQNQAAEMLCLLRLWGHPLLESRSAARAVRSQTCAPKMVDFDMILQVLSFFKGTIINGYRKKNSGVWPRVKVDTIYGNIIG

SEQ ID NO: 17795 - protein, 85 aa, unidentified
  REGION 1..85: note = Description of Unknown:cds_NC_039223.1_cds_YP_009513199.1_6 target sequence
QLHADSAEISHDVMLREYKSLSALEFEPCIDYDPVTNLSMFLKDKAIAHPSDNWLASFRRNLLSEDQKKQIEEATSTNRLLIEFL

SEQ ID NO: 17796 - protein, 85 aa, unidentified
  REGION 1..85: note = Description of Unknown:cds_NC_039223.1_cds_YP_009513199.1_6 target sequence
ESNDFDPYKEMEYLTTLEYLRDDSVAVSYSLKEKEVKVNGRIFAKLTKKLRNCQVMAEGILADRIAPFFQGNGVIQDSISLTKSM

SEQ ID NO: 17797 - protein, 85 aa, unidentified
  REGION 1..85: note = Description of Unknown:cds_NC_039223.1_cds_YP_009513199.1_6 target sequence
LAMSQLSFNSNKKRIADCKERVSSNRNHDQKSKNRRRVATFITTDLQKYCLNWRYQTVKLFAHTINQLMGLPHFFEWIHLRLMDT

SEQ ID NO: 17798 - protein, 85 aa, unidentified
  REGION 1..85: note = Description of Unknown:cds_NC_039223.1_cds_YP_009513199.1_6 target sequence
TMFVGDPFNPPSDPTDCDLSRVPNDDIYIVSARGGIEGLCQKLWTMISIAAIQLAAARSHCRVACMVQGDNQVIAVTREVRSDDS

SEQ ID NO: 17799 - protein, 85 aa, unidentified
  REGION 1..85: note = Description of Unknown:cds_NC_039223.1_cds_YP_009513199.1_6 target sequence
PDMVLTQLHQASDNFFKELIHVNHLIGHNLKDRETIRSDTFFIYSKRIFKDGAILSQVLKNSSKLVLISGDLSENTVMSCANIAS

SEQ ID NO: 17800 - protein, 85 aa, unidentified
  REGION 1..85: note = Description of Unknown:cds_NC_039223.1_cds_YP_009513199.1_6 target sequence
TVARLCENGLPKDFCYYLNYLMSCVQTYFDSEFSITHSSQSDSNQSWIEDISFVHSYVLTPAQLGGLSNLQYSRLYTRNIGDPGT

SEQ ID NO: 17801 - protein, 85 aa, unidentified
  REGION 1..85: note = Description of Unknown:cds_NC_039223.1_cds_YP_009513199.1_6 target sequence
TAFAEVKRLEAVGLLSPSIMTNILTRPPGNGDWASLCNDPYSFNFETVASPSIVLKKHTQKVLFETCSNPLLSGVHTEDNEAEEK

SEQ ID NO: 17802 - protein, 85 aa, unidentified
  REGION 1..85: note = Description of Unknown:cds_NC_039223.1_cds_YP_009513199.1_6 target sequence
ALAEFLLNQEVIHPRVAHAIMEASSVGRRKQIQGLVDTTNTVIKIALTRRPLGVKRLMRIINYSSMHAMLFRDDIFLSNRSNHPL

SEQ ID NO: 17803 - protein, 85 aa, unidentified
  REGION 1..85: note = Description of Unknown:cds_NC_039223.1_cds_YP_009513199.1_6 target sequence
VSSNMCSLTLADYARNRSWSPLTGGRKILGVSNPDTIELVEGEILSVSGGCTKCDSGDEQFTWFHLPSNIELTDDTSKNPPMRVP

SEQ ID NO: 17804 - protein, 85 aa, unidentified
  REGION 1..85: note = Description of Unknown:cds_NC_039223.1_cds_YP_009513199.1_6 target sequence
YLGSKTQERRAASLAKIAHMSPHVKAALRASSVLIWAYGDNEVNWTAALNVARSRCNISSEYLRLLSPLPTAGNLQHRLDDGITQ

SEQ ID NO: 17805 - protein, 85 aa, unidentified
  REGION 1..85: note = Description of Unknown:cds_NC_039223.1_cds_YP_009513199.1_6 target sequence
MTFTPASLYRVSPYVHISNDSQRLFTEEGVKEGNVVYQQIMLLGLSLIESLFPMTTTRTYDEITLHLHSKFSCCIREAPVAVPFE

SEQ ID NO: 17806 - protein, 85 aa, unidentified
  REGION 1..85: note = Description of Unknown:cds_NC_039223.1_cds_YP_009513199.1_6 target sequence
LLGLAPELRMVTSNKFMYDPSPISERDFARLDLAIFKSYELNLESYSTLELMNILSISSGKLIGQSVVSYDEDTSIKNDATIVYD

SEQ ID NO: 17807 - protein, 85 aa, unidentified
  REGION 1..85: note = Description of Unknown:cds_NC_039223.1_cds_YP_009513199.1_6 target sequence
NTRNWISEAQNSDVVRLFEYAALEVLLDCAYQLYYLRVRGLNNIVLYMNDLYKNMPGILLSNIAATISHPIIHSRLNAVGLINHD

SEQ ID NO: 17808 - protein, 85 aa, unidentified
  REGION 1..85: note = Description of Unknown:cds_NC_039223.1_cds_YP_009513199.1_6 target sequence
GSHQLADIDFVEVSAKLLVSCTRRVVSGLYAGNKYDLLFPSVLDDNLNEKMLQLISRLCCLYTVLFATTREIPKIRGLSAEEKCS

SEQ ID NO: 17809 - protein, 85 aa, unidentified
  REGION 1..85: note = Description of Unknown:cds_NC_039223.1_cds_YP_009513199.1_6 target sequence
ILTEYLLSDAVKPLLRPEQVSSIMSPNIITFPANLYYMSRKSLNLIREREDRDTILSLLFPQEPLLELRPVRDIGARVKDPFTRQ

SEQ ID NO: 17810 - protein, 85 aa, unidentified
  REGION 1..85: note = Description of Unknown:cds_NC_039223.1_cds_YP_009513199.1_6 target sequence
PASFIQELDLSAPARYDAFTLSKVCFEHTLLNPKEDYLVRYLFRGIGTASSSWYKASHLLSVPEVRCARHGNSLYLAEGSGATMS

SEQ ID NO: 17811 - protein, 85 aa, unidentified
  REGION 1..85: note = Description of Unknown:cds_NC_039223.1_cds_YP_009513199.1_6 target sequence
LLELHIPHETIYYNTLFSNEMNPPQRHFGPTPTQFLNSVVYRNLQAEVPCKDGYVQEFCPLWRENAEESDLTSDKAVGYITSVVP

SEQ ID NO: 17812 - protein, 85 aa, unidentified
  REGION 1..85: note = Description of Unknown:cds_NC_039223.1_cds_YP_009513199.1_6 target sequence
YRSVSLLHCDIEIPPGSNQSLLDQLATNLSLIAMHSVREGGVVIIKVLYAMGYYFHLLMNLFTPCSTKGYILSNGYACRGDMECY

SEQ ID NO: 17813 - protein, 85 aa, unidentified
  REGION 1..85: note = Description of Unknown:cds_NC_039223.1_cds_YP_009513199.1_6 target sequence
LIFVMGYLGGPTFVHEVVRMAKTLIQRHGTLLSKSDEITLTKLFTSQQRRVTDILSSPLPKLMKLLRENIDAALIEAGGQPVRPF

SEQ ID NO: 17814 - protein, 85 aa, unidentified
  REGION 1..85: note = Description of Unknown:cds_NC_039223.1_cds_YP_009513199.1_6 target sequence
CAESLVSTLIDMTQTTQIIASHIDTVIRSVIYMEAEGDLADTVFLFTPYNLSTDGKKRTSLKQCTKQILEVTILGLRAKDINKVG

SEQ ID NO: 17815 - protein, 84 aa, unidentified
  REGION 1..84: note = Description of Unknown:cds_NC_039223.1_cds_YP_009513199.1_6 target sequence
DINKVGDVISLVLRGAVSLEDLIPLRTYLKRSTCPKYLKAVLGITKLKEMFTDTSLLYLTRAQQKFYMKTIGNAAKGYYSNNDS

SEQ ID NO: 17816 - protein, 85 aa, unidentified
  REGION 1..85: note = Description of Unknown:cds_NC_039223.1_cds_YP_009513199.1_6 target sequence
LLYYWKLTGLPLPDECDFDHLIISRQWKRILESATPDTERMIKLGRAVHQTLNHNSKITGVLHPRCLEELANIEVPDSTNKFRKI

SEQ ID NO: 17817 - protein, 85 aa, unidentified
  REGION 1..85: note = Description of Unknown:cds_NC_039223.1_cds_YP_009513199.1_6 target sequence
EKKIQIHNTRYGDLFTKLCTHVEKKLLGSSRSNNVPRSEEFSSIRTDPAFWFHSKWSRAKFAWLHIKQVQRHLIVAARTRSAVNK

SEQ ID NO: 17818 - protein, 85 aa, unidentified
  REGION 1..85: note = Description of Unknown:cds_NC_039223.1_cds_YP_009513199.1_6 target sequence
LVTLSHKIGHVFVTPELVIVTHTDENKFTCLTQELVLMYADMMEGRDMVNIISSTAAHLRNLSEKIDDILRLVDALAKDLGNQVY

SEQ ID NO: 17819 - protein, 85 aa, unidentified
  REGION 1..85: note = Description of Unknown:cds_NC_039223.1_cds_YP_009513199.1_6 target sequence
DVVALMEGFAYGAVQLLEPSGTFAGDFFAFNLQELKDTLIELLPNNIAESVTHAIATVFSGLEQNQAAEMLCLLRLWGHPLLESR

SEQ ID NO: 17820 - protein, 85 aa, unidentified
  REGION 1..85: note = Description of Unknown:cds_NC_039223.1_cds_YP_009513199.1_6 target sequence
SAARAVRSQTCAPKMVDFDMILQVLSFFKGTIINGYRKKNSGVWPRVKVDTIYGNIIGQLHADSAEISHDVMLREYKSLSALEFE

SEQ ID NO: 17821 - protein, 85 aa, unidentified
  REGION 1..85: note = Description of Unknown:cds_NC_039223.1_cds_YP_009513199.1_6 target sequence
PCIDYDPVTNLSMFLKDKAIAHPSDNWLASFRRNLLSEDQKKQIEEATSTNRLLIEFLESNDFDPYKEMEYLTTLEYLRDDSVAV

SEQ ID NO: 17822 - protein, 85 aa, unidentified
  REGION 1..85: note = Description of Unknown:cds_NC_039223.1_cds_YP_009513199.1_6 target sequence
SYSLKEKEVKVNGRIFAKLTKKLRNCQVMAEGILADRIAPFFQGNGVIQDSISLTKSMLAMSQLSFNSNKKRIADCKERVSSNRN

SEQ ID NO: 17823 - protein, 85 aa, unidentified
  REGION 1..85: note = Description of Unknown:cds_NC_039223.1_cds_YP_009513199.1_6 target sequence
HDQKSKNRRRVATFITTDLQKYCLNWRYQTVKLFAHTINQLMGLPHFFEWIHLRLMDTTMFVGDPFNPPSDPTDCDLSRVPNDDI

SEQ ID NO: 17824 - protein, 85 aa, unidentified
  REGION 1..85: note = Description of Unknown:cds_NC_039223.1_cds_YP_009513199.1_6 target sequence
YIVSARGGIEGLCQKLWTMISIAAIQLAAARSHCRVACMVQGDNQVIAVTREVRSDDSPDMVLTQLHQASDNFFKELIHVNHLIG

SEQ ID NO: 17825 - protein, 85 aa, unidentified
  REGION 1..85: note = Description of Unknown:cds_NC_039223.1_cds_YP_009513199.1_6 target sequence
HNLKDRETIRSDTFFIYSKRIFKDGAILSQVLKNSSKLVLISGDLSENTVMSCANIASTVARLCENGLPKDFCYYLNYLMSCVQT

SEQ ID NO: 17826 - protein, 85 aa, unidentified
  REGION 1..85: note = Description of Unknown:cds_NC_039223.1_cds_YP_009513199.1_6 target sequence
YFDSEFSITHSSQSDSNQSWIEDISFVHSYVLTPAQLGGLSNLQYSRLYTRNIGDPGTTAFAEVKRLEAVGLLSPSIMTNILTRP

SEQ ID NO: 17827 - protein, 85 aa, unidentified
  REGION 1..85: note = Description of Unknown:cds_NC_039223.1_cds_YP_009513199.1_6 target sequence
PGNGDWASLCNDPYSFNFETVASPSIVLKKHTQKVLFETCSNPLLSGVHTEDNEAEEKALAEFLLNQEVIHPRVAHAIMEASSVG

SEQ ID NO: 17828 - protein, 85 aa, unidentified
  REGION 1..85: note = Description of Unknown:cds_NC_039223.1_cds_YP_009513199.1_6 target sequence
RRKQIQGLVDTTNTVIKIALTRRPLGVKRLMRIINYSSMHAMLFRDDIFLSNRSNHPLVSSNMCSLTLADYARNRSWSPLTGGRK

SEQ ID NO: 17829 - protein, 85 aa, unidentified
  REGION 1..85: note = Description of Unknown:cds_NC_039223.1_cds_YP_009513199.1_6 target sequence
ILGVSNPDTIELVEGEILSVSGGCTKCDSGDEQFTWFHLPSNIELTDDTSKNPPMRVPYLGSKTQERRAASLAKIAHMSPHVKAA

SEQ ID NO: 17830 - protein, 85 aa, unidentified
  REGION 1..85: note = Description of Unknown:cds_NC_039223.1_cds_YP_009513199.1_6 target sequence
LRASSVLIWAYGDNEVNWTAALNVARSRCNISSEYLRLLSPLPTAGNLQHRLDDGITQMTFTPASLYRVSPYVHISNDSQRLFTE

SEQ ID NO: 17831 - protein, 85 aa, unidentified
  REGION 1..85: note = Description of Unknown:cds_NC_039223.1_cds_YP_009513199.1_6 target sequence
EGVKEGNVVYQQIMLLGLSLIESLFPMTTTRTYDEITLHLHSKFSCCIREAPVAVPFELLGLAPELRMVTSNKFMYDPSPISERD

SEQ ID NO: 17832 - protein, 85 aa, unidentified
  REGION 1..85: note = Description of Unknown:cds_NC_039223.1_cds_YP_009513199.1_6 target sequence
FARLDLAIFKSYELNLESYSTLELMNILSISSGKLIGQSVVSYDEDTSIKNDATIVYDNTRNWISEAQNSDVVRLFEYAALEVLL

SEQ ID NO: 17833 - protein, 85 aa, unidentified
  REGION 1..85: note = Description of Unknown:cds_NC_039223.1_cds_YP_009513199.1_6 target sequence
DCAYQLYYLRVRGLNNIVLYMNDLYKNMPGILLSNIAATISHPIIHSRLNAVGLINHDGSHQLADIDFVEVSAKLLVSCTRRVVS

SEQ ID NO: 17834 - protein, 85 aa, unidentified
  REGION 1..85: note = Description of Unknown:cds_NC_039223.1_cds_YP_009513199.1_6 target sequence
GLYAGNKYDLLFPSVLDDNLNEKMLQLISRLCCLYTVLFATTREIPKIRGLSAEEKCSILTEYLLSDAVKPLLRPEQVSSIMSPN

SEQ ID NO: 17835 - protein, 85 aa, unidentified
  REGION 1..85: note = Description of Unknown:cds_NC_039223.1_cds_YP_009513199.1_6 target sequence
IITFPANLYYMSRKSLNLIREREDRDTILSLLFPQEPLLELRPVRDIGARVKDPFTRQPASFIQELDLSAPARYDAFTLSKVCFE

SEQ ID NO: 17836 - protein, 85 aa, unidentified
  REGION 1..85: note = Description of Unknown:cds_NC_039223.1_cds_YP_009513199.1_6 target sequence
HTLLNPKEDYLVRYLFRGIGTASSSWYKASHLLSVPEVRCARHGNSLYLAEGSGATMSLLELHIPHETIYYNTLFSNEMNPPQRH

SEQ ID NO: 17837 - protein, 85 aa, unidentified
  REGION 1..85: note = Description of Unknown:cds_NC_039223.1_cds_YP_009513199.1_6 target sequence
FGPTPTQFLNSVVYRNLQAEVPCKDGYVQEFCPLWRENAEESDLTSDKAVGYITSVVPYRSVSLLHCDIEIPPGSNQSLLDQLAT

SEQ ID NO: 17838 - protein, 85 aa, unidentified
  REGION 1..85: note = Description of Unknown:cds_NC_039223.1_cds_YP_009513199.1_6 target sequence
NLSLIAMHSVREGGVVIIKVLYAMGYYFHLLMNLFTPCSTKGYILSNGYACRGDMECYLIFVMGYLGGPTFVHEVVRMAKTLIQR

SEQ ID NO: 17839 - protein, 85 aa, unidentified
  REGION 1..85: note = Description of Unknown:cds_NC_039223.1_cds_YP_009513199.1_6 target sequence
HGTLLSKSDEITLTKLFTSQQRRVTDILSSPLPKLMKLLRENIDAALIEAGGQPVRPFCAESLVSTLIDMTQTTQIIASHIDTVI

SEQ ID NO: 17840 - protein, 85 aa, unidentified
  REGION 1..85: note = Description of Unknown:cds_NC_039223.1_cds_YP_009513199.1_6 target sequence
RSVIYMEAEGDLADTVFLFTPYNLSTDGKKRTSLKQCTKQILEVTILGLRAKDINKVGDVISLVLRGAVSLEDLIPLRTYLKRST

SEQ ID NO: 17841 - protein, 85 aa, unidentified
  REGION 1..85: note = Description of Unknown:cds_NC_016144.1_cds_YP_004928143.1_9 target sequence
QEAQYPDARLSSPIVLDQCDLVARACNLYSNYSYNPTLKKCRLPKHIYRLQYDIAVNEFLAGVPLSTLPIDYLVPLIINANTDSI

SEQ ID NO: 17842 - protein, 85 aa, unidentified
  REGION 1..85: note = Description of Unknown:cds_NC_016144.1_cds_YP_004928143.1_9 target sequence
KIQDQPSIKNHIKDGISFALHDSGFLNYYLKTIGINTMIDLGTFHNSAKKILLNERIIDEAVTWLDLVVAARRARMNRGNTRSTW

SEQ ID NO: 17843 - protein, 85 aa, unidentified
  REGION 1..85: note = Description of Unknown:cds_NC_016144.1_cds_YP_004928143.1_9 target sequence
YASGELIDILGYGDYIFWKIPLKLLPLNKRGVPHASAPWYDPTTFKSCSEGSTVVVSISTVEVLLMIKDVAFSRMNTLLICKLAE

SEQ ID NO: 17844 - protein, 85 aa, unidentified
  REGION 1..85: note = Description of Unknown:cds_NC_016144.1_cds_YP_004928143.1_9 target sequence
LEDTLTDYPTVESLHDLYRSGDYLISLLGSTGYDIIKYLEPLCLGRIQLLSNFTPRKTWYYSQMQVALLKDLAERTKGRELTLYQ

SEQ ID NO: 17845 - protein, 85 aa, unidentified
  REGION 1..85: note = Description of Unknown:cds_NC_016144.1_cds_YP_004928143.1_9 target sequence
QTKIRSFHQILFRLKLRAQQWCELFSIQKHWGHPVLHSELAIAKVKKHGTCLKVLRPSIMFDTFCVFKYMVGKHHFDNTGHWYRV

SEQ ID NO: 17846 - protein, 85 aa, unidentified
  REGION 1..85: note = Description of Unknown:cds_NC_016144.1_cds_YP_004928143.1_9 target sequence
THDKNLTPTLKTYIQKNHFPTFRDVRKFLWEFYLVQHEDLFSTKVISDLSIFIKDRATAVESICWDAVFEPNVLGYAPPMRFITK

SEQ ID NO: 17847 - protein, 85 aa, unidentified
  REGION 1..85: note = Description of Unknown:cds_NC_016144.1_cds_YP_004928143.1_9 target sequence
RVPEQFLAQEDFSLEAVISYAEKLQYLEPVNRNFSFSLKEKELNIGRTFGKLPYLTRNLQTLCEALLADGLAKAFPSNMMVVTER

SEQ ID NO: 17848 - protein, 85 aa, unidentified
  REGION 1..85: note = Description of Unknown:cds_NC_016144.1_cds_YP_004928143.1_9 target sequence
EQKETLLHQASWHHEQGNLGDHVQVRGASFVTDLEKYNLAFRFEFTRPFIEYCNHCYNIKNAFNWMHYLIPSCYMHVSDYYNPPH

SEQ ID NO: 17849 - protein, 85 aa, unidentified
  REGION 1..85: note = Description of Unknown:cds_NC_016144.1_cds_YP_004928143.1_9 target sequence
GLTLENRGYPPEGPSSYRGHLGGIEGLQQKLWTSISCAQISLAELRSGFKTRSAVMGDNQCITVLSVFPDHYQEDLQELEAEDNA

SEQ ID NO: 17850 - protein, 85 aa, unidentified
  REGION 1..85: note = Description of Unknown:cds_NC_016144.1_cds_YP_004928143.1_9 target sequence
ARVAAILARITASCGIFLKPEETFVHSGFIYFGKKQYLNGVQLPQSLKTAARMAPLSDAIFDDLQGTLASIGTAFERAIAESRHI

SEQ ID NO: 17851 - protein, 85 aa, unidentified
  REGION 1..85: note = Description of Unknown:cds_NC_016144.1_cds_YP_004928143.1_9 target sequence
FPIRIMAAIQSYLAVKVLQENHLGFPKNTDLGVLALGKPISAKMIRLCLSIPQVLGGLSFLNPEKCFYRNLSDPVTSGLYQVKKY

SEQ ID NO: 17852 - protein, 85 aa, unidentified
  REGION 1..85: note = Description of Unknown:cds_NC_016144.1_cds_YP_004928143.1_9 target sequence
LAYIGQGDLFPLFVAKRPGDASAIDLVLNPLGLNYPGAQDLTSFLRRIVRQSITFHSKNKLINSLFHANADLEDEYLCEWLLSSE

SEQ ID NO: 17853 - protein, 85 aa, unidentified
  REGION 1..85: note = Description of Unknown:cds_NC_016144.1_cds_YP_004928143.1_9 target sequence
PVMSRFAADIFSRTPSGKRLQILGYLEGTRTLLASRNLHTNSESSLLSRLRALTTKRWQLWFSYMDQYDEDLGDVIGQLTCTLDI

SEQ ID NO: 17854 - protein, 85 aa, unidentified
  REGION 1..85: note = Description of Unknown:cds_NC_016144.1_cds_YP_004928143.1_9 target sequence
ANVLREYSWSHVLQGRRLIGATLPCVPEQFELTWLTGDKACKHCQSKLRDKKKPYVSAALVDKIISQRPSYHRLSWTIGTLTPYI

SEQ ID NO: 17855 - protein, 85 aa, unidentified
  REGION 1..85: note = Description of Unknown:cds_NC_016144.1_cds_YP_004928143.1_9 target sequence
GSRTEDKIGQSAFKPRCPSAALRETIELASRILWVTQGSSQAEDIIRPFCEARINLPVQELFKLLPSHYSGNIVHRYNDQYGPRS

SEQ ID NO: 17856 - protein, 85 aa, unidentified
  REGION 1..85: note = Description of Unknown:cds_NC_016144.1_cds_YP_004928143.1_9 target sequence
FMANRMSNTATRIIVSTNTLGPYSGGGQAARDSNIIFQNVINFAVAVLDIQNSFLDQPMSEFKHIHLHIKDCCTREVPSQYLTYK

SEQ ID NO: 17857 - protein, 85 aa, unidentified
  REGION 1..85: note = Description of Unknown:cds_NC_016144.1_cds_YP_004928143.1_9 target sequence
ANFGMNLQKYQSNELIYDKDPLRCGLTCRVSVENFFLKHHFKNSVEGELLRYPHLSAWGLANTVMTSLLADMNNASTDLISGNEV

SEQ ID NO: 17858 - protein, 85 aa, unidentified
  REGION 1..85: note = Description of Unknown:cds_NC_016144.1_cds_YP_004928143.1_9 target sequence
KSFTSQFLAYPLIGIFYSFGAITTFKLGRNLSLQKITKSQIIYYLDSQLYNLPHRALRVFKTTFQHPAVLESLLTIDPSFSFFLG

SEQ ID NO: 17859 - protein, 85 aa, unidentified
  REGION 1..85: note = Description of Unknown:cds_NC_016144.1_cds_YP_004928143.1_9 target sequence
GASGGKSVADATRLFLRLAIQVFLNFISLYSQQKIGKTLPLWVVFPLEGEPDEPILEFLSELLRALSHPLPDQEASTDTRIQPSC

SEQ ID NO: 17860 - protein, 85 aa, unidentified
  REGION 1..85: note = Description of Unknown:cds_NC_016144.1_cds_YP_004928143.1_9 target sequence
VFRSEQIYRSMSTMSNFFHASLACWRDRRQGRARGSSNVKGTILLYDIKGLLSLGWKDCSLSNAPLKNSLSSSHCSRDILEHRSR

SEQ ID NO: 17861 - protein, 85 aa, unidentified
  REGION 1..85: note = Description of Unknown:cds_NC_016144.1_cds_YP_004928143.1_9 target sequence
NITECPPLLSRRTRISQESKHARNIVQNTQHVRSATLPGDAPPDPTHRPGCLRLNVFKTEQDETGLSTEETIEQLLARLKMMPDT

SEQ ID NO: 17862 - protein, 85 aa, unidentified
  REGION 1..85: note = Description of Unknown:cds_NC_016144.1_cds_YP_004928143.1_9 target sequence
TSYCRFTGVIASMHYKLDEVLYPTNETPTVALLAEGEGSGALLLIRKYRARQIFFNTLATGNMVEAEVLMGESVPRMLLPLLPSI

SEQ ID NO: 17863 - protein, 85 aa, unidentified
  REGION 1..85: note = Description of Unknown:cds_NC_016144.1_cds_YP_004928143.1_9 target sequence
NNKEIKIFFNTSVTMKTDITDPKWFDSIEDRLPRSLDLLVMDAETIGNSIRIPLYNAVIKCIDRDKMQDKPKCVIVKLFLNDYLG

SEQ ID NO: 17864 - protein, 85 aa, unidentified
  REGION 1..85: note = Description of Unknown:cds_NC_016144.1_cds_YP_004928143.1_9 target sequence
TCWILNHITLRYNKVEIIKPLSSNARSSEWYLKAEQPVLSSELNYINVNWEGHTTKLIKKALHCQLSRQSYWVTHLMSYANLDLH

SEQ ID NO: 17865 - protein, 85 aa, unidentified
  REGION 1..85: note = Description of Unknown:cds_NC_016144.1_cds_YP_004928143.1_9 target sequence
REYIRMGFPPLTSVLHYRYHMVATESSPLLTIRRHTNLLLQEIRELVRDYFLSRCTRTQAFHFIKTQKGRITKLANDYLKWRLVL

SEQ ID NO: 17866 - protein, 84 aa, unidentified
  REGION 1..84: note = Description of Unknown:cds_NC_016144.1_cds_YP_004928143.1_9 target sequence
TKLANDYLKWRLVLSALERYTLFEQALNNIEPYIQVCILGPCNKALCSNDHLPIPLLYLTRTDQAERKLLNRLVGLVQFFPDGL

SEQ ID NO: 17867 - protein, 85 aa, unidentified
  REGION 1..85: note = Description of Unknown:cds_NC_016144.1_cds_YP_004928143.1_9 target sequence
LYSNYSYNPTLKKCRLPKHIYRLQYDIAVNEFLAGVPLSTLPIDYLVPLIINANTDSIKIQDQPSIKNHIKDGISFALHDSGFLN

SEQ ID NO: 17868 - protein, 85 aa, unidentified
  REGION 1..85: note = Description of Unknown:cds_NC_016144.1_cds_YP_004928143.1_9 target sequence
YYLKTIGINTMIDLGTFHNSAKKILLNERIIDEAVTWLDLVVAARRARMNRGNTRSTWYASGELIDILGYGDYIFWKIPLKLLPL

SEQ ID NO: 17869 - protein, 85 aa, unidentified
  REGION 1..85: note = Description of Unknown:cds_NC_016144.1_cds_YP_004928143.1_9 target sequence
NKRGVPHASAPWYDPTTFKSCSEGSTVVVSISTVEVLLMIKDVAFSRMNTLLICKLAELEDTLTDYPTVESLHDLYRSGDYLISL

SEQ ID NO: 17870 - protein, 85 aa, unidentified
  REGION 1..85: note = Description of Unknown:cds_NC_016144.1_cds_YP_004928143.1_9 target sequence
LGSTGYDIIKYLEPLCLGRIQLLSNFTPRKTWYYSQMQVALLKDLAERTKGRELTLYQQTKIRSFHQILFRLKLRAQQWCELFSI

SEQ ID NO: 17871 - protein, 85 aa, unidentified
  REGION 1..85: note = Description of Unknown:cds_NC_016144.1_cds_YP_004928143.1_9 target sequence
QKHWGHPVLHSELAIAKVKKHGTCLKVLRPSIMFDTFCVFKYMVGKHHFDNTGHWYRVTHDKNLTPTLKTYIQKNHFPTFRDVRK

SEQ ID NO: 17872 - protein, 85 aa, unidentified
  REGION 1..85: note = Description of Unknown:cds_NC_016144.1_cds_YP_004928143.1_9 target sequence
FLWEFYLVQHEDLFSTKVISDLSIFIKDRATAVESICWDAVFEPNVLGYAPPMRFITKRVPEQFLAQEDFSLEAVISYAEKLQYL

SEQ ID NO: 17873 - protein, 85 aa, unidentified
  REGION 1..85: note = Description of Unknown:cds_NC_016144.1_cds_YP_004928143.1_9 target sequence
EPVNRNFSFSLKEKELNIGRTFGKLPYLTRNLQTLCEALLADGLAKAFPSNMMVVTEREQKETLLHQASWHHEQGNLGDHVQVRG

SEQ ID NO: 17874 - protein, 85 aa, unidentified
  REGION 1..85: note = Description of Unknown:cds_NC_016144.1_cds_YP_004928143.1_9 target sequence
ASFVTDLEKYNLAFRFEFTRPFIEYCNHCYNIKNAFNWMHYLIPSCYMHVSDYYNPPHGLTLENRGYPPEGPSSYRGHLGGIEGL

SEQ ID NO: 17875 - protein, 85 aa, unidentified
  REGION 1..85: note = Description of Unknown:cds_NC_016144.1_cds_YP_004928143.1_9 target sequence
QQKLWTSISCAQISLAELRSGFKTRSAVMGDNQCITVLSVFPDHYQEDLQELEAEDNAARVAAILARITASCGIFLKPEETFVHS

SEQ ID NO: 17876 - protein, 85 aa, unidentified
  REGION 1..85: note = Description of Unknown:cds_NC_016144.1_cds_YP_004928143.1_9 target sequence
GFIYFGKKQYLNGVQLPQSLKTAARMAPLSDAIFDDLQGTLASIGTAFERAIAESRHIFPIRIMAAIQSYLAVKVLQENHLGFPK

SEQ ID NO: 17877 - protein, 85 aa, unidentified
  REGION 1..85: note = Description of Unknown:cds_NC_016144.1_cds_YP_004928143.1_9 target sequence
NTDLGVLALGKPISAKMIRLCLSIPQVLGGLSFLNPEKCFYRNLSDPVTSGLYQVKKYLAYIGQGDLFPLFVAKRPGDASAIDLV

SEQ ID NO: 17878 - protein, 85 aa, unidentified
  REGION 1..85: note = Description of Unknown:cds_NC_016144.1_cds_YP_004928143.1_9 target sequence
LNPLGLNYPGAQDLTSFLRRIVRQSITFHSKNKLINSLFHANADLEDEYLCEWLLSSEPVMSRFAADIFSRTPSGKRLQILGYLE

SEQ ID NO: 17879 - protein, 85 aa, unidentified
  REGION 1..85: note = Description of Unknown:cds_NC_016144.1_cds_YP_004928143.1_9 target sequence
GTRTLLASRNLHTNSESSLLSRLRALTTKRWQLWFSYMDQYDEDLGDVIGQLTCTLDIANVLREYSWSHVLQGRRLIGATLPCVP

SEQ ID NO: 17880 - protein, 85 aa, unidentified
  REGION 1..85: note = Description of Unknown:cds_NC_016144.1_cds_YP_004928143.1_9 target sequence
EQFELTWLTGDKACKHCQSKLRDKKKPYVSAALVDKIISQRPSYHRLSWTIGTLTPYIGSRTEDKIGQSAFKPRCPSAALRETIE

SEQ ID NO: 17881 - protein, 85 aa, unidentified
  REGION 1..85: note = Description of Unknown:cds_NC_016144.1_cds_YP_004928143.1_9 target sequence
LASRILWVTQGSSQAEDIIRPFCEARINLPVQELFKLLPSHYSGNIVHRYNDQYGPRSFMANRMSNTATRIIVSTNTLGPYSGGG

SEQ ID NO: 17882 - protein, 85 aa, unidentified
  REGION 1..85: note = Description of Unknown:cds_NC_016144.1_cds_YP_004928143.1_9 target sequence
QAARDSNIIFQNVINFAVAVLDIQNSFLDQPMSEFKHIHLHIKDCCTREVPSQYLTYKANFGMNLQKYQSNELIYDKDPLRCGLT

SEQ ID NO: 17883 - protein, 85 aa, unidentified
  REGION 1..85: note = Description of Unknown:cds_NC_016144.1_cds_YP_004928143.1_9 target sequence
CRVSVENFFLKHHFKNSVEGELLRYPHLSAWGLANTVMTSLLADMNNASTDLISGNEVKSFTSQFLAYPLIGIFYSFGAITTFKL

SEQ ID NO: 17884 - protein, 85 aa, unidentified
  REGION 1..85: note = Description of Unknown:cds_NC_016144.1_cds_YP_004928143.1_9 target sequence
GRNLSLQKITKSQIIYYLDSQLYNLPHRALRVFKTTFQHPAVLESLLTIDPSFSFFLGGASGGKSVADATRLFLRLAIQVFLNFI

SEQ ID NO: 17885 - protein, 85 aa, unidentified
  REGION 1..85: note = Description of Unknown:cds_NC_016144.1_cds_YP_004928143.1_9 target sequence
SLYSQQKIGKTLPLWVVFPLEGEPDEPILEFLSELLRALSHPLPDQEASTDTRIQPSCVFRSEQIYRSMSTMSNFFHASLACWRD

SEQ ID NO: 17886 - protein, 85 aa, unidentified
  REGION 1..85: note = Description of Unknown:cds_NC_016144.1_cds_YP_004928143.1_9 target sequence
RRQGRARGSSNVKGTILLYDIKGLLSLGWKDCSLSNAPLKNSLSSSHCSRDILEHRSRNITECPPLLSRRTRISQESKHARNIVQ

SEQ ID NO: 17887 - protein, 85 aa, unidentified
  REGION 1..85: note = Description of Unknown:cds_NC_016144.1_cds_YP_004928143.1_9 target sequence
NTQHVRSATLPGDAPPDPTHRPGCLRLNVFKTEQDETGLSTEETIEQLLARLKMMPDTTSYCRFTGVIASMHYKLDEVLYPTNET

SEQ ID NO: 17888 - protein, 85 aa, unidentified
  REGION 1..85: note = Description of Unknown:cds_NC_016144.1_cds_YP_004928143.1_9 target sequence
PTVALLAEGEGSGALLLIRKYRARQIFFNTLATGNMVEAEVLMGESVPRMLLPLLPSINNKEIKIFFNTSVTMKTDITDPKWFDS

SEQ ID NO: 17889 - protein, 85 aa, unidentified
  REGION 1..85: note = Description of Unknown:cds_NC_016144.1_cds_YP_004928143.1_9 target sequence
IEDRLPRSLDLLVMDAETIGNSIRIPLYNAVIKCIDRDKMQDKPKCVIVKLFLNDYLGTCWILNHITLRYNKVEIIKPLSSNARS

SEQ ID NO: 17890 - protein, 85 aa, unidentified
  REGION 1..85: note = Description of Unknown:cds_NC_016144.1_cds_YP_004928143.1_9 target sequence
SEWYLKAEQPVLSSELNYINVNWEGHTTKLIKKALHCQLSRQSYWVTHLMSYANLDLHREYIRMGFPPLTSVLHYRYHMVATESS

SEQ ID NO: 17891 - protein, 85 aa, unidentified
  REGION 1..85: note = Description of Unknown:cds_NC_016144.1_cds_YP_004928143.1_9 target sequence
PLLTIRRHTNLLLQEIRELVRDYFLSRCTRTQAFHFIKTQKGRITKLANDYLKWRLVLSALERYTLFEQALNNIEPYIQVCILGP

SEQ ID NO: 17892 - protein, 85 aa, unidentified
  REGION 1..85: note = Description of Unknown:cds_NC_003468.2_cds_NP_604473.1_1 target sequence
EKYREIHQRVRDLAPGTVSALECIDLLDRLYAVRHDLVDQMIKHDWSDNKDVERPIGQVLLMAGIPNDIIQGMEKKIIPNSPSGQ

SEQ ID NO: 17893 - protein, 85 aa, unidentified
  REGION 1..85: note = Description of Unknown:cds_NC_003468.2_cds_NP_604473.1_1 target sequence
VLKSFFRMTPDNYKITGNLIEFIEVTVTADVSRGIREKKIKYEGGLQFVEHLLETESRKGNIPQPYKITFSVVAVKTDGSNISTQ

SEQ ID NO: 17894 - protein, 85 aa, unidentified
  REGION 1..85: note = Description of Unknown:cds_NC_003468.2_cds_NP_604473.1_1 target sequence
WPSRRNDGVVQHMRLVQADINYVREHLIKLDERASLEAMFNLKFHVSGPKLRYFNIPDYRPQQLCEPRIDNLIQYCKNWLTKEHK

SEQ ID NO: 17895 - protein, 85 aa, unidentified
  REGION 1..85: note = Description of Unknown:cds_NC_003468.2_cds_NP_604473.1_1 target sequence
FVFKEVSGANVIQAFESHEQLHLQKYNESRKPRNFLLLQLTVQGAYLPSTISSDQCNTRIGCLEISKNQPETPVQMLALDISYKY

SEQ ID NO: 17896 - protein, 85 aa, unidentified
  REGION 1..85: note = Description of Unknown:cds_NC_003468.2_cds_NP_604473.1_1 target sequence
LSLTRDELINYYSPRVHFQSSPNVKEPGTLKLGLSQLNPLSKSILDNVGKHKKDKGLFGEIIDSINVASQIQINACAKIIEQILS

SEQ ID NO: 17897 - protein, 85 aa, unidentified
  REGION 1..85: note = Description of Unknown:cds_NC_003468.2_cds_NP_604473.1_1 target sequence
NLEINIGEINASMPSPNKTTGVDDLLNKFYDNELGKYMLSILRKTAAWHIGHLVRDITESLIAHAGLRRSKYWSVHAYDHGNVIL

SEQ ID NO: 17898 - protein, 85 aa, unidentified
  REGION 1..85: note = Description of Unknown:cds_NC_003468.2_cds_NP_604473.1_1 target sequence
FILPSKSLEVVGSYIRYFTVFKDGIGLIDADNIDSKAEIDGVTWCYSKVMSIDLNRLLALNIAFEKSLLATATWFQYYTEDQGHF

SEQ ID NO: 17899 - protein, 85 aa, unidentified
  REGION 1..85: note = Description of Unknown:cds_NC_003468.2_cds_NP_604473.1_1 target sequence
PLQHALRSIFSFHFLLCVSQKMKLCAIFDNLRYLIPSVTSLYSGYELLIEKFFERPFKSSLDVYLYSIIKSLLISLAQNNKVRFY

SEQ ID NO: 17900 - protein, 85 aa, unidentified
  REGION 1..85: note = Description of Unknown:cds_NC_003468.2_cds_NP_604473.1_1 target sequence
SRVRLLGLTVDHSTVGASGVYPSLMSRVVYKHYRSLISEATTCFFLFEKGLHGNLPEEAKIHLETIEWARKFQEKEKQYGDILLK

SEQ ID NO: 17901 - protein, 85 aa, unidentified
  REGION 1..85: note = Description of Unknown:cds_NC_003468.2_cds_NP_604473.1_1 target sequence
EGYTIESVINGEVDVEQQLFCQEVSELSAQELNKYLQAKSQVLCANIMNKHWDKPYFSQTRNISLKGMSGALQEDGHLAASVTLI

SEQ ID NO: 17902 - protein, 85 aa, unidentified
  REGION 1..85: note = Description of Unknown:cds_NC_003468.2_cds_NP_604473.1_1 target sequence
EAIRFLNRSQTNPNVIDMYEQTKQSKAQARIVRKYQRTEADRGFFITTLPTRVRLEIIEDYFDAIAKVVPEEYISYGGDKKVLNI

SEQ ID NO: 17903 - protein, 85 aa, unidentified
  REGION 1..85: note = Description of Unknown:cds_NC_003468.2_cds_NP_604473.1_1 target sequence
QNALEKALRWASGVSEITTSTGKSIKFKRKLMYVSADATKWSPGDNSAKFRRFTQAIYDGLSDNKLKCCVVDALRNIYETEFFMS

SEQ ID NO: 17904 - protein, 85 aa, unidentified
  REGION 1..85: note = Description of Unknown:cds_NC_003468.2_cds_NP_604473.1_1 target sequence
RKLHRYIDSMENHSDAVEDFLAFFSNGVSANVKGNWLQGNLNKCSSLFGAAVSLLFREVWKQLFPELECFFEFAHHSDDALFIYG

SEQ ID NO: 17905 - protein, 85 aa, unidentified
  REGION 1..85: note = Description of Unknown:cds_NC_003468.2_cds_NP_604473.1_1 target sequence
YLEPEDDGTDWFLYVSQQIQAGNFHWHAINQEMWKSMFNLHEHLLLMGSIKVSPKKTTVSPTNAEFLSTFFEGCAVSIPFVKILL

SEQ ID NO: 17906 - protein, 85 aa, unidentified
  REGION 1..85: note = Description of Unknown:cds_NC_003468.2_cds_NP_604473.1_1 target sequence
GSLSDLPGLGFFDDLAAAQSRCVKSLDLGACPQLAQLAIVLCTSKVERLYGTADGMVNSPTAFLKVNKAHVPVPLGGDGSMSIME

SEQ ID NO: 17907 - protein, 85 aa, unidentified
  REGION 1..85: note = Description of Unknown:cds_NC_003468.2_cds_NP_604473.1_1 target sequence
LATAGFGMADKNILKNAFISYKHTRRDGDRYVLGLFKFLMSLSEDVFQHDRLGEFSFVGKVQWKVFTPKAEFEFHDQFSHNYLLE

SEQ ID NO: 17908 - protein, 85 aa, unidentified
  REGION 1..85: note = Description of Unknown:cds_NC_003468.2_cds_NP_604473.1_1 target sequence
WTRQHPVYDYIIPRNRDNLLVYLVRKLNDPSIITAMTMQSPLQLRFRMQAKQHMKVCRYEGEWVTFREVLAAADSFATSYQPTER

SEQ ID NO: 17909 - protein, 85 aa, unidentified
  REGION 1..85: note = Description of Unknown:cds_NC_003468.2_cds_NP_604473.1_1 target sequence
DMDLFNTLVSCTFSKEYAWKDFLNEVRCEVLTTRHVHRPKIARTFTVREKDQAIQNPINSVIGYKYALTVDEVSDVLDSAFFPES

SEQ ID NO: 17910 - protein, 85 aa, unidentified
  REGION 1..85: note = Description of Unknown:cds_NC_003468.2_cds_NP_604473.1_1 target sequence
LSADLQVMKDGVYRELGLDISSPEVLKRIAPLLYKAGRSRVVIVEGNVEGTAESICSYWLKTMSLIKTIRVRPKKEVLKAMSLYS

SEQ ID NO: 17911 - protein, 85 aa, unidentified
  REGION 1..85: note = Description of Unknown:cds_NC_003468.2_cds_NP_604473.1_1 target sequence
VKENIGLQDDIAATRLCIEIWRWCKANEQDVKEWLTSLYFEKQTLMDWVERFRRKGVVPIDPEIQCIGLLLYDVLGYKSVLQMQA

SEQ ID NO: 17912 - protein, 85 aa, unidentified
  REGION 1..85: note = Description of Unknown:cds_NC_003468.2_cds_NP_604473.1_1 target sequence
NRRAYSGKQYDAYCVQTYNEETKLYEGDLRVTFNFGLDCARLEVFWDKKEYILETSITQRHVLRLLMEEVSQELIRCGMRFKTEQ

SEQ ID NO: 17913 - protein, 85 aa, unidentified
  REGION 1..85: note = Description of Unknown:cds_NC_003468.2_cds_NP_604473.1_1 target sequence
VNQTRSLVLFKTEAGFEWGKPNVPCIVYKHCVLRTGLRTKQPINKEFMINVQSDGFRAIAQMDIESPRFLLAHAYHTLRDIRYQA

SEQ ID NO: 17914 - protein, 85 aa, unidentified
  REGION 1..85: note = Description of Unknown:cds_NC_003468.2_cds_NP_604473.1_1 target sequence
VQAVGNVWFKTEQHKLFINPIISSGLLENFMKGLPAAIPPAAYSLIMNKAKISVDLFMFNELLALINRNNILNLDGIEETSEGYS

SEQ ID NO: 17915 - protein, 85 aa, unidentified
  REGION 1..85: note = Description of Unknown:cds_NC_003468.2_cds_NP_604473.1_1 target sequence
TVTSMSSKQWSEEMSLMSDDDIDDMEDFTIALDDIDFEQINLEEDIQHFLQDESAYVGDLLIQTEDIEVKKIRGVTRVLEPVKLL

SEQ ID NO: 17916 - protein, 85 aa, unidentified
  REGION 1..85: note = Description of Unknown:cds_NC_003468.2_cds_NP_604473.1_1 target sequence
KSWVSKGLAIDKVYNPIGIILMARYMSKTYNFSSTPLALLNPYDLTELESVVKGWGETVNDRFKDLDIEAQTVVKEKGVQPEDVL

SEQ ID NO: 17917 - protein, 84 aa, unidentified
  REGION 1..84: note = Description of Unknown:cds_NC_003468.2_cds_NP_604473.1_1 target sequence
TYNFSSTPLALLNPYDLTELESVVKGWGETVNDRFKDLDIEAQTVVKEKGVQPEDVLPDSLFSFRHVDVLLRRLFPRDPVSTFY

SEQ ID NO: 17918 - protein, 85 aa, unidentified
  REGION 1..85: note = Description of Unknown:cds_NC_003468.2_cds_NP_604473.1_1 target sequence
DRLYAVRHDLVDQMIKHDWSDNKDVERPIGQVLLMAGIPNDIIQGMEKKIIPNSPSGQVLKSFFRMTPDNYKITGNLIEFIEVTV

SEQ ID NO: 17919 - protein, 85 aa, unidentified
  REGION 1..85: note = Description of Unknown:cds_NC_003468.2_cds_NP_604473.1_1 target sequence
TADVSRGIREKKIKYEGGLQFVEHLLETESRKGNIPQPYKITFSVVAVKTDGSNISTQWPSRRNDGVVQHMRLVQADINYVREHL

SEQ ID NO: 17920 - protein, 85 aa, unidentified
  REGION 1..85: note = Description of Unknown:cds_NC_003468.2_cds_NP_604473.1_1 target sequence
IKLDERASLEAMFNLKFHVSGPKLRYFNIPDYRPQQLCEPRIDNLIQYCKNWLTKEHKFVFKEVSGANVIQAFESHEQLHLQKYN

SEQ ID NO: 17921 - protein, 85 aa, unidentified
  REGION 1..85: note = Description of Unknown:cds_NC_003468.2_cds_NP_604473.1_1 target sequence
ESRKPRNFLLLQLTVQGAYLPSTISSDQCNTRIGCLEISKNQPETPVQMLALDISYKYLSLTRDELINYYSPRVHFQSSPNVKEP

SEQ ID NO: 17922 - protein, 85 aa, unidentified
  REGION 1..85: note = Description of Unknown:cds_NC_003468.2_cds_NP_604473.1_1 target sequence
GTLKLGLSQLNPLSKSILDNVGKHKKDKGLFGEIIDSINVASQIQINACAKIIEQILSNLEINIGEINASMPSPNKTTGVDDLLN

SEQ ID NO: 17923 - protein, 85 aa, unidentified
  REGION 1..85: note = Description of Unknown:cds_NC_003468.2_cds_NP_604473.1_1 target sequence
KFYDNELGKYMLSILRKTAAWHIGHLVRDITESLIAHAGLRRSKYWSVHAYDHGNVILFILPSKSLEVVGSYIRYFTVFKDGIGL

SEQ ID NO: 17924 - protein, 85 aa, unidentified
  REGION 1..85: note = Description of Unknown:cds_NC_003468.2_cds_NP_604473.1_1 target sequence
IDADNIDSKAEIDGVTWCYSKVMSIDLNRLLALNIAFEKSLLATATWFQYYTEDQGHFPLQHALRSIFSFHFLLCVSQKMKLCAI

SEQ ID NO: 17925 - protein, 85 aa, unidentified
  REGION 1..85: note = Description of Unknown:cds_NC_003468.2_cds_NP_604473.1_1 target sequence
FDNLRYLIPSVTSLYSGYELLIEKFFERPFKSSLDVYLYSIIKSLLISLAQNNKVRFYSRVRLLGLTVDHSTVGASGVYPSLMSR

SEQ ID NO: 17926 - protein, 85 aa, unidentified
  REGION 1..85: note = Description of Unknown:cds_NC_003468.2_cds_NP_604473.1_1 target sequence
VVYKHYRSLISEATTCFFLFEKGLHGNLPEEAKIHLETIEWARKFQEKEKQYGDILLKEGYTIESVINGEVDVEQQLFCQEVSEL

SEQ ID NO: 17927 - protein, 85 aa, unidentified
  REGION 1..85: note = Description of Unknown:cds_NC_003468.2_cds_NP_604473.1_1 target sequence
SAQELNKYLQAKSQVLCANIMNKHWDKPYFSQTRNISLKGMSGALQEDGHLAASVTLIEAIRFLNRSQTNPNVIDMYEQTKQSKA

SEQ ID NO: 17928 - protein, 85 aa, unidentified
  REGION 1..85: note = Description of Unknown:cds_NC_003468.2_cds_NP_604473.1_1 target sequence
QARIVRKYQRTEADRGFFITTLPTRVRLEIIEDYFDAIAKVVPEEYISYGGDKKVLNIQNALEKALRWASGVSEITTSTGKSIKF

SEQ ID NO: 17929 - protein, 85 aa, unidentified
  REGION 1..85: note = Description of Unknown:cds_NC_003468.2_cds_NP_604473.1_1 target sequence
KRKLMYVSADATKWSPGDNSAKFRRFTQAIYDGLSDNKLKCCVVDALRNIYETEFFMSRKLHRYIDSMENHSDAVEDFLAFFSNG

SEQ ID NO: 17930 - protein, 85 aa, unidentified
  REGION 1..85: note = Description of Unknown:cds_NC_003468.2_cds_NP_604473.1_1 target sequence
VSANVKGNWLQGNLNKCSSLFGAAVSLLFREVWKQLFPELECFFEFAHHSDDALFIYGYLEPEDDGTDWFLYVSQQIQAGNFHWH

SEQ ID NO: 17931 - protein, 85 aa, unidentified
  REGION 1..85: note = Description of Unknown:cds_NC_003468.2_cds_NP_604473.1_1 target sequence
AINQEMWKSMFNLHEHLLLMGSIKVSPKKTTVSPTNAEFLSTFFEGCAVSIPFVKILLGSLSDLPGLGFFDDLAAAQSRCVKSLD

SEQ ID NO: 17932 - protein, 85 aa, unidentified
  REGION 1..85: note = Description of Unknown:cds_NC_003468.2_cds_NP_604473.1_1 target sequence
LGACPQLAQLAIVLCTSKVERLYGTADGMVNSPTAFLKVNKAHVPVPLGGDGSMSIMELATAGFGMADKNILKNAFISYKHTRRD

SEQ ID NO: 17933 - protein, 85 aa, unidentified
  REGION 1..85: note = Description of Unknown:cds_NC_003468.2_cds_NP_604473.1_1 target sequence
GDRYVLGLFKFLMSLSEDVFQHDRLGEFSFVGKVQWKVFTPKAEFEFHDQFSHNYLLEWTRQHPVYDYIIPRNRDNLLVYLVRKL

SEQ ID NO: 17934 - protein, 85 aa, unidentified
  REGION 1..85: note = Description of Unknown:cds_NC_003468.2_cds_NP_604473.1_1 target sequence
NDPSIITAMTMQSPLQLRFRMQAKQHMKVCRYEGEWVTFREVLAAADSFATSYQPTERDMDLFNTLVSCTFSKEYAWKDFLNEVR

SEQ ID NO: 17935 - protein, 85 aa, unidentified
  REGION 1..85: note = Description of Unknown:cds_NC_003468.2_cds_NP_604473.1_1 target sequence
CEVLTTRHVHRPKIARTFTVREKDQAIQNPINSVIGYKYALTVDEVSDVLDSAFFPESLSADLQVMKDGVYRELGLDISSPEVLK

SEQ ID NO: 17936 - protein, 85 aa, unidentified
  REGION 1..85: note = Description of Unknown:cds_NC_003468.2_cds_NP_604473.1_1 target sequence
RIAPLLYKAGRSRVVIVEGNVEGTAESICSYWLKTMSLIKTIRVRPKKEVLKAMSLYSVKENIGLQDDIAATRLCIEIWRWCKAN

SEQ ID NO: 17937 - protein, 85 aa, unidentified
  REGION 1..85: note = Description of Unknown:cds_NC_003468.2_cds_NP_604473.1_1 target sequence
EQDVKEWLTSLYFEKQTLMDWVERFRRKGVVPIDPEIQCIGLLLYDVLGYKSVLQMQANRRAYSGKQYDAYCVQTYNEETKLYEG

SEQ ID NO: 17938 - protein, 85 aa, unidentified
  REGION 1..85: note = Description of Unknown:cds_NC_003468.2_cds_NP_604473.1_1 target sequence
DLRVTFNFGLDCARLEVFWDKKEYILETSITQRHVLRLLMEEVSQELIRCGMRFKTEQVNQTRSLVLFKTEAGFEWGKPNVPCIV

SEQ ID NO: 17939 - protein, 85 aa, unidentified
  REGION 1..85: note = Description of Unknown:cds_NC_003468.2_cds_NP_604473.1_1 target sequence
YKHCVLRTGLRTKQPINKEFMINVQSDGFRAIAQMDIESPRFLLAHAYHTLRDIRYQAVQAVGNVWFKTEQHKLFINPIISSGLL

SEQ ID NO: 17940 - protein, 85 aa, unidentified
  REGION 1..85: note = Description of Unknown:cds_NC_003468.2_cds_NP_604473.1_1 target sequence
ENFMKGLPAAIPPAAYSLIMNKAKISVDLFMFNELLALINRNNILNLDGIEETSEGYSTVTSMSSKQWSEEMSLMSDDDIDDMED

SEQ ID NO: 17941 - protein, 85 aa, unidentified
  REGION 1..85: note = Description of Unknown:cds_NC_003468.2_cds_NP_604473.1_1 target sequence
FTIALDDIDFEQINLEEDIQHFLQDESAYVGDLLIQTEDIEVKKIRGVTRVLEPVKLLKSWVSKGLAIDKVYNPIGIILMARYMS

SEQ ID NO: 17942 - protein, 85 aa, unidentified
  REGION 1..85: note = Description of Unknown:cds_NC_003468.2_cds_NP_604473.1_1 target sequence
KTYNFSSTPLALLNPYDLTELESVVKGWGETVNDRFKDLDIEAQTVVKEKGVQPEDVLPDSLFSFRHVDVLLRRLFPRDPVSTFY

SEQ ID NO: 17943 - protein, 85 aa, unidentified
  REGION 1..85: note = Description of Unknown:cds_NC_005238.1_cds_NP_942558.1_1 target sequence
EKYREIHRDLKEFTINSLTAVECMDYLDRLYAVRHDIVDQMIKHEWSDNKDSEEPISKVLLFAGIPNNVITALEKKVIPDHPSGK

SEQ ID NO: 17944 - protein, 85 aa, unidentified
  REGION 1..85: note = Description of Unknown:cds_NC_005238.1_cds_NP_942558.1_1 target sequence
TLRSFFKMTPDNYRITGSLIEFVEVTVTADVDKGIREKKMKYELGLKYLEQELMTFFHRGELQNPYKITFKVVAVRTDGSNISTQ

SEQ ID NO: 17945 - protein, 85 aa, unidentified
  REGION 1..85: note = Description of Unknown:cds_NC_005238.1_cds_NP_942558.1_1 target sequence
WPSARNDGVVQYMRLVQAEISYVREHLVKTEERAALEAMFNLKFNISSLKTQPYFIPEYKGIDLIRPDIDGLVNYAQSWMSKTQE

SEQ ID NO: 17946 - protein, 85 aa, unidentified
  REGION 1..85: note = Description of Unknown:cds_NC_005238.1_cds_NP_942558.1_1 target sequence
FSFFEVKGSAVFDCFNENEQGHIVKYPMSRHPRNFLLIQCTVLTAYKPATILSDQLDSRRACIQFLNLIPETPASILAHDMAHRY

SEQ ID NO: 17947 - protein, 85 aa, unidentified
  REGION 1..85: note = Description of Unknown:cds_NC_005238.1_cds_NP_942558.1_1 target sequence
INLTRDDLLAYYAPRIQFNPTQNIKEPGTFKLTSNMMRPESKIMLDMLSQHEPRENLGKSIESLNISSHIVQSDCVSLITKILSD

SEQ ID NO: 17948 - protein, 85 aa, unidentified
  REGION 1..85: note = Description of Unknown:cds_NC_005238.1_cds_NP_942558.1_1 target sequence
LELNISEPSSHEQITAKHTHVDTVLDKFFQNETQKYLIDILKKTTAWHIGHLVRDITESLIAHSGLRRSKYWSIHAYNNGSVILF

SEQ ID NO: 17949 - protein, 85 aa, unidentified
  REGION 1..85: note = Description of Unknown:cds_NC_005238.1_cds_NP_942558.1_1 target sequence
ILPSKSLEVAGSFVRFMTAFKLGPGLVDKDNLDSILADGDILWGVSKIMSLDLNRLLALNIAFEKALLATATWFQYYTEDQSQFP

SEQ ID NO: 17950 - protein, 85 aa, unidentified
  REGION 1..85: note = Description of Unknown:cds_NC_005238.1_cds_NP_942558.1_1 target sequence
LQHSIRSVFAYHFLLAICQKMKLCAIFDNLRYLIPAVTSLYSGFPSLVEKLFERPFKSALEVYVYYNIKSLLVALAQNNKARFYS

SEQ ID NO: 17951 - protein, 85 aa, unidentified
  REGION 1..85: note = Description of Unknown:cds_NC_005238.1_cds_NP_942558.1_1 target sequence
KVKLLGLTVDQSTVGASGIYPSFMSRVVYKHYKSLISEVTTCFFLFEKGLHGNVNEEAKIHLETVEWATKFKEKEDKYGEMLVEH

SEQ ID NO: 17952 - protein, 85 aa, unidentified
  REGION 1..85: note = Description of Unknown:cds_NC_005238.1_cds_NP_942558.1_1 target sequence
GYTIGELVESSELAVQQLYCQDAVELAANELNRVLIAKSQVVANSILNKYWEEPYFSQTRNISLKGMSGQVQEDGHLSSSTTIIE

SEQ ID NO: 17953 - protein, 85 aa, unidentified
  REGION 1..85: note = Description of Unknown:cds_NC_005238.1_cds_NP_942558.1_1 target sequence
AIRYLSNSRNNPNVLQLYEETRHQKAQARIVRKFQRTEADRGFFITTLPTRCRLEIIEDYYDAISKNVAEEYISYGGERKILCIQ

SEQ ID NO: 17954 - protein, 85 aa, unidentified
  REGION 1..85: note = Description of Unknown:cds_NC_005238.1_cds_NP_942558.1_1 target sequence
AALEKALRWASGESFIELSNGKFIRMKRKLMYVSADATKWSPGDNSAKFRRFTAALHNGLPDDRLKNCVIDALRHVYKTDFYMSR

SEQ ID NO: 17955 - protein, 85 aa, unidentified
  REGION 1..85: note = Description of Unknown:cds_NC_005238.1_cds_NP_942558.1_1 target sequence
KLRHYIDSMDTYEPHVRDFLNFFPDGHHGEVRGNWLQGNLNKCSSLFGVAMSLLFKEIWTRLFPELDCFFEFAHHSDDALFIYGY

SEQ ID NO: 17956 - protein, 85 aa, unidentified
  REGION 1..85: note = Description of Unknown:cds_NC_005238.1_cds_NP_942558.1_1 target sequence
LEPADDGTDWFLFVSQQIQAGKLHWFNVNTEMWKSMFNLHEHILLLGSIKISPKKTTLSPTNAEFLSTFFEGCAVSIPFIKILLG

SEQ ID NO: 17957 - protein, 85 aa, unidentified
  REGION 1..85: note = Description of Unknown:cds_NC_005238.1_cds_NP_942558.1_1 target sequence
SLSDLPGLGYFDDLAAAQTRCVKAMDLGASPQISQLAVSLSTSKVERLYGTSIGMVNYPGTYLRTKHSETPIPLGGSGAMSIMEL

SEQ ID NO: 17958 - protein, 85 aa, unidentified
  REGION 1..85: note = Description of Unknown:cds_NC_005238.1_cds_NP_942558.1_1 target sequence
STAGIGMSDKNLLKQALIGYMHKHQKQMSYILGLFKFLMDLSGETFQHERLGQFSFIGKVQWKIFTPKSEFEFSDMYSQKFLKVW

SEQ ID NO: 17959 - protein, 85 aa, unidentified
  REGION 1..85: note = Description of Unknown:cds_NC_005238.1_cds_NP_942558.1_1 target sequence
SEQHPTYDYIIPKGRDNLLIYLVRKLNDPSIITAMTMQSPLQLRFRMQAKQHMKVCRLDGDWVTFREVLAAANSFAESYEPSQND

SEQ ID NO: 17960 - protein, 85 aa, unidentified
  REGION 1..85: note = Description of Unknown:cds_NC_005238.1_cds_NP_942558.1_1 target sequence
IDLFQTLTSCTFSKEYAWKDFLNNVHCDVIPTKQVQRAKVARTFTVREKDRIIQNSIPAVIGYKFAVTVDEMSDVLDTAKFPDSL

SEQ ID NO: 17961 - protein, 85 aa, unidentified
  REGION 1..85: note = Description of Unknown:cds_NC_005238.1_cds_NP_942558.1_1 target sequence
AVDLKTMKDGVYRELGLDISSPDVMKKVAPMLYKSAKSRVVIVQGNVEGTAEAICAYWLRNMSLIKTIKVKPHKEVLQAVSIFNR

SEQ ID NO: 17962 - protein, 85 aa, unidentified
  REGION 1..85: note = Description of Unknown:cds_NC_005238.1_cds_NP_942558.1_1 target sequence
KEDIGQQKDLSALKLCIEVWRWAKANNAPYRDWFHALWFEDKTFSEWLDRFIRVGVPPIDPEIQCAALMIADVKGDRSVLQLQAN

SEQ ID NO: 17963 - protein, 85 aa, unidentified
  REGION 1..85: note = Description of Unknown:cds_NC_005238.1_cds_NP_942558.1_1 target sequence
RRAYSGKQYDAYCVQTYNEETKLYEGDLRVTFNFGLDCARLEIFWDKKTYILETSITQKHVLKIMMEEVSKELVRCGMRFNTEQV

SEQ ID NO: 17964 - protein, 85 aa, unidentified
  REGION 1..85: note = Description of Unknown:cds_NC_005238.1_cds_NP_942558.1_1 target sequence
NGVKHLVLFKTDSGFEWGKPNIPCIVYKNCALRTGLRTNQAINHKFMITIKDDGLRAIAQYDEDSPRFLLAHAFHTIRDVRYQAV

SEQ ID NO: 17965 - protein, 85 aa, unidentified
  REGION 1..85: note = Description of Unknown:cds_NC_005238.1_cds_NP_942558.1_1 target sequence
DAVSNVWFTHKGIKLYLNPIISSGLLEYFMKNIPAAIPPAAYSLIMNRAKISVDLFMFNDLLRLINPGNTLDLSGLEITGEGYST

SEQ ID NO: 17966 - protein, 85 aa, unidentified
  REGION 1..85: note = Description of Unknown:cds_NC_005238.1_cds_NP_942558.1_1 target sequence
VNSLSSRLWSEEMSLVDDEEEMDDEFTIDLQDVDFENIDIEADVEHFLQDESAYTGDLLIMSEETEVKKMRGIIKLLEPVKLIKS

SEQ ID NO: 17967 - protein, 85 aa, unidentified
  REGION 1..85: note = Description of Unknown:cds_NC_005238.1_cds_NP_942558.1_1 target sequence
WVSRGLSIEKVYNPVNIILMTRYISKNFNFSGKQVSLLDPYDLTELESIVKGWGESVVDQFDSLDLEAQNLVQKQGIVPEDVIPD

SEQ ID NO: 17968 - protein, 84 aa, unidentified
  REGION 1..84: note = Description of Unknown:cds_NC_005238.1_cds_NP_942558.1_1 target sequence
NFNFSGKQVSLLDPYDLTELESIVKGWGESVVDQFDSLDLEAQNLVQKQGIVPEDVIPDSLFSFRHTMVLLRRLFGQDSVSTFY

SEQ ID NO: 17969 - protein, 85 aa, unidentified
  REGION 1..85: note = Description of Unknown:cds_NC_005238.1_cds_NP_942558.1_1 target sequence
DRLYAVRHDIVDQMIKHEWSDNKDSEEPISKVLLFAGIPNNVITALEKKVIPDHPSGKTLRSFFKMTPDNYRITGSLIEFVEVTV

SEQ ID NO: 17970 - protein, 85 aa, unidentified
  REGION 1..85: note = Description of Unknown:cds_NC_005238.1_cds_NP_942558.1_1 target sequence
TADVDKGIREKKMKYELGLKYLEQELMTFFHRGELQNPYKITFKVVAVRTDGSNISTQWPSARNDGVVQYMRLVQAEISYVREHL

SEQ ID NO: 17971 - protein, 85 aa, unidentified
  REGION 1..85: note = Description of Unknown:cds_NC_005238.1_cds_NP_942558.1_1 target sequence
VKTEERAALEAMFNLKFNISSLKTQPYFIPEYKGIDLIRPDIDGLVNYAQSWMSKTQEFSFFEVKGSAVFDCFNENEQGHIVKYP

SEQ ID NO: 17972 - protein, 85 aa, unidentified
  REGION 1..85: note = Description of Unknown:cds_NC_005238.1_cds_NP_942558.1_1 target sequence
MSRHPRNFLLIQCTVLTAYKPATILSDQLDSRRACIQFLNLIPETPASILAHDMAHRYINLTRDDLLAYYAPRIQFNPTQNIKEP

SEQ ID NO: 17973 - protein, 85 aa, unidentified
  REGION 1..85: note = Description of Unknown:cds_NC_005238.1_cds_NP_942558.1_1 target sequence
GTFKLTSNMMRPESKIMLDMLSQHEPRENLGKSIESLNISSHIVQSDCVSLITKILSDLELNISEPSSHEQITAKHTHVDTVLDK

SEQ ID NO: 17974 - protein, 85 aa, unidentified
  REGION 1..85: note = Description of Unknown:cds_NC_005238.1_cds_NP_942558.1_1 target sequence
FFQNETQKYLIDILKKTTAWHIGHLVRDITESLIAHSGLRRSKYWSIHAYNNGSVILFILPSKSLEVAGSFVRFMTAFKLGPGLV

SEQ ID NO: 17975 - protein, 85 aa, unidentified
  REGION 1..85: note = Description of Unknown:cds_NC_005238.1_cds_NP_942558.1_1 target sequence
DKDNLDSILADGDILWGVSKIMSLDLNRLLALNIAFEKALLATATWFQYYTEDQSQFPLQHSIRSVFAYHFLLAICQKMKLCAIF

SEQ ID NO: 17976 - protein, 85 aa, unidentified
  REGION 1..85: note = Description of Unknown:cds_NC_005238.1_cds_NP_942558.1_1 target sequence
DNLRYLIPAVTSLYSGFPSLVEKLFERPFKSALEVYVYYNIKSLLVALAQNNKARFYSKVKLLGLTVDQSTVGASGIYPSFMSRV

SEQ ID NO: 17977 - protein, 85 aa, unidentified
  REGION 1..85: note = Description of Unknown:cds_NC_005238.1_cds_NP_942558.1_1 target sequence
VYKHYKSLISEVTTCFFLFEKGLHGNVNEEAKIHLETVEWATKFKEKEDKYGEMLVEHGYTIGELVESSELAVQQLYCQDAVELA

SEQ ID NO: 17978 - protein, 85 aa, unidentified
  REGION 1..85: note = Description of Unknown:cds_NC_005238.1_cds_NP_942558.1_1 target sequence
ANELNRVLIAKSQVVANSILNKYWEEPYFSQTRNISLKGMSGQVQEDGHLSSSTTIIEAIRYLSNSRNNPNVLQLYEETRHQKAQ

SEQ ID NO: 17979 - protein, 85 aa, unidentified
  REGION 1..85: note = Description of Unknown:cds_NC_005238.1_cds_NP_942558.1_1 target sequence
ARIVRKFQRTEADRGFFITTLPTRCRLEIIEDYYDAISKNVAEEYISYGGERKILCIQAALEKALRWASGESFIELSNGKFIRMK

SEQ ID NO: 17980 - protein, 85 aa, unidentified
  REGION 1..85: note = Description of Unknown:cds_NC_005238.1_cds_NP_942558.1_1 target sequence
RKLMYVSADATKWSPGDNSAKFRRFTAALHNGLPDDRLKNCVIDALRHVYKTDFYMSRKLRHYIDSMDTYEPHVRDFLNFFPDGH

SEQ ID NO: 17981 - protein, 85 aa, unidentified
  REGION 1..85: note = Description of Unknown:cds_NC_005238.1_cds_NP_942558.1_1 target sequence
HGEVRGNWLQGNLNKCSSLFGVAMSLLFKEIWTRLFPELDCFFEFAHHSDDALFIYGYLEPADDGTDWFLFVSQQIQAGKLHWFN

SEQ ID NO: 17982 - protein, 85 aa, unidentified
  REGION 1..85: note = Description of Unknown:cds_NC_005238.1_cds_NP_942558.1_1 target sequence
VNTEMWKSMFNLHEHILLLGSIKISPKKTTLSPTNAEFLSTFFEGCAVSIPFIKILLGSLSDLPGLGYFDDLAAAQTRCVKAMDL

SEQ ID NO: 17983 - protein, 85 aa, unidentified
  REGION 1..85: note = Description of Unknown:cds_NC_005238.1_cds_NP_942558.1_1 target sequence
GASPQISQLAVSLSTSKVERLYGTSIGMVNYPGTYLRTKHSETPIPLGGSGAMSIMELSTAGIGMSDKNLLKQALIGYMHKHQKQ

SEQ ID NO: 17984 - protein, 85 aa, unidentified
  REGION 1..85: note = Description of Unknown:cds_NC_005238.1_cds_NP_942558.1_1 target sequence
MSYILGLFKFLMDLSGETFQHERLGQFSFIGKVQWKIFTPKSEFEFSDMYSQKFLKVWSEQHPTYDYIIPKGRDNLLIYLVRKLN

SEQ ID NO: 17985 - protein, 85 aa, unidentified
  REGION 1..85: note = Description of Unknown:cds_NC_005238.1_cds_NP_942558.1_1 target sequence
DPSIITAMTMQSPLQLRFRMQAKQHMKVCRLDGDWVTFREVLAAANSFAESYEPSQNDIDLFQTLTSCTFSKEYAWKDFLNNVHC

SEQ ID NO: 17986 - protein, 85 aa, unidentified
  REGION 1..85: note = Description of Unknown:cds_NC_005238.1_cds_NP_942558.1_1 target sequence
DVIPTKQVQRAKVARTFTVREKDRIIQNSIPAVIGYKFAVTVDEMSDVLDTAKFPDSLAVDLKTMKDGVYRELGLDISSPDVMKK

SEQ ID NO: 17987 - protein, 85 aa, unidentified
  REGION 1..85: note = Description of Unknown:cds_NC_005238.1_cds_NP_942558.1_1 target sequence
VAPMLYKSAKSRVVIVQGNVEGTAEAICAYWLRNMSLIKTIKVKPHKEVLQAVSIFNRKEDIGQQKDLSALKLCIEVWRWAKANN

SEQ ID NO: 17988 - protein, 85 aa, unidentified
  REGION 1..85: note = Description of Unknown:cds_NC_005238.1_cds_NP_942558.1_1 target sequence
APYRDWFHALWFEDKTFSEWLDRFIRVGVPPIDPEIQCAALMIADVKGDRSVLQLQANRRAYSGKQYDAYCVQTYNEETKLYEGD

SEQ ID NO: 17989 - protein, 85 aa, unidentified
  REGION 1..85: note = Description of Unknown:cds_NC_005238.1_cds_NP_942558.1_1 target sequence
LRVTFNFGLDCARLEIFWDKKTYILETSITQKHVLKIMMEEVSKELVRCGMRFNTEQVNGVKHLVLFKTDSGFEWGKPNIPCIVY

SEQ ID NO: 17990 - protein, 85 aa, unidentified
  REGION 1..85: note = Description of Unknown:cds_NC_005238.1_cds_NP_942558.1_1 target sequence
KNCALRTGLRTNQAINHKFMITIKDDGLRAIAQYDEDSPRFLLAHAFHTIRDVRYQAVDAVSNVWFTHKGIKLYLNPIISSGLLE

SEQ ID NO: 17991 - protein, 85 aa, unidentified
  REGION 1..85: note = Description of Unknown:cds_NC_005238.1_cds_NP_942558.1_1 target sequence
YFMKNIPAAIPPAAYSLIMNRAKISVDLFMFNDLLRLINPGNTLDLSGLEITGEGYSTVNSLSSRLWSEEMSLVDDEEEMDDEFT

SEQ ID NO: 17992 - protein, 85 aa, unidentified
  REGION 1..85: note = Description of Unknown:cds_NC_005238.1_cds_NP_942558.1_1 target sequence
IDLQDVDFENIDIEADVEHFLQDESAYTGDLLIMSEETEVKKMRGIIKLLEPVKLIKSWVSRGLSIEKVYNPVNIILMTRYISKN

SEQ ID NO: 17993 - protein, 85 aa, unidentified
  REGION 1..85: note = Description of Unknown:cds_NC_034401.1_cds_YP_009361847.1_1 target sequence
NRFRTIERELRELVPGTVSAPECIDLLDKLYALRHDLVDEMVKHDWSDNKDVETPIISVLMQMGIPESILTKMEKMIIPNHPSGK

SEQ ID NO: 17994 - protein, 85 aa, unidentified
  REGION 1..85: note = Description of Unknown:cds_NC_034401.1_cds_YP_009361847.1_1 target sequence
TLKQFFKMTPDNYKIEGDVVYFKEVTVTSDVEKGVREKNKKYQDGFKLIERELQKAYDAGLIERLITVQFDVISVKTDGSNISTQ

SEQ ID NO: 17995 - protein, 85 aa, unidentified
  REGION 1..85: note = Description of Unknown:cds_NC_034401.1_cds_YP_009361847.1_1 target sequence
WPSRRAGGVVQHMRLVQAMISFVREHLIKEDEKSTLEAMFNLKFSIPEPVLDTFKIPVYPGIHPLNSNIEELVDYCKNWLSCNHE

SEQ ID NO: 17996 - protein, 85 aa, unidentified
  REGION 1..85: note = Description of Unknown:cds_NC_034401.1_cds_YP_009361847.1_1 target sequence
FSFKEVSGSLVSTAFADYEQKQEETYEHSRKPRNFLLIQASVDAVYKPATIVSDQLDTRYACNTLLKESPMTPVQSLVRDMCYAF

SEQ ID NO: 17997 - protein, 85 aa, unidentified
  REGION 1..85: note = Description of Unknown:cds_NC_034401.1_cds_YP_009361847.1_1 target sequence
VNLDPEDIVSYYSNKQTFERTHGVHEPGTYRIGMSKLSDEAKKCLDILRGVDNQHAPEKIESLWPSKSSDLGSACATVEKILNDL

SEQ ID NO: 17998 - protein, 85 aa, unidentified
  REGION 1..85: note = Description of Unknown:cds_NC_034401.1_cds_YP_009361847.1_1 target sequence
SMVMDEGKEIFKSRPSRTYVDRVLGKFTDNEIEKFMVKPLKKTVAWSLSHLIRDITESLIAHSGTKRSKYYSLHGYHDGSVLLCL

SEQ ID NO: 17999 - protein, 85 aa, unidentified
  REGION 1..85: note = Description of Unknown:cds_NC_034401.1_cds_YP_009361847.1_1 target sequence
LPSKSLESSGSYIRFITVFKAGIGMIDYDNLDSEIYIDGVKWIYSKPISLDLNRLLALNNCFEKSFIATAVWFQYYLEDQGHFPF

SEQ ID NO: 18000 - protein, 85 aa, unidentified
  REGION 1..85: note = Description of Unknown:cds_NC_034401.1_cds_YP_009361847.1_1 target sequence
QSTLRSVFSYHLLLACTQKMKVCALFDNARYLIPSCTSLYSGVVSLLEKFCVRPFKTAIEVYMYNQIKQLLISLAQNNKLRFYSK

SEQ ID NO: 18001 - protein, 85 aa, unidentified
  REGION 1..85: note = Description of Unknown:cds_NC_034401.1_cds_YP_009361847.1_1 target sequence
VRLLGMTVDQSTIGASGVYPSLISHAVYKHYKSVISEITTCFFMFEKGLHGTMTEEAKVHMETVEWAQKFIKKEQEYGKHIVEQG

SEQ ID NO: 18002 - protein, 85 aa, unidentified
  REGION 1..85: note = Description of Unknown:cds_NC_034401.1_cds_YP_009361847.1_1 target sequence
YLLADIGSKIQVDQQLYCADVVELAAQEMNSVLSSKNQSVVSSILNKHWERPYFSQPRNISLKAMSGALQEDGHLAASVTMIEAI

SEQ ID NO: 18003 - protein, 85 aa, unidentified
  REGION 1..85: note = Description of Unknown:cds_NC_034401.1_cds_YP_009361847.1_1 target sequence
RYLKDNKSNPNVVELYQKTRHIKAQARIVRKHQRTEADRGFFITTLPTRVRLEIIEDYYDALSKNIPEEYISYGGEKKILSVQIA

SEQ ID NO: 18004 - protein, 85 aa, unidentified
  REGION 1..85: note = Description of Unknown:cds_NC_034401.1_cds_YP_009361847.1_1 target sequence
LEKALRWASGKSTITLSTGQQLVFKRKLMYVSADATKWSPGDNSAKFQRFTSVLFNGLRDDLLKNCVIDALKNMYETEFFISRRL

SEQ ID NO: 18005 - protein, 85 aa, unidentified
  REGION 1..85: note = Description of Unknown:cds_NC_034401.1_cds_YP_009361847.1_1 target sequence
RGYIERMDHKEDNVKEFLSFFANNQRSGLVRGNWLQGNLNKCSSLFGVAVSFLFKKVWNNLFPELGCFIEVAHHSDDALFIYGYL

SEQ ID NO: 18006 - protein, 85 aa, unidentified
  REGION 1..85: note = Description of Unknown:cds_NC_034401.1_cds_YP_009361847.1_1 target sequence
EPDDDGSDWYLYVSQKIQSGHHYWHSVNTDMWKAMFNLHEHILLMGSIKISAKKTTLSPTNAEFLSTFFEGCSVSIPFSKILLGS

SEQ ID NO: 18007 - protein, 85 aa, unidentified
  REGION 1..85: note = Description of Unknown:cds_NC_034401.1_cds_YP_009361847.1_1 target sequence
LSDLPGLGFFDDLAAGQSRCVKALDLGASPQVAQVALSVVNSKIERLYGTAPGMVNSPLVHLSVLPDEIPIPLGGLGSNSILELA

SEQ ID NO: 18008 - protein, 85 aa, unidentified
  REGION 1..85: note = Description of Unknown:cds_NC_034401.1_cds_YP_009361847.1_1 target sequence
TAGIGMSDKNNLKKALINYRHKNRGKVSYHLGLFKFLMNLSDEAFNHERLGEFSFTGKVQWKIFTPKSEFEFFDMFSKHYIDQWS

SEQ ID NO: 18009 - protein, 85 aa, unidentified
  REGION 1..85: note = Description of Unknown:cds_NC_034401.1_cds_YP_009361847.1_1 target sequence
KEHPAYDYIIPSSRDNLLVYLVRKLNEPSITAALTVQSPIQLRFRMQAKQHLAVCKQGEDWVTFRQILAAAHLFASNYIPTEKDI

SEQ ID NO: 18010 - protein, 85 aa, unidentified
  REGION 1..85: note = Description of Unknown:cds_NC_034401.1_cds_YP_009361847.1_1 target sequence
DLFNTLSECTFSKEFAWQNFLNSVDCEVLQAKKVHRPKVARTFTVKERDQNIQNQITTVIAYRFATTASEIKDVMNQARFPESLS

SEQ ID NO: 18011 - protein, 85 aa, unidentified
  REGION 1..85: note = Description of Unknown:cds_NC_034401.1_cds_YP_009361847.1_1 target sequence
TDMKTLHDGVYRELGLDTNDPKVMKKIAPLLYKTSKSRVVIVQGNIEGTAETICSYWLKQMSFVKQIKIIPHREVLQATSIFNVK

SEQ ID NO: 18012 - protein, 85 aa, unidentified
  REGION 1..85: note = Description of Unknown:cds_NC_034401.1_cds_YP_009361847.1_1 target sequence
EQTGERVDIAALRLVIEVWRWAKHNELDIKTWFHNLWFEDRTLYDWLIKFQRKGCPIVDPEIQCAGLLMYDFFKNMNILQIQADR

SEQ ID NO: 18013 - protein, 85 aa, unidentified
  REGION 1..85: note = Description of Unknown:cds_NC_034401.1_cds_YP_009361847.1_1 target sequence
RAFSGKQYDADCYQIYNEITGLYEGDLRVVFNFGVDRARLEIFWDKKAYILETSITSRHVLKIMMEEVTKELLRCGMRFVTEQAM

SEQ ID NO: 18014 - protein, 85 aa, unidentified
  REGION 1..85: note = Description of Unknown:cds_NC_034401.1_cds_YP_009361847.1_1 target sequence
RSSTLVLFKTDSGFEWGKPNTPCVIFRHCSLKTSLRTMKASNAEFKINILDNGFKAIAQADEDSPRFLLAHAYHTIKDVRYQALD

SEQ ID NO: 18015 - protein, 85 aa, unidentified
  REGION 1..85: note = Description of Unknown:cds_NC_034401.1_cds_YP_009361847.1_1 target sequence
AVGPIYFQKLYLNPIVQTGLIENFMKGLPAAIPPNAYSLIMNKAKISVDLFMFNKLLALINPDNTLDLTGLYPVEGSGYSTVTTI

SEQ ID NO: 18016 - protein, 85 aa, unidentified
  REGION 1..85: note = Description of Unknown:cds_NC_034401.1_cds_YP_009361847.1_1 target sequence
SSTDWAKEMDLMDDENDYDEDFTMDLTELDFDQIDIADDITHFLQDESSYTSDLLITSEPKDVKKLRGLVKVMEPIKLIKSWVNK

SEQ ID NO: 18017 - protein, 85 aa, unidentified
  REGION 1..85: note = Description of Unknown:cds_NC_034401.1_cds_YP_009361847.1_1 target sequence
GLSVEKVYNPIGIILMTRYLSKIYKFGERQVSVMDPYDLTELEAIVKGWGELVYDNFQEIDELAQKYVEEKNCLPEDVIPDSLFS

SEQ ID NO: 18018 - protein, 84 aa, unidentified
  REGION 1..84: note = Description of Unknown:cds_NC_034401.1_cds_YP_009361847.1_1 target sequence
IYKFGERQVSVMDPYDLTELEAIVKGWGELVYDNFQEIDELAQKYVEEKNCLPEDVIPDSLFSFRHTKILLDRLFFHDRMKSFY

SEQ ID NO: 18019 - protein, 85 aa, unidentified
  REGION 1..85: note = Description of Unknown:cds_NC_034401.1_cds_YP_009361847.1_1 target sequence
DKLYALRHDLVDEMVKHDWSDNKDVETPIISVLMQMGIPESILTKMEKMIIPNHPSGKTLKQFFKMTPDNYKIEGDVVYFKEVTV

SEQ ID NO: 18020 - protein, 85 aa, unidentified
  REGION 1..85: note = Description of Unknown:cds_NC_034401.1_cds_YP_009361847.1_1 target sequence
TSDVEKGVREKNKKYQDGFKLIERELQKAYDAGLIERLITVQFDVISVKTDGSNISTQWPSRRAGGVVQHMRLVQAMISFVREHL

SEQ ID NO: 18021 - protein, 85 aa, unidentified
  REGION 1..85: note = Description of Unknown:cds_NC_034401.1_cds_YP_009361847.1_1 target sequence
IKEDEKSTLEAMFNLKFSIPEPVLDTFKIPVYPGIHPLNSNIEELVDYCKNWLSCNHEFSFKEVSGSLVSTAFADYEQKQEETYE

SEQ ID NO: 18022 - protein, 85 aa, unidentified
  REGION 1..85: note = Description of Unknown:cds_NC_034401.1_cds_YP_009361847.1_1 target sequence
HSRKPRNFLLIQASVDAVYKPATIVSDQLDTRYACNTLLKESPMTPVQSLVRDMCYAFVNLDPEDIVSYYSNKQTFERTHGVHEP

SEQ ID NO: 18023 - protein, 85 aa, unidentified
  REGION 1..85: note = Description of Unknown:cds_NC_034401.1_cds_YP_009361847.1_1 target sequence
GTYRIGMSKLSDEAKKCLDILRGVDNQHAPEKIESLWPSKSSDLGSACATVEKILNDLSMVMDEGKEIFKSRPSRTYVDRVLGKF

SEQ ID NO: 18024 - protein, 85 aa, unidentified
  REGION 1..85: note = Description of Unknown:cds_NC_034401.1_cds_YP_009361847.1_1 target sequence
TDNEIEKFMVKPLKKTVAWSLSHLIRDITESLIAHSGTKRSKYYSLHGYHDGSVLLCLLPSKSLESSGSYIRFITVFKAGIGMID

SEQ ID NO: 18025 - protein, 85 aa, unidentified
  REGION 1..85: note = Description of Unknown:cds_NC_034401.1_cds_YP_009361847.1_1 target sequence
YDNLDSEIYIDGVKWIYSKPISLDLNRLLALNNCFEKSFIATAVWFQYYLEDQGHFPFQSTLRSVFSYHLLLACTQKMKVCALFD

SEQ ID NO: 18026 - protein, 85 aa, unidentified
  REGION 1..85: note = Description of Unknown:cds_NC_034401.1_cds_YP_009361847.1_1 target sequence
NARYLIPSCTSLYSGVVSLLEKFCVRPFKTAIEVYMYNQIKQLLISLAQNNKLRFYSKVRLLGMTVDQSTIGASGVYPSLISHAV

SEQ ID NO: 18027 - protein, 85 aa, unidentified
  REGION 1..85: note = Description of Unknown:cds_NC_034401.1_cds_YP_009361847.1_1 target sequence
YKHYKSVISEITTCFFMFEKGLHGTMTEEAKVHMETVEWAQKFIKKEQEYGKHIVEQGYLLADIGSKIQVDQQLYCADVVELAAQ

SEQ ID NO: 18028 - protein, 85 aa, unidentified
  REGION 1..85: note = Description of Unknown:cds_NC_034401.1_cds_YP_009361847.1_1 target sequence
EMNSVLSSKNQSVVSSILNKHWERPYFSQPRNISLKAMSGALQEDGHLAASVTMIEAIRYLKDNKSNPNVVELYQKTRHIKAQAR

SEQ ID NO: 18029 - protein, 85 aa, unidentified
  REGION 1..85: note = Description of Unknown:cds_NC_034401.1_cds_YP_009361847.1_1 target sequence
IVRKHQRTEADRGFFITTLPTRVRLEIIEDYYDALSKNIPEEYISYGGEKKILSVQIALEKALRWASGKSTITLSTGQQLVFKRK

SEQ ID NO: 18030 - protein, 85 aa, unidentified
  REGION 1..85: note = Description of Unknown:cds_NC_034401.1_cds_YP_009361847.1_1 target sequence
LMYVSADATKWSPGDNSAKFQRFTSVLFNGLRDDLLKNCVIDALKNMYETEFFISRRLRGYIERMDHKEDNVKEFLSFFANNQRS

SEQ ID NO: 18031 - protein, 85 aa, unidentified
  REGION 1..85: note = Description of Unknown:cds_NC_034401.1_cds_YP_009361847.1_1 target sequence
GLVRGNWLQGNLNKCSSLFGVAVSFLFKKVWNNLFPELGCFIEVAHHSDDALFIYGYLEPDDDGSDWYLYVSQKIQSGHHYWHSV

SEQ ID NO: 18032 - protein, 85 aa, unidentified
  REGION 1..85: note = Description of Unknown:cds_NC_034401.1_cds_YP_009361847.1_1 target sequence
NTDMWKAMFNLHEHILLMGSIKISAKKTTLSPTNAEFLSTFFEGCSVSIPFSKILLGSLSDLPGLGFFDDLAAGQSRCVKALDLG

SEQ ID NO: 18033 - protein, 85 aa, unidentified
  REGION 1..85: note = Description of Unknown:cds_NC_034401.1_cds_YP_009361847.1_1 target sequence
ASPQVAQVALSVVNSKIERLYGTAPGMVNSPLVHLSVLPDEIPIPLGGLGSNSILELATAGIGMSDKNNLKKALINYRHKNRGKV

SEQ ID NO: 18034 - protein, 85 aa, unidentified
  REGION 1..85: note = Description of Unknown:cds_NC_034401.1_cds_YP_009361847.1_1 target sequence
SYHLGLFKFLMNLSDEAFNHERLGEFSFTGKVQWKIFTPKSEFEFFDMFSKHYIDQWSKEHPAYDYIIPSSRDNLLVYLVRKLNE

SEQ ID NO: 18035 - protein, 85 aa, unidentified
  REGION 1..85: note = Description of Unknown:cds_NC_034401.1_cds_YP_009361847.1_1 target sequence
PSITAALTVQSPIQLRFRMQAKQHLAVCKQGEDWVTFRQILAAAHLFASNYIPTEKDIDLFNTLSECTFSKEFAWQNFLNSVDCE

SEQ ID NO: 18036 - protein, 85 aa, unidentified
  REGION 1..85: note = Description of Unknown:cds_NC_034401.1_cds_YP_009361847.1_1 target sequence
VLQAKKVHRPKVARTFTVKERDQNIQNQITTVIAYRFATTASEIKDVMNQARFPESLSTDMKTLHDGVYRELGLDTNDPKVMKKI

SEQ ID NO: 18037 - protein, 85 aa, unidentified
  REGION 1..85: note = Description of Unknown:cds_NC_034401.1_cds_YP_009361847.1_1 target sequence
APLLYKTSKSRVVIVQGNIEGTAETICSYWLKQMSFVKQIKIIPHREVLQATSIFNVKEQTGERVDIAALRLVIEVWRWAKHNEL

SEQ ID NO: 18038 - protein, 85 aa, unidentified
  REGION 1..85: note = Description of Unknown:cds_NC_034401.1_cds_YP_009361847.1_1 target sequence
DIKTWFHNLWFEDRTLYDWLIKFQRKGCPIVDPEIQCAGLLMYDFFKNMNILQIQADRRAFSGKQYDADCYQIYNEITGLYEGDL

SEQ ID NO: 18039 - protein, 85 aa, unidentified
  REGION 1..85: note = Description of Unknown:cds_NC_034401.1_cds_YP_009361847.1_1 target sequence
RVVFNFGVDRARLEIFWDKKAYILETSITSRHVLKIMMEEVTKELLRCGMRFVTEQAMRSSTLVLFKTDSGFEWGKPNTPCVIFR

SEQ ID NO: 18040 - protein, 85 aa, unidentified
  REGION 1..85: note = Description of Unknown:cds_NC_034401.1_cds_YP_009361847.1_1 target sequence
HCSLKTSLRTMKASNAEFKINILDNGFKAIAQADEDSPRFLLAHAYHTIKDVRYQALDAVGPIYFQKLYLNPIVQTGLIENFMKG

SEQ ID NO: 18041 - protein, 85 aa, unidentified
  REGION 1..85: note = Description of Unknown:cds_NC_034401.1_cds_YP_009361847.1_1 target sequence
LPAAIPPNAYSLIMNKAKISVDLFMFNKLLALINPDNTLDLTGLYPVEGSGYSTVTTISSTDWAKEMDLMDDENDYDEDFTMDLT

SEQ ID NO: 18042 - protein, 85 aa, unidentified
  REGION 1..85: note = Description of Unknown:cds_NC_034401.1_cds_YP_009361847.1_1 target sequence
ELDFDQIDIADDITHFLQDESSYTSDLLITSEPKDVKKLRGLVKVMEPIKLIKSWVNKGLSVEKVYNPIGIILMTRYLSKIYKFG

SEQ ID NO: 18043 - protein, 85 aa, unidentified
  REGION 1..85: note = Description of Unknown:cds_NC_001542.1_cds_NP_056797.1_5 target sequence
LDPGEVYDDPIDPIELEAEPRGTPTVPNILRNSDYNLNSPLIEDPARLMLEWLKTGNRPYRMTLTDNCSRSFRVLKDYFKKVDLG

SEQ ID NO: 18044 - protein, 85 aa, unidentified
  REGION 1..85: note = Description of Unknown:cds_NC_001542.1_cds_NP_056797.1_5 target sequence
SLKVGGMAAQSMISLWLYGAHSESNRSRRCITDLAHFYSKSSPIEKLLNLTLGNRGLRIPPEGVLSCLERVDYDNAFGRYLANTY

SEQ ID NO: 18045 - protein, 85 aa, unidentified
  REGION 1..85: note = Description of Unknown:cds_NC_001542.1_cds_NP_056797.1_5 target sequence
SSYLFFHVITLYMNALDWDEEKTILALWKDLTSVDIGKDLVKFKDQIWGLLIVTKDFVYSQSSNCLFDRNYTLMLKDLFLSRFNS

SEQ ID NO: 18046 - protein, 85 aa, unidentified
  REGION 1..85: note = Description of Unknown:cds_NC_001542.1_cds_NP_056797.1_5 target sequence
LMVLLSPPEPRYSDDLISQLCQLYIAGDQVLSMCGNSGYEVIKILEPYVVNSLVQRAEKFRPLIHSLGDFPVFIKDKVSQLEETF

SEQ ID NO: 18047 - protein, 85 aa, unidentified
  REGION 1..85: note = Description of Unknown:cds_NC_001542.1_cds_NP_056797.1_5 target sequence
GSCARRFFRALDQFDNIHDLVFVYGCYRHWGHPYIDYRKGLSKLYDQVHIKKVIDKSYQECLASDLARRILRWGFDKYSKWYLDS

SEQ ID NO: 18048 - protein, 85 aa, unidentified
  REGION 1..85: note = Description of Unknown:cds_NC_001542.1_cds_NP_056797.1_5 target sequence
RFLARDHPLTPYIKTQTWPPKHIVDLVGDTWHKLPITQIFEIPESMDPSEILDDKSHSFTRTRLASWLSENRGGPVPSEKVIITA

SEQ ID NO: 18049 - protein, 85 aa, unidentified
  REGION 1..85: note = Description of Unknown:cds_NC_001542.1_cds_NP_056797.1_5 target sequence
LSKPPVNPREFLKSIDLGGLPDEDLIIGLKPKERELKIEGRFFALMSWNLRLYFVITEKLLANYILPLFDALTMTDNLNKVFKKL

SEQ ID NO: 18050 - protein, 85 aa, unidentified
  REGION 1..85: note = Description of Unknown:cds_NC_001542.1_cds_NP_056797.1_5 target sequence
IDRVTGQGLLDYSRVTYAFHLDYEKWNNHQRLESTEDVFSVLDQVFGLKRVFSRTHEFFQKSWIYYSDRSDLIGLREDQIYCLDA

SEQ ID NO: 18051 - protein, 85 aa, unidentified
  REGION 1..85: note = Description of Unknown:cds_NC_001542.1_cds_NP_056797.1_5 target sequence
SNGPTCWNGQDGGLEGLRQKGWSLVSLLMIDRESQIRNTRTKVLAQGDNQVLCPTYMLSPGLSQEGLLYELESISRNAFSIYRAV

SEQ ID NO: 18052 - protein, 85 aa, unidentified
  REGION 1..85: note = Description of Unknown:cds_NC_001542.1_cds_NP_056797.1_5 target sequence
EEGASKLGLIIKKEETMCSYDFLIYGKTPLFRGNILVPESKRWARVSCVSNDQIVNLANIMSTVSTNALTVAQHSQSLIKPMRDF

SEQ ID NO: 18053 - protein, 85 aa, unidentified
  REGION 1..85: note = Description of Unknown:cds_NC_001542.1_cds_NP_056797.1_5 target sequence
LLMSVQAVFHYLLFSPILKGRVYKILSAEGESFLLAMSRIIYLDPSLGGVSGMSLGRFHIRQFSDPVSEGLSFWREIWLSSHESW

SEQ ID NO: 18054 - protein, 85 aa, unidentified
  REGION 1..85: note = Description of Unknown:cds_NC_001542.1_cds_NP_056797.1_5 target sequence
IHALCQEAGNPDLGERTLESFTRLLEDPTTLNIRGGASPTILLKDAIRKALYDEVDKVENSEFREAILLSKTHRDNFILFLTSVE

SEQ ID NO: 18055 - protein, 85 aa, unidentified
  REGION 1..85: note = Description of Unknown:cds_NC_001542.1_cds_NP_056797.1_5 target sequence
PLFPRFLSELFSSSFLGIPESIIGLIQNSRTIRRQFRKSLSKTLEESFYNSEIHGISRMTQTPQRVGGVWPCSSERADLLREISW

SEQ ID NO: 18056 - protein, 85 aa, unidentified
  REGION 1..85: note = Description of Unknown:cds_NC_001542.1_cds_NP_056797.1_5 target sequence
GRKVVGTTVPHPSEMLGLLPKSSISCTCGATGGGNPRVSVSVLPSFDQSFFCTGPLKGYLGSSTSMSTQLFHAWEKVTNVHVVKR

SEQ ID NO: 18057 - protein, 85 aa, unidentified
  REGION 1..85: note = Description of Unknown:cds_NC_001542.1_cds_NP_056797.1_5 target sequence
ALSLKESINWFITRDSNLAQTLIRNIVSLTGPDFPLEEAPVFKRTGSALHRFKSARYSEGGYSSVCPNLLSHISVSTDTMSDLTQ

SEQ ID NO: 18058 - protein, 85 aa, unidentified
  REGION 1..85: note = Description of Unknown:cds_NC_001542.1_cds_NP_056797.1_5 target sequence
DGKNYDFMFQPLMLYAQTWTSELVQRDTRLRDSTFHWHLQCNRCVRPIDDVTLETSQIFEFPDVSKRISRMVSGAVPHFQRLPDI

SEQ ID NO: 18059 - protein, 85 aa, unidentified
  REGION 1..85: note = Description of Unknown:cds_NC_001542.1_cds_NP_056797.1_5 target sequence
RLRPGDFESLSGREKSHHIGSAQGLLYSILVAIHDSGYNDGTIFPVNIYGKVSPRDYLRGLARGVLIGSSICFLTRMTNININRP

SEQ ID NO: 18060 - protein, 85 aa, unidentified
  REGION 1..85: note = Description of Unknown:cds_NC_001542.1_cds_NP_056797.1_5 target sequence
LELISGVISYILLRLDNHPSLYIMLREPSFREEIFSIPQKIPAAYPTTMKEGNRSILCYLQHVLRYEREVITASPENDWLWIFSD

SEQ ID NO: 18061 - protein, 85 aa, unidentified
  REGION 1..85: note = Description of Unknown:cds_NC_001542.1_cds_NP_056797.1_5 target sequence
FRSAKMTYLTLITYQSHLLLQRVERNLSKSMRDNLRQLSSLMRQVLGGHGEDTLESDDNIQRLLKDSLRRTRWVDQEVRHAARTM

SEQ ID NO: 18062 - protein, 85 aa, unidentified
  REGION 1..85: note = Description of Unknown:cds_NC_001542.1_cds_NP_056797.1_5 target sequence
TGDYSPNKKVSRKVGCSEWVCSAQQVAVSTSANPAPVSELDIRALSKRFQNPLISGLRVVQWATGAHYKLKPILDDLNVFPSLCL

SEQ ID NO: 18063 - protein, 85 aa, unidentified
  REGION 1..85: note = Description of Unknown:cds_NC_001542.1_cds_NP_056797.1_5 target sequence
VVGDGSGGISRAVLNMFPDAKLVFNSLLEVNDLMASGTHPLPPSAIMRGGNDIVSRVIDFDSIWEKPSDLRNLATWKYFQSVQKQ

SEQ ID NO: 18064 - protein, 85 aa, unidentified
  REGION 1..85: note = Description of Unknown:cds_NC_001542.1_cds_NP_056797.1_5 target sequence
VNMSYDLIICDAEVTDIASINRITLLMSDFALSIDGPLYLVFKTYGTMLVNPNYKAIQHLSRAFPSVTGFITQVTSSFSSELYLR

SEQ ID NO: 18065 - protein, 85 aa, unidentified
  REGION 1..85: note = Description of Unknown:cds_NC_001542.1_cds_NP_056797.1_5 target sequence
FSKRGKFFRDAEYLTSSTLREMSLVLFNCSSPKSEMQRARSLNYQDLVRGFPEEIISNPYNEMIITLIDSDVESFLVHKMVDDLE

SEQ ID NO: 18066 - protein, 85 aa, unidentified
  REGION 1..85: note = Description of Unknown:cds_NC_001542.1_cds_NP_056797.1_5 target sequence
LQRGTLSKVAIIIAIMIVFSNRVFNVSKPLTDPLFYPPSDPKILRHFNICCSTMMYLSTALGDVPSFARLHDLYNRPITYYFRKQ

SEQ ID NO: 18067 - protein, 85 aa, unidentified
  REGION 1..85: note = Description of Unknown:cds_NC_001542.1_cds_NP_056797.1_5 target sequence
VILGNVYLSWSWSNDTSVFKRVACNSSLSLSSHWIRLIYKIVKTTRLVGSIKDLSGEVERHLHRYNRWITLENIRSRSSLLDYSC

SEQ ID NO: 18068 - protein, 84 aa, unidentified
  REGION 1..84: note = Description of Unknown:cds_NC_001542.1_cds_NP_056797.1_5 target sequence
VFKRVACNSSLSLSSHWIRLIYKIVKTTRLVGSIKDLSGEVERHLHRYNRWITLENIRSRSSLLDYSCLCIGYSWKPAHAKTLV

SEQ ID NO: 18069 - protein, 85 aa, unidentified
  REGION 1..85: note = Description of Unknown:cds_NC_001542.1_cds_NP_056797.1_5 target sequence
NILRNSDYNLNSPLIEDPARLMLEWLKTGNRPYRMTLTDNCSRSFRVLKDYFKKVDLGSLKVGGMAAQSMISLWLYGAHSESNRS

SEQ ID NO: 18070 - protein, 85 aa, unidentified
  REGION 1..85: note = Description of Unknown:cds_NC_001542.1_cds_NP_056797.1_5 target sequence
RRCITDLAHFYSKSSPIEKLLNLTLGNRGLRIPPEGVLSCLERVDYDNAFGRYLANTYSSYLFFHVITLYMNALDWDEEKTILAL

SEQ ID NO: 18071 - protein, 85 aa, unidentified
  REGION 1..85: note = Description of Unknown:cds_NC_001542.1_cds_NP_056797.1_5 target sequence
WKDLTSVDIGKDLVKFKDQIWGLLIVTKDFVYSQSSNCLFDRNYTLMLKDLFLSRFNSLMVLLSPPEPRYSDDLISQLCQLYIAG

SEQ ID NO: 18072 - protein, 85 aa, unidentified
  REGION 1..85: note = Description of Unknown:cds_NC_001542.1_cds_NP_056797.1_5 target sequence
DQVLSMCGNSGYEVIKILEPYVVNSLVQRAEKFRPLIHSLGDFPVFIKDKVSQLEETFGSCARRFFRALDQFDNIHDLVFVYGCY

SEQ ID NO: 18073 - protein, 85 aa, unidentified
  REGION 1..85: note = Description of Unknown:cds_NC_001542.1_cds_NP_056797.1_5 target sequence
RHWGHPYIDYRKGLSKLYDQVHIKKVIDKSYQECLASDLARRILRWGFDKYSKWYLDSRFLARDHPLTPYIKTQTWPPKHIVDLV

SEQ ID NO: 18074 - protein, 85 aa, unidentified
  REGION 1..85: note = Description of Unknown:cds_NC_001542.1_cds_NP_056797.1_5 target sequence
GDTWHKLPITQIFEIPESMDPSEILDDKSHSFTRTRLASWLSENRGGPVPSEKVIITALSKPPVNPREFLKSIDLGGLPDEDLII

SEQ ID NO: 18075 - protein, 85 aa, unidentified
  REGION 1..85: note = Description of Unknown:cds_NC_001542.1_cds_NP_056797.1_5 target sequence
GLKPKERELKIEGRFFALMSWNLRLYFVITEKLLANYILPLFDALTMTDNLNKVFKKLIDRVTGQGLLDYSRVTYAFHLDYEKWN

SEQ ID NO: 18076 - protein, 85 aa, unidentified
  REGION 1..85: note = Description of Unknown:cds_NC_001542.1_cds_NP_056797.1_5 target sequence
NHQRLESTEDVFSVLDQVFGLKRVFSRTHEFFQKSWIYYSDRSDLIGLREDQIYCLDASNGPTCWNGQDGGLEGLRQKGWSLVSL

SEQ ID NO: 18077 - protein, 85 aa, unidentified
  REGION 1..85: note = Description of Unknown:cds_NC_001542.1_cds_NP_056797.1_5 target sequence
LMIDRESQIRNTRTKVLAQGDNQVLCPTYMLSPGLSQEGLLYELESISRNAFSIYRAVEEGASKLGLIIKKEETMCSYDFLIYGK

SEQ ID NO: 18078 - protein, 85 aa, unidentified
  REGION 1..85: note = Description of Unknown:cds_NC_001542.1_cds_NP_056797.1_5 target sequence
TPLFRGNILVPESKRWARVSCVSNDQIVNLANIMSTVSTNALTVAQHSQSLIKPMRDFLLMSVQAVFHYLLFSPILKGRVYKILS

SEQ ID NO: 18079 - protein, 85 aa, unidentified
  REGION 1..85: note = Description of Unknown:cds_NC_001542.1_cds_NP_056797.1_5 target sequence
AEGESFLLAMSRIIYLDPSLGGVSGMSLGRFHIRQFSDPVSEGLSFWREIWLSSHESWIHALCQEAGNPDLGERTLESFTRLLED

SEQ ID NO: 18080 - protein, 85 aa, unidentified
  REGION 1..85: note = Description of Unknown:cds_NC_001542.1_cds_NP_056797.1_5 target sequence
PTTLNIRGGASPTILLKDAIRKALYDEVDKVENSEFREAILLSKTHRDNFILFLTSVEPLFPRFLSELFSSSFLGIPESIIGLIQ

SEQ ID NO: 18081 - protein, 85 aa, unidentified
  REGION 1..85: note = Description of Unknown:cds_NC_001542.1_cds_NP_056797.1_5 target sequence
NSRTIRRQFRKSLSKTLEESFYNSEIHGISRMTQTPQRVGGVWPCSSERADLLREISWGRKVVGTTVPHPSEMLGLLPKSSISCT

SEQ ID NO: 18082 - protein, 85 aa, unidentified
  REGION 1..85: note = Description of Unknown:cds_NC_001542.1_cds_NP_056797.1_5 target sequence
CGATGGGNPRVSVSVLPSFDQSFFCTGPLKGYLGSSTSMSTQLFHAWEKVTNVHVVKRALSLKESINWFITRDSNLAQTLIRNIV

SEQ ID NO: 18083 - protein, 85 aa, unidentified
  REGION 1..85: note = Description of Unknown:cds_NC_001542.1_cds_NP_056797.1_5 target sequence
SLTGPDFPLEEAPVFKRTGSALHRFKSARYSEGGYSSVCPNLLSHISVSTDTMSDLTQDGKNYDFMFQPLMLYAQTWTSELVQRD

SEQ ID NO: 18084 - protein, 85 aa, unidentified
  REGION 1..85: note = Description of Unknown:cds_NC_001542.1_cds_NP_056797.1_5 target sequence
TRLRDSTFHWHLQCNRCVRPIDDVTLETSQIFEFPDVSKRISRMVSGAVPHFQRLPDIRLRPGDFESLSGREKSHHIGSAQGLLY

SEQ ID NO: 18085 - protein, 85 aa, unidentified
  REGION 1..85: note = Description of Unknown:cds_NC_001542.1_cds_NP_056797.1_5 target sequence
SILVAIHDSGYNDGTIFPVNIYGKVSPRDYLRGLARGVLIGSSICFLTRMTNININRPLELISGVISYILLRLDNHPSLYIMLRE

SEQ ID NO: 18086 - protein, 85 aa, unidentified
  REGION 1..85: note = Description of Unknown:cds_NC_001542.1_cds_NP_056797.1_5 target sequence
PSFREEIFSIPQKIPAAYPTTMKEGNRSILCYLQHVLRYEREVITASPENDWLWIFSDFRSAKMTYLTLITYQSHLLLQRVERNL

SEQ ID NO: 18087 - protein, 85 aa, unidentified
  REGION 1..85: note = Description of Unknown:cds_NC_001542.1_cds_NP_056797.1_5 target sequence
SKSMRDNLRQLSSLMRQVLGGHGEDTLESDDNIQRLLKDSLRRTRWVDQEVRHAARTMTGDYSPNKKVSRKVGCSEWVCSAQQVA

SEQ ID NO: 18088 - protein, 85 aa, unidentified
  REGION 1..85: note = Description of Unknown:cds_NC_001542.1_cds_NP_056797.1_5 target sequence
VSTSANPAPVSELDIRALSKRFQNPLISGLRVVQWATGAHYKLKPILDDLNVFPSLCLVVGDGSGGISRAVLNMFPDAKLVFNSL

SEQ ID NO: 18089 - protein, 85 aa, unidentified
  REGION 1..85: note = Description of Unknown:cds_NC_001542.1_cds_NP_056797.1_5 target sequence
LEVNDLMASGTHPLPPSAIMRGGNDIVSRVIDFDSIWEKPSDLRNLATWKYFQSVQKQVNMSYDLIICDAEVTDIASINRITLLM

SEQ ID NO: 18090 - protein, 85 aa, unidentified
  REGION 1..85: note = Description of Unknown:cds_NC_001542.1_cds_NP_056797.1_5 target sequence
SDFALSIDGPLYLVFKTYGTMLVNPNYKAIQHLSRAFPSVTGFITQVTSSFSSELYLRFSKRGKFFRDAEYLTSSTLREMSLVLF

SEQ ID NO: 18091 - protein, 85 aa, unidentified
  REGION 1..85: note = Description of Unknown:cds_NC_001542.1_cds_NP_056797.1_5 target sequence
NCSSPKSEMQRARSLNYQDLVRGFPEEIISNPYNEMIITLIDSDVESFLVHKMVDDLELQRGTLSKVAIIIAIMIVFSNRVFNVS

SEQ ID NO: 18092 - protein, 85 aa, unidentified
  REGION 1..85: note = Description of Unknown:cds_NC_001542.1_cds_NP_056797.1_5 target sequence
KPLTDPLFYPPSDPKILRHFNICCSTMMYLSTALGDVPSFARLHDLYNRPITYYFRKQVILGNVYLSWSWSNDTSVFKRVACNSS

SEQ ID NO: 18093 - protein, 85 aa, unidentified
  REGION 1..85: note = Description of Unknown:cds_NC_003243.1_cds_NP_478343.1_5 target sequence
IDPGEVYDDPIDPVEPEPELKTNNAVIPNILRNSDYNLNSPLIEHPSRLMLEWLTTGNKPMRLTLTDNCIRSYKTLKCYFRKVDI

SEQ ID NO: 18094 - protein, 85 aa, unidentified
  REGION 1..85: note = Description of Unknown:cds_NC_003243.1_cds_NP_478343.1_5 target sequence
GSVKVGGPAAQAMTSLWLHGEHSESNRSRKCLSDLTQFYQKSSPIEKLLNYTLGNRGLRIPPEGVLLCLKKVDYDRSFGRYLANI

SEQ ID NO: 18095 - protein, 85 aa, unidentified
  REGION 1..85: note = Description of Unknown:cds_NC_003243.1_cds_NP_478343.1_5 target sequence
YSSYLFFHVIILYMNALDWDEEKTILALWRDLNSVDIKKDQVKFRDSIWGSLIVTKEFVYSQNSNCLFDRNYTLMLKDLFLSRFN

SEQ ID NO: 18096 - protein, 85 aa, unidentified
  REGION 1..85: note = Description of Unknown:cds_NC_003243.1_cds_NP_478343.1_5 target sequence
SLLILLSPPEPRYSDDLISLLCQLYIAGDHVLSMCGNSGYDVIKMLEPYVINSLVQRAEEFRPLIHSLGDFPLFIREKVGQLEGT

SEQ ID NO: 18097 - protein, 85 aa, unidentified
  REGION 1..85: note = Description of Unknown:cds_NC_003243.1_cds_NP_478343.1_5 target sequence
FGPSARRFFQVLDQVDNIHDLVFVYGCYRHWGHPYIDYRKGLLKLYDQVHVKKMIDGAYQECLASDLAKRILRWGFDKYSKWYLD

SEQ ID NO: 18098 - protein, 85 aa, unidentified
  REGION 1..85: note = Description of Unknown:cds_NC_003243.1_cds_NP_478343.1_5 target sequence
PKLLAPDHPLAPYIKTQTWPPKHIVDLVGNTWHKLPITQIFEIPESMDPSEILDDKSHSFTRTKLASWLAENRGGPVPSEKVIIT

SEQ ID NO: 18099 - protein, 85 aa, unidentified
  REGION 1..85: note = Description of Unknown:cds_NC_003243.1_cds_NP_478343.1_5 target sequence
ALSKPPVNPREFLKSIDLGGLPDDDLIIGLKPKERELKIEGRFFALMSWNLRLYFVITEKLLANYILPLFDALTMTDNLNKVFKK

SEQ ID NO: 18100 - protein, 85 aa, unidentified
  REGION 1..85: note = Description of Unknown:cds_NC_003243.1_cds_NP_478343.1_5 target sequence
LIDRVTGQGLQDYSRVTYAFHLDYEKWNNHQRLESTKDVFPVLDQVFGLKKVFSRTHEFFQKSWIYYSDRSDLIGLWEDQIYCLD

SEQ ID NO: 18101 - protein, 85 aa, unidentified
  REGION 1..85: note = Description of Unknown:cds_NC_003243.1_cds_NP_478343.1_5 target sequence
MSDGPTCWNGQDGGLEGLRQKGWSLVSLLMIDRESQTRNTRTKDFAQGDNQVLCPTYMLSSGLSHEGLLYELESISRNALSIYRA

SEQ ID NO: 18102 - protein, 85 aa, unidentified
  REGION 1..85: note = Description of Unknown:cds_NC_003243.1_cds_NP_478343.1_5 target sequence
IEDGASKLGLIIKKEETMCSYDFLIYGKTPLFRGNILVPESKRWARVSCISNDQIVNLANIMSTVSTNALTVAQHSQSLIKPMRG

SEQ ID NO: 18103 - protein, 85 aa, unidentified
  REGION 1..85: note = Description of Unknown:cds_NC_003243.1_cds_NP_478343.1_5 target sequence
FLLMAVQAVFHYLLFSPILKGRVYKILSAEGDDFLLAMSRIVYLDPSLGGVSGMSLGRFHIRQFSDPVSEGLSFWKEIWTSSSES

SEQ ID NO: 18104 - protein, 85 aa, unidentified
  REGION 1..85: note = Description of Unknown:cds_NC_003243.1_cds_NP_478343.1_5 target sequence
WIHSLCQEAGNPDLGDRSLEKFTRLLEDPTTLNIRGGASPTILLKDAIRKALYDEVDKVENSEFREAILLSRHHRDNFILFLKSI

SEQ ID NO: 18105 - protein, 85 aa, unidentified
  REGION 1..85: note = Description of Unknown:cds_NC_003243.1_cds_NP_478343.1_5 target sequence
EPLFPRFLSELFSSSFLGIPESIIGLIQNSRTIRRQFRRSLSRSLEESFYNSEIHGISRMTQVPQRIGRVWSCSSERAHLLREIS

SEQ ID NO: 18106 - protein, 85 aa, unidentified
  REGION 1..85: note = Description of Unknown:cds_NC_003243.1_cds_NP_478343.1_5 target sequence
WGRKRVGTTVPHPSEMLALLPKSSISCPCGLTGSENPRVSISVLPSIYQSFFSRGPLKGYLGSSTSMSTQTFHAWEKVTNVHVVK

SEQ ID NO: 18107 - protein, 85 aa, unidentified
  REGION 1..85: note = Description of Unknown:cds_NC_003243.1_cds_NP_478343.1_5 target sequence
RALSLKESINWFISRNSNLAQTLIRNIISLTGPQFPLEEAPVFKRTGSALHRFKSARYSEGGYSSICPNLLSHISVSTDTMSDLT

SEQ ID NO: 18108 - protein, 85 aa, unidentified
  REGION 1..85: note = Description of Unknown:cds_NC_003243.1_cds_NP_478343.1_5 target sequence
HDGRNFDFMFQPLMLYAQTWTSELVQKDIRLKDSTFHWHLRCPKCIRSIDDVILVHPQVFDFPDVSKRISRMVSGAVPSSQILPE

SEQ ID NO: 18109 - protein, 85 aa, unidentified
  REGION 1..85: note = Description of Unknown:cds_NC_003243.1_cds_NP_478343.1_5 target sequence
VNLLPGHFESLCGRDKSRHIGSAQGLLYSILVATHDPGYNDGTIFPVNIYSKISPKDYLRGLARGILIGSSICLLTRMTNININR

SEQ ID NO: 18110 - protein, 85 aa, unidentified
  REGION 1..85: note = Description of Unknown:cds_NC_003243.1_cds_NP_478343.1_5 target sequence
PLELISGVITYILLRLDNHPSLYVMLREPSLRSEIFSIPQKIPAAYPTTMKEGNRSVLCYLQHVLRYEREIITSSPENDWLWIFS

SEQ ID NO: 18111 - protein, 85 aa, unidentified
  REGION 1..85: note = Description of Unknown:cds_NC_003243.1_cds_NP_478343.1_5 target sequence
DFRSMKMTYLTLITYQSHIFLQRIERSLSKKMRADLRQLSSLMRQVLGGHGEDTLDSGEDIQRLLRDAIQRTKWVDQEVRHAAKT

SEQ ID NO: 18112 - protein, 85 aa, unidentified
  REGION 1..85: note = Description of Unknown:cds_NC_003243.1_cds_NP_478343.1_5 target sequence
MTNDHSPSKKTSRKVGCSEWICSAQQVSISTSSNPAPVSEMDVRTLSRKLQNPLISGLRVVQCATGAHYKLKPILDNLNTYPSFC

SEQ ID NO: 18113 - protein, 85 aa, unidentified
  REGION 1..85: note = Description of Unknown:cds_NC_003243.1_cds_NP_478343.1_5 target sequence
LVVGDGSGGISRTVLNMFPDAKLVFNSLLEVSDLMASGTHPLPPSAIMSGGEDITSRVIDFESIWEKPSDLRNLSTWRYFQSVQS

SEQ ID NO: 18114 - protein, 85 aa, unidentified
  REGION 1..85: note = Description of Unknown:cds_NC_003243.1_cds_NP_478343.1_5 target sequence
QLNMSYDLIICDAEVTDIASVNKITLLMSDFVLSIDGPVDLIFKSYGSMLVDPDYKAIQHLSRAFPQVTGYITQLTSSFSSELYL

SEQ ID NO: 18115 - protein, 85 aa, unidentified
  REGION 1..85: note = Description of Unknown:cds_NC_003243.1_cds_NP_478343.1_5 target sequence
RFSKRGKFFRDAEYLTSSTLREMSLVLFNCSSPKSELQRARSLNYQDLVRGFPEEIVSNPYNEMIITLIDSEVESFLVHKMVDDL

SEQ ID NO: 18116 - protein, 85 aa, unidentified
  REGION 1..85: note = Description of Unknown:cds_NC_003243.1_cds_NP_478343.1_5 target sequence
ELQRGTLSRMSIIIAIVIVYSNRVFNVSKPLNDPLFYPPSDPKILRHFNICCSTMMYLSTVLGDVPNFARQHELYNGPITYYFKR

SEQ ID NO: 18117 - protein, 85 aa, unidentified
  REGION 1..85: note = Description of Unknown:cds_NC_003243.1_cds_NP_478343.1_5 target sequence
QIIRGSIYLSWSWSDDTSVFKRVSCNSNLSLSSHWIRLIYKIVKTTRLTGSPVDLSKEVEKHLRGYNRWITLNDVKSRSSLLDYS

SEQ ID NO: 18118 - protein, 84 aa, unidentified
  REGION 1..84: note = Description of Unknown:cds_NC_003243.1_cds_NP_478343.1_5 target sequence
RGSIYLSWSWSDDTSVFKRVSCNSNLSLSSHWIRLIYKIVKTTRLTGSPVDLSKEVEKHLRGYNRWITLNDVKSRSSLLDYSCL

SEQ ID NO: 18119 - protein, 85 aa, unidentified
  REGION 1..85: note = Description of Unknown:cds_NC_003243.1_cds_NP_478343.1_5 target sequence
PNILRNSDYNLNSPLIEHPSRLMLEWLTTGNKPMRLTLTDNCIRSYKTLKCYFRKVDIGSVKVGGPAAQAMTSLWLHGEHSESNR

SEQ ID NO: 18120 - protein, 85 aa, unidentified
  REGION 1..85: note = Description of Unknown:cds_NC_003243.1_cds_NP_478343.1_5 target sequence
SRKCLSDLTQFYQKSSPIEKLLNYTLGNRGLRIPPEGVLLCLKKVDYDRSFGRYLANIYSSYLFFHVIILYMNALDWDEEKTILA

SEQ ID NO: 18121 - protein, 85 aa, unidentified
  REGION 1..85: note = Description of Unknown:cds_NC_003243.1_cds_NP_478343.1_5 target sequence
LWRDLNSVDIKKDQVKFRDSIWGSLIVTKEFVYSQNSNCLFDRNYTLMLKDLFLSRFNSLLILLSPPEPRYSDDLISLLCQLYIA

SEQ ID NO: 18122 - protein, 85 aa, unidentified
  REGION 1..85: note = Description of Unknown:cds_NC_003243.1_cds_NP_478343.1_5 target sequence
GDHVLSMCGNSGYDVIKMLEPYVINSLVQRAEEFRPLIHSLGDFPLFIREKVGQLEGTFGPSARRFFQVLDQVDNIHDLVFVYGC

SEQ ID NO: 18123 - protein, 85 aa, unidentified
  REGION 1..85: note = Description of Unknown:cds_NC_003243.1_cds_NP_478343.1_5 target sequence
YRHWGHPYIDYRKGLLKLYDQVHVKKMIDGAYQECLASDLAKRILRWGFDKYSKWYLDPKLLAPDHPLAPYIKTQTWPPKHIVDL

SEQ ID NO: 18124 - protein, 85 aa, unidentified
  REGION 1..85: note = Description of Unknown:cds_NC_003243.1_cds_NP_478343.1_5 target sequence
VGNTWHKLPITQIFEIPESMDPSEILDDKSHSFTRTKLASWLAENRGGPVPSEKVIITALSKPPVNPREFLKSIDLGGLPDDDLI

SEQ ID NO: 18125 - protein, 85 aa, unidentified
  REGION 1..85: note = Description of Unknown:cds_NC_003243.1_cds_NP_478343.1_5 target sequence
IGLKPKERELKIEGRFFALMSWNLRLYFVITEKLLANYILPLFDALTMTDNLNKVFKKLIDRVTGQGLQDYSRVTYAFHLDYEKW

SEQ ID NO: 18126 - protein, 85 aa, unidentified
  REGION 1..85: note = Description of Unknown:cds_NC_003243.1_cds_NP_478343.1_5 target sequence
NNHQRLESTKDVFPVLDQVFGLKKVFSRTHEFFQKSWIYYSDRSDLIGLWEDQIYCLDMSDGPTCWNGQDGGLEGLRQKGWSLVS

SEQ ID NO: 18127 - protein, 85 aa, unidentified
  REGION 1..85: note = Description of Unknown:cds_NC_003243.1_cds_NP_478343.1_5 target sequence
LLMIDRESQTRNTRTKDFAQGDNQVLCPTYMLSSGLSHEGLLYELESISRNALSIYRAIEDGASKLGLIIKKEETMCSYDFLIYG

SEQ ID NO: 18128 - protein, 85 aa, unidentified
  REGION 1..85: note = Description of Unknown:cds_NC_003243.1_cds_NP_478343.1_5 target sequence
KTPLFRGNILVPESKRWARVSCISNDQIVNLANIMSTVSTNALTVAQHSQSLIKPMRGFLLMAVQAVFHYLLFSPILKGRVYKIL

SEQ ID NO: 18129 - protein, 85 aa, unidentified
  REGION 1..85: note = Description of Unknown:cds_NC_003243.1_cds_NP_478343.1_5 target sequence
SAEGDDFLLAMSRIVYLDPSLGGVSGMSLGRFHIRQFSDPVSEGLSFWKEIWTSSSESWIHSLCQEAGNPDLGDRSLEKFTRLLE

SEQ ID NO: 18130 - protein, 85 aa, unidentified
  REGION 1..85: note = Description of Unknown:cds_NC_003243.1_cds_NP_478343.1_5 target sequence
DPTTLNIRGGASPTILLKDAIRKALYDEVDKVENSEFREAILLSRHHRDNFILFLKSIEPLFPRFLSELFSSSFLGIPESIIGLI

SEQ ID NO: 18131 - protein, 85 aa, unidentified
  REGION 1..85: note = Description of Unknown:cds_NC_003243.1_cds_NP_478343.1_5 target sequence
QNSRTIRRQFRRSLSRSLEESFYNSEIHGISRMTQVPQRIGRVWSCSSERAHLLREISWGRKRVGTTVPHPSEMLALLPKSSISC

SEQ ID NO: 18132 - protein, 85 aa, unidentified
  REGION 1..85: note = Description of Unknown:cds_NC_003243.1_cds_NP_478343.1_5 target sequence
PCGLTGSENPRVSISVLPSIYQSFFSRGPLKGYLGSSTSMSTQTFHAWEKVTNVHVVKRALSLKESINWFISRNSNLAQTLIRNI

SEQ ID NO: 18133 - protein, 85 aa, unidentified
  REGION 1..85: note = Description of Unknown:cds_NC_003243.1_cds_NP_478343.1_5 target sequence
ISLTGPQFPLEEAPVFKRTGSALHRFKSARYSEGGYSSICPNLLSHISVSTDTMSDLTHDGRNFDFMFQPLMLYAQTWTSELVQK

SEQ ID NO: 18134 - protein, 85 aa, unidentified
  REGION 1..85: note = Description of Unknown:cds_NC_003243.1_cds_NP_478343.1_5 target sequence
DIRLKDSTFHWHLRCPKCIRSIDDVILVHPQVFDFPDVSKRISRMVSGAVPSSQILPEVNLLPGHFESLCGRDKSRHIGSAQGLL

SEQ ID NO: 18135 - protein, 85 aa, unidentified
  REGION 1..85: note = Description of Unknown:cds_NC_003243.1_cds_NP_478343.1_5 target sequence
YSILVATHDPGYNDGTIFPVNIYSKISPKDYLRGLARGILIGSSICLLTRMTNININRPLELISGVITYILLRLDNHPSLYVMLR

SEQ ID NO: 18136 - protein, 85 aa, unidentified
  REGION 1..85: note = Description of Unknown:cds_NC_003243.1_cds_NP_478343.1_5 target sequence
EPSLRSEIFSIPQKIPAAYPTTMKEGNRSVLCYLQHVLRYEREIITSSPENDWLWIFSDFRSMKMTYLTLITYQSHIFLQRIERS

SEQ ID NO: 18137 - protein, 85 aa, unidentified
  REGION 1..85: note = Description of Unknown:cds_NC_003243.1_cds_NP_478343.1_5 target sequence
LSKKMRADLRQLSSLMRQVLGGHGEDTLDSGEDIQRLLRDAIQRTKWVDQEVRHAAKTMTNDHSPSKKTSRKVGCSEWICSAQQV

SEQ ID NO: 18138 - protein, 85 aa, unidentified
  REGION 1..85: note = Description of Unknown:cds_NC_003243.1_cds_NP_478343.1_5 target sequence
SISTSSNPAPVSEMDVRTLSRKLQNPLISGLRVVQCATGAHYKLKPILDNLNTYPSFCLVVGDGSGGISRTVLNMFPDAKLVFNS

SEQ ID NO: 18139 - protein, 85 aa, unidentified
  REGION 1..85: note = Description of Unknown:cds_NC_003243.1_cds_NP_478343.1_5 target sequence
LLEVSDLMASGTHPLPPSAIMSGGEDITSRVIDFESIWEKPSDLRNLSTWRYFQSVQSQLNMSYDLIICDAEVTDIASVNKITLL

SEQ ID NO: 18140 - protein, 85 aa, unidentified
  REGION 1..85: note = Description of Unknown:cds_NC_003243.1_cds_NP_478343.1_5 target sequence
MSDFVLSIDGPVDLIFKSYGSMLVDPDYKAIQHLSRAFPQVTGYITQLTSSFSSELYLRFSKRGKFFRDAEYLTSSTLREMSLVL

SEQ ID NO: 18141 - protein, 85 aa, unidentified
  REGION 1..85: note = Description of Unknown:cds_NC_003243.1_cds_NP_478343.1_5 target sequence
FNCSSPKSELQRARSLNYQDLVRGFPEEIVSNPYNEMIITLIDSEVESFLVHKMVDDLELQRGTLSRMSIIIAIVIVYSNRVFNV

SEQ ID NO: 18142 - protein, 85 aa, unidentified
  REGION 1..85: note = Description of Unknown:cds_NC_003243.1_cds_NP_478343.1_5 target sequence
SKPLNDPLFYPPSDPKILRHFNICCSTMMYLSTVLGDVPNFARQHELYNGPITYYFKRQIIRGSIYLSWSWSDDTSVFKRVSCNS

SEQ ID NO: 18143 - protein, 85 aa, unidentified
  REGION 1..85: note = Description of Unknown:cds_NC_025251.1_cds_YP_009091813.1_5 target sequence
LDPQEVYDDPVDPVEPETDLKNNSVVPNILRNSDYNLNSPLIEDPSRLMLDWLTTGNRPNRLNMTDNAFRSYKVLKSYFKRLDVG

SEQ ID NO: 18144 - protein, 85 aa, unidentified
  REGION 1..85: note = Description of Unknown:cds_NC_025251.1_cds_YP_009091813.1_5 target sequence
SLKVGGVGAQAMMSLWLHGAHSESTRSRKCLSDLTHFYQRSSPIEKLLNYTLENRGLQTPPEGVLSSLKKVDYDQAFGRYMGNVY

SEQ ID NO: 18145 - protein, 85 aa, unidentified
  REGION 1..85: note = Description of Unknown:cds_NC_025251.1_cds_YP_009091813.1_5 target sequence
SSYLFFHVIILYMNALDWEEEKTILALWKDLSSVDIKKDQVKFRDQIWGSLVVTKDFIYSQSANCLFDRNYTLMLKDLFLSRFNS

SEQ ID NO: 18146 - protein, 85 aa, unidentified
  REGION 1..85: note = Description of Unknown:cds_NC_025251.1_cds_YP_009091813.1_5 target sequence
LLILLSPPEPRYSDDLISQLCQLYIAGDHVLAMCGNSGYDVIKMLEPYVVNSLVQRAEGFRPLIHSLGDFPLFIKDKVTQLEGIF

SEQ ID NO: 18147 - protein, 85 aa, unidentified
  REGION 1..85: note = Description of Unknown:cds_NC_025251.1_cds_YP_009091813.1_5 target sequence
GPSARNFFHILDQLDNIHDLVFVYGCYRHWGHPYIDYRKGLSKLYDQVHLKKVIDKDYQECLASDLAKRILRWGFDKYSKWYLDS

SEQ ID NO: 18148 - protein, 85 aa, unidentified
  REGION 1..85: note = Description of Unknown:cds_NC_025251.1_cds_YP_009091813.1_5 target sequence
KLLAHDHPLTPYVKTQTWPPKHIVDIVGNTWHKLPITQIFEIPESMDPSEILDDKSHSFTRTKLASWLSDNRGGPVPSEKVIITA

SEQ ID NO: 18149 - protein, 85 aa, unidentified
  REGION 1..85: note = Description of Unknown:cds_NC_025251.1_cds_YP_009091813.1_5 target sequence
LSRPPVNPREFLKSIDLGGLPDDDLIIGLKPKERELKIEGRFFALMSWNLRLYFVITEKLLANYILPLFDALTMTDNLNKVFKKL

SEQ ID NO: 18150 - protein, 85 aa, unidentified
  REGION 1..85: note = Description of Unknown:cds_NC_025251.1_cds_YP_009091813.1_5 target sequence
IDRVTGQGLQDYSRVTYAFHLDYEKWNNHQRLESTKDVFSVLDHVFGLKRVFSRTHEFFQKSWVYYSDRSDLIGLWEGQIYCLDM

SEQ ID NO: 18151 - protein, 85 aa, unidentified
  REGION 1..85: note = Description of Unknown:cds_NC_025251.1_cds_YP_009091813.1_5 target sequence
SDGPTCWNGQDGGLEGLRQKGWSLVSLLMIDRESQTRNTRTKILAQGDNQVLCPTYMLSSGLTEEGLLYELESISRNALSIYRAI

SEQ ID NO: 18152 - protein, 85 aa, unidentified
  REGION 1..85: note = Description of Unknown:cds_NC_025251.1_cds_YP_009091813.1_5 target sequence
EDGASKLGLIIKKEETMCSYDFLIYGKTPLFRGNILVPESKRWARVSCISNDQIVNLANIMSTVSTNALTVAQHSQSLIKPMRDF

SEQ ID NO: 18153 - protein, 85 aa, unidentified
  REGION 1..85: note = Description of Unknown:cds_NC_025251.1_cds_YP_009091813.1_5 target sequence
LLMSVQAVFHYLLFSPILKDRVYKILSADGDDFLLALSRIVYLDPSLGGVSGMSLGRFHIRQFSDPVSEGLAFWKEIWSSSSEAW

SEQ ID NO: 18154 - protein, 85 aa, unidentified
  REGION 1..85: note = Description of Unknown:cds_NC_025251.1_cds_YP_009091813.1_5 target sequence
IHSLCQEAGNPDLGDRSLESFTRLLEDPTTLNIRGGASPTILLKDAIRKALYDEVDKVENSEFREAILLSKTHRDNFILFLRSVE

SEQ ID NO: 18155 - protein, 85 aa, unidentified
  REGION 1..85: note = Description of Unknown:cds_NC_025251.1_cds_YP_009091813.1_5 target sequence
PLFPRFLSELFSSSFLGIPESIIGLIQNSRTIRRQFRRSLSRTLEESFFNSEVHGINRMTQVPQRIGKVWACSAERADLLREISW

SEQ ID NO: 18156 - protein, 85 aa, unidentified
  REGION 1..85: note = Description of Unknown:cds_NC_025251.1_cds_YP_009091813.1_5 target sequence
GRKVVGTTVPHPAEMLVLVPRSSISCVCTQTGEDSPRISVSVLPSFDRSFFSRGPLKGYLGSSTSMSTQLFHAWEKVTNVHVVKR

SEQ ID NO: 18157 - protein, 85 aa, unidentified
  REGION 1..85: note = Description of Unknown:cds_NC_025251.1_cds_YP_009091813.1_5 target sequence
ALSLKESINWFIDRKSNLAQTLIKNIISLTGPLFPLEETPVFKRTGSALHRFKSARYSEGGYSSICPNLLSHISVSTDTMSDLTQ

SEQ ID NO: 18158 - protein, 85 aa, unidentified
  REGION 1..85: note = Description of Unknown:cds_NC_025251.1_cds_YP_009091813.1_5 target sequence
DGRNFDFMFQPLMLYAQTWTSELVQKDIRLRDSTFHWHLRCLKCIRPIDEITLEAPQIFTFPDVSKRISRMVSGAVPQFQRLPEV

SEQ ID NO: 18159 - protein, 85 aa, unidentified
  REGION 1..85: note = Description of Unknown:cds_NC_025251.1_cds_YP_009091813.1_5 target sequence
VLKPGKFESLNGKEKSRHIGTAQGLLYSILVATHDAGYNDGTIFPVNIYSKVSPRDYLRGLARGVLIGSSICFLTRMTNININRP

SEQ ID NO: 18160 - protein, 85 aa, unidentified
  REGION 1..85: note = Description of Unknown:cds_NC_025251.1_cds_YP_009091813.1_5 target sequence
LELISGVISYILLRLDNHPSLYVMLKESSLRSEIFSIPQKIPAAYPTTMKEGNRSVLCYLQHVLRYERDMITSSPDNDWLWIFSD

SEQ ID NO: 18161 - protein, 85 aa, unidentified
  REGION 1..85: note = Description of Unknown:cds_NC_025251.1_cds_YP_009091813.1_5 target sequence
FRSAKMTYLTLVTYQSHILLLKIEKSLSKQMRIRLRQLSSLMRQVLGGHGEDSLESDEDIQGLLRDALQRTRWVDQEVRHAAKTM

SEQ ID NO: 18162 - protein, 85 aa, unidentified
  REGION 1..85: note = Description of Unknown:cds_NC_025251.1_cds_YP_009091813.1_5 target sequence
TGDHSPSRKIPRKGGCSEWVCSAQQVAISTSSNPAPMSELDVRALSRRLQNPLISGLRVVQWATGAHYKLKPILDDLDAYPSLCL

SEQ ID NO: 18163 - protein, 85 aa, unidentified
  REGION 1..85: note = Description of Unknown:cds_NC_025251.1_cds_YP_009091813.1_5 target sequence
VVGDGSGGISRTVLSMFPDARLVFNSLLEVSDLMASGTHPLPPSAIMSGGSDIVSRVIDFGSIWEKPSDLRNLSTWRYFQSIQGR

SEQ ID NO: 18164 - protein, 85 aa, unidentified
  REGION 1..85: note = Description of Unknown:cds_NC_025251.1_cds_YP_009091813.1_5 target sequence
LNMSYDLIICDAEVTDIPSVNKITLLMSDFSLSINGPLNLIFKTYGTMLVNSDYKAIQHLSRAFPSVAGYITQMTSSFSSEIYLR

SEQ ID NO: 18165 - protein, 85 aa, unidentified
  REGION 1..85: note = Description of Unknown:cds_NC_025251.1_cds_YP_009091813.1_5 target sequence
FSKRGKFFRDSEYLTSSTLREMSLVLFNCSSPKSEMQRARSLNYQDLVRGFPEEIISNPYNEMIITLIDSEVESFLVHKMVDDLE

SEQ ID NO: 18166 - protein, 85 aa, unidentified
  REGION 1..85: note = Description of Unknown:cds_NC_025251.1_cds_YP_009091813.1_5 target sequence
LQRGTLSKMSIIVAIVVVFSNRVFNVSKPLSGSVFYPPSDPKILRHFNICCSTLMYLSTALGDVLNFARLHELYNNPVTYYFKKQ

SEQ ID NO: 18167 - protein, 85 aa, unidentified
  REGION 1..85: note = Description of Unknown:cds_NC_025251.1_cds_YP_009091813.1_5 target sequence
VVKGSIYLSWSWSDSTSIFKRVACNSNLSLSSHWIRLIYKIVRTTRFVGNTNELSKEVEKHLRGYNRWINLNDIRSRSSLLDYSG

SEQ ID NO: 18168 - protein, 84 aa, unidentified
  REGION 1..84: note = Description of Unknown:cds_NC_025251.1_cds_YP_009091813.1_5 target sequence
KGSIYLSWSWSDSTSIFKRVACNSNLSLSSHWIRLIYKIVRTTRFVGNTNELSKEVEKHLRGYNRWINLNDIRSRSSLLDYSGL

SEQ ID NO: 18169 - protein, 85 aa, unidentified
  REGION 1..85: note = Description of Unknown:cds_NC_025251.1_cds_YP_009091813.1_5 target sequence
NILRNSDYNLNSPLIEDPSRLMLDWLTTGNRPNRLNMTDNAFRSYKVLKSYFKRLDVGSLKVGGVGAQAMMSLWLHGAHSESTRS

SEQ ID NO: 18170 - protein, 85 aa, unidentified
  REGION 1..85: note = Description of Unknown:cds_NC_025251.1_cds_YP_009091813.1_5 target sequence
RKCLSDLTHFYQRSSPIEKLLNYTLENRGLQTPPEGVLSSLKKVDYDQAFGRYMGNVYSSYLFFHVIILYMNALDWEEEKTILAL

SEQ ID NO: 18171 - protein, 85 aa, unidentified
  REGION 1..85: note = Description of Unknown:cds_NC_025251.1_cds_YP_009091813.1_5 target sequence
WKDLSSVDIKKDQVKFRDQIWGSLVVTKDFIYSQSANCLFDRNYTLMLKDLFLSRFNSLLILLSPPEPRYSDDLISQLCQLYIAG

SEQ ID NO: 18172 - protein, 85 aa, unidentified
  REGION 1..85: note = Description of Unknown:cds_NC_025251.1_cds_YP_009091813.1_5 target sequence
DHVLAMCGNSGYDVIKMLEPYVVNSLVQRAEGFRPLIHSLGDFPLFIKDKVTQLEGIFGPSARNFFHILDQLDNIHDLVFVYGCY

SEQ ID NO: 18173 - protein, 85 aa, unidentified
  REGION 1..85: note = Description of Unknown:cds_NC_025251.1_cds_YP_009091813.1_5 target sequence
RHWGHPYIDYRKGLSKLYDQVHLKKVIDKDYQECLASDLAKRILRWGFDKYSKWYLDSKLLAHDHPLTPYVKTQTWPPKHIVDIV

SEQ ID NO: 18174 - protein, 85 aa, unidentified
  REGION 1..85: note = Description of Unknown:cds_NC_025251.1_cds_YP_009091813.1_5 target sequence
GNTWHKLPITQIFEIPESMDPSEILDDKSHSFTRTKLASWLSDNRGGPVPSEKVIITALSRPPVNPREFLKSIDLGGLPDDDLII

SEQ ID NO: 18175 - protein, 85 aa, unidentified
  REGION 1..85: note = Description of Unknown:cds_NC_025251.1_cds_YP_009091813.1_5 target sequence
GLKPKERELKIEGRFFALMSWNLRLYFVITEKLLANYILPLFDALTMTDNLNKVFKKLIDRVTGQGLQDYSRVTYAFHLDYEKWN

SEQ ID NO: 18176 - protein, 85 aa, unidentified
  REGION 1..85: note = Description of Unknown:cds_NC_025251.1_cds_YP_009091813.1_5 target sequence
NHQRLESTKDVFSVLDHVFGLKRVFSRTHEFFQKSWVYYSDRSDLIGLWEGQIYCLDMSDGPTCWNGQDGGLEGLRQKGWSLVSL

SEQ ID NO: 18177 - protein, 85 aa, unidentified
  REGION 1..85: note = Description of Unknown:cds_NC_025251.1_cds_YP_009091813.1_5 target sequence
LMIDRESQTRNTRTKILAQGDNQVLCPTYMLSSGLTEEGLLYELESISRNALSIYRAIEDGASKLGLIIKKEETMCSYDFLIYGK

SEQ ID NO: 18178 - protein, 85 aa, unidentified
  REGION 1..85: note = Description of Unknown:cds_NC_025251.1_cds_YP_009091813.1_5 target sequence
TPLFRGNILVPESKRWARVSCISNDQIVNLANIMSTVSTNALTVAQHSQSLIKPMRDFLLMSVQAVFHYLLFSPILKDRVYKILS

SEQ ID NO: 18179 - protein, 85 aa, unidentified
  REGION 1..85: note = Description of Unknown:cds_NC_025251.1_cds_YP_009091813.1_5 target sequence
ADGDDFLLALSRIVYLDPSLGGVSGMSLGRFHIRQFSDPVSEGLAFWKEIWSSSSEAWIHSLCQEAGNPDLGDRSLESFTRLLED

SEQ ID NO: 18180 - protein, 85 aa, unidentified
  REGION 1..85: note = Description of Unknown:cds_NC_025251.1_cds_YP_009091813.1_5 target sequence
PTTLNIRGGASPTILLKDAIRKALYDEVDKVENSEFREAILLSKTHRDNFILFLRSVEPLFPRFLSELFSSSFLGIPESIIGLIQ

SEQ ID NO: 18181 - protein, 85 aa, unidentified
  REGION 1..85: note = Description of Unknown:cds_NC_025251.1_cds_YP_009091813.1_5 target sequence
NSRTIRRQFRRSLSRTLEESFFNSEVHGINRMTQVPQRIGKVWACSAERADLLREISWGRKVVGTTVPHPAEMLVLVPRSSISCV

SEQ ID NO: 18182 - protein, 85 aa, unidentified
  REGION 1..85: note = Description of Unknown:cds_NC_025251.1_cds_YP_009091813.1_5 target sequence
CTQTGEDSPRISVSVLPSFDRSFFSRGPLKGYLGSSTSMSTQLFHAWEKVTNVHVVKRALSLKESINWFIDRKSNLAQTLIKNII

SEQ ID NO: 18183 - protein, 85 aa, unidentified
  REGION 1..85: note = Description of Unknown:cds_NC_025251.1_cds_YP_009091813.1_5 target sequence
SLTGPLFPLEETPVFKRTGSALHRFKSARYSEGGYSSICPNLLSHISVSTDTMSDLTQDGRNFDFMFQPLMLYAQTWTSELVQKD

SEQ ID NO: 18184 - protein, 85 aa, unidentified
  REGION 1..85: note = Description of Unknown:cds_NC_025251.1_cds_YP_009091813.1_5 target sequence
IRLRDSTFHWHLRCLKCIRPIDEITLEAPQIFTFPDVSKRISRMVSGAVPQFQRLPEVVLKPGKFESLNGKEKSRHIGTAQGLLY

SEQ ID NO: 18185 - protein, 85 aa, unidentified
  REGION 1..85: note = Description of Unknown:cds_NC_025251.1_cds_YP_009091813.1_5 target sequence
SILVATHDAGYNDGTIFPVNIYSKVSPRDYLRGLARGVLIGSSICFLTRMTNININRPLELISGVISYILLRLDNHPSLYVMLKE

SEQ ID NO: 18186 - protein, 85 aa, unidentified
  REGION 1..85: note = Description of Unknown:cds_NC_025251.1_cds_YP_009091813.1_5 target sequence
SSLRSEIFSIPQKIPAAYPTTMKEGNRSVLCYLQHVLRYERDMITSSPDNDWLWIFSDFRSAKMTYLTLVTYQSHILLLKIEKSL

SEQ ID NO: 18187 - protein, 85 aa, unidentified
  REGION 1..85: note = Description of Unknown:cds_NC_025251.1_cds_YP_009091813.1_5 target sequence
SKQMRIRLRQLSSLMRQVLGGHGEDSLESDEDIQGLLRDALQRTRWVDQEVRHAAKTMTGDHSPSRKIPRKGGCSEWVCSAQQVA

SEQ ID NO: 18188 - protein, 85 aa, unidentified
  REGION 1..85: note = Description of Unknown:cds_NC_025251.1_cds_YP_009091813.1_5 target sequence
ISTSSNPAPMSELDVRALSRRLQNPLISGLRVVQWATGAHYKLKPILDDLDAYPSLCLVVGDGSGGISRTVLSMFPDARLVFNSL

SEQ ID NO: 18189 - protein, 85 aa, unidentified
  REGION 1..85: note = Description of Unknown:cds_NC_025251.1_cds_YP_009091813.1_5 target sequence
LEVSDLMASGTHPLPPSAIMSGGSDIVSRVIDFGSIWEKPSDLRNLSTWRYFQSIQGRLNMSYDLIICDAEVTDIPSVNKITLLM

SEQ ID NO: 18190 - protein, 85 aa, unidentified
  REGION 1..85: note = Description of Unknown:cds_NC_025251.1_cds_YP_009091813.1_5 target sequence
SDFSLSINGPLNLIFKTYGTMLVNSDYKAIQHLSRAFPSVAGYITQMTSSFSSEIYLRFSKRGKFFRDSEYLTSSTLREMSLVLF

SEQ ID NO: 18191 - protein, 85 aa, unidentified
  REGION 1..85: note = Description of Unknown:cds_NC_025251.1_cds_YP_009091813.1_5 target sequence
NCSSPKSEMQRARSLNYQDLVRGFPEEIISNPYNEMIITLIDSEVESFLVHKMVDDLELQRGTLSKMSIIVAIVVVFSNRVFNVS

SEQ ID NO: 18192 - protein, 85 aa, unidentified
  REGION 1..85: note = Description of Unknown:cds_NC_025251.1_cds_YP_009091813.1_5 target sequence
KPLSGSVFYPPSDPKILRHFNICCSTLMYLSTALGDVLNFARLHELYNNPVTYYFKKQVVKGSIYLSWSWSDSTSIFKRVACNSN

SEQ ID NO: 18193 - protein, 85 aa, unidentified
  REGION 1..85: note = Description of Unknown:cds_NC_031988.1_cds_YP_009325518.1_5 target sequence
IDPGEVYDDPIDPVEPEVDLRNNPTIPNILRNSDYNLNSPLIEDPARLMLEWLTSGNKPNRMTLTDNCLRSYKVLKGYFKKVDIG

SEQ ID NO: 18194 - protein, 85 aa, unidentified
  REGION 1..85: note = Description of Unknown:cds_NC_031988.1_cds_YP_009325518.1_5 target sequence
SLKVGGPAAQAMISLWLHGAHSESNRSRKCMSDLAQFYHKSSPIEKLLTYTLGNRGLRIPSEGVLACLKKVDYDKAFGRYLANIY

SEQ ID NO: 18195 - protein, 85 aa, unidentified
  REGION 1..85: note = Description of Unknown:cds_NC_031988.1_cds_YP_009325518.1_5 target sequence
SSYLFFHVIVLYMNALDWDEEKTILALWRELNSIDTKKDQVKFRDQIWGSLIVTKDFVYSQSSNSLFDRNYTLMLKDLFLSRFNS

SEQ ID NO: 18196 - protein, 85 aa, unidentified
  REGION 1..85: note = Description of Unknown:cds_NC_031988.1_cds_YP_009325518.1_5 target sequence
LLILLSPPEPRYSDDLVSQMCQLYIAGDNVLSMCGNSGYEVIKMLEPYVVNSLVQRAEGFRPLIHSLGDFPVFIKDKVGQLEGTF

SEQ ID NO: 18197 - protein, 85 aa, unidentified
  REGION 1..85: note = Description of Unknown:cds_NC_031988.1_cds_YP_009325518.1_5 target sequence
GPSARKFFQVLDQFDNIHDLVFVYGCYRHWGHPYIDYRKGLSKLYDQVHIKKVIDGTYQECLASDLAKRILRWGFDKYSKWYLDS

SEQ ID NO: 18198 - protein, 85 aa, unidentified
  REGION 1..85: note = Description of Unknown:cds_NC_031988.1_cds_YP_009325518.1_5 target sequence
KLLSKDHPLAPYIKTQTWPPKHVVDLVGNTWHKLPITQLFEVPESMDPSEILDDKSHSFTRTKLASWLSENRGGPIPSEKVIITA

SEQ ID NO: 18199 - protein, 85 aa, unidentified; identical to SEQ ID NO: 18149
  REGION 1..85: note = Description of Unknown:cds_NC_031988.1_cds_YP_009325518.1_5 target sequence

SEQ ID NO: 18200 - protein, 85 aa, unidentified
  REGION 1..85: note = Description of Unknown:cds_NC_031988.1_cds_YP_009325518.1_5 target sequence
IDRVTGQGLLDYSRVTYAFHLDYEKWNNHQRLESTKDVFSVLDQAFGLKKVFSRTHEFFQKSWIYYSDRSDLIGLWEDQIYCLDM

SEQ ID NO: 18201 - protein, 85 aa, unidentified
  REGION 1..85: note = Description of Unknown:cds_NC_031988.1_cds_YP_009325518.1_5 target sequence
SNGPTCWNGQDGGLEGLRQKGWSLVSLLMIDRESQTRNTRTKILAQGDNQVLCPTYMLSSGLSHEGLLYELESISRNALSIYRAI

SEQ ID NO: 18202 - protein, 85 aa, unidentified; identical to SEQ ID NO: 18152
  REGION 1..85: note = Description of Unknown:cds_NC_031988.1_cds_YP_009325518.1_5 target sequence

SEQ ID NO: 18203 - protein, 85 aa, unidentified
  REGION 1..85: note = Description of Unknown:cds_NC_031988.1_cds_YP_009325518.1_5 target sequence
LLMSVQAVFHYLLFSPILKGRVYKILSAEGDDFLLAMSRIIYLDPSLGGVSGMSLGRFHIRQFSDPVSEGLSFWKEIWASSSESW

SEQ ID NO: 18204 - protein, 85 aa, unidentified
  REGION 1..85: note = Description of Unknown:cds_NC_031988.1_cds_YP_009325518.1_5 target sequence
IHALCQEAGNPDLGERSLESFTRLLEDPTTLNIKGGASPTILLKDAIRKALYDEVDKVENSEFREAILLSKTHRDNFILFLKSIE

SEQ ID NO: 18205 - protein, 85 aa, unidentified
  REGION 1..85: note = Description of Unknown:cds_NC_031988.1_cds_YP_009325518.1_5 target sequence
PLFPRFLSELFSSSFLGIPESIIGLIQNSRTIRRQFRRSLSRTLEESFYNSEIHGINRMTQVPQRIGRVWSCSSERADLLREISW

SEQ ID NO: 18206 - protein, 85 aa, unidentified
  REGION 1..85: note = Description of Unknown:cds_NC_031988.1_cds_YP_009325518.1_5 target sequence
GRKVVGTTVPHPSEMLSMLPKSSISCTCGSSGGENPRVSVSVLPSFDQSFFSRGPLKGYLGSSTSTSTQLFHAWEKVTNVHVVKR

SEQ ID NO: 18207 - protein, 85 aa, unidentified
  REGION 1..85: note = Description of Unknown:cds_NC_031988.1_cds_YP_009325518.1_5 target sequence
ALSLKESINWFIVRDSNLAQTLIRNIMSLTGPDFPLEEAPVFKRTGSALHRFKSARYSEGGYSSVCPNLLSHISVSTDTMSDLTQ

SEQ ID NO: 18208 - protein, 85 aa, unidentified
  REGION 1..85: note = Description of Unknown:cds_NC_031988.1_cds_YP_009325518.1_5 target sequence
DGRNFDFMFQPLMLYAQTWTSELVQKDTRLRDSTFHWHLRCHKCVRPIDDITLETPQVFAFPDVSKRISRMVSGAVPQFQKLPEI

SEQ ID NO: 18209 - protein, 85 aa, unidentified
  REGION 1..85: note = Description of Unknown:cds_NC_031988.1_cds_YP_009325518.1_5 target sequence
HLRAGHFESLGGKEKSRHIGSAQGLLYSILVATHDSGYNDGTIFPVNIYGKVSPRDYLRGLARGVLIGSSICFLTRMTNININRP

SEQ ID NO: 18210 - protein, 85 aa, unidentified
  REGION 1..85: note = Description of Unknown:cds_NC_031988.1_cds_YP_009325518.1_5 target sequence
LELISGVISYILLRLDNHPSLYVMLREPSLRSEIFSIPQKIPAAYPTTMKEGNRSVLCYLQHVLRYEREVITASPENDWLWIFSD

SEQ ID NO: 18211 - protein, 85 aa, unidentified
  REGION 1..85: note = Description of Unknown:cds_NC_031988.1_cds_YP_009325518.1_5 target sequence
FRNIKMTYLTLITYQSHILLQRVERCLSKKMRASLRQMSSLMRQVLGGHGEETLDSDEDIQRLLRDALQRTRWVDQEVRHAARTM

SEQ ID NO: 18212 - protein, 85 aa, unidentified
  REGION 1..85: note = Description of Unknown:cds_NC_031988.1_cds_YP_009325518.1_5 target sequence
TGDYSPNKRVSRKAGCSEWVCSAQQVAISTSANPAPVSELDVRTLSRKLQNPLISGLRVVQWATGAHYKLKPILDDLNSFPSLCL

SEQ ID NO: 18213 - protein, 85 aa, unidentified
  REGION 1..85: note = Description of Unknown:cds_NC_031988.1_cds_YP_009325518.1_5 target sequence
VVGDGSGGISRAVLNMFPDAKLVFNSLLEVNDLMASGTHPLPPSAIMSGGDDIVSRVIDFNSIWEKPSDLRNLSTWKYFQSVQNQ

SEQ ID NO: 18214 - protein, 85 aa, unidentified
  REGION 1..85: note = Description of Unknown:cds_NC_031988.1_cds_YP_009325518.1_5 target sequence
VNMSYDLIICDAEVTDIASINRITLLMSDFALSIDGPLYLIFKTYGTMLVNPDYKAIQHLSRVFPTVTGFITQMTSSFSSELYLR

SEQ ID NO: 18215 - protein, 85 aa, unidentified
  REGION 1..85: note = Description of Unknown:cds_NC_031988.1_cds_YP_009325518.1_5 target sequence
FSKRGKFFRDVEYLTSSTLREMSLVLFNCSSPKSEMQRARSLNYQDLVRGFPEEIISNPYNEMIITLIDSDVESFLVHKMVDDLE

SEQ ID NO: 18216 - protein, 85 aa, unidentified
  REGION 1..85: note = Description of Unknown:cds_NC_031988.1_cds_YP_009325518.1_5 target sequence
LQRGTLSKMSIIIAIVIVFSNRVFNVSKPLNDPLFYPPSDPKILRHFNICCSTMMYLSTALGDVPNFARLHELYNRPITYYFKKQ

SEQ ID NO: 18217 - protein, 85 aa, unidentified
  REGION 1..85: note = Description of Unknown:cds_NC_031988.1_cds_YP_009325518.1_5 target sequence
VVRGSIYLSWSWSDDTSVFKRVACNSNLSLSSHWIRLIYKIVKTTRLAGSHVELSREIEKHLKGYNRWITFNDIRSRSSLLDYSC

SEQ ID NO: 18218 - protein, 84 aa, unidentified
  REGION 1..84: note = Description of Unknown:cds_NC_031988.1_cds_YP_009325518.1_5 target sequence
RGSIYLSWSWSDDTSVFKRVACNSNLSLSSHWIRLIYKIVKTTRLAGSHVELSREIEKHLKGYNRWITFNDIRSRSSLLDYSCL

SEQ ID NO: 18219 - protein, 85 aa, unidentified
  REGION 1..85: note = Description of Unknown:cds_NC_031988.1_cds_YP_009325518.1_5 target sequence
NILRNSDYNLNSPLIEDPARLMLEWLTSGNKPNRMTLTDNCLRSYKVLKGYFKKVDIGSLKVGGPAAQAMISLWLHGAHSESNRS

SEQ ID NO: 18220 - protein, 85 aa, unidentified
  REGION 1..85: note = Description of Unknown:cds_NC_031988.1_cds_YP_009325518.1_5 target sequence
RKCMSDLAQFYHKSSPIEKLLTYTLGNRGLRIPSEGVLACLKKVDYDKAFGRYLANIYSSYLFFHVIVLYMNALDWDEEKTILAL

SEQ ID NO: 18221 - protein, 85 aa, unidentified
  REGION 1..85: note = Description of Unknown:cds_NC_031988.1_cds_YP_009325518.1_5 target sequence
WRELNSIDTKKDQVKFRDQIWGSLIVTKDFVYSQSSNSLFDRNYTLMLKDLFLSRFNSLLILLSPPEPRYSDDLVSQMCQLYIAG

SEQ ID NO: 18222 - protein, 85 aa, unidentified
  REGION 1..85: note = Description of Unknown:cds_NC_031988.1_cds_YP_009325518.1_5 target sequence
DNVLSMCGNSGYEVIKMLEPYVVNSLVQRAEGFRPLIHSLGDFPVFIKDKVGQLEGTFGPSARKFFQVLDQFDNIHDLVFVYGCY

SEQ ID NO: 18223 - protein, 85 aa, unidentified
  REGION 1..85: note = Description of Unknown:cds_NC_031988.1_cds_YP_009325518.1_5 target sequence
RHWGHPYIDYRKGLSKLYDQVHIKKVIDGTYQECLASDLAKRILRWGFDKYSKWYLDSKLLSKDHPLAPYIKTQTWPPKHVVDLV

SEQ ID NO: 18224 - protein, 85 aa, unidentified
  REGION 1..85: note = Description of Unknown:cds_NC_031988.1_cds_YP_009325518.1_5 target sequence
GNTWHKLPITQLFEVPESMDPSEILDDKSHSFTRTKLASWLSENRGGPIPSEKVIITALSRPPVNPREFLKSIDLGGLPDDDLII

SEQ ID NO: 18225 - protein, 85 aa, unidentified; identical to SEQ ID NO: 18075
  REGION 1..85: note = Description of Unknown:cds_NC_031988.1_cds_YP_009325518.1_5 target sequence

SEQ ID NO: 18226 - protein, 85 aa, unidentified
  REGION 1..85: note = Description of Unknown:cds_NC_031988.1_cds_YP_009325518.1_5 target sequence
NHQRLESTKDVFSVLDQAFGLKKVFSRTHEFFQKSWIYYSDRSDLIGLWEDQIYCLDMSNGPTCWNGQDGGLEGLRQKGWSLVSL

SEQ ID NO: 18227 - protein, 85 aa, unidentified
  REGION 1..85: note = Description of Unknown:cds_NC_031988.1_cds_YP_009325518.1_5 target sequence
LMIDRESQTRNTRTKILAQGDNQVLCPTYMLSSGLSHEGLLYELESISRNALSIYRAIEDGASKLGLIIKKEETMCSYDFLIYGK

SEQ ID NO: 18228 - protein, 85 aa, unidentified
  REGION 1..85: note = Description of Unknown:cds_NC_031988.1_cds_YP_009325518.1_5 target sequence
TPLFRGNILVPESKRWARVSCISNDQIVNLANIMSTVSTNALTVAQHSQSLIKPMRDFLLMSVQAVFHYLLFSPILKGRVYKILS

SEQ ID NO: 18229 - protein, 85 aa, unidentified
  REGION 1..85: note = Description of Unknown:cds_NC_031988.1_cds_YP_009325518.1_5 target sequence
AEGDDFLLAMSRIIYLDPSLGGVSGMSLGRFHIRQFSDPVSEGLSFWKEIWASSSESWIHALCQEAGNPDLGERSLESFTRLLED

SEQ ID NO: 18230 - protein, 85 aa, unidentified
  REGION 1..85: note = Description of Unknown:cds_NC_031988.1_cds_YP_009325518.1_5 target sequence
PTTLNIKGGASPTILLKDAIRKALYDEVDKVENSEFREAILLSKTHRDNFILFLKSIEPLFPRFLSELFSSSFLGIPESIIGLIQ

SEQ ID NO: 18231 - protein, 85 aa, unidentified
  REGION 1..85: note = Description of Unknown:cds_NC_031988.1_cds_YP_009325518.1_5 target sequence
NSRTIRRQFRRSLSRTLEESFYNSEIHGINRMTQVPQRIGRVWSCSSERADLLREISWGRKVVGTTVPHPSEMLSMLPKSSISCT

SEQ ID NO: 18232 - protein, 85 aa, unidentified
  REGION 1..85: note = Description of Unknown:cds_NC_031988.1_cds_YP_009325518.1_5 target sequence
CGSSGGENPRVSVSVLPSFDQSFFSRGPLKGYLGSSTSTSTQLFHAWEKVTNVHVVKRALSLKESINWFIVRDSNLAQTLIRNIM

SEQ ID NO: 18233 - protein, 85 aa, unidentified
  REGION 1..85: note = Description of Unknown:cds_NC_031988.1_cds_YP_009325518.1_5 target sequence
SLTGPDFPLEEAPVFKRTGSALHRFKSARYSEGGYSSVCPNLLSHISVSTDTMSDLTQDGRNFDFMFQPLMLYAQTWTSELVQKD

SEQ ID NO: 18234 - protein, 85 aa, unidentified
  REGION 1..85: note = Description of Unknown:cds_NC_031988.1_cds_YP_009325518.1_5 target sequence
TRLRDSTFHWHLRCHKCVRPIDDITLETPQVFAFPDVSKRISRMVSGAVPQFQKLPEIHLRAGHFESLGGKEKSRHIGSAQGLLY

SEQ ID NO: 18235 - protein, 85 aa, unidentified
  REGION 1..85: note = Description of Unknown:cds_NC_031988.1_cds_YP_009325518.1_5 target sequence
SILVATHDSGYNDGTIFPVNIYGKVSPRDYLRGLARGVLIGSSICFLTRMTNININRPLELISGVISYILLRLDNHPSLYVMLRE

SEQ ID NO: 18236 - protein, 85 aa, unidentified
  REGION 1..85: note = Description of Unknown:cds_NC_031988.1_cds_YP_009325518.1_5 target sequence
PSLRSEIFSIPQKIPAAYPTTMKEGNRSVLCYLQHVLRYEREVITASPENDWLWIFSDFRNIKMTYLTLITYQSHILLQRVERCL

SEQ ID NO: 18237 - protein, 85 aa, unidentified
  REGION 1..85: note = Description of Unknown:cds_NC_031988.1_cds_YP_009325518.1_5 target sequence
SKKMRASLRQMSSLMRQVLGGHGEETLDSDEDIQRLLRDALQRTRWVDQEVRHAARTMTGDYSPNKRVSRKAGCSEWVCSAQQVA

SEQ ID NO: 18238 - protein, 85 aa, unidentified
  REGION 1..85: note = Description of Unknown:cds_NC_031988.1_cds_YP_009325518.1_5 target sequence
ISTSANPAPVSELDVRTLSRKLQNPLISGLRVVQWATGAHYKLKPILDDLNSFPSLCLVVGDGSGGISRAVLNMFPDAKLVFNSL

SEQ ID NO: 18239 - protein, 85 aa, unidentified
  REGION 1..85: note = Description of Unknown:cds_NC_031988.1_cds_YP_009325518.1_5 target sequence
LEVNDLMASGTHPLPPSAIMSGGDDIVSRVIDFNSIWEKPSDLRNLSTWKYFQSVQNQVNMSYDLIICDAEVTDIASINRITLLM

SEQ ID NO: 18240 - protein, 85 aa, unidentified
  REGION 1..85: note = Description of Unknown:cds_NC_031988.1_cds_YP_009325518.1_5 target sequence
SDFALSIDGPLYLIFKTYGTMLVNPDYKAIQHLSRVFPTVTGFITQMTSSFSSELYLRFSKRGKFFRDVEYLTSSTLREMSLVLF

SEQ ID NO: 18241 - protein, 85 aa, unidentified
  REGION 1..85: note = Description of Unknown:cds_NC_031988.1_cds_YP_009325518.1_5 target sequence
NCSSPKSEMQRARSLNYQDLVRGFPEEIISNPYNEMIITLIDSDVESFLVHKMVDDLELQRGTLSKMSIIIAIVIVFSNRVFNVS

SEQ ID NO: 18242 - protein, 85 aa, unidentified
  REGION 1..85: note = Description of Unknown:cds_NC_031988.1_cds_YP_009325518.1_5 target sequence
KPLNDPLFYPPSDPKILRHFNICCSTMMYLSTALGDVPNFARLHELYNRPITYYFKKQVVRGSIYLSWSWSDDTSVFKRVACNSN

SEQ ID NO: 18243 - protein, 85 aa, unidentified
  REGION 1..85: note = Description of Unknown:cds_NC_020808.1_cds_YP_007641396.1_5 target sequence
IDPLEVYDDPVDPVEPEAEFRGNSVVPNILRNSDYNLNSPLIEDPSRLMLEWLTTGNKPNRMTFTDNSLRSYKVLKSYFKKIDVG

SEQ ID NO: 18244 - protein, 85 aa, unidentified
  REGION 1..85: note = Description of Unknown:cds_NC_020808.1_cds_YP_007641396.1_5 target sequence
SLRVGSSGAQAMISLWIHGSHSESNRSRKCLTDLSNFYQKSSPIEKLLNYTLENRGLKIPREGVLSSLRKVNYDHAFGRYLGNTY

SEQ ID NO: 18245 - protein, 85 aa, unidentified
  REGION 1..85: note = Description of Unknown:cds_NC_020808.1_cds_YP_007641396.1_5 target sequence
ASYLFFHIIILYMNALDWDEEKTILALWKELNSVDVGKDQVKFRDQIWGSLVVTKDFVYSQSANSLFDRNYTLMLKDLFLSRFNS

SEQ ID NO: 18246 - protein, 85 aa, unidentified
  REGION 1..85: note = Description of Unknown:cds_NC_020808.1_cds_YP_007641396.1_5 target sequence
LLILLSPPEPRYSDDLVSQLCQLYIAGDNILSICGNSGYDVIKMLEPYVVNSLVQKAEEFRPLIHSLGDFPIFIKDKVGQLEGTF

SEQ ID NO: 18247 - protein, 85 aa, unidentified
  REGION 1..85: note = Description of Unknown:cds_NC_020808.1_cds_YP_007641396.1_5 target sequence
GPSARKFFRVLDQLDNIHDLVFVYGCYRHWGHPYIDYRKGLSKLYDQVHVKKVIDGDYQECLASDLAKRILRWGFDKYSKWYLDA

SEQ ID NO: 18248 - protein, 85 aa, unidentified
  REGION 1..85: note = Description of Unknown:cds_NC_020808.1_cds_YP_007641396.1_5 target sequence
KLLTKDHPLTPYIKTQTWPPKHVVDIVGNTWHKLPITQIFEIPESMDPSEILDDKSHSFTRTKLASWLSENRGGPVPSEKVIITA

SEQ ID NO: 18249 - protein, 85 aa, unidentified
  REGION 1..85: note = Description of Unknown:cds_NC_020808.1_cds_YP_007641396.1_5 target sequence
LSRPPVNPREFLRSIDIGGLPDDDLIIGLKPKERELKIEGRFFALMSWNLRLYFVITEKLLANYILPLFDALTMTDNLNKVFKKL

SEQ ID NO: 18250 - protein, 85 aa, unidentified
  REGION 1..85: note = Description of Unknown:cds_NC_020808.1_cds_YP_007641396.1_5 target sequence
IDRVTGQGLLDYSRVTYAFHLDYEKWNNHQRLESTKDVFSVLDYVFGLKRVFSRTHEFFQKSWVYYSDRSDLIGLWEDQIYCLDM

SEQ ID NO: 18251 - protein, 85 aa, unidentified
  REGION 1..85: note = Description of Unknown:cds_NC_020808.1_cds_YP_007641396.1_5 target sequence
TNGPTCWNGQDGGLEGLRQKGWSLVSLLMIDRESQTRNTRTKILAQGDNQVLCPTYMLSSGLTQEGLLYELDSISRNALSIYRAI

SEQ ID NO: 18252 - protein, 85 aa, unidentified; identical to SEQ ID NO: 18152
  REGION 1..85: note = Description of Unknown:cds_NC_020808.1_cds_YP_007641396.1_5 target sequence

SEQ ID NO: 18253 - protein, 85 aa, unidentified
  REGION 1..85: note = Description of Unknown:cds_NC_020808.1_cds_YP_007641396.1_5 target sequence
LLMSVQAVFHYLLFSPILKDRVYKILSADGDEFLLAMSRIIYLDPSLGGVSGMSLGRFHIRQFSDPVSEGLSFWKEIWSSSSEPW

SEQ ID NO: 18254 - protein, 85 aa, unidentified
  REGION 1..85: note = Description of Unknown:cds_NC_020808.1_cds_YP_007641396.1_5 target sequence
IQSLCQEAGNPDLGDRSLESFTRLLEDPTTLNIRGGASPTILLKEAIRKALYDEVDKVENSEFREAILLSKTHRDNFILFLKSVE

SEQ ID NO: 18255 - protein, 85 aa, unidentified
  REGION 1..85: note = Description of Unknown:cds_NC_020808.1_cds_YP_007641396.1_5 target sequence
PLFPRFLSELFSSSFLGIPESIIGLIQNSRTIRRQFRRSLSRTLEESFFNSEVHGINRMTQIPQRIGRVWDCSAERADQLREISW

SEQ ID NO: 18256 - protein, 85 aa, unidentified
  REGION 1..85: note = Description of Unknown:cds_NC_020808.1_cds_YP_007641396.1_5 target sequence
GRKVVGTTVPHPAEMLALLPKSSISCTCGQTGENSPRISVSVLPSFDQSFFSRGPLKGYLGSSTSMSTQLFHAWEKVTNVHVVKR

SEQ ID NO: 18257 - protein, 85 aa, unidentified
  REGION 1..85: note = Description of Unknown:cds_NC_020808.1_cds_YP_007641396.1_5 target sequence
ALSLKESINWFIVRDSNLAQTLIKNIISLTGPSFPLEETPVFKRTGSALHRFKSARYSEGGYSSICPNLLSHISVSTDTMSDLTQ

SEQ ID NO: 18258 - protein, 85 aa, unidentified
  REGION 1..85: note = Description of Unknown:cds_NC_020808.1_cds_YP_007641396.1_5 target sequence
DGTNFDFMFQPLMLYAQTWTSELVQKDDRLKDSTFHWHLRCPKCIRPIDDINLEAPQVFMFPDVSKRISRMVSGAVPHFQKLPEI

SEQ ID NO: 18259 - protein, 85 aa, unidentified
  REGION 1..85: note = Description of Unknown:cds_NC_020808.1_cds_YP_007641396.1_5 target sequence
NLKPGKFELLSGKDKSRHIGTAQGLLYSVLVATHDSGYNDGTIFPVNIYGRVSPRDYLRGLARGVLIGSSICFLTRMTNININRP

SEQ ID NO: 18260 - protein, 85 aa, unidentified
  REGION 1..85: note = Description of Unknown:cds_NC_020808.1_cds_YP_007641396.1_5 target sequence
LELISGVISYILLRLDNHPSLYVMLKEPSLRSEIFSIPQKIPAAYPTTMKEGNRSVLCYLQHVLRYERDAITASPDNDWLWIFSD

SEQ ID NO: 18261 - protein, 85 aa, unidentified
  REGION 1..85: note = Description of Unknown:cds_NC_020808.1_cds_YP_007641396.1_5 target sequence
FRSTKMTYLTLVTYQSHILLQKIEKNLSKQMRIRLRQLSSLMRRVLGGHGEETLDSEEDIQGLLRDALQRTRWVDQEVRHAAKTM

SEQ ID NO: 18262 - protein, 85 aa, unidentified
  REGION 1..85: note = Description of Unknown:cds_NC_020808.1_cds_YP_007641396.1_5 target sequence
SGDHSPSKRISRKAGCSEWICSAQQVAISTSSNPAPTSELDVRALSRRFQNPLISGLRVVQWATGAHYKLKPILDDIDVYPALCL

SEQ ID NO: 18263 - protein, 85 aa, unidentified
  REGION 1..85: note = Description of Unknown:cds_NC_020808.1_cds_YP_007641396.1_5 target sequence
VVGDGSGGISRVVLSMFPDAKLVFNSLLEVSDLMASGTHPLPPSAIVSGGDDIVSRVIDFDSIWEKPSDLRNPSTWKYFQTVQCS

SEQ ID NO: 18264 - protein, 85 aa, unidentified
  REGION 1..85: note = Description of Unknown:cds_NC_020808.1_cds_YP_007641396.1_5 target sequence
HNMSYELIICDAEVTDIPSVNKITLLMSDFALSINGPLTLVFKTYGTMLVNPDYKAIQHLSRAFPSVTGYITQMTSSFSSELYLK

SEQ ID NO: 18265 - protein, 85 aa, unidentified
  REGION 1..85: note = Description of Unknown:cds_NC_020808.1_cds_YP_007641396.1_5 target sequence
FSKRGKFFRDAEYLTSSTLREMSLVLFNCSSPKSEMQRARSLNYQDLVRGFPEEIISNPYNEMIITLIDSEVESFLVHKMVDDLE

SEQ ID NO: 18266 - protein, 85 aa, unidentified
  REGION 1..85: note = Description of Unknown:cds_NC_020808.1_cds_YP_007641396.1_5 target sequence
LQRGALSKISIVIAIMMVFSNRVFNVSKPLNDPKFYPPSDPKILRHFNICCSTLMYLSTAMGDVLSFARLHELYNGPITYYFKKQ

SEQ ID NO: 18267 - protein, 85 aa, unidentified
  REGION 1..85: note = Description of Unknown:cds_NC_020808.1_cds_YP_007641396.1_5 target sequence
IIGGSIYLSWSWSDNSSIFKRVACNSNLSLSSHWIRLIYKIVRTTRFVGSAKDLSKEVERHLRGYNRWINFNDIRSRSSLLDYSC

SEQ ID NO: 18268 - protein, 84 aa, unidentified
  REGION 1..84: note = Description of Unknown:cds_NC_020808.1_cds_YP_007641396.1_5 target sequence
GGSIYLSWSWSDNSSIFKRVACNSNLSLSSHWIRLIYKIVRTTRFVGSAKDLSKEVERHLRGYNRWINFNDIRSRSSLLDYSCL

SEQ ID NO: 18269 - protein, 85 aa, unidentified
  REGION 1..85: note = Description of Unknown:cds_NC_020808.1_cds_YP_007641396.1_5 target sequence
NILRNSDYNLNSPLIEDPSRLMLEWLTTGNKPNRMTFTDNSLRSYKVLKSYFKKIDVGSLRVGSSGAQAMISLWIHGSHSESNRS

SEQ ID NO: 18270 - protein, 85 aa, unidentified
  REGION 1..85: note = Description of Unknown:cds_NC_020808.1_cds_YP_007641396.1_5 target sequence
RKCLTDLSNFYQKSSPIEKLLNYTLENRGLKIPREGVLSSLRKVNYDHAFGRYLGNTYASYLFFHIIILYMNALDWDEEKTILAL

SEQ ID NO: 18271 - protein, 85 aa, unidentified
  REGION 1..85: note = Description of Unknown:cds_NC_020808.1_cds_YP_007641396.1_5 target sequence
WKELNSVDVGKDQVKFRDQIWGSLVVTKDFVYSQSANSLFDRNYTLMLKDLFLSRFNSLLILLSPPEPRYSDDLVSQLCQLYIAG

SEQ ID NO: 18272 - protein, 85 aa, unidentified
  REGION 1..85: note = Description of Unknown:cds_NC_020808.1_cds_YP_007641396.1_5 target sequence
DNILSICGNSGYDVIKMLEPYVVNSLVQKAEEFRPLIHSLGDFPIFIKDKVGQLEGTFGPSARKFFRVLDQLDNIHDLVFVYGCY

SEQ ID NO: 18273 - protein, 85 aa, unidentified
  REGION 1..85: note = Description of Unknown:cds_NC_020808.1_cds_YP_007641396.1_5 target sequence
RHWGHPYIDYRKGLSKLYDQVHVKKVIDGDYQECLASDLAKRILRWGFDKYSKWYLDAKLLTKDHPLTPYIKTQTWPPKHVVDIV

SEQ ID NO: 18274 - protein, 85 aa, unidentified
  REGION 1..85: note = Description of Unknown:cds_NC_020808.1_cds_YP_007641396.1_5 target sequence
GNTWHKLPITQIFEIPESMDPSEILDDKSHSFTRTKLASWLSENRGGPVPSEKVIITALSRPPVNPREFLRSIDIGGLPDDDLII

SEQ ID NO: 18275 - protein, 85 aa, unidentified; identical to SEQ ID NO: 18075
  REGION 1..85: note = Description of Unknown:cds_NC_020808.1_cds_YP_007641396.1_5 target sequence

SEQ ID NO: 18276 - protein, 85 aa, unidentified
  REGION 1..85: note = Description of Unknown:cds_NC_020808.1_cds_YP_007641396.1_5 target sequence
NHQRLESTKDVFSVLDYVFGLKRVFSRTHEFFQKSWVYYSDRSDLIGLWEDQIYCLDMTNGPTCWNGQDGGLEGLRQKGWSLVSL

SEQ ID NO: 18277 - protein, 85 aa, unidentified
  REGION 1..85: note = Description of Unknown:cds_NC_020808.1_cds_YP_007641396.1_5 target sequence
LMIDRESQTRNTRTKILAQGDNQVLCPTYMLSSGLTQEGLLYELDSISRNALSIYRAIEDGASKLGLIIKKEETMCSYDFLIYGK

SEQ ID NO: 18278 - protein, 85 aa, unidentified; identical to SEQ ID NO: 18178
  REGION 1..85: note = Description of Unknown:cds_NC_020808.1_cds_YP_007641396.1_5 target sequence

SEQ ID NO: 18279 - protein, 85 aa, unidentified
  REGION 1..85: note = Description of Unknown:cds_NC_020808.1_cds_YP_007641396.1_5 target sequence
ADGDEFLLAMSRIIYLDPSLGGVSGMSLGRFHIRQFSDPVSEGLSFWKEIWSSSSEPWIQSLCQEAGNPDLGDRSLESFTRLLED

SEQ ID NO: 18280 - protein, 85 aa, unidentified
  REGION 1..85: note = Description of Unknown:cds_NC_020808.1_cds_YP_007641396.1_5 target sequence
PTTLNIRGGASPTILLKEAIRKALYDEVDKVENSEFREAILLSKTHRDNFILFLKSVEPLFPRFLSELFSSSFLGIPESIIGLIQ

SEQ ID NO: 18281 - protein, 85 aa, unidentified
  REGION 1..85: note = Description of Unknown:cds_NC_020808.1_cds_YP_007641396.1_5 target sequence
NSRTIRRQFRRSLSRTLEESFFNSEVHGINRMTQIPQRIGRVWDCSAERADQLREISWGRKVVGTTVPHPAEMLALLPKSSISCT

SEQ ID NO: 18282 - protein, 85 aa, unidentified
  REGION 1..85: note = Description of Unknown:cds_NC_020808.1_cds_YP_007641396.1_5 target sequence
CGQTGENSPRISVSVLPSFDQSFFSRGPLKGYLGSSTSMSTQLFHAWEKVTNVHVVKRALSLKESINWFIVRDSNLAQTLIKNII

SEQ ID NO: 18283 - protein, 85 aa, unidentified
  REGION 1..85: note = Description of Unknown:cds_NC_020808.1_cds_YP_007641396.1_5 target sequence
SLTGPSFPLEETPVFKRTGSALHRFKSARYSEGGYSSICPNLLSHISVSTDTMSDLTQDGTNFDFMFQPLMLYAQTWTSELVQKD

SEQ ID NO: 18284 - protein, 85 aa, unidentified
  REGION 1..85: note = Description of Unknown:cds_NC_020808.1_cds_YP_007641396.1_5 target sequence
DRLKDSTFHWHLRCPKCIRPIDDINLEAPQVFMFPDVSKRISRMVSGAVPHFQKLPEINLKPGKFELLSGKDKSRHIGTAQGLLY

SEQ ID NO: 18285 - protein, 85 aa, unidentified
  REGION 1..85: note = Description of Unknown:cds_NC_020808.1_cds_YP_007641396.1_5 target sequence
SVLVATHDSGYNDGTIFPVNIYGRVSPRDYLRGLARGVLIGSSICFLTRMTNININRPLELISGVISYILLRLDNHPSLYVMLKE

SEQ ID NO: 18286 - protein, 85 aa, unidentified
  REGION 1..85: note = Description of Unknown:cds_NC_020808.1_cds_YP_007641396.1_5 target sequence
PSLRSEIFSIPQKIPAAYPTTMKEGNRSVLCYLQHVLRYERDAITASPDNDWLWIFSDFRSTKMTYLTLVTYQSHILLQKIEKNL

SEQ ID NO: 18287 - protein, 85 aa, unidentified
  REGION 1..85: note = Description of Unknown:cds_NC_020808.1_cds_YP_007641396.1_5 target sequence
SKQMRIRLRQLSSLMRRVLGGHGEETLDSEEDIQGLLRDALQRTRWVDQEVRHAAKTMSGDHSPSKRISRKAGCSEWICSAQQVA

SEQ ID NO: 18288 - protein, 85 aa, unidentified
  REGION 1..85: note = Description of Unknown:cds_NC_020808.1_cds_YP_007641396.1_5 target sequence
ISTSSNPAPTSELDVRALSRRFQNPLISGLRVVQWATGAHYKLKPILDDIDVYPALCLVVGDGSGGISRVVLSMFPDAKLVFNSL

SEQ ID NO: 18289 - protein, 85 aa, unidentified
  REGION 1..85: note = Description of Unknown:cds_NC_020808.1_cds_YP_007641396.1_5 target sequence
LEVSDLMASGTHPLPPSAIVSGGDDIVSRVIDFDSIWEKPSDLRNPSTWKYFQTVQCSHNMSYELIICDAEVTDIPSVNKITLLM

SEQ ID NO: 18290 - protein, 85 aa, unidentified
  REGION 1..85: note = Description of Unknown:cds_NC_020808.1_cds_YP_007641396.1_5 target sequence
SDFALSINGPLTLVFKTYGTMLVNPDYKAIQHLSRAFPSVTGYITQMTSSFSSELYLKFSKRGKFFRDAEYLTSSTLREMSLVLF

SEQ ID NO: 18291 - protein, 85 aa, unidentified
  REGION 1..85: note = Description of Unknown:cds_NC_020808.1_cds_YP_007641396.1_5 target sequence
NCSSPKSEMQRARSLNYQDLVRGFPEEIISNPYNEMIITLIDSEVESFLVHKMVDDLELQRGALSKISIVIAIMMVFSNRVFNVS

SEQ ID NO: 18292 - protein, 85 aa, unidentified
  REGION 1..85: note = Description of Unknown:cds_NC_020808.1_cds_YP_007641396.1_5 target sequence
KPLNDPKFYPPSDPKILRHFNICCSTLMYLSTAMGDVLSFARLHELYNGPITYYFKKQIIGGSIYLSWSWSDNSSIFKRVACNSN

SEQ ID NO: 18293 - protein, 85 aa, unidentified
  REGION 1..85: note = Description of Unknown:cds_NC_025385.1_cds_YP_009094331.1_5 target sequence
IDSLEVYDDPVDPIEPEVDLKNNAVVPNILRNSDYNLNSPLIEDPSQLMLDWLITGNKPNRLSPSDNLVRSYKVLKSYFKKVDVG

SEQ ID NO: 18294 - protein, 85 aa, unidentified
  REGION 1..85: note = Description of Unknown:cds_NC_025385.1_cds_YP_009094331.1_5 target sequence
SLRIGGLGAQAMTSLWLHGAHSESTRSRKCLSDLAQFYQKSSPIEKLLNYTLENRGLQVPPEGVLSSLKKVSYDRAFGRYLANTY

SEQ ID NO: 18295 - protein, 85 aa, unidentified
  REGION 1..85: note = Description of Unknown:cds_NC_025385.1_cds_YP_009094331.1_5 target sequence
SSYLFFHVIILYMNALDWEEEKTILALWKDLNSVDIKKDQVKFRDQIWGSLVVTKDFVYSQSANCLFDRNYTLMLKDLFLSRFNS

SEQ ID NO: 18296 - protein, 85 aa, unidentified
  REGION 1..85: note = Description of Unknown:cds_NC_025385.1_cds_YP_009094331.1_5 target sequence
LLILLSPPEPRYSDDLISQLCQLYIAGDNVLSMCGNSGYDVIKMLEPYVVNSLVQRAEGFRPLIHSLGDFPLFIKDKVTQLEGTF

SEQ ID NO: 18297 - protein, 85 aa, unidentified
  REGION 1..85: note = Description of Unknown:cds_NC_025385.1_cds_YP_009094331.1_5 target sequence
GPSARNFFRILDQLDNIHDLVFVYGCYRHWGHPYIEYRKGLSKLYDQVHVKKVIDGDYQECLASDLAKRILRWGFDKYSKWYLDS

SEQ ID NO: 18298 - protein, 85 aa, unidentified
  REGION 1..85: note = Description of Unknown:cds_NC_025385.1_cds_YP_009094331.1_5 target sequence
KLLAPNHPLTPYIKTQTWPPKHIVDMVGNTWHKLPITQIFEIPESMDPSEILDDKSHSFTRTKLASWLSDNRGGPVPSEKVIITA

SEQ ID NO: 18299 - protein, 85 aa, unidentified
  REGION 1..85: note = Description of Unknown:cds_NC_025385.1_cds_YP_009094331.1_5 target sequence
LSRPPVNPREFLKSIDIGGLPDDDLIIGLKPKERELKIEGRFFALMSWNLRLYFVITEKLLANYILPLFDALTMTDNLNKVFKKL

SEQ ID NO: 18300 - protein, 85 aa, unidentified
  REGION 1..85: note = Description of Unknown:cds_NC_025385.1_cds_YP_009094331.1_5 target sequence
IDRVTGQGLQDYSRVTYAFHLDYEKWNNHQRLESTKDVFSVLDYVFGLKKVFSRTHEFFQKSWVYYSDRSDLIGLWEDQIYCLDM

SEQ ID NO: 18301 - protein, 85 aa, unidentified
  REGION 1..85: note = Description of Unknown:cds_NC_025385.1_cds_YP_009094331.1_5 target sequence
SNGPTCWNGQDGGLEGLRQKGWSLVSLLMIDRESQTRNTRTKILAQGDNQVLCPTYMLSSGLTQEGLLYELDSISRNALSIYRAI

SEQ ID NO: 18302 - protein, 85 aa, unidentified; identical to SEQ ID NO: 18152
  REGION 1..85: note = Description of Unknown:cds_NC_025385.1_cds_YP_009094331.1_5 target sequence

SEQ ID NO: 18303 - protein, 85 aa, unidentified
  REGION 1..85: note = Description of Unknown:cds_NC_025385.1_cds_YP_009094331.1_5 target sequence
LLMSVQAVFHYLLFSPILKDRVYKILSADGDDFLLAMSRIVFLDPSLGGVSGMSLGRFHIRQFSDPVSEGLSFWKEIWSSSSESW

SEQ ID NO: 18304 - protein, 85 aa, unidentified
  REGION 1..85: note = Description of Unknown:cds_NC_025385.1_cds_YP_009094331.1_5 target sequence
IHSLCQEAGNPDLGDRSLESFTRLLEDPTTLNIRGGASPTILLKEAIRKALYDEVDKVENSEFREAILLSKTHRDNFILFLRSIE

SEQ ID NO: 18305 - protein, 85 aa, unidentified
  REGION 1..85: note = Description of Unknown:cds_NC_025385.1_cds_YP_009094331.1_5 target sequence
PLFPRFLSELFSSSFLGIPESIIGLIQNSRTIRRQFRKSLSRTLEESFFNSEVHGINRMTQVPQRIGRVWPCSAERADLLREISW

SEQ ID NO: 18306 - protein, 85 aa, unidentified
  REGION 1..85: note = Description of Unknown:cds_NC_025385.1_cds_YP_009094331.1_5 target sequence
GRKVVGTTVPHPSEMLALLPKSSISCVCGQTGEDSPRISVSVLPSFDQSFFSRGPLKGYLGSSTSMSTQLFHAWEKVTNVHVVKR

SEQ ID NO: 18307 - protein, 85 aa, unidentified
  REGION 1..85: note = Description of Unknown:cds_NC_025385.1_cds_YP_009094331.1_5 target sequence
ALSLKESINWFIVRDSNLAQVLIKNIISLTGPLFPLEETPVFKRTGSALHRFKSARYSEGGYSSICPNLLSHISVSTDTMSELTQ

SEQ ID NO: 18308 - protein, 85 aa, unidentified
  REGION 1..85: note = Description of Unknown:cds_NC_025385.1_cds_YP_009094331.1_5 target sequence
DGKNFDFMFQPLMLYAQTWTSELVQKDLRLKDSTFHWHLRCPKCIRPIDDITLEAPQVFMFPDVSKRISRMVSGAVPQFQRLPEI

SEQ ID NO: 18309 - protein, 85 aa, unidentified
  REGION 1..85: note = Description of Unknown:cds_NC_025385.1_cds_YP_009094331.1_5 target sequence
SLKPGKFESLNGKDKSRHIGTAQGLLYSILVATHDSGYNDGTIFPVNIYGKVSPKDYLRGLARGVLIGSSICFLTRMTNININRP

SEQ ID NO: 18310 - protein, 85 aa, unidentified
  REGION 1..85: note = Description of Unknown:cds_NC_025385.1_cds_YP_009094331.1_5 target sequence
LELISGVISYILLRLDNHPSLYVMLKEPSLRSEIFSIPQKIPAAYPTTMKEGNRSVLCYLQHVLRYERDVITASPENDWLWIFSD

SEQ ID NO: 18311 - protein, 85 aa, unidentified
  REGION 1..85: note = Description of Unknown:cds_NC_025385.1_cds_YP_009094331.1_5 target sequence
FRSTKMTYLTLVTYQSHILLQKIEKSLSKQMRIRLRQLSSLMRQVLGGHGEDSLDSDEDFQGLLRDALQRTRWVDQEVRHAAKTM

SEQ ID NO: 18312 - protein, 85 aa, unidentified
  REGION 1..85: note = Description of Unknown:cds_NC_025385.1_cds_YP_009094331.1_5 target sequence
TGDHSPTKKVSRKAGGSEWICSAQQVAISTSSNPAPTSELDVRALSRKFQNPLISGLRVVQWATGAHYKLKPILDDLESCPSLCL

SEQ ID NO: 18313 - protein, 85 aa, unidentified
  REGION 1..85: note = Description of Unknown:cds_NC_025385.1_cds_YP_009094331.1_5 target sequence
VVGDGSGGISRTVLSMFPDARLVFNSLLEVSDLMASGTHPLPPSAIMSGGDDIVSRVIDFESIWEKPSDLRNLSTWRYFQSVQNS

SEQ ID NO: 18314 - protein, 85 aa, unidentified
  REGION 1..85: note = Description of Unknown:cds_NC_025385.1_cds_YP_009094331.1_5 target sequence
SKMSYDLIICDAEVTDISSVNKITLLMSDFSLSINGPLTLIFKTYGTMLVNSDYKAIQHLSRAFPSVTGYITQMTSSFSSELYLK

SEQ ID NO: 18315 - protein, 85 aa, unidentified; identical to SEQ ID NO: 18265
  REGION 1..85: note = Description of Unknown:cds_NC_025385.1_cds_YP_009094331.1_5 target sequence

SEQ ID NO: 18316 - protein, 85 aa, unidentified
  REGION 1..85: note = Description of Unknown:cds_NC_025385.1_cds_YP_009094331.1_5 target sequence
LQKGALSKMSIIIAIVMVFSNRVFNVSKPLSDPMFYPPSDPKILRHFNICCSTLMYLSTALGDVLNFARLHELYNNPVTYYFKKQ

SEQ ID NO: 18317 - protein, 85 aa, unidentified
  REGION 1..85: note = Description of Unknown:cds_NC_025385.1_cds_YP_009094331.1_5 target sequence
VIRGSIYLSWSWSDSTSVFKRVACNSNLSLSSHWIRLIYKIVRTTRFVGSSSDLSEEVEKHLRGYNRWIKFHDIRSRSSLLDYSC

SEQ ID NO: 18318 - protein, 84 aa, unidentified
  REGION 1..84: note = Description of Unknown:cds_NC_025385.1_cds_YP_009094331.1_5 target sequence
RGSIYLSWSWSDSTSVFKRVACNSNLSLSSHWIRLIYKIVRTTRFVGSSSDLSEEVEKHLRGYNRWIKFHDIRSRSSLLDYSCL

SEQ ID NO: 18319 - protein, 85 aa, unidentified
  REGION 1..85: note = Description of Unknown:cds_NC_025385.1_cds_YP_009094331.1_5 target sequence
NILRNSDYNLNSPLIEDPSQLMLDWLITGNKPNRLSPSDNLVRSYKVLKSYFKKVDVGSLRIGGLGAQAMTSLWLHGAHSESTRS

SEQ ID NO: 18320 - protein, 85 aa, unidentified
  REGION 1..85: note = Description of Unknown:cds_NC_025385.1_cds_YP_009094331.1_5 target sequence
RKCLSDLAQFYQKSSPIEKLLNYTLENRGLQVPPEGVLSSLKKVSYDRAFGRYLANTYSSYLFFHVIILYMNALDWEEEKTILAL

SEQ ID NO: 18321 - protein, 85 aa, unidentified
  REGION 1..85: note = Description of Unknown:cds_NC_025385.1_cds_YP_009094331.1_5 target sequence
WKDLNSVDIKKDQVKFRDQIWGSLVVTKDFVYSQSANCLFDRNYTLMLKDLFLSRFNSLLILLSPPEPRYSDDLISQLCQLYIAG

SEQ ID NO: 18322 - protein, 85 aa, unidentified
  REGION 1..85: note = Description of Unknown:cds_NC_025385.1_cds_YP_009094331.1_5 target sequence
DNVLSMCGNSGYDVIKMLEPYVVNSLVQRAEGFRPLIHSLGDFPLFIKDKVTQLEGTFGPSARNFFRILDQLDNIHDLVFVYGCY

SEQ ID NO: 18323 - protein, 85 aa, unidentified
  REGION 1..85: note = Description of Unknown:cds_NC_025385.1_cds_YP_009094331.1_5 target sequence
RHWGHPYIEYRKGLSKLYDQVHVKKVIDGDYQECLASDLAKRILRWGFDKYSKWYLDSKLLAPNHPLTPYIKTQTWPPKHIVDMV

SEQ ID NO: 18324 - protein, 85 aa, unidentified
  REGION 1..85: note = Description of Unknown:cds_NC_025385.1_cds_YP_009094331.1_5 target sequence
GNTWHKLPITQIFEIPESMDPSEILDDKSHSFTRTKLASWLSDNRGGPVPSEKVIITALSRPPVNPREFLKSIDIGGLPDDDLII

SEQ ID NO: 18325 - protein, 85 aa, unidentified; identical to SEQ ID NO: 18175
  REGION 1..85: note = Description of Unknown:cds_NC_025385.1_cds_YP_009094331.1_5 target sequence

SEQ ID NO: 18326 - protein, 85 aa, unidentified
  REGION 1..85: note = Description of Unknown:cds_NC_025385.1_cds_YP_009094331.1_5 target sequence
NHQRLESTKDVFSVLDYVFGLKKVFSRTHEFFQKSWVYYSDRSDLIGLWEDQIYCLDMSNGPTCWNGQDGGLEGLRQKGWSLVSL

SEQ ID NO: 18327 - protein, 85 aa, unidentified; identical to SEQ ID NO: 18277
  REGION 1..85: note = Description of Unknown:cds_NC_025385.1_cds_YP_009094331.1_5 target sequence

SEQ ID NO: 18328 - protein, 85 aa, unidentified; identical to SEQ ID NO: 18178
  REGION 1..85: note = Description of Unknown:cds_NC_025385.1_cds_YP_009094331.1_5 target sequence

SEQ ID NO: 18329 - protein, 85 aa, unidentified
  REGION 1..85: note = Description of Unknown:cds_NC_025385.1_cds_YP_009094331.1_5 target sequence
ADGDDFLLAMSRIVFLDPSLGGVSGMSLGRFHIRQFSDPVSEGLSFWKEIWSSSSESWIHSLCQEAGNPDLGDRSLESFTRLLED

SEQ ID NO: 18330 - protein, 85 aa, unidentified
  REGION 1..85: note = Description of Unknown:cds_NC_025385.1_cds_YP_009094331.1_5 target sequence
PTTLNIRGGASPTILLKEAIRKALYDEVDKVENSEFREAILLSKTHRDNFILFLRSIEPLFPRFLSELFSSSFLGIPESIIGLIQ

SEQ ID NO: 18331 - protein, 85 aa, unidentified
  REGION 1..85: note = Description of Unknown:cds_NC_025385.1_cds_YP_009094331.1_5 target sequence
NSRTIRRQFRKSLSRTLEESFFNSEVHGINRMTQVPQRIGRVWPCSAERADLLREISWGRKVVGTTVPHPSEMLALLPKSSISCV

SEQ ID NO: 18332 - protein, 85 aa, unidentified
  REGION 1..85: note = Description of Unknown:cds_NC_025385.1_cds_YP_009094331.1_5 target sequence
CGQTGEDSPRISVSVLPSFDQSFFSRGPLKGYLGSSTSMSTQLFHAWEKVTNVHVVKRALSLKESINWFIVRDSNLAQVLIKNII

SEQ ID NO: 18333 - protein, 85 aa, unidentified
  REGION 1..85: note = Description of Unknown:cds_NC_025385.1_cds_YP_009094331.1_5 target sequence
SLTGPLFPLEETPVFKRTGSALHRFKSARYSEGGYSSICPNLLSHISVSTDTMSELTQDGKNFDFMFQPLMLYAQTWTSELVQKD

SEQ ID NO: 18334 - protein, 85 aa, unidentified
  REGION 1..85: note = Description of Unknown:cds_NC_025385.1_cds_YP_009094331.1_5 target sequence
LRLKDSTFHWHLRCPKCIRPIDDITLEAPQVFMFPDVSKRISRMVSGAVPQFQRLPEISLKPGKFESLNGKDKSRHIGTAQGLLY

SEQ ID NO: 18335 - protein, 85 aa, unidentified
  REGION 1..85: note = Description of Unknown:cds_NC_025385.1_cds_YP_009094331.1_5 target sequence
SILVATHDSGYNDGTIFPVNIYGKVSPKDYLRGLARGVLIGSSICFLTRMTNININRPLELISGVISYILLRLDNHPSLYVMLKE

SEQ ID NO: 18336 - protein, 85 aa, unidentified
  REGION 1..85: note = Description of Unknown:cds_NC_025385.1_cds_YP_009094331.1_5 target sequence
PSLRSEIFSIPQKIPAAYPTTMKEGNRSVLCYLQHVLRYERDVITASPENDWLWIFSDFRSTKMTYLTLVTYQSHILLQKIEKSL

SEQ ID NO: 18337 - protein, 85 aa, unidentified
  REGION 1..85: note = Description of Unknown:cds_NC_025385.1_cds_YP_009094331.1_5 target sequence
SKQMRIRLRQLSSLMRQVLGGHGEDSLDSDEDFQGLLRDALQRTRWVDQEVRHAAKTMTGDHSPTKKVSRKAGGSEWICSAQQVA

SEQ ID NO: 18338 - protein, 85 aa, unidentified
  REGION 1..85: note = Description of Unknown:cds_NC_025385.1_cds_YP_009094331.1_5 target sequence
ISTSSNPAPTSELDVRALSRKFQNPLISGLRVVQWATGAHYKLKPILDDLESCPSLCLVVGDGSGGISRTVLSMFPDARLVFNSL

SEQ ID NO: 18339 - protein, 85 aa, unidentified
  REGION 1..85: note = Description of Unknown:cds_NC_025385.1_cds_YP_009094331.1_5 target sequence
LEVSDLMASGTHPLPPSAIMSGGDDIVSRVIDFESIWEKPSDLRNLSTWRYFQSVQNSSKMSYDLIICDAEVTDISSVNKITLLM

SEQ ID NO: 18340 - protein, 85 aa, unidentified
  REGION 1..85: note = Description of Unknown:cds_NC_025385.1_cds_YP_009094331.1_5 target sequence
SDFSLSINGPLTLIFKTYGTMLVNSDYKAIQHLSRAFPSVTGYITQMTSSFSSELYLKFSKRGKFFRDAEYLTSSTLREMSLVLF

SEQ ID NO: 18341 - protein, 85 aa, unidentified
  REGION 1..85: note = Description of Unknown:cds_NC_025385.1_cds_YP_009094331.1_5 target sequence
NCSSPKSEMQRARSLNYQDLVRGFPEEIISNPYNEMIITLIDSEVESFLVHKMVDDLELQKGALSKMSIIIAIVMVFSNRVFNVS

SEQ ID NO: 18342 - protein, 85 aa, unidentified
  REGION 1..85: note = Description of Unknown:cds_NC_025385.1_cds_YP_009094331.1_5 target sequence
KPLSDPMFYPPSDPKILRHFNICCSTLMYLSTALGDVLNFARLHELYNNPVTYYFKKQVIRGSIYLSWSWSDSTSVFKRVACNSN

SEQ ID NO: 18343 - protein, 85 aa, unidentified
  REGION 1..85: note = Description of Unknown:cds_NC_020809.1_cds_YP_007641401.1_5 target sequence
IESTEVYDDPVDPVEPDVDIRNNSVVPNILRNSDYNLNSPLLEDPSRLMLDWLITGNKPCRLNLTDNLFRSYKVLRSYFKKIDIG

SEQ ID NO: 18344 - protein, 85 aa, unidentified
  REGION 1..85: note = Description of Unknown:cds_NC_020809.1_cds_YP_007641401.1_5 target sequence
SLKVGSLGAQSMTTLWLHGSHAESTRSRKCLSDLSQFYKKSSPIEILLNYTLENRGLQTPAEGVLSSLNKVHYDQAFGRYLGNTY

SEQ ID NO: 18345 - protein, 85 aa, unidentified
  REGION 1..85: note = Description of Unknown:cds_NC_020809.1_cds_YP_007641401.1_5 target sequence
SAYLFFHVIILYMNALDWDEEKTILALWKDIASIDVKNDLVKFRDQIWGSLVVTKDFVYSQSANCLFDRNYTLMLKDLFLSRFNS

SEQ ID NO: 18346 - protein, 85 aa, unidentified
  REGION 1..85: note = Description of Unknown:cds_NC_020809.1_cds_YP_007641401.1_5 target sequence
LLILLSPPEFRYSDDLVSTLCQLYIAGDKVLASCGNSGYDVIKMLEPYIVNKLVQRAESFRPLIHSLGDFPQFIRDKTTQLEGIF

SEQ ID NO: 18347 - protein, 85 aa, unidentified
  REGION 1..85: note = Description of Unknown:cds_NC_020809.1_cds_YP_007641401.1_5 target sequence
GPRAREFFQTMDLLDNIHDLVFTYGCYRHWGHPYIDYRKGLSKLYDQVHVKKVIDQHYQECLASDLAKRILRWGFDKYSRWYLDQ

SEQ ID NO: 18348 - protein, 85 aa, unidentified
  REGION 1..85: note = Description of Unknown:cds_NC_020809.1_cds_YP_007641401.1_5 target sequence
ELLPKDHPLTPYVKTQTWPPKHVVDLIGDSWHNLPITQLFEIPESMDPSEILDDKSHSFTRTKLASWLSENRGGPVPSEKVIITA

SEQ ID NO: 18349 - protein, 85 aa, unidentified
  REGION 1..85: note = Description of Unknown:cds_NC_020809.1_cds_YP_007641401.1_5 target sequence
LSRPPVNPREFLRSIDVGGLPDDDLIIGLKPKERELKVEGRFFALMSWNLRLYFVITEKLLATYILPLFDALTMTDNLNKVFKKL

SEQ ID NO: 18350 - protein, 85 aa, unidentified
  REGION 1..85: note = Description of Unknown:cds_NC_020809.1_cds_YP_007641401.1_5 target sequence
IDRVTGQGLLDYSRVTYAFHLDYEKWNNHQRLESTKDVFSVLDKAFGLKRVFSRTHEFFQKSWIYYSDRSDLIGMWKDQIYCLDM

SEQ ID NO: 18351 - protein, 85 aa, unidentified
  REGION 1..85: note = Description of Unknown:cds_NC_020809.1_cds_YP_007641401.1_5 target sequence
SNGPTCWNGQDGGLEGLRQKGWSLVSLLMIDRESQTRNTRTKILAQGDNQVLCPTYMLSSGLTKEGLLYELDSISRNAISIYRAI

SEQ ID NO: 18352 - protein, 85 aa, unidentified
  REGION 1..85: note = Description of Unknown:cds_NC_020809.1_cds_YP_007641401.1_5 target sequence
EDGASKLGLIIKKEETMCSYDFLIYGKTPLFRGNILVPESKRWARVSCISNDQIVNLANIMSTVSTNALTVAQHSQSLVKPMRDF

SEQ ID NO: 18353 - protein, 85 aa, unidentified
  REGION 1..85: note = Description of Unknown:cds_NC_020809.1_cds_YP_007641401.1_5 target sequence
LLMSVQAVFHYLLFSPILKDRVYKILVADGNEFLLAMSRIVYLDPSLGGVSGMSLGRFHIRQFSDPVSEGLAFWREIWLSSNEPW

SEQ ID NO: 18354 - protein, 85 aa, unidentified
  REGION 1..85: note = Description of Unknown:cds_NC_020809.1_cds_YP_007641401.1_5 target sequence
IHSLCQEAGNPDLGDRSLESFTRLLEDPTTLNIRGGASPTILLKEAIRKALYEEVDKVENSEFREAILLSKTHRDNFILFLKSVE

SEQ ID NO: 18355 - protein, 85 aa, unidentified
  REGION 1..85: note = Description of Unknown:cds_NC_020809.1_cds_YP_007641401.1_5 target sequence
PLFPRFLSELFSSSFLGIPESIIGLIQNSRTIRRQFRRSLSRALEESFFNSEIHGVNRMTQVPQRIGRVWACSAERADQLREISW

SEQ ID NO: 18356 - protein, 85 aa, unidentified
  REGION 1..85: note = Description of Unknown:cds_NC_020809.1_cds_YP_007641401.1_5 target sequence
GRKVVGTTVPHPSEMIALIPKSSISCTCSQSGEANPRISVSVLPSFDQSYFSRGPLKGYLGSSTSMSTQLFHAWEKVTNVHVVKR

SEQ ID NO: 18357 - protein, 85 aa, unidentified
  REGION 1..85: note = Description of Unknown:cds_NC_020809.1_cds_YP_007641401.1_5 target sequence
ALSLKESINWFITRDSNLAQTLIKNIVSLTGPTFPLEEAPVFKRTGSALHRFKSARYSEGGYSSICPNLLSHISVSTDTMSDLTQ

SEQ ID NO: 18358 - protein, 85 aa, unidentified
  REGION 1..85: note = Description of Unknown:cds_NC_020809.1_cds_YP_007641401.1_5 target sequence
DGTNFDFMFQPLMLYAQTWTSELVQKDLRLKDSTFHWHLRCLKCIRPIDDVILETPQVFVFPDVSKRISRMVSGAVPQFRKLPDI

SEQ ID NO: 18359 - protein, 85 aa, unidentified
  REGION 1..85: note = Description of Unknown:cds_NC_020809.1_cds_YP_007641401.1_5 target sequence
TLKPGKFDALKGKEKSQHIGTAQGLLYSILVATHDSGYNDGTIFPVNIYGKVSPRDYLRGLARGVLIGSSICFLTRMTNININRP

SEQ ID NO: 18360 - protein, 85 aa, unidentified
  REGION 1..85: note = Description of Unknown:cds_NC_020809.1_cds_YP_007641401.1_5 target sequence
LELISGVISYILLRLDNHPSLYVMLKEPSLRSEIFSIPQKVPAAYPTTMKEGNRSVLCYLQHVLRYEREAITASPENDWLWIFSD

SEQ ID NO: 18361 - protein, 85 aa, unidentified
  REGION 1..85: note = Description of Unknown:cds_NC_020809.1_cds_YP_007641401.1_5 target sequence
FRSIKMTYLTLITYQSHILLQRVEKNLSKQMRVKLRQLNSLMRQVLGGHGESTLDSDEDIQSLLRDSLRRTKWVDQEVRHAAKTM

SEQ ID NO: 18362 - protein, 85 aa, unidentified
  REGION 1..85: note = Description of Unknown:cds_NC_020809.1_cds_YP_007641401.1_5 target sequence
TCEYSPSKKVSRKAGCSEWICSAQQVAISTSSNPAPVSEMDVRALSKKLQNPLISGLRVVQWATGAHYKLKPILDDLDFYPTLCL

SEQ ID NO: 18363 - protein, 85 aa, unidentified
  REGION 1..85: note = Description of Unknown:cds_NC_020809.1_cds_YP_007641401.1_5 target sequence
VVGDGSGGISRAVLSMFPDAKLVFNSLLEVNDLMASGTHPLPPSALMSGGEDIISRVIDFDSIWEKPSDLRNTSTWRYFQSVQQS

SEQ ID NO: 18364 - protein, 85 aa, unidentified
  REGION 1..85: note = Description of Unknown:cds_NC_020809.1_cds_YP_007641401.1_5 target sequence
INMSYDLIICDAEVTDIHSVNKITLLMSDFSLSINGPLNLIFKTYGTMLVNPEYKAIQHLSRAFPSVTGYITQMTSSFSSELYLK

SEQ ID NO: 18365 - protein, 85 aa, unidentified
  REGION 1..85: note = Description of Unknown:cds_NC_020809.1_cds_YP_007641401.1_5 target sequence
FSKRGKFFRDPEYLTSSTLREMSLVLFNCSSSKSEMLRARSLNYQDLVRGFPEEIISNPYNEMIITLIDNDVESFLVHKMVDDLE

SEQ ID NO: 18366 - protein, 85 aa, unidentified
  REGION 1..85: note = Description of Unknown:cds_NC_020809.1_cds_YP_007641401.1_5 target sequence
LQRGSFSKMSIIVTIMLVFSNRVFNVSKPLNDPKFYPPSDPKILRHFNICCGTLIYLSTALGDVLNFARLHELYNNPVTYYFKKQ

SEQ ID NO: 18367 - protein, 85 aa, unidentified
  REGION 1..85: note = Description of Unknown:cds_NC_020809.1_cds_YP_007641401.1_5 target sequence
ILGGRMYLSWSWADNTPIFKRVACNSSLSLSSHWIRLIYKIVKTTRLIGNAHDLSKEVERHLRSYNRWINFNDLRSRSSLLDYSC

SEQ ID NO: 18368 - protein, 84 aa, unidentified
  REGION 1..84: note = Description of Unknown:cds_NC_020809.1_cds_YP_007641401.1_5 target sequence
GGRMYLSWSWADNTPIFKRVACNSSLSLSSHWIRLIYKIVKTTRLIGNAHDLSKEVERHLRSYNRWINFNDLRSRSSLLDYSCL

SEQ ID NO: 18369 - protein, 85 aa, unidentified
  REGION 1..85: note = Description of Unknown:cds_NC_020809.1_cds_YP_007641401.1_5 target sequence
NILRNSDYNLNSPLLEDPSRLMLDWLITGNKPCRLNLTDNLFRSYKVLRSYFKKIDIGSLKVGSLGAQSMTTLWLHGSHAESTRS

SEQ ID NO: 18370 - protein, 85 aa, unidentified
  REGION 1..85: note = Description of Unknown:cds_NC_020809.1_cds_YP_007641401.1_5 target sequence
RKCLSDLSQFYKKSSPIEILLNYTLENRGLQTPAEGVLSSLNKVHYDQAFGRYLGNTYSAYLFFHVIILYMNALDWDEEKTILAL

SEQ ID NO: 18371 - protein, 85 aa, unidentified
  REGION 1..85: note = Description of Unknown:cds_NC_020809.1_cds_YP_007641401.1_5 target sequence
WKDIASIDVKNDLVKFRDQIWGSLVVTKDFVYSQSANCLFDRNYTLMLKDLFLSRFNSLLILLSPPEFRYSDDLVSTLCQLYIAG

SEQ ID NO: 18372 - protein, 85 aa, unidentified
  REGION 1..85: note = Description of Unknown:cds_NC_020809.1_cds_YP_007641401.1_5 target sequence
DKVLASCGNSGYDVIKMLEPYIVNKLVQRAESFRPLIHSLGDFPQFIRDKTTQLEGIFGPRAREFFQTMDLLDNIHDLVFTYGCY

SEQ ID NO: 18373 - protein, 85 aa, unidentified
  REGION 1..85: note = Description of Unknown:cds_NC_020809.1_cds_YP_007641401.1_5 target sequence
RHWGHPYIDYRKGLSKLYDQVHVKKVIDQHYQECLASDLAKRILRWGFDKYSRWYLDQELLPKDHPLTPYVKTQTWPPKHVVDLI

SEQ ID NO: 18374 - protein, 85 aa, unidentified
  REGION 1..85: note = Description of Unknown:cds_NC_020809.1_cds_YP_007641401.1_5 target sequence
GDSWHNLPITQLFEIPESMDPSEILDDKSHSFTRTKLASWLSENRGGPVPSEKVIITALSRPPVNPREFLRSIDVGGLPDDDLII

SEQ ID NO: 18375 - protein, 85 aa, unidentified
  REGION 1..85: note = Description of Unknown:cds_NC_020809.1_cds_YP_007641401.1_5 target sequence
GLKPKERELKVEGRFFALMSWNLRLYFVITEKLLATYILPLFDALTMTDNLNKVFKKLIDRVTGQGLLDYSRVTYAFHLDYEKWN

SEQ ID NO: 18376 - protein, 85 aa, unidentified
  REGION 1..85: note = Description of Unknown:cds_NC_020809.1_cds_YP_007641401.1_5 target sequence
NHQRLESTKDVFSVLDKAFGLKRVFSRTHEFFQKSWIYYSDRSDLIGMWKDQIYCLDMSNGPTCWNGQDGGLEGLRQKGWSLVSL

SEQ ID NO: 18377 - protein, 85 aa, unidentified
  REGION 1..85: note = Description of Unknown:cds_NC_020809.1_cds_YP_007641401.1_5 target sequence
LMIDRESQTRNTRTKILAQGDNQVLCPTYMLSSGLTKEGLLYELDSISRNAISIYRAIEDGASKLGLIIKKEETMCSYDFLIYGK

SEQ ID NO: 18378 - protein, 85 aa, unidentified
  REGION 1..85: note = Description of Unknown:cds_NC_020809.1_cds_YP_007641401.1_5 target sequence
TPLFRGNILVPESKRWARVSCISNDQIVNLANIMSTVSTNALTVAQHSQSLVKPMRDFLLMSVQAVFHYLLFSPILKDRVYKILV

SEQ ID NO: 18379 - protein, 85 aa, unidentified
  REGION 1..85: note = Description of Unknown:cds_NC_020809.1_cds_YP_007641401.1_5 target sequence
ADGNEFLLAMSRIVYLDPSLGGVSGMSLGRFHIRQFSDPVSEGLAFWREIWLSSNEPWIHSLCQEAGNPDLGDRSLESFTRLLED

SEQ ID NO: 18380 - protein, 85 aa, unidentified
  REGION 1..85: note = Description of Unknown:cds_NC_020809.1_cds_YP_007641401.1_5 target sequence
PTTLNIRGGASPTILLKEAIRKALYEEVDKVENSEFREAILLSKTHRDNFILFLKSVEPLFPRFLSELFSSSFLGIPESIIGLIQ

SEQ ID NO: 18381 - protein, 85 aa, unidentified
  REGION 1..85: note = Description of Unknown:cds_NC_020809.1_cds_YP_007641401.1_5 target sequence
NSRTIRRQFRRSLSRALEESFFNSEIHGVNRMTQVPQRIGRVWACSAERADQLREISWGRKVVGTTVPHPSEMIALIPKSSISCT

SEQ ID NO: 18382 - protein, 85 aa, unidentified
  REGION 1..85: note = Description of Unknown:cds_NC_020809.1_cds_YP_007641401.1_5 target sequence
CSQSGEANPRISVSVLPSFDQSYFSRGPLKGYLGSSTSMSTQLFHAWEKVTNVHVVKRALSLKESINWFITRDSNLAQTLIKNIV

SEQ ID NO: 18383 - protein, 85 aa, unidentified
  REGION 1..85: note = Description of Unknown:cds_NC_020809.1_cds_YP_007641401.1_5 target sequence
SLTGPTFPLEEAPVFKRTGSALHRFKSARYSEGGYSSICPNLLSHISVSTDTMSDLTQDGTNFDFMFQPLMLYAQTWTSELVQKD

SEQ ID NO: 18384 - protein, 85 aa, unidentified
  REGION 1..85: note = Description of Unknown:cds_NC_020809.1_cds_YP_007641401.1_5 target sequence
LRLKDSTFHWHLRCLKCIRPIDDVILETPQVFVFPDVSKRISRMVSGAVPQFRKLPDITLKPGKFDALKGKEKSQHIGTAQGLLY

SEQ ID NO: 18385 - protein, 85 aa, unidentified
  REGION 1..85: note = Description of Unknown:cds_NC_020809.1_cds_YP_007641401.1_5 target sequence
SILVATHDSGYNDGTIFPVNIYGKVSPRDYLRGLARGVLIGSSICFLTRMTNININRPLELISGVISYILLRLDNHPSLYVMLKE

SEQ ID NO: 18386 - protein, 85 aa, unidentified
  REGION 1..85: note = Description of Unknown:cds_NC_020809.1_cds_YP_007641401.1_5 target sequence
PSLRSEIFSIPQKVPAAYPTTMKEGNRSVLCYLQHVLRYEREAITASPENDWLWIFSDFRSIKMTYLTLITYQSHILLQRVEKNL

SEQ ID NO: 18387 - protein, 85 aa, unidentified
  REGION 1..85: note = Description of Unknown:cds_NC_020809.1_cds_YP_007641401.1_5 target sequence
SKQMRVKLRQLNSLMRQVLGGHGESTLDSDEDIQSLLRDSLRRTKWVDQEVRHAAKTMTCEYSPSKKVSRKAGCSEWICSAQQVA

SEQ ID NO: 18388 - protein, 85 aa, unidentified
  REGION 1..85: note = Description of Unknown:cds_NC_020809.1_cds_YP_007641401.1_5 target sequence
ISTSSNPAPVSEMDVRALSKKLQNPLISGLRVVQWATGAHYKLKPILDDLDFYPTLCLVVGDGSGGISRAVLSMFPDAKLVFNSL

SEQ ID NO: 18389 - protein, 85 aa, unidentified
  REGION 1..85: note = Description of Unknown:cds_NC_020809.1_cds_YP_007641401.1_5 target sequence
LEVNDLMASGTHPLPPSALMSGGEDIISRVIDFDSIWEKPSDLRNTSTWRYFQSVQQSINMSYDLIICDAEVTDIHSVNKITLLM

SEQ ID NO: 18390 - protein, 85 aa, unidentified
  REGION 1..85: note = Description of Unknown:cds_NC_020809.1_cds_YP_007641401.1_5 target sequence
SDFSLSINGPLNLIFKTYGTMLVNPEYKAIQHLSRAFPSVTGYITQMTSSFSSELYLKFSKRGKFFRDPEYLTSSTLREMSLVLF

SEQ ID NO: 18391 - protein, 85 aa, unidentified
  REGION 1..85: note = Description of Unknown:cds_NC_020809.1_cds_YP_007641401.1_5 target sequence
NCSSSKSEMLRARSLNYQDLVRGFPEEIISNPYNEMIITLIDNDVESFLVHKMVDDLELQRGSFSKMSIIVTIMLVFSNRVFNVS

SEQ ID NO: 18392 - protein, 85 aa, unidentified
  REGION 1..85: note = Description of Unknown:cds_NC_020809.1_cds_YP_007641401.1_5 target sequence
KPLNDPKFYPPSDPKILRHFNICCGTLIYLSTALGDVLNFARLHELYNNPVTYYFKKQILGGRMYLSWSWADNTPIFKRVACNSS

SEQ ID NO: 18393 - protein, 85 aa, unidentified
  REGION 1..85: note = Description of Unknown:cds_NC_025377.1_cds_YP_009094272.1_5 target sequence
LESTEVYDDPLDPVEPEQDWRPEASAPNILRNSDYNLNSPLLSDPSELMISWLQSGQKPNRIPLSENIRRSQKILKLSLKKVDLA

SEQ ID NO: 18394 - protein, 85 aa, unidentified
  REGION 1..85: note = Description of Unknown:cds_NC_025377.1_cds_YP_009094272.1_5 target sequence
TVLTGGDSSRSVMALWCNKSHLESTRSRRCLNNLSQFYNKSSPIEAILKYSLEIRGLQNPRDGILTSLEKVNYDSSFGRYMGNVY

SEQ ID NO: 18395 - protein, 85 aa, unidentified
  REGION 1..85: note = Description of Unknown:cds_NC_025377.1_cds_YP_009094272.1_5 target sequence
ASYLLFHVVILYMNALDWDEEKTIISLWRDIIHYETKEDRLTIKDQIWGSLLVTKEFVYSSSTSALFDKNYVLMLKDLFLSRFNS

SEQ ID NO: 18396 - protein, 85 aa, unidentified
  REGION 1..85: note = Description of Unknown:cds_NC_025377.1_cds_YP_009094272.1_5 target sequence
LMILISPPESKYSDTLIETLCSLYVAGDQVVAQCGNSGYDVIKMLEPCVVHELVERAEKYRPLITSLGDFPEFIREKKAQLIGIF

SEQ ID NO: 18397 - protein, 85 aa, unidentified
  REGION 1..85: note = Description of Unknown:cds_NC_025377.1_cds_YP_009094272.1_5 target sequence
GPPASRFFSVIDRLDNIHDLVFVYGCYRHWGHPYIDYRKGLSKLYDQVHMKKFIDEGYQKSLASDLAKRILRWGFDKYSKWYLDP

SEQ ID NO: 18398 - protein, 85 aa, unidentified
  REGION 1..85: note = Description of Unknown:cds_NC_025377.1_cds_YP_009094272.1_5 target sequence
ARMRRDHPLRQYVSTQTWPPKHIVDLVGDTWHELPITQIFEIPESMDPSEILDDKSHSLTRSKLAGWLAENRGGPVPSEKVIITA

SEQ ID NO: 18399 - protein, 85 aa, unidentified
  REGION 1..85: note = Description of Unknown:cds_NC_025377.1_cds_YP_009094272.1_5 target sequence
LSKSPVNPREFLRSVDAHGLDEEDLIIGLKPKERELKIEGRFFALMSWNLRLYFVITEKLLANHILPLFDALTMTDNLNKVFKKL

SEQ ID NO: 18400 - protein, 85 aa, unidentified
  REGION 1..85: note = Description of Unknown:cds_NC_025377.1_cds_YP_009094272.1_5 target sequence
IDRVTGQGLMDYSRVTYAFHLDYEKWNNHQRMESTKDVFSVLDKVFGLERVFSRTHEFFQKSWIYYSERSDLIGIAGGNIYCLDM

SEQ ID NO: 18401 - protein, 85 aa, unidentified
  REGION 1..85: note = Description of Unknown:cds_NC_025377.1_cds_YP_009094272.1_5 target sequence
TGGPTCWNGQDGGLEGLRQKGWSMISLLMIDRESQIRNTRTKILAQGDNQVLCPTYMVSSGLSQDGLKYELENISKNAMSIYRAI

SEQ ID NO: 18402 - protein, 85 aa, unidentified
  REGION 1..85: note = Description of Unknown:cds_NC_025377.1_cds_YP_009094272.1_5 target sequence
EEGAGRLGLIIKKEETMCSYDFLIYGKTPLFRGNILVPESKRWARVSCISNDQIVNLANIMSTVSTNALTVAQHSQSLIKPMRDF

SEQ ID NO: 18403 - protein, 85 aa, unidentified
  REGION 1..85: note = Description of Unknown:cds_NC_025377.1_cds_YP_009094272.1_5 target sequence
LLMSVQAIYHYLLFSPILKDRVYKILNAQGEDFLMSMARIIYLDPSLGGVSGMSLGRFHIRQFSDPVTEGLSFWKEIWEVSSEGW

SEQ ID NO: 18404 - protein, 85 aa, unidentified
  REGION 1..85: note = Description of Unknown:cds_NC_025377.1_cds_YP_009094272.1_5 target sequence
IHSLCQEAGNPDLGDRSLESFTRLIEDPTTLNIRGGASPTILLKEAIRKALYDEVDRVENSEFREAILLSKTHRDNFILFLKSIE

SEQ ID NO: 18405 - protein, 85 aa, unidentified
  REGION 1..85: note = Description of Unknown:cds_NC_025377.1_cds_YP_009094272.1_5 target sequence
PLFPRFLSELFSSSFLGIPESIIGLIQNSRTIRRQFRRSLSQSLEESFFKSELHGLTRLTQVPQRVGRVWRCSAERADQLREISW

SEQ ID NO: 18406 - protein, 85 aa, unidentified
  REGION 1..85: note = Description of Unknown:cds_NC_025377.1_cds_YP_009094272.1_5 target sequence
GKKVVGTTVPHPSEMLNLVPKSSVSCNCGRINPESPRISVSVLPSFDNSFLSRGPLKGYLGSSTSVTTQLFHAWEKVTNIHVVRR

SEQ ID NO: 18407 - protein, 85 aa, unidentified
  REGION 1..85: note = Description of Unknown:cds_NC_025377.1_cds_YP_009094272.1_5 target sequence
ALSLKESINWFIDRDSNLAKTIIRNILSLTGPDFVIEETPLFKRTGSALHRFKSARYSEGGYSSVCPNLLSHISVSTDTMSDLTQ

SEQ ID NO: 18408 - protein, 85 aa, unidentified
  REGION 1..85: note = Description of Unknown:cds_NC_025377.1_cds_YP_009094272.1_5 target sequence
DGSNFDFMFQPLMLYSQTWTSEIVQRDLRLRDTTYHWHLRCQRCIRPIEDITLDSPCCFVFPDISNRISRMVSGAVPEVRKLPEV

SEQ ID NO: 18409 - protein, 85 aa, unidentified
  REGION 1..85: note = Description of Unknown:cds_NC_025377.1_cds_YP_009094272.1_5 target sequence
ALKAGDFSTISPRERSYHIGTAQGLLYSILVAIHDPGYNDHALFPVNIYSRMSPQHYLRGLSRGVLIGSSICFLTRMTNININRP

SEQ ID NO: 18410 - protein, 85 aa, unidentified
  REGION 1..85: note = Description of Unknown:cds_NC_025377.1_cds_YP_009094272.1_5 target sequence
LELISGVISYILLKLDTHPSLYVMLKEPGMRSEIFSIPQKIPAAYPTTMKEGNRAILSYLQYILRYQKEEITRSESSDLLWMFSD

SEQ ID NO: 18411 - protein, 85 aa, unidentified
  REGION 1..85: note = Description of Unknown:cds_NC_025377.1_cds_YP_009094272.1_5 target sequence
FRSMKMTYLTLLTFQTHILLQKIGKSLSKQMRSDLRHLNTLMRRVLGGQGEGDLDSQEDVGRLLNDSVRRTRWVDQEVRHAAKSL

SEQ ID NO: 18412 - protein, 85 aa, unidentified
  REGION 1..85: note = Description of Unknown:cds_NC_025377.1_cds_YP_009094272.1_5 target sequence
CKEPKEPLKTSRRLCQVEWSCSLQQVAISTSSNPSAYTDMDLRMISRQIQNPLISGLRIVQWATGAHYKIKPLLQKLDQCPQMCL

SEQ ID NO: 18413 - protein, 85 aa, unidentified
  REGION 1..85: note = Description of Unknown:cds_NC_025377.1_cds_YP_009094272.1_5 target sequence
VVGDGSGGISRAVLRVFPDAKLLFNSLLEVNDLMAAGTHPLPPSALMHGGDELTNRVIDFEAIWEKPSDLRNVSTWKYFQSVQER

SEQ ID NO: 18414 - protein, 85 aa, unidentified
  REGION 1..85: note = Description of Unknown:cds_NC_025377.1_cds_YP_009094272.1_5 target sequence
SKMSFDLVICDAEVTDVTSINKISLLMSDFIMAIKSPVTLIFKTYGTMLINPDYKALRNLSRAFPEVTGYITQLTSSFSSEIYLM

SEQ ID NO: 18415 - protein, 85 aa, unidentified
  REGION 1..85: note = Description of Unknown:cds_NC_025377.1_cds_YP_009094272.1_5 target sequence
FKKHGRFFKEAESLTASTVHEMSLVLFNCRTPKSEMLRARSLNYSDLIRGFPEEIISNPYNEMIITLIDSEMESFLVHKLVDDLE

SEQ ID NO: 18416 - protein, 85 aa, unidentified
  REGION 1..85: note = Description of Unknown:cds_NC_025377.1_cds_YP_009094272.1_5 target sequence
LARGSLSKLSKILVIIILYSNRVFNVSKPMRDSSFCPPSDPKLLRHYNICSSTLLFLATVLGDTNSFTKLHEMYNQPVTYYFKKR

SEQ ID NO: 18417 - protein, 85 aa, unidentified
  REGION 1..85: note = Description of Unknown:cds_NC_025377.1_cds_YP_009094272.1_5 target sequence
TIREKIYLMWSWSGKSPVFKRVSCNHAISLSAHWIRLLYKIIRTTRVGESGDIISRAVKSCLKGYNRWILMRDIRSRTSLLEYSC

SEQ ID NO: 18418 - protein, 84 aa, unidentified
  REGION 1..84: note = Description of Unknown:cds_NC_025377.1_cds_YP_009094272.1_5 target sequence
REKIYLMWSWSGKSPVFKRVSCNHAISLSAHWIRLLYKIIRTTRVGESGDIISRAVKSCLKGYNRWILMRDIRSRTSLLEYSCL

SEQ ID NO: 18419 - protein, 85 aa, unidentified
  REGION 1..85: note = Description of Unknown:cds_NC_025377.1_cds_YP_009094272.1_5 target sequence
NILRNSDYNLNSPLLSDPSELMISWLQSGQKPNRIPLSENIRRSQKILKLSLKKVDLATVLTGGDSSRSVMALWCNKSHLESTRS

SEQ ID NO: 18420 - protein, 85 aa, unidentified
  REGION 1..85: note = Description of Unknown:cds_NC_025377.1_cds_YP_009094272.1_5 target sequence
RRCLNNLSQFYNKSSPIEAILKYSLEIRGLQNPRDGILTSLEKVNYDSSFGRYMGNVYASYLLFHVVILYMNALDWDEEKTIISL

SEQ ID NO: 18421 - protein, 85 aa, unidentified
  REGION 1..85: note = Description of Unknown:cds_NC_025377.1_cds_YP_009094272.1_5 target sequence
WRDIIHYETKEDRLTIKDQIWGSLLVTKEFVYSSSTSALFDKNYVLMLKDLFLSRFNSLMILISPPESKYSDTLIETLCSLYVAG

SEQ ID NO: 18422 - protein, 85 aa, unidentified
  REGION 1..85: note = Description of Unknown:cds_NC_025377.1_cds_YP_009094272.1_5 target sequence
DQVVAQCGNSGYDVIKMLEPCVVHELVERAEKYRPLITSLGDFPEFIREKKAQLIGIFGPPASRFFSVIDRLDNIHDLVFVYGCY

SEQ ID NO: 18423 - protein, 85 aa, unidentified
  REGION 1..85: note = Description of Unknown:cds_NC_025377.1_cds_YP_009094272.1_5 target sequence
RHWGHPYIDYRKGLSKLYDQVHMKKFIDEGYQKSLASDLAKRILRWGFDKYSKWYLDPARMRRDHPLRQYVSTQTWPPKHIVDLV

SEQ ID NO: 18424 - protein, 85 aa, unidentified
  REGION 1..85: note = Description of Unknown:cds_NC_025377.1_cds_YP_009094272.1_5 target sequence
GDTWHELPITQIFEIPESMDPSEILDDKSHSLTRSKLAGWLAENRGGPVPSEKVIITALSKSPVNPREFLRSVDAHGLDEEDLII

SEQ ID NO: 18425 - protein, 85 aa, unidentified
  REGION 1..85: note = Description of Unknown:cds_NC_025377.1_cds_YP_009094272.1_5 target sequence
GLKPKERELKIEGRFFALMSWNLRLYFVITEKLLANHILPLFDALTMTDNLNKVFKKLIDRVTGQGLMDYSRVTYAFHLDYEKWN

SEQ ID NO: 18426 - protein, 85 aa, unidentified
  REGION 1..85: note = Description of Unknown:cds_NC_025377.1_cds_YP_009094272.1_5 target sequence
NHQRMESTKDVFSVLDKVFGLERVFSRTHEFFQKSWIYYSERSDLIGIAGGNIYCLDMTGGPTCWNGQDGGLEGLRQKGWSMISL

SEQ ID NO: 18427 - protein, 85 aa, unidentified
  REGION 1..85: note = Description of Unknown:cds_NC_025377.1_cds_YP_009094272.1_5 target sequence
LMIDRESQIRNTRTKILAQGDNQVLCPTYMVSSGLSQDGLKYELENISKNAMSIYRAIEEGAGRLGLIIKKEETMCSYDFLIYGK

SEQ ID NO: 18428 - protein, 85 aa, unidentified
  REGION 1..85: note = Description of Unknown:cds_NC_025377.1_cds_YP_009094272.1_5 target sequence
TPLFRGNILVPESKRWARVSCISNDQIVNLANIMSTVSTNALTVAQHSQSLIKPMRDFLLMSVQAIYHYLLFSPILKDRVYKILN

SEQ ID NO: 18429 - protein, 85 aa, unidentified
  REGION 1..85: note = Description of Unknown:cds_NC_025377.1_cds_YP_009094272.1_5 target sequence
AQGEDFLMSMARIIYLDPSLGGVSGMSLGRFHIRQFSDPVTEGLSFWKEIWEVSSEGWIHSLCQEAGNPDLGDRSLESFTRLIED

SEQ ID NO: 18430 - protein, 85 aa, unidentified
  REGION 1..85: note = Description of Unknown:cds_NC_025377.1_cds_YP_009094272.1_5 target sequence
PTTLNIRGGASPTILLKEAIRKALYDEVDRVENSEFREAILLSKTHRDNFILFLKSIEPLFPRFLSELFSSSFLGIPESIIGLIQ

SEQ ID NO: 18431 - protein, 85 aa, unidentified
  REGION 1..85: note = Description of Unknown:cds_NC_025377.1_cds_YP_009094272.1_5 target sequence
NSRTIRRQFRRSLSQSLEESFFKSELHGLTRLTQVPQRVGRVWRCSAERADQLREISWGKKVVGTTVPHPSEMLNLVPKSSVSCN

SEQ ID NO: 18432 - protein, 85 aa, unidentified
  REGION 1..85: note = Description of Unknown:cds_NC_025377.1_cds_YP_009094272.1_5 target sequence
CGRINPESPRISVSVLPSFDNSFLSRGPLKGYLGSSTSVTTQLFHAWEKVTNIHVVRRALSLKESINWFIDRDSNLAKTIIRNIL

SEQ ID NO: 18433 - protein, 85 aa, unidentified
  REGION 1..85: note = Description of Unknown:cds_NC_025377.1_cds_YP_009094272.1_5 target sequence
SLTGPDFVIEETPLFKRTGSALHRFKSARYSEGGYSSVCPNLLSHISVSTDTMSDLTQDGSNFDFMFQPLMLYSQTWTSEIVQRD

SEQ ID NO: 18434 - protein, 85 aa, unidentified
  REGION 1..85: note = Description of Unknown:cds_NC_025377.1_cds_YP_009094272.1_5 target sequence
LRLRDTTYHWHLRCQRCIRPIEDITLDSPCCFVFPDISNRISRMVSGAVPEVRKLPEVALKAGDFSTISPRERSYHIGTAQGLLY

SEQ ID NO: 18435 - protein, 85 aa, unidentified
  REGION 1..85: note = Description of Unknown:cds_NC_025377.1_cds_YP_009094272.1_5 target sequence
SILVAIHDPGYNDHALFPVNIYSRMSPQHYLRGLSRGVLIGSSICFLTRMTNININRPLELISGVISYILLKLDTHPSLYVMLKE

SEQ ID NO: 18436 - protein, 85 aa, unidentified
  REGION 1..85: note = Description of Unknown:cds_NC_025377.1_cds_YP_009094272.1_5 target sequence
PGMRSEIFSIPQKIPAAYPTTMKEGNRAILSYLQYILRYQKEEITRSESSDLLWMFSDFRSMKMTYLTLLTFQTHILLQKIGKSL

SEQ ID NO: 18437 - protein, 85 aa, unidentified
  REGION 1..85: note = Description of Unknown:cds_NC_025377.1_cds_YP_009094272.1_5 target sequence
SKQMRSDLRHLNTLMRRVLGGQGEGDLDSQEDVGRLLNDSVRRTRWVDQEVRHAAKSLCKEPKEPLKTSRRLCQVEWSCSLQQVA

SEQ ID NO: 18438 - protein, 85 aa, unidentified
  REGION 1..85: note = Description of Unknown:cds_NC_025377.1_cds_YP_009094272.1_5 target sequence
ISTSSNPSAYTDMDLRMISRQIQNPLISGLRIVQWATGAHYKIKPLLQKLDQCPQMCLVVGDGSGGISRAVLRVFPDAKLLFNSL

SEQ ID NO: 18439 - protein, 85 aa, unidentified
  REGION 1..85: note = Description of Unknown:cds_NC_025377.1_cds_YP_009094272.1_5 target sequence
LEVNDLMAAGTHPLPPSALMHGGDELTNRVIDFEAIWEKPSDLRNVSTWKYFQSVQERSKMSFDLVICDAEVTDVTSINKISLLM

SEQ ID NO: 18440 - protein, 85 aa, unidentified
  REGION 1..85: note = Description of Unknown:cds_NC_025377.1_cds_YP_009094272.1_5 target sequence
SDFIMAIKSPVTLIFKTYGTMLINPDYKALRNLSRAFPEVTGYITQLTSSFSSEIYLMFKKHGRFFKEAESLTASTVHEMSLVLF

SEQ ID NO: 18441 - protein, 85 aa, unidentified
  REGION 1..85: note = Description of Unknown:cds_NC_025377.1_cds_YP_009094272.1_5 target sequence
NCRTPKSEMLRARSLNYSDLIRGFPEEIISNPYNEMIITLIDSEMESFLVHKLVDDLELARGSLSKLSKILVIIILYSNRVFNVS

SEQ ID NO: 18442 - protein, 85 aa, unidentified
  REGION 1..85: note = Description of Unknown:cds_NC_025377.1_cds_YP_009094272.1_5 target sequence
KPMRDSSFCPPSDPKLLRHYNICSSTLLFLATVLGDTNSFTKLHEMYNQPVTYYFKKRTIREKIYLMWSWSGKSPVFKRVSCNHA

SEQ ID NO: 18443 - protein, 85 aa, unidentified
  REGION 1..85: note = Description of Unknown:cds_NC_020807.1_cds_YP_007641391.1_5 target sequence
IDSSEVYDDPIDPAEPECEWSGNPVIPNILRNSDYNLNSPLLEDPTHLMIQWLLSGNRPLRMTVTENMVRSHKVLKASFKRVDIA

SEQ ID NO: 18444 - protein, 85 aa, unidentified
  REGION 1..85: note = Description of Unknown:cds_NC_020807.1_cds_YP_007641391.1_5 target sequence
VIKIGGTSAQAMMGTWVRGSHAESSRSRKCLADLSSFYQRSSPIESILNYTLMNRGLQTPREGVLAGLSRVSYDQSFGRYLGNLY

SEQ ID NO: 18445 - protein, 85 aa, unidentified
  REGION 1..85: note = Description of Unknown:cds_NC_020807.1_cds_YP_007641391.1_5 target sequence
SSYLLFHTIVLYMNALDWEEEKTILALWKDITSVDIKNDKVLFKDPLWGKFLVTKDFVYSYDSNSLFDRNYTLMLKDLFLSRFNS

SEQ ID NO: 18446 - protein, 85 aa, unidentified
  REGION 1..85: note = Description of Unknown:cds_NC_020807.1_cds_YP_007641391.1_5 target sequence
LLILISPPEPRYSDELVANLCRLYIAGDKILSTCGNPGYDIIKMLEPYVVNLLVQKAETFRPLIHPLGEFPTFIKDKTAQLIGTF

SEQ ID NO: 18447 - protein, 85 aa, unidentified
  REGION 1..85: note = Description of Unknown:cds_NC_020807.1_cds_YP_007641391.1_5 target sequence
GPCASQFFSMLSQFDNIHDLVFVYGCYRHWGHPYIDYRRGLTKLFDQVHMRKTIDQKYQECLASDLAKKILRWGFDKYSKWYLDT

SEQ ID NO: 18448 - protein, 85 aa, unidentified
  REGION 1..85: note = Description of Unknown:cds_NC_020807.1_cds_YP_007641391.1_5 target sequence
NSLPKNHPLAPYIATQTWPPKHIVDLLGDSWHLLPMTQIFEIPESMDPSEILDDKSHSFTRSKLAYWLSENRGGPVPSEKVIITA

SEQ ID NO: 18449 - protein, 85 aa, unidentified
  REGION 1..85: note = Description of Unknown:cds_NC_020807.1_cds_YP_007641391.1_5 target sequence
LSRPPVNPREFLRTIDQGGLPEDDLIIGLKPKERELKIEGRFFALMSWNLRLYFVITEKLLANHILPLFDALTMTDNLNKVFKKL

SEQ ID NO: 18450 - protein, 85 aa, unidentified
  REGION 1..85: note = Description of Unknown:cds_NC_020807.1_cds_YP_007641391.1_5 target sequence
IDRVTGQGLLDYSRVTYAFHLDYEKWNNHQRLESTKDVFSVLDKAFGLSRVFSRTHEFFQKSWVYYSDRSDLIGIWKDQIYCLDM

SEQ ID NO: 18451 - protein, 85 aa, unidentified
  REGION 1..85: note = Description of Unknown:cds_NC_020807.1_cds_YP_007641391.1_5 target sequence
AEGPTCWNGQDGGLEGLRQKGWSLVSLLMIERESQTRNTRTKILAQGDNQVLCPTYMLSSGLNNEGLRYELESISKNAMSIYRAI

SEQ ID NO: 18452 - protein, 85 aa, unidentified
  REGION 1..85: note = Description of Unknown:cds_NC_020807.1_cds_YP_007641391.1_5 target sequence
EEGASKLGLIIKKEETMCSFDFLIYGKTPLFRGNILVPESKRWARVSCISNDQIVNLANIMSTVSTNALTVAQHSQSLIKPMRDF

SEQ ID NO: 18453 - protein, 85 aa, unidentified
  REGION 1..85: note = Description of Unknown:cds_NC_020807.1_cds_YP_007641391.1_5 target sequence
LLMSVQAIYHYLLFSPILKDRVYKVLNSKGDDFLLAMSRIIYLDPSLGGVSGMSLGRFHIRQFSDPVSEGLTFWKEIWLSASETW

SEQ ID NO: 18454 - protein, 85 aa, unidentified
  REGION 1..85: note = Description of Unknown:cds_NC_020807.1_cds_YP_007641391.1_5 target sequence
IHHLCQEAGNPDLGDRTLESFTRLLEDPTTLNIRGGASPTILLKEAIRKALYDEVDKVENSEFREAIILSKTHRDNFILFLKSIE

SEQ ID NO: 18455 - protein, 85 aa, unidentified
  REGION 1..85: note = Description of Unknown:cds_NC_020807.1_cds_YP_007641391.1_5 target sequence
PLFPRFLSELFSSSFLGIPESIIGLIQNSRTVRRQFRKSLSRALEESFFHSEIHGINRMTQTPQRLGRVWPCSAERADQLREISW

SEQ ID NO: 18456 - protein, 85 aa, unidentified
  REGION 1..85: note = Description of Unknown:cds_NC_020807.1_cds_YP_007641391.1_5 target sequence
GRKVVGTTVPHPAEMLVLVPRSSVACGCNVRDAYNPRLSVSVLPSFDNSFFSRGPLKGYLGSSTSVSTQLFHAWEKVTNVHVVKR

SEQ ID NO: 18457 - protein, 85 aa, unidentified
  REGION 1..85: note = Description of Unknown:cds_NC_020807.1_cds_YP_007641391.1_5 target sequence
ALSLKESINWFVSRDSNLAQTLIRNILSLTGPSFPIEEAPVFKRTGSALHRFKSARYSEGGYSSVCPNLLSHISVSTDTMSDLTQ

SEQ ID NO: 18458 - protein, 85 aa, unidentified
  REGION 1..85: note = Description of Unknown:cds_NC_020807.1_cds_YP_007641391.1_5 target sequence
DGTNFDFMFQPLMLYAQTWTSELVQKDVRLKDSTFHWHLRCQKCIRPIEEVSLEAPQSFIFPDISTRISRMVSGAVPQFRKLPDI

SEQ ID NO: 18459 - protein, 85 aa, unidentified
  REGION 1..85: note = Description of Unknown:cds_NC_020807.1_cds_YP_007641391.1_5 target sequence
GLKAGDLTVLNNNERSYHIGTAQGLLYSILVAVHDPGYNDNSLFPVNIYGRVSARSYLRGLARGVLIGSSICFLTRMTNININRP

SEQ ID NO: 18460 - protein, 85 aa, unidentified
  REGION 1..85: note = Description of Unknown:cds_NC_020807.1_cds_YP_007641391.1_5 target sequence
LELISGVISYILLRLDNHPSLYVMLKEPDLRAEIFSIPQKIPAAYPTTMEEGNRSVLCYLQQVLRYERDSMCSSPESELLWIFSD

SEQ ID NO: 18461 - protein, 85 aa, unidentified
  REGION 1..85: note = Description of Unknown:cds_NC_020807.1_cds_YP_007641391.1_5 target sequence
FRSIKMTYLTLITYQAHLWLQKVERNLSKQMRAKLRQLNSLMRQVLGGHGEDNVESDEEIHSLLKEALRRTRWVDQEVRHAAKSM

SEQ ID NO: 18462 - protein, 85 aa, unidentified
  REGION 1..85: note = Description of Unknown:cds_NC_020807.1_cds_YP_007641391.1_5 target sequence
SPDLSPIPRISRKIGSSEWICSAQQIAISTSLNPALASDIDLRSLSRQFQNPLMSGLRIVQWATGAHYKVKPILNDLDVCPCLSL

SEQ ID NO: 18463 - protein, 85 aa, unidentified
  REGION 1..85: note = Description of Unknown:cds_NC_020807.1_cds_YP_007641391.1_5 target sequence
VIGDGSGGISRVVLSMFPDSKLVFNSLLEVNDLMASGTHPLPPSALMRGGEEITSRVIDFDSIWEKPSDLRNPLTWKYFHSVQSK

SEQ ID NO: 18464 - protein, 85 aa, unidentified
  REGION 1..85: note = Description of Unknown:cds_NC_020807.1_cds_YP_007641391.1_5 target sequence
LKTQFDLIVCDAEVTDIESVNKITLLLSDFSMSIRGPLCLIFKTYGTMLVNPDYKAIHHLSRAFPNVTGFVTQMTSSFSSEVYLK

SEQ ID NO: 18465 - protein, 85 aa, unidentified
  REGION 1..85: note = Description of Unknown:cds_NC_020807.1_cds_YP_007641391.1_5 target sequence
FSKKGHFFRDHELLTASTIREMSLVLFNCSNTKSEMLRARTLNYQDLVRGFPEEIISNPYNEMIITLIDSEVESFLVHKMVDELE

SEQ ID NO: 18466 - protein, 85 aa, unidentified
  REGION 1..85: note = Description of Unknown:cds_NC_020807.1_cds_YP_007641391.1_5 target sequence
LKRGYPSKMAIILAITIVFSNRVFNVSKSLKESKFFPPSDPKLLRHFNICSSTLLFLSTTLGDLPNFTRIHELYNLPVTYYFKKQ

SEQ ID NO: 18467 - protein, 85 aa, unidentified
  REGION 1..85: note = Description of Unknown:cds_NC_020807.1_cds_YP_007641391.1_5 target sequence
TIRSKKYLSWSWASPSPIFKKVACNSSLSLSAHWIRMIYKIVKTTRLSCRPKDLIRETEACLKNYNRWINMRDIRSRTSLMDYCC

SEQ ID NO: 18468 - protein, 84 aa, unidentified
  REGION 1..84: note = Description of Unknown:cds_NC_020807.1_cds_YP_007641391.1_5 target sequence
RSKKYLSWSWASPSPIFKKVACNSSLSLSAHWIRMIYKIVKTTRLSCRPKDLIRETEACLKNYNRWINMRDIRSRTSLMDYCCL

SEQ ID NO: 18469 - protein, 85 aa, unidentified
  REGION 1..85: note = Description of Unknown:cds_NC_020807.1_cds_YP_007641391.1_5 target sequence
NILRNSDYNLNSPLLEDPTHLMIQWLLSGNRPLRMTVTENMVRSHKVLKASFKRVDIAVIKIGGTSAQAMMGTWVRGSHAESSRS

SEQ ID NO: 18470 - protein, 85 aa, unidentified
  REGION 1..85: note = Description of Unknown:cds_NC_020807.1_cds_YP_007641391.1_5 target sequence
RKCLADLSSFYQRSSPIESILNYTLMNRGLQTPREGVLAGLSRVSYDQSFGRYLGNLYSSYLLFHTIVLYMNALDWEEEKTILAL

SEQ ID NO: 18471 - protein, 85 aa, unidentified
  REGION 1..85: note = Description of Unknown:cds_NC_020807.1_cds_YP_007641391.1_5 target sequence
WKDITSVDIKNDKVLFKDPLWGKFLVTKDFVYSYDSNSLFDRNYTLMLKDLFLSRFNSLLILISPPEPRYSDELVANLCRLYIAG

SEQ ID NO: 18472 - protein, 85 aa, unidentified
  REGION 1..85: note = Description of Unknown:cds_NC_020807.1_cds_YP_007641391.1_5 target sequence
DKILSTCGNPGYDIIKMLEPYVVNLLVQKAETFRPLIHPLGEFPTFIKDKTAQLIGTFGPCASQFFSMLSQFDNIHDLVFVYGCY

SEQ ID NO: 18473 - protein, 85 aa, unidentified
  REGION 1..85: note = Description of Unknown:cds_NC_020807.1_cds_YP_007641391.1_5 target sequence
RHWGHPYIDYRRGLTKLFDQVHMRKTIDQKYQECLASDLAKKILRWGFDKYSKWYLDTNSLPKNHPLAPYIATQTWPPKHIVDLL

SEQ ID NO: 18474 - protein, 85 aa, unidentified
  REGION 1..85: note = Description of Unknown:cds_NC_020807.1_cds_YP_007641391.1_5 target sequence
GDSWHLLPMTQIFEIPESMDPSEILDDKSHSFTRSKLAYWLSENRGGPVPSEKVIITALSRPPVNPREFLRTIDQGGLPEDDLII

SEQ ID NO: 18475 - protein, 85 aa, unidentified
  REGION 1..85: note = Description of Unknown:cds_NC_020807.1_cds_YP_007641391.1_5 target sequence
GLKPKERELKIEGRFFALMSWNLRLYFVITEKLLANHILPLFDALTMTDNLNKVFKKLIDRVTGQGLLDYSRVTYAFHLDYEKWN

SEQ ID NO: 18476 - protein, 85 aa, unidentified
  REGION 1..85: note = Description of Unknown:cds_NC_020807.1_cds_YP_007641391.1_5 target sequence
NHQRLESTKDVFSVLDKAFGLSRVFSRTHEFFQKSWVYYSDRSDLIGIWKDQIYCLDMAEGPTCWNGQDGGLEGLRQKGWSLVSL

SEQ ID NO: 18477 - protein, 85 aa, unidentified
  REGION 1..85: note = Description of Unknown:cds_NC_020807.1_cds_YP_007641391.1_5 target sequence
LMIERESQTRNTRTKILAQGDNQVLCPTYMLSSGLNNEGLRYELESISKNAMSIYRAIEEGASKLGLIIKKEETMCSFDFLIYGK

SEQ ID NO: 18478 - protein, 85 aa, unidentified
  REGION 1..85: note = Description of Unknown:cds_NC_020807.1_cds_YP_007641391.1_5 target sequence
TPLFRGNILVPESKRWARVSCISNDQIVNLANIMSTVSTNALTVAQHSQSLIKPMRDFLLMSVQAIYHYLLFSPILKDRVYKVLN

SEQ ID NO: 18479 - protein, 85 aa, unidentified
  REGION 1..85: note = Description of Unknown:cds_NC_020807.1_cds_YP_007641391.1_5 target sequence
SKGDDFLLAMSRIIYLDPSLGGVSGMSLGRFHIRQFSDPVSEGLTFWKEIWLSASETWIHHLCQEAGNPDLGDRTLESFTRLLED

SEQ ID NO: 18480 - protein, 85 aa, unidentified
  REGION 1..85: note = Description of Unknown:cds_NC_020807.1_cds_YP_007641391.1_5 target sequence
PTTLNIRGGASPTILLKEAIRKALYDEVDKVENSEFREAIILSKTHRDNFILFLKSIEPLFPRFLSELFSSSFLGIPESIIGLIQ

SEQ ID NO: 18481 - protein, 85 aa, unidentified
  REGION 1..85: note = Description of Unknown:cds_NC_020807.1_cds_YP_007641391.1_5 target sequence
NSRTVRRQFRKSLSRALEESFFHSEIHGINRMTQTPQRLGRVWPCSAERADQLREISWGRKVVGTTVPHPAEMLVLVPRSSVACG

SEQ ID NO: 18482 - protein, 85 aa, unidentified
  REGION 1..85: note = Description of Unknown:cds_NC_020807.1_cds_YP_007641391.1_5 target sequence
CNVRDAYNPRLSVSVLPSFDNSFFSRGPLKGYLGSSTSVSTQLFHAWEKVTNVHVVKRALSLKESINWFVSRDSNLAQTLIRNIL

SEQ ID NO: 18483 - protein, 85 aa, unidentified
  REGION 1..85: note = Description of Unknown:cds_NC_020807.1_cds_YP_007641391.1_5 target sequence
SLTGPSFPIEEAPVFKRTGSALHRFKSARYSEGGYSSVCPNLLSHISVSTDTMSDLTQDGTNFDFMFQPLMLYAQTWTSELVQKD

SEQ ID NO: 18484 - protein, 85 aa, unidentified
  REGION 1..85: note = Description of Unknown:cds_NC_020807.1_cds_YP_007641391.1_5 target sequence
VRLKDSTFHWHLRCQKCIRPIEEVSLEAPQSFIFPDISTRISRMVSGAVPQFRKLPDIGLKAGDLTVLNNNERSYHIGTAQGLLY

SEQ ID NO: 18485 - protein, 85 aa, unidentified
  REGION 1..85: note = Description of Unknown:cds_NC_020807.1_cds_YP_007641391.1_5 target sequence
SILVAVHDPGYNDNSLFPVNIYGRVSARSYLRGLARGVLIGSSICFLTRMTNININRPLELISGVISYILLRLDNHPSLYVMLKE

SEQ ID NO: 18486 - protein, 85 aa, unidentified
  REGION 1..85: note = Description of Unknown:cds_NC_020807.1_cds_YP_007641391.1_5 target sequence
PDLRAEIFSIPQKIPAAYPTTMEEGNRSVLCYLQQVLRYERDSMCSSPESELLWIFSDFRSIKMTYLTLITYQAHLWLQKVERNL

SEQ ID NO: 18487 - protein, 85 aa, unidentified
  REGION 1..85: note = Description of Unknown:cds_NC_020807.1_cds_YP_007641391.1_5 target sequence
SKQMRAKLRQLNSLMRQVLGGHGEDNVESDEEIHSLLKEALRRTRWVDQEVRHAAKSMSPDLSPIPRISRKIGSSEWICSAQQIA

SEQ ID NO: 18488 - protein, 85 aa, unidentified
  REGION 1..85: note = Description of Unknown:cds_NC_020807.1_cds_YP_007641391.1_5 target sequence
ISTSLNPALASDIDLRSLSRQFQNPLMSGLRIVQWATGAHYKVKPILNDLDVCPCLSLVIGDGSGGISRVVLSMFPDSKLVFNSL

SEQ ID NO: 18489 - protein, 85 aa, unidentified
  REGION 1..85: note = Description of Unknown:cds_NC_020807.1_cds_YP_007641391.1_5 target sequence
LEVNDLMASGTHPLPPSALMRGGEEITSRVIDFDSIWEKPSDLRNPLTWKYFHSVQSKLKTQFDLIVCDAEVTDIESVNKITLLL

SEQ ID NO: 18490 - protein, 85 aa, unidentified
  REGION 1..85: note = Description of Unknown:cds_NC_020807.1_cds_YP_007641391.1_5 target sequence
SDFSMSIRGPLCLIFKTYGTMLVNPDYKAIHHLSRAFPNVTGFVTQMTSSFSSEVYLKFSKKGHFFRDHELLTASTIREMSLVLF

SEQ ID NO: 18491 - protein, 85 aa, unidentified
  REGION 1..85: note = Description of Unknown:cds_NC_020807.1_cds_YP_007641391.1_5 target sequence
NCSNTKSEMLRARTLNYQDLVRGFPEEIISNPYNEMIITLIDSEVESFLVHKMVDELELKRGYPSKMAIILAITIVFSNRVFNVS

SEQ ID NO: 18492 - protein, 85 aa, unidentified
  REGION 1..85: note = Description of Unknown:cds_NC_020807.1_cds_YP_007641391.1_5 target sequence
KSLKESKFFPPSDPKLLRHFNICSSTLLFLSTTLGDLPNFTRIHELYNLPVTYYFKKQTIRSKKYLSWSWASPSPIFKKVACNSS

SEQ ID NO: 18493 - protein, 85 aa, unidentified
  REGION 1..85: note = Description of Unknown:cds_NC_020810.1_cds_YP_007641406.1_5 target sequence
LESTEVYDDPLDPVEPEFDLKTNSVVPNILRNSDYNLNSPLLEDPSKLMLEWLMTGNKPHRLNLTDNLLRSYKVLKGYFKRLDTG

SEQ ID NO: 18494 - protein, 85 aa, unidentified
  REGION 1..85: note = Description of Unknown:cds_NC_020810.1_cds_YP_007641406.1_5 target sequence
SLRVGSVGSQAMVTLWLHGSHSESTRSRKCLAELSQFYKKSAPIETLLNCTLENRGLRTPPEGVLSCLDKVHYDQAFGRYLGNTY

SEQ ID NO: 18495 - protein, 85 aa, unidentified
  REGION 1..85: note = Description of Unknown:cds_NC_020810.1_cds_YP_007641406.1_5 target sequence
SSYLFFHVMVLYMNALDWDEEKTILSLWRDISSIDIKNDLVKFKDQIWGTLVVTKDFIYSQSANCLFDRNYTLMLKDLFLSRFNS

SEQ ID NO: 18496 - protein, 85 aa, unidentified
  REGION 1..85: note = Description of Unknown:cds_NC_020810.1_cds_YP_007641406.1_5 target sequence
FLILLSPPEARYSDDLVSNLCQLYISGDRVLSVCGNSGFDVIKLLEPYIVNKLVQRAEKFRPLIHSLGDFPQFIKDKTTQLEGTF

SEQ ID NO: 18497 - protein, 85 aa, unidentified
  REGION 1..85: note = Description of Unknown:cds_NC_020810.1_cds_YP_007641406.1_5 target sequence
GPSAKEFFQTMDSLDNVHDLVFVYGCYRHWGHPYIDYRRGLSKLYDQVHLKKTIDKSYQECLASDLAKRILRWGFDKYSRWYVDP

SEQ ID NO: 18498 - protein, 85 aa, unidentified
  REGION 1..85: note = Description of Unknown:cds_NC_020810.1_cds_YP_007641406.1_5 target sequence
NLLQNDHPLVPYVRTQTWPPKHVVDVVGDTWHNLPITQIFEIPESMDPSEILDDKSHSFTRTKLASWLSEHRGGPVPSEKVIITA

SEQ ID NO: 18499 - protein, 85 aa, unidentified
  REGION 1..85: note = Description of Unknown:cds_NC_020810.1_cds_YP_007641406.1_5 target sequence
LSRPPVNPREFLRSIDVSGLPDDDLIIGLKPKERELKIEGRFFALMSWNLRLYFVITEKLLATYILPLFDSLTMTDNLNKVFKKL

SEQ ID NO: 18500 - protein, 85 aa, unidentified
  REGION 1..85: note = Description of Unknown:cds_NC_020810.1_cds_YP_007641406.1_5 target sequence
IDRVTGQGLLDYSRVTYAFHLDYEKWNNHQRLESTIDVFSVLDKVFGLKKVFSRTHEFFQKSWIYYSDRSDLIGLWRDQIYCLDM

SEQ ID NO: 18501 - protein, 85 aa, unidentified
  REGION 1..85: note = Description of Unknown:cds_NC_020810.1_cds_YP_007641406.1_5 target sequence
SNGPTCWNGQDGGLEGLRQKGWSLVSLLMIDRESQTRNTRTKILAQGDNQVLCPTYMLSPGLNKEGLLYELDSISRNAISIYRAI

SEQ ID NO: 18502 - protein, 85 aa, unidentified
  REGION 1..85: note = Description of Unknown:cds_NC_020810.1_cds_YP_007641406.1_5 target sequence
EDGAAKLGLIIKKEETMCSYDFLIYGKTPLFRGNILVPESKRWARVSCISNDQIVNLANIMSTVSTNALTVAQHSQSLIKPMRDF

SEQ ID NO: 18503 - protein, 85 aa, unidentified
  REGION 1..85: note = Description of Unknown:cds_NC_020810.1_cds_YP_007641406.1_5 target sequence
LLMSVQAVFHYLLFSPILKNRVYKILVADGTEFLLAMSRIIYLDPSLGGVSGMSLGRFHIRQFSDPVSEGLSFWREIWSSSSETW

SEQ ID NO: 18504 - protein, 85 aa, unidentified
  REGION 1..85: note = Description of Unknown:cds_NC_020810.1_cds_YP_007641406.1_5 target sequence
IHSLCQEAGNPDLGERSLESFTRLLEDPTTLNIRGGASPTILLKEAIRKALYDEVDKVENSEFREAILLSKTHRDNFILFLRSVE

SEQ ID NO: 18505 - protein, 85 aa, unidentified
  REGION 1..85: note = Description of Unknown:cds_NC_020810.1_cds_YP_007641406.1_5 target sequence
PLFPRFLSELFSSSFLGIPESIIGLIQNSRTIRRQFRKSLSRTLEESFFSSEIQGISRVTQVAQKIGRVWRCSAERADQLREISW

SEQ ID NO: 18506 - protein, 85 aa, unidentified
  REGION 1..85: note = Description of Unknown:cds_NC_020810.1_cds_YP_007641406.1_5 target sequence
GRKVVGTTVPHPSEMLSMIPKSSISCTCGQLEDDNPRISVSVLPSFDQTFFSRGPLKGYLGSSTSMSTQLFHAWEKVTNVHVVKR

SEQ ID NO: 18507 - protein, 85 aa, unidentified
  REGION 1..85: note = Description of Unknown:cds_NC_020810.1_cds_YP_007641406.1_5 target sequence
ALSLKESINWFISRDSNLAHTLIRNIVSLTGPSFPLEEAPVFKRTGSALHRFKSARYSEGGYSSICPNLLSHISVSTDTMSDLTQ

SEQ ID NO: 18508 - protein, 85 aa, unidentified
  REGION 1..85: note = Description of Unknown:cds_NC_020810.1_cds_YP_007641406.1_5 target sequence
DGTNFDFMFQPLMLYAQTWTSELVQKDLRLKDSTFHWHLRCVRCVRPIDDITLEAPNVFSFPDVSRRISRMVSGAVPQFQKLPEI

SEQ ID NO: 18509 - protein, 85 aa, unidentified
  REGION 1..85: note = Description of Unknown:cds_NC_020810.1_cds_YP_007641406.1_5 target sequence
SLKPGKFETLSGKDQSKHIGTAQGLLYSILVAIHDSGYNDGTVFPVNIYKRVSPRDYLRGLARGVLIGSSICFLTRMTSININRP

SEQ ID NO: 18510 - protein, 85 aa, unidentified
  REGION 1..85: note = Description of Unknown:cds_NC_020810.1_cds_YP_007641406.1_5 target sequence
LELISGVISYILLRLDNHPSLYVMLKEPSLRLEIFSIPQKIPAAYPTTMKEGNRSVLCYLQHVLRYEREAITASPECDWLWIFSD

SEQ ID NO: 18511 - protein, 85 aa, unidentified
  REGION 1..85: note = Description of Unknown:cds_NC_020810.1_cds_YP_007641406.1_5 target sequence
FRSIKMTYLTLITYQSHLLLQKIDRNLSKQMRVQLRQLNSLMRQVLGGHGEGSLDSADDIHGLLRDALQRTRWVDQEVRHAAKAM

SEQ ID NO: 18512 - protein, 85 aa, unidentified
  REGION 1..85: note = Description of Unknown:cds_NC_020810.1_cds_YP_007641406.1_5 target sequence
KCDYSPQKRSSRKASSSEWICSAQQIAISTSSNPAPTSEIDIRALSRKLQNPLISGLRVVQWATGAHYKLKPILNELDTYPTLCL

SEQ ID NO: 18513 - protein, 85 aa, unidentified
  REGION 1..85: note = Description of Unknown:cds_NC_020810.1_cds_YP_007641406.1_5 target sequence
VVGDGSGGISRAVLSMFPDAKLVFNSLLEVSDLMASGTHPLPPSALVSGGEDIISRVIDFQSIWEKPSDLRNPSTWRYFQSVQQT

SEQ ID NO: 18514 - protein, 85 aa, unidentified
  REGION 1..85: note = Description of Unknown:cds_NC_020810.1_cds_YP_007641406.1_5 target sequence
TNMSYDLIICDAEVTDISSINKITLLMSDFSLSINGPLSLIFKTYGTMLVNPDYRAIQHLSRAFPSAAGYITQVTSSFSSELYLK

SEQ ID NO: 18515 - protein, 85 aa, unidentified
  REGION 1..85: note = Description of Unknown:cds_NC_020810.1_cds_YP_007641406.1_5 target sequence
  MOD_RES 40: note = Any amino acid
FSKRGKFFRDPEHLTSSTLREMSLVLFNCSSSKSEMLRAXSLNYQDLVRGFPEEIISNPYNEMIITLIDNDVESFLVHKMIDDLE

SEQ ID NO: 18516 - protein, 85 aa, unidentified
  REGION 1..85: note = Description of Unknown:cds_NC_020810.1_cds_YP_007641406.1_5 target sequence
LQRGAFSKLSIILTIMVVFSNRVFNVSKPLTDTKFYPPSDPKILKHFNICCSTLLYLSVALGDVLNFARLHELYNNPITYYFRKQ

SEQ ID NO: 18517 - protein, 85 aa, unidentified
  REGION 1..85: note = Description of Unknown:cds_NC_020810.1_cds_YP_007641406.1_5 target sequence
VIGGRMYLAWSWSHSTSVFKRVACNSNLSLSAHWIRLIYKVVKTTRLTGGPKDLSREMERHLKSYNRWINFDDLRSRSSLLDYSG

SEQ ID NO: 18518 - protein, 84 aa, unidentified
  REGION 1..84: note = Description of Unknown:cds_NC_020810.1_cds_YP_007641406.1_5 target sequence
GGRMYLAWSWSHSTSVFKRVACNSNLSLSAHWIRLIYKVVKTTRLTGGPKDLSREMERHLKSYNRWINFDDLRSRSSLLDYSGL

SEQ ID NO: 18519 - protein, 85 aa, unidentified
  REGION 1..85: note = Description of Unknown:cds_NC_020810.1_cds_YP_007641406.1_5 target sequence
NILRNSDYNLNSPLLEDPSKLMLEWLMTGNKPHRLNLTDNLLRSYKVLKGYFKRLDTGSLRVGSVGSQAMVTLWLHGSHSESTRS

SEQ ID NO: 18520 - protein, 85 aa, unidentified
  REGION 1..85: note = Description of Unknown:cds_NC_020810.1_cds_YP_007641406.1_5 target sequence
RKCLAELSQFYKKSAPIETLLNCTLENRGLRTPPEGVLSCLDKVHYDQAFGRYLGNTYSSYLFFHVMVLYMNALDWDEEKTILSL

SEQ ID NO: 18521 - protein, 85 aa, unidentified
  REGION 1..85: note = Description of Unknown:cds_NC_020810.1_cds_YP_007641406.1_5 target sequence
WRDISSIDIKNDLVKFKDQIWGTLVVTKDFIYSQSANCLFDRNYTLMLKDLFLSRFNSFLILLSPPEARYSDDLVSNLCQLYISG

SEQ ID NO: 18522 - protein, 85 aa, unidentified
  REGION 1..85: note = Description of Unknown:cds_NC_020810.1_cds_YP_007641406.1_5 target sequence
DRVLSVCGNSGFDVIKLLEPYIVNKLVQRAEKFRPLIHSLGDFPQFIKDKTTQLEGTFGPSAKEFFQTMDSLDNVHDLVFVYGCY

SEQ ID NO: 18523 - protein, 85 aa, unidentified
  REGION 1..85: note = Description of Unknown:cds_NC_020810.1_cds_YP_007641406.1_5 target sequence
RHWGHPYIDYRRGLSKLYDQVHLKKTIDKSYQECLASDLAKRILRWGFDKYSRWYVDPNLLQNDHPLVPYVRTQTWPPKHVVDVV

SEQ ID NO: 18524 - protein, 85 aa, unidentified
  REGION 1..85: note = Description of Unknown:cds_NC_020810.1_cds_YP_007641406.1_5 target sequence
GDTWHNLPITQIFEIPESMDPSEILDDKSHSFTRTKLASWLSEHRGGPVPSEKVIITALSRPPVNPREFLRSIDVSGLPDDDLII

SEQ ID NO: 18525 - protein, 85 aa, unidentified
  REGION 1..85: note = Description of Unknown:cds_NC_020810.1_cds_YP_007641406.1_5 target sequence
GLKPKERELKIEGRFFALMSWNLRLYFVITEKLLATYILPLFDSLTMTDNLNKVFKKLIDRVTGQGLLDYSRVTYAFHLDYEKWN

SEQ ID NO: 18526 - protein, 85 aa, unidentified
  REGION 1..85: note = Description of Unknown:cds_NC_020810.1_cds_YP_007641406.1_5 target sequence
NHQRLESTIDVFSVLDKVFGLKKVFSRTHEFFQKSWIYYSDRSDLIGLWRDQIYCLDMSNGPTCWNGQDGGLEGLRQKGWSLVSL

SEQ ID NO: 18527 - protein, 85 aa, unidentified
  REGION 1..85: note = Description of Unknown:cds_NC_020810.1_cds_YP_007641406.1_5 target sequence
LMIDRESQTRNTRTKILAQGDNQVLCPTYMLSPGLNKEGLLYELDSISRNAISIYRAIEDGAAKLGLIIKKEETMCSYDFLIYGK

SEQ ID NO: 18528 - protein, 85 aa, unidentified
  REGION 1..85: note = Description of Unknown:cds_NC_020810.1_cds_YP_007641406.1_5 target sequence
TPLFRGNILVPESKRWARVSCISNDQIVNLANIMSTVSTNALTVAQHSQSLIKPMRDFLLMSVQAVFHYLLFSPILKNRVYKILV

SEQ ID NO: 18529 - protein, 85 aa, unidentified
  REGION 1..85: note = Description of Unknown:cds_NC_020810.1_cds_YP_007641406.1_5 target sequence
ADGTEFLLAMSRIIYLDPSLGGVSGMSLGRFHIRQFSDPVSEGLSFWREIWSSSSETWIHSLCQEAGNPDLGERSLESFTRLLED

SEQ ID NO: 18530 - protein, 85 aa, unidentified
  REGION 1..85: note = Description of Unknown:cds_NC_020810.1_cds_YP_007641406.1_5 target sequence
PTTLNIRGGASPTILLKEAIRKALYDEVDKVENSEFREAILLSKTHRDNFILFLRSVEPLFPRFLSELFSSSFLGIPESIIGLIQ

SEQ ID NO: 18531 - protein, 85 aa, unidentified
  REGION 1..85: note = Description of Unknown:cds_NC_020810.1_cds_YP_007641406.1_5 target sequence
NSRTIRRQFRKSLSRTLEESFFSSEIQGISRVTQVAQKIGRVWRCSAERADQLREISWGRKVVGTTVPHPSEMLSMIPKSSISCT

SEQ ID NO: 18532 - protein, 85 aa, unidentified
  REGION 1..85: note = Description of Unknown:cds_NC_020810.1_cds_YP_007641406.1_5 target sequence
CGQLEDDNPRISVSVLPSFDQTFFSRGPLKGYLGSSTSMSTQLFHAWEKVTNVHVVKRALSLKESINWFISRDSNLAHTLIRNIV

SEQ ID NO: 18533 - protein, 85 aa, unidentified
  REGION 1..85: note = Description of Unknown:cds_NC_020810.1_cds_YP_007641406.1_5 target sequence
SLTGPSFPLEEAPVFKRTGSALHRFKSARYSEGGYSSICPNLLSHISVSTDTMSDLTQDGTNFDFMFQPLMLYAQTWTSELVQKD

SEQ ID NO: 18534 - protein, 85 aa, unidentified
  REGION 1..85: note = Description of Unknown:cds_NC_020810.1_cds_YP_007641406.1_5 target sequence
LRLKDSTFHWHLRCVRCVRPIDDITLEAPNVFSFPDVSRRISRMVSGAVPQFQKLPEISLKPGKFETLSGKDQSKHIGTAQGLLY

SEQ ID NO: 18535 - protein, 85 aa, unidentified
  REGION 1..85: note = Description of Unknown:cds_NC_020810.1_cds_YP_007641406.1_5 target sequence
SILVAIHDSGYNDGTVFPVNIYKRVSPRDYLRGLARGVLIGSSICFLTRMTSININRPLELISGVISYILLRLDNHPSLYVMLKE

SEQ ID NO: 18536 - protein, 85 aa, unidentified
  REGION 1..85: note = Description of Unknown:cds_NC_020810.1_cds_YP_007641406.1_5 target sequence
PSLRLEIFSIPQKIPAAYPTTMKEGNRSVLCYLQHVLRYEREAITASPECDWLWIFSDFRSIKMTYLTLITYQSHLLLQKIDRNL

SEQ ID NO: 18537 - protein, 85 aa, unidentified
  REGION 1..85: note = Description of Unknown:cds_NC_020810.1_cds_YP_007641406.1_5 target sequence
SKQMRVQLRQLNSLMRQVLGGHGEGSLDSADDIHGLLRDALQRTRWVDQEVRHAAKAMKCDYSPQKRSSRKASSSEWICSAQQIA

SEQ ID NO: 18538 - protein, 85 aa, unidentified
  REGION 1..85: note = Description of Unknown:cds_NC_020810.1_cds_YP_007641406.1_5 target sequence
ISTSSNPAPTSEIDIRALSRKLQNPLISGLRVVQWATGAHYKLKPILNELDTYPTLCLVVGDGSGGISRAVLSMFPDAKLVFNSL

SEQ ID NO: 18539 - protein, 85 aa, unidentified
  REGION 1..85: note = Description of Unknown:cds_NC_020810.1_cds_YP_007641406.1_5 target sequence
LEVSDLMASGTHPLPPSALVSGGEDIISRVIDFQSIWEKPSDLRNPSTWRYFQSVQQTTNMSYDLIICDAEVTDISSINKITLLM

SEQ ID NO: 18540 - protein, 85 aa, unidentified
  REGION 1..85: note = Description of Unknown:cds_NC_020810.1_cds_YP_007641406.1_5 target sequence
SDFSLSINGPLSLIFKTYGTMLVNPDYRAIQHLSRAFPSAAGYITQVTSSFSSELYLKFSKRGKFFRDPEHLTSSTLREMSLVLF

SEQ ID NO: 18541 - protein, 85 aa, unidentified
  REGION 1..85: note = Description of Unknown:cds_NC_020810.1_cds_YP_007641406.1_5 target sequence
  MOD_RES 13: note = Any amino acid
NCSSSKSEMLRAXSLNYQDLVRGFPEEIISNPYNEMIITLIDNDVESFLVHKMIDDLELQRGAFSKLSIILTIMVVFSNRVFNVS

SEQ ID NO: 18542 - protein, 85 aa, unidentified
  REGION 1..85: note = Description of Unknown:cds_NC_020810.1_cds_YP_007641406.1_5 target sequence
KPLTDTKFYPPSDPKILKHFNICCSTLLYLSVALGDVLNFARLHELYNNPITYYFRKQVIGGRMYLAWSWSHSTSVFKRVACNSN

SEQ ID NO: 18543 - protein, 85 aa, unidentified
  REGION 1..85: note = Description of Unknown:cds_NC_025365.1_cds_YP_009094183.1_5 target sequence
IESSEVYDDPLDPAEPESEWSNTSIIPNILRNSDYNLNSPLLEDHADLMLQWLSSGNRPLRMSTTDNISRSYKVLKLSFKKIDIA

SEQ ID NO: 18544 - protein, 85 aa, unidentified
  REGION 1..85: note = Description of Unknown:cds_NC_025365.1_cds_YP_009094183.1_5 target sequence
SIKFGGQGAQAMMNTWVLCSHAESSRSRKCLTDLSIFYQRSIPIESILNYTLSNRGLQTPKEGVLSCLGRISYDQSFGRYLGNLY

SEQ ID NO: 18545 - protein, 85 aa, unidentified
  REGION 1..85: note = Description of Unknown:cds_NC_025365.1_cds_YP_009094183.1_5 target sequence
SSYLLFHTMILYMNALDWEEEKTIIALWKEITSIDVKNDKVTFRDPLWGKFLVTKEFVYSYTNCSLFDRNYTLMLKDLFLSRFNS

SEQ ID NO: 18546 - protein, 85 aa, unidentified
  REGION 1..85: note = Description of Unknown:cds_NC_025365.1_cds_YP_009094183.1_5 target sequence
LLILISPPEPRYSDDLISNLCQLYKSGDKVISECGNSGYDVIKILEPYVVNHLVQKAETFRPLIHSLGDFPAFIKDKTTQLRGTF

SEQ ID NO: 18547 - protein, 85 aa, unidentified
  REGION 1..85: note = Description of Unknown:cds_NC_025365.1_cds_YP_009094183.1_5 target sequence
GPCASQFFSALDQFDNIHDLVFVYGCYRHWGHPYIDYRKGLTKLFDQVHMKKTIDKHYQECLASDLAKKILRWGFDKYSRWYLDT

SEQ ID NO: 18548 - protein, 85 aa, unidentified
  REGION 1..85: note = Description of Unknown:cds_NC_025365.1_cds_YP_009094183.1_5 target sequence
SLLPKNHPLIPYITTQTWPPRHVVDLLGDSWHSLPMTQIFEIPESMDPSEILDDKSHSFTRTRLASWLSENRGGPVPSEKVIITA

SEQ ID NO: 18549 - protein, 85 aa, unidentified
  REGION 1..85: note = Description of Unknown:cds_NC_025365.1_cds_YP_009094183.1_5 target sequence
LSKAPVNPREFLKAVDLNGLAEDDLIIGLKPKERELKIEGRFFALMSWNLRLYFVITEKLLANHILPLFDALTMTDNLNKVFKKL

SEQ ID NO: 18550 - protein, 85 aa, unidentified
  REGION 1..85: note = Description of Unknown:cds_NC_025365.1_cds_YP_009094183.1_5 target sequence
IDRVTGQGLCDYSRVTYAFHLDYEKWNNHQRLESTKDVFSVLDKAFGLSRVFSRTHEFFQKSWVYYSDRSDLIGIWNDQIYCLDM

SEQ ID NO: 18551 - protein, 85 aa, unidentified
  REGION 1..85: note = Description of Unknown:cds_NC_025365.1_cds_YP_009094183.1_5 target sequence
ADGPTCWNGQDGGLEGLRQKGWSLVSLLMIDRESQTRNTRTKILAQGDNQVLCPTYMLSSGLNNEGLMYELESISKNAMSIYRAI

SEQ ID NO: 18552 - protein, 85 aa, unidentified
  REGION 1..85: note = Description of Unknown:cds_NC_025365.1_cds_YP_009094183.1_5 target sequence
EEGASKLGLIIKKEETMCSYDFLIYGKTPLFRGNILVPESKRWARVSCISNDQIVNLANIMSTVSTNALTVAQHSQSLIKPMRDF

SEQ ID NO: 18553 - protein, 85 aa, unidentified
  REGION 1..85: note = Description of Unknown:cds_NC_025365.1_cds_YP_009094183.1_5 target sequence
LLMSVQAIYHYLLFSPILKDRVYKVLNSKGDDFLLTMSRIIYLDPSLGGVSGMSLGRFHIRQFSDPVSEGLTFWKEIWLSSSESW

SEQ ID NO: 18554 - protein, 85 aa, unidentified
  REGION 1..85: note = Description of Unknown:cds_NC_025365.1_cds_YP_009094183.1_5 target sequence
IHHLCQEAGNPDLGDRSLESFTRLLEDPTTLNIRGGASPTILLKEAIRKALYDEVDKVENSEFREAIILSKTHRDNFILFLKSIE

SEQ ID NO: 18555 - protein, 85 aa, unidentified
  REGION 1..85: note = Description of Unknown:cds_NC_025365.1_cds_YP_009094183.1_5 target sequence
PLFPRFLSELFSSSFLGIPESIIGLIQNSRTVRRQFRKSLSRALEESFFHSEIHGISRMTQSPQRLGRVWSCSAERADQLREISW

SEQ ID NO: 18556 - protein, 85 aa, unidentified
  REGION 1..85: note = Description of Unknown:cds_NC_025365.1_cds_YP_009094183.1_5 target sequence
GRKVVGTTVPHPSEMLMLVPKSSVSCGCSIRELYNPRISVSVLPSFDNSFFSRGSLRGYLGSSTSVSTQLFHAWEKVTNVHVVKR

SEQ ID NO: 18557 - protein, 85 aa, unidentified
  REGION 1..85: note = Description of Unknown:cds_NC_025365.1_cds_YP_009094183.1_5 target sequence
ALSLKESINWFISRDSNLAQTLIRNILSLTGPEFPIEEAPVFKRTGSALHRFKSARYSEGGYSAVCPNLLSHISVSTDTMSDLTQ

SEQ ID NO: 18558 - protein, 85 aa, unidentified
  REGION 1..85: note = Description of Unknown:cds_NC_025365.1_cds_YP_009094183.1_5 target sequence
DGTNFDFMFQPLMLYAQTWTSELVQKDLRLRDSTFHWHLRCQKCIRPIEEVSLEAPQSFAFPDISTRISRMVSGAVPQFRKLPTI

SEQ ID NO: 18559 - protein, 85 aa, unidentified
  REGION 1..85: note = Description of Unknown:cds_NC_025365.1_cds_YP_009094183.1_5 target sequence
ELKAGDLSSLTNNERSYHVGTAQGLLYSILVAIHDPGYNDNSLFPVNIYGKVSARSYLRGLARGVFIGSSICFLTRMTNININRP

SEQ ID NO: 18560 - protein, 85 aa, unidentified
  REGION 1..85: note = Description of Unknown:cds_NC_025365.1_cds_YP_009094183.1_5 target sequence
LELISGVISYILLRLDNHPSLYVMLKEPELRSEIFSIPQKIPAAYPTTMKEGNRSVLCYLQQVLRYERDSMSSSPGNDLLWIFSD

SEQ ID NO: 18561 - protein, 85 aa, unidentified
  REGION 1..85: note = Description of Unknown:cds_NC_025365.1_cds_YP_009094183.1_5 target sequence
FRSIKMTYLTLITFQAHLWLQRIERNLSKQMRAKLRQLNSLMRQVLGGHGEENIESDDEINSLLKEALRRTRWVDQEVRHAAKTM

SEQ ID NO: 18562 - protein, 85 aa, unidentified
  REGION 1..85: note = Description of Unknown:cds_NC_025365.1_cds_YP_009094183.1_5 target sequence
RPDLSPVPKNSRKIGSSEWICSAQQIAFSTSLNPAPMSDIDLRLLSRQFQNPLMSGLRVVQWATGAHYKLKPILDDLEVGPSLSL

SEQ ID NO: 18563 - protein, 85 aa, unidentified
  REGION 1..85: note = Description of Unknown:cds_NC_025365.1_cds_YP_009094183.1_5 target sequence
VVGDGSGGISRTVLNMFPDSKLVFNSLLEVNDLMASGTHPLPPSALMRGGEDITSRVIDFESIWEKPSDLRNSVTWKYFQSVQTR

SEQ ID NO: 18564 - protein, 85 aa, unidentified
  REGION 1..85: note = Description of Unknown:cds_NC_025365.1_cds_YP_009094183.1_5 target sequence
VKAHFDLIVCDAEVTDIESVNKITLLLSDFAMSIRGPLCLIFKTYGTMLINPDYKAIHHLSRAFPNMIGFVTQMTSSFSSEVYLR

SEQ ID NO: 18565 - protein, 85 aa, unidentified
  REGION 1..85: note = Description of Unknown:cds_NC_025365.1_cds_YP_009094183.1_5 target sequence
FSKKGHFFREHESLTASTIREMSLVLFNCSNPKSEMLRARSLNYQDLIRGFPEEIISNPYNEMIITLIDSEVESFLVHKLVDDLE

SEQ ID NO: 18566 - protein, 85 aa, unidentified
  REGION 1..85: note = Description of Unknown:cds_NC_025365.1_cds_YP_009094183.1_5 target sequence
LKRGSSSKMAIIVAIIILFSNRVFNVSKSIKDTKFFPPSDPKILRHFNICLSTMLFLSTTMGDLSNFTKIHELYNSPVIYYFRKQ

SEQ ID NO: 18567 - protein, 85 aa, unidentified
  REGION 1..85: note = Description of Unknown:cds_NC_025365.1_cds_YP_009094183.1_5 target sequence
TIKGKKFLSWSWADPSSIFKKVSCNSSLSLSAHWIRMIYKIVKTTRLNSNPRELLKEVEIYLKGYNRWITMRDVRSRTSLLDYCC

SEQ ID NO: 18568 - protein, 84 aa, unidentified
  REGION 1..84: note = Description of Unknown:cds_NC_025365.1_cds_YP_009094183.1_5 target sequence
KGKKFLSWSWADPSSIFKKVSCNSSLSLSAHWIRMIYKIVKTTRLNSNPRELLKEVEIYLKGYNRWITMRDVRSRTSLLDYCCL

SEQ ID NO: 18569 - protein, 85 aa, unidentified
  REGION 1..85: note = Description of Unknown:cds_NC_025365.1_cds_YP_009094183.1_5 target sequence
NILRNSDYNLNSPLLEDHADLMLQWLSSGNRPLRMSTTDNISRSYKVLKLSFKKIDIASIKFGGQGAQAMMNTWVLCSHAESSRS

SEQ ID NO: 18570 - protein, 85 aa, unidentified
  REGION 1..85: note = Description of Unknown:cds_NC_025365.1_cds_YP_009094183.1_5 target sequence
RKCLTDLSIFYQRSIPIESILNYTLSNRGLQTPKEGVLSCLGRISYDQSFGRYLGNLYSSYLLFHTMILYMNALDWEEEKTIIAL

SEQ ID NO: 18571 - protein, 85 aa, unidentified
  REGION 1..85: note = Description of Unknown:cds_NC_025365.1_cds_YP_009094183.1_5 target sequence
WKEITSIDVKNDKVTFRDPLWGKFLVTKEFVYSYTNCSLFDRNYTLMLKDLFLSRFNSLLILISPPEPRYSDDLISNLCQLYKSG

SEQ ID NO: 18572 - protein, 85 aa, unidentified
  REGION 1..85: note = Description of Unknown:cds_NC_025365.1_cds_YP_009094183.1_5 target sequence
DKVISECGNSGYDVIKILEPYVVNHLVQKAETFRPLIHSLGDFPAFIKDKTTQLRGTFGPCASQFFSALDQFDNIHDLVFVYGCY

SEQ ID NO: 18573 - protein, 85 aa, unidentified
  REGION 1..85: note = Description of Unknown:cds_NC_025365.1_cds_YP_009094183.1_5 target sequence
RHWGHPYIDYRKGLTKLFDQVHMKKTIDKHYQECLASDLAKKILRWGFDKYSRWYLDTSLLPKNHPLIPYITTQTWPPRHVVDLL

SEQ ID NO: 18574 - protein, 85 aa, unidentified
  REGION 1..85: note = Description of Unknown:cds_NC_025365.1_cds_YP_009094183.1_5 target sequence
GDSWHSLPMTQIFEIPESMDPSEILDDKSHSFTRTRLASWLSENRGGPVPSEKVIITALSKAPVNPREFLKAVDLNGLAEDDLII

SEQ ID NO: 18575 - protein, 85 aa, unidentified
  REGION 1..85: note = Description of Unknown:cds_NC_025365.1_cds_YP_009094183.1_5 target sequence
GLKPKERELKIEGRFFALMSWNLRLYFVITEKLLANHILPLFDALTMTDNLNKVFKKLIDRVTGQGLCDYSRVTYAFHLDYEKWN

SEQ ID NO: 18576 - protein, 85 aa, unidentified
  REGION 1..85: note = Description of Unknown:cds_NC_025365.1_cds_YP_009094183.1_5 target sequence
NHQRLESTKDVFSVLDKAFGLSRVFSRTHEFFQKSWVYYSDRSDLIGIWNDQIYCLDMADGPTCWNGQDGGLEGLRQKGWSLVSL

SEQ ID NO: 18577 - protein, 85 aa, unidentified
  REGION 1..85: note = Description of Unknown:cds_NC_025365.1_cds_YP_009094183.1_5 target sequence
LMIDRESQTRNTRTKILAQGDNQVLCPTYMLSSGLNNEGLMYELESISKNAMSIYRAIEEGASKLGLIIKKEETMCSYDFLIYGK

SEQ ID NO: 18578 - protein, 85 aa, unidentified; identical to SEQ ID NO: 18478
  REGION 1..85: note = Description of Unknown:cds_NC_025365.1_cds_YP_009094183.1_5 target sequence

SEQ ID NO: 18579 - protein, 85 aa, unidentified
  REGION 1..85: note = Description of Unknown:cds_NC_025365.1_cds_YP_009094183.1_5 target sequence
SKGDDFLLTMSRIIYLDPSLGGVSGMSLGRFHIRQFSDPVSEGLTFWKEIWLSSSESWIHHLCQEAGNPDLGDRSLESFTRLLED

SEQ ID NO: 18580 - protein, 85 aa, unidentified; identical to SEQ ID NO: 18480
  REGION 1..85: note = Description of Unknown:cds_NC_025365.1_cds_YP_009094183.1_5 target sequence

SEQ ID NO: 18581 - protein, 85 aa, unidentified
  REGION 1..85: note = Description of Unknown:cds_NC_025365.1_cds_YP_009094183.1_5 target sequence
NSRTVRRQFRKSLSRALEESFFHSEIHGISRMTQSPQRLGRVWSCSAERADQLREISWGRKVVGTTVPHPSEMLMLVPKSSVSCG

SEQ ID NO: 18582 - protein, 85 aa, unidentified
  REGION 1..85: note = Description of Unknown:cds_NC_025365.1_cds_YP_009094183.1_5 target sequence
CSIRELYNPRISVSVLPSFDNSFFSRGSLRGYLGSSTSVSTQLFHAWEKVTNVHVVKRALSLKESINWFISRDSNLAQTLIRNIL

SEQ ID NO: 18583 - protein, 85 aa, unidentified
  REGION 1..85: note = Description of Unknown:cds_NC_025365.1_cds_YP_009094183.1_5 target sequence
SLTGPEFPIEEAPVFKRTGSALHRFKSARYSEGGYSAVCPNLLSHISVSTDTMSDLTQDGTNFDFMFQPLMLYAQTWTSELVQKD

SEQ ID NO: 18584 - protein, 85 aa, unidentified
  REGION 1..85: note = Description of Unknown:cds_NC_025365.1_cds_YP_009094183.1_5 target sequence
LRLRDSTFHWHLRCQKCIRPIEEVSLEAPQSFAFPDISTRISRMVSGAVPQFRKLPTIELKAGDLSSLTNNERSYHVGTAQGLLY

SEQ ID NO: 18585 - protein, 85 aa, unidentified
  REGION 1..85: note = Description of Unknown:cds_NC_025365.1_cds_YP_009094183.1_5 target sequence
SILVAIHDPGYNDNSLFPVNIYGKVSARSYLRGLARGVFIGSSICFLTRMTNININRPLELISGVISYILLRLDNHPSLYVMLKE

SEQ ID NO: 18586 - protein, 85 aa, unidentified
  REGION 1..85: note = Description of Unknown:cds_NC_025365.1_cds_YP_009094183.1_5 target sequence
PELRSEIFSIPQKIPAAYPTTMKEGNRSVLCYLQQVLRYERDSMSSSPGNDLLWIFSDFRSIKMTYLTLITFQAHLWLQRIERNL

SEQ ID NO: 18587 - protein, 85 aa, unidentified
  REGION 1..85: note = Description of Unknown:cds_NC_025365.1_cds_YP_009094183.1_5 target sequence
SKQMRAKLRQLNSLMRQVLGGHGEENIESDDEINSLLKEALRRTRWVDQEVRHAAKTMRPDLSPVPKNSRKIGSSEWICSAQQIA

SEQ ID NO: 18588 - protein, 85 aa, unidentified
  REGION 1..85: note = Description of Unknown:cds_NC_025365.1_cds_YP_009094183.1_5 target sequence
FSTSLNPAPMSDIDLRLLSRQFQNPLMSGLRVVQWATGAHYKLKPILDDLEVGPSLSLVVGDGSGGISRTVLNMFPDSKLVFNSL

SEQ ID NO: 18589 - protein, 85 aa, unidentified
  REGION 1..85: note = Description of Unknown:cds_NC_025365.1_cds_YP_009094183.1_5 target sequence
LEVNDLMASGTHPLPPSALMRGGEDITSRVIDFESIWEKPSDLRNSVTWKYFQSVQTRVKAHFDLIVCDAEVTDIESVNKITLLL

SEQ ID NO: 18590 - protein, 85 aa, unidentified
  REGION 1..85: note = Description of Unknown:cds_NC_025365.1_cds_YP_009094183.1_5 target sequence
SDFAMSIRGPLCLIFKTYGTMLINPDYKAIHHLSRAFPNMIGFVTQMTSSFSSEVYLRFSKKGHFFREHESLTASTIREMSLVLF

SEQ ID NO: 18591 - protein, 85 aa, unidentified
  REGION 1..85: note = Description of Unknown:cds_NC_025365.1_cds_YP_009094183.1_5 target sequence
NCSNPKSEMLRARSLNYQDLIRGFPEEIISNPYNEMIITLIDSEVESFLVHKLVDDLELKRGSSSKMAIIVAIIILFSNRVFNVS

SEQ ID NO: 18592 - protein, 85 aa, unidentified
  REGION 1..85: note = Description of Unknown:cds_NC_025365.1_cds_YP_009094183.1_5 target sequence
KSIKDTKFFPPSDPKILRHFNICLSTMLFLSTTMGDLSNFTKIHELYNSPVIYYFRKQTIKGKKFLSWSWADPSSIFKKVSCNSS

SEQ ID NO: 18593 - protein, 85 aa, unidentified
  REGION 1..85: note = Description of Unknown:cds_NC_031955.1_cds_YP_009325416.1_5 target sequence
DWSEVTDDPEDLIEYEPDSVSGDPPPNILRTSDYNLNSPLLEDSCQLMIEWLKTGNRPSRLKSSDGLIRSHKALKECLKRADLET

SEQ ID NO: 18594 - protein, 85 aa, unidentified
  REGION 1..85: note = Description of Unknown:cds_NC_031955.1_cds_YP_009325416.1_5 target sequence
VKYGGSGAKMVFKKWVTNSYVESTRNRKMFADLQEFYQKVEPIEAITSKFLEKRGLKYPAKGILERFRTTQTDSLVGRYLINIYS

SEQ ID NO: 18595 - protein, 85 aa, unidentified
  REGION 1..85: note = Description of Unknown:cds_NC_031955.1_cds_YP_009325416.1_5 target sequence
SYLLFHILILYMNALDWDEEKTIIALWRSLLDYNSKTDSVSVKDILWGQMIVTKDYLFIIDVNSLFDRNFVLMLKDTFLSRFNSL

SEQ ID NO: 18596 - protein, 85 aa, unidentified
  REGION 1..85: note = Description of Unknown:cds_NC_031955.1_cds_YP_009325416.1_5 target sequence
MILLSPPDTLYSSDFPENICSLYMAGDSVLADCGNAGYDVIKMLEPFIVNKLVQEAENYRPLIPKLGDFPEFIKDKTRQLVGTFG

SEQ ID NO: 18597 - protein, 85 aa, unidentified
  REGION 1..85: note = Description of Unknown:cds_NC_031955.1_cds_YP_009325416.1_5 target sequence
PVADSFFSQLDRFNNIHDLVFVYGCYRHWGHPHIDYRKGLSKLYDQVHMKKSIDTSYQESLASDLARRVLRWGFDKYSRWYVDSR

SEQ ID NO: 18598 - protein, 85 aa, unidentified
  REGION 1..85: note = Description of Unknown:cds_NC_031955.1_cds_YP_009325416.1_5 target sequence
GLPSHHPLKPYISTQTWPPKHIVDMMGDTWHELPITQLFEIPESMDPSEILDDKSHSLTRNRLISWLSEGKGGPVPSEKVIITAL

SEQ ID NO: 18599 - protein, 85 aa, unidentified
  REGION 1..85: note = Description of Unknown:cds_NC_031955.1_cds_YP_009325416.1_5 target sequence
SQNPINPREFLKRIDDHGLDQDDLIIGLKPKERELKIEGRFFALMSWNLRLYFVITEKLLASHIIPLFDSLTMTDNLNKVFKKLI

SEQ ID NO: 18600 - protein, 85 aa, unidentified
  REGION 1..85: note = Description of Unknown:cds_NC_031955.1_cds_YP_009325416.1_5 target sequence
DRVTGQGLSDYSRVTYAFHLDYEKWNNHQRMESTRNVFEVLDKVFGLKKVFSRTHEFFQKSWIYYSERSDLIGVWGDKICCLDMS

SEQ ID NO: 18601 - protein, 85 aa, unidentified
  REGION 1..85: note = Description of Unknown:cds_NC_031955.1_cds_YP_009325416.1_5 target sequence
EGPTCWDGQDGGLEGLRQKGWSLVSLLMIDRESQIRNTKTKILAQGDNQVLCPTYVVSPGLNEDGLRYELENISRNAISIYRAIE

SEQ ID NO: 18602 - protein, 85 aa, unidentified
  REGION 1..85: note = Description of Unknown:cds_NC_031955.1_cds_YP_009325416.1_5 target sequence
EGAGKLGLIIKKEETMCSFDFLIYGKTPLFRGNILVPESKRWARVSCISNDQIISLANIMSTVSTNALTVAQHSQSLVKPIRDFL

SEQ ID NO: 18603 - protein, 85 aa, unidentified
  REGION 1..85: note = Description of Unknown:cds_NC_031955.1_cds_YP_009325416.1_5 target sequence
LMSVQAIYHYLLFSPILKSRVHGILSLSGERLLLAMARIIYLDPSLGGISGMSLGRFHIRQFSDPVTEGLSFWKEIWESSSENWI

SEQ ID NO: 18604 - protein, 85 aa, unidentified
  REGION 1..85: note = Description of Unknown:cds_NC_031955.1_cds_YP_009325416.1_5 target sequence
LALCQEAGNPDIGERTLESFTRLLEDPTTLNIRGGASPTILLKEAIRQALYDEVDKVSNSEFREAIILSKTHRDNFILFLRSIEP

SEQ ID NO: 18605 - protein, 85 aa, unidentified
  REGION 1..85: note = Description of Unknown:cds_NC_031955.1_cds_YP_009325416.1_5 target sequence
LFPRFLSELFSSSFLGIPESIIGLIQNSRTIRRQFRKSLSRTLEESFYRSELNGLERMTQTGQRVGRVWDCSSDKADRLREISWG

SEQ ID NO: 18606 - protein, 85 aa, unidentified
  REGION 1..85: note = Description of Unknown:cds_NC_031955.1_cds_YP_009325416.1_5 target sequence
RKVVGTTVPHPSEMLSLTPKSSVSCGCKISDIIKPRVSVSVLPSFDCRFDSRGPLKGYLGSSTSVSTQLFHAWEKVTNVHVVRRA

SEQ ID NO: 18607 - protein, 85 aa, unidentified
  REGION 1..85: note = Description of Unknown:cds_NC_031955.1_cds_YP_009325416.1_5 target sequence
LSLKESINWFINRDSNLAKTLIRNIKSLTGPEFEIEEIPVFKRTGSALHRFKSARYSEGGYSSVCPNLLSHISVSTDTMSELTHG

SEQ ID NO: 18608 - protein, 85 aa, unidentified
  REGION 1..85: note = Description of Unknown:cds_NC_031955.1_cds_YP_009325416.1_5 target sequence
GLNFDFMFQPLMLYSQTWTAEIVQRDLKLRDSTYHWHLRCHNCIRIIDDVTLECPQVFDFPDISTRISRMVSGAVPEFKKLPEIH

SEQ ID NO: 18609 - protein, 85 aa, unidentified
  REGION 1..85: note = Description of Unknown:cds_NC_031955.1_cds_YP_009325416.1_5 target sequence
LQPGDLNTMTDKSKSFHIGTAQGLLYSILVAIHDPGYNDHTLFPVNIYPKLSAKEYLLGLSRGILIGSSICFLTRMTNINVNRPL

SEQ ID NO: 18610 - protein, 85 aa, unidentified
  REGION 1..85: note = Description of Unknown:cds_NC_031955.1_cds_YP_009325416.1_5 target sequence
ELMSGVISYILLKLDSHPSLYMMLKESDIRSEIFSIPQKIPAAYPTTMKEGNRAILSYLQHTLRYEKENLIEGSGKNWLWVFSDF

SEQ ID NO: 18611 - protein, 85 aa, unidentified
  REGION 1..85: note = Description of Unknown:cds_NC_031955.1_cds_YP_009325416.1_5 target sequence
RSSKMTYLTLITFQAHILLLRVSKNLSKQMKADLRQLNTLMRQVLGGQGESQSKEIDVDQRILSEAITRVKWVDQEVRHAARTLS

SEQ ID NO: 18612 - protein, 85 aa, unidentified
  REGION 1..85: note = Description of Unknown:cds_NC_031955.1_cds_YP_009325416.1_5 target sequence
PCKNSLPTLFRRPGQSEWICSSQFITISTSANPSEPSPIDVKSVSKRLQNPLISGLRVVQWATGAHYKIKPILNTLRFDPKLCLV

SEQ ID NO: 18613 - protein, 85 aa, unidentified
  REGION 1..85: note = Description of Unknown:cds_NC_031955.1_cds_YP_009325416.1_5 target sequence
IGDGSGGISRCILQFFPGTRLVFNSLLQVNDLMASGTHPLPPSALSHGGPDMTSRVIDFDSIWEKPSDLRNISTWRYFKDVQKDL

SEQ ID NO: 18614 - protein, 85 aa, unidentified
  REGION 1..85: note = Description of Unknown:cds_NC_031955.1_cds_YP_009325416.1_5 target sequence
GLNFDLIVCDAEVTDLVSVNKISLLLSDFILSIKSPLTLIFKTYGTMLVNPEYKALNHLSRSFPSISGVITQTTSSFSSEMYMIG

SEQ ID NO: 18615 - protein, 85 aa, unidentified
  REGION 1..85: note = Description of Unknown:cds_NC_031955.1_cds_YP_009325416.1_5 target sequence
TKSGAYFKEVEYITASTIRELSLVLFNCRSPKSEMIRARSLNYKDLTMGFPQEIISNPFNEMIITLIDSEVESFLVHKMIDDLEL

SEQ ID NO: 18616 - protein, 85 aa, unidentified
  REGION 1..85: note = Description of Unknown:cds_NC_031955.1_cds_YP_009325416.1_5 target sequence
TKGSLQKLAKIIAIVIVYSNRVFNISKPLSSHKFYPPSDPKLLRHFNICAGTFLYISSLLGDTANFTRLHLLYNEKITYYFRKQT

SEQ ID NO: 18617 - protein, 85 aa, unidentified
  REGION 1..85: note = Description of Unknown:cds_NC_031955.1_cds_YP_009325416.1_5 target sequence
YRGRTYLSWNWTSESSVYKRVSCNSMFSLSSHWIRMIYKVVRLNRLNEPKTRLMDEVLVPLRSYNRWIKLKDLKYRTSLLEFWSC

SEQ ID NO: 18618 - protein, 84 aa, unidentified
  REGION 1..84: note = Description of Unknown:cds_NC_031955.1_cds_YP_009325416.1_5 target sequence
RGRTYLSWNWTSESSVYKRVSCNSMFSLSSHWIRMIYKVVRLNRLNEPKTRLMDEVLVPLRSYNRWIKLKDLKYRTSLLEFWSC

SEQ ID NO: 18619 - protein, 85 aa, unidentified
  REGION 1..85: note = Description of Unknown:cds_NC_031955.1_cds_YP_009325416.1_5 target sequence
ILRTSDYNLNSPLLEDSCQLMIEWLKTGNRPSRLKSSDGLIRSHKALKECLKRADLETVKYGGSGAKMVFKKWVTNSYVESTRNR

SEQ ID NO: 18620 - protein, 85 aa, unidentified
  REGION 1..85: note = Description of Unknown:cds_NC_031955.1_cds_YP_009325416.1_5 target sequence
KMFADLQEFYQKVEPIEAITSKFLEKRGLKYPAKGILERFRTTQTDSLVGRYLINIYSSYLLFHILILYMNALDWDEEKTIIALW

SEQ ID NO: 18621 - protein, 85 aa, unidentified
  REGION 1..85: note = Description of Unknown:cds_NC_031955.1_cds_YP_009325416.1_5 target sequence
RSLLDYNSKTDSVSVKDILWGQMIVTKDYLFIIDVNSLFDRNFVLMLKDTFLSRFNSLMILLSPPDTLYSSDFPENICSLYMAGD

SEQ ID NO: 18622 - protein, 85 aa, unidentified
  REGION 1..85: note = Description of Unknown:cds_NC_031955.1_cds_YP_009325416.1_5 target sequence
SVLADCGNAGYDVIKMLEPFIVNKLVQEAENYRPLIPKLGDFPEFIKDKTRQLVGTFGPVADSFFSQLDRFNNIHDLVFVYGCYR

SEQ ID NO: 18623 - protein, 85 aa, unidentified
  REGION 1..85: note = Description of Unknown:cds_NC_031955.1_cds_YP_009325416.1_5 target sequence
HWGHPHIDYRKGLSKLYDQVHMKKSIDTSYQESLASDLARRVLRWGFDKYSRWYVDSRGLPSHHPLKPYISTQTWPPKHIVDMMG

SEQ ID NO: 18624 - protein, 85 aa, unidentified
  REGION 1..85: note = Description of Unknown:cds_NC_031955.1_cds_YP_009325416.1_5 target sequence
DTWHELPITQLFEIPESMDPSEILDDKSHSLTRNRLISWLSEGKGGPVPSEKVIITALSQNPINPREFLKRIDDHGLDQDDLIIG

SEQ ID NO: 18625 - protein, 85 aa, unidentified
  REGION 1..85: note = Description of Unknown:cds_NC_031955.1_cds_YP_009325416.1_5 target sequence
LKPKERELKIEGRFFALMSWNLRLYFVITEKLLASHIIPLFDSLTMTDNLNKVFKKLIDRVTGQGLSDYSRVTYAFHLDYEKWNN

SEQ ID NO: 18626 - protein, 85 aa, unidentified
  REGION 1..85: note = Description of Unknown:cds_NC_031955.1_cds_YP_009325416.1_5 target sequence
HQRMESTRNVFEVLDKVFGLKKVFSRTHEFFQKSWIYYSERSDLIGVWGDKICCLDMSEGPTCWDGQDGGLEGLRQKGWSLVSLL

SEQ ID NO: 18627 - protein, 85 aa, unidentified
  REGION 1..85: note = Description of Unknown:cds_NC_031955.1_cds_YP_009325416.1_5 target sequence
MIDRESQIRNTKTKILAQGDNQVLCPTYVVSPGLNEDGLRYELENISRNAISIYRAIEEGAGKLGLIIKKEETMCSFDFLIYGKT

SEQ ID NO: 18628 - protein, 85 aa, unidentified
  REGION 1..85: note = Description of Unknown:cds_NC_031955.1_cds_YP_009325416.1_5 target sequence
PLFRGNILVPESKRWARVSCISNDQIISLANIMSTVSTNALTVAQHSQSLVKPIRDFLLMSVQAIYHYLLFSPILKSRVHGILSL

SEQ ID NO: 18629 - protein, 85 aa, unidentified
  REGION 1..85: note = Description of Unknown:cds_NC_031955.1_cds_YP_009325416.1_5 target sequence
SGERLLLAMARIIYLDPSLGGISGMSLGRFHIRQFSDPVTEGLSFWKEIWESSSENWILALCQEAGNPDIGERTLESFTRLLEDP

SEQ ID NO: 18630 - protein, 85 aa, unidentified
  REGION 1..85: note = Description of Unknown:cds_NC_031955.1_cds_YP_009325416.1_5 target sequence
TTLNIRGGASPTILLKEAIRQALYDEVDKVSNSEFREAIILSKTHRDNFILFLRSIEPLFPRFLSELFSSSFLGIPESIIGLIQN

SEQ ID NO: 18631 - protein, 85 aa, unidentified
  REGION 1..85: note = Description of Unknown:cds_NC_031955.1_cds_YP_009325416.1_5 target sequence
SRTIRRQFRKSLSRTLEESFYRSELNGLERMTQTGQRVGRVWDCSSDKADRLREISWGRKVVGTTVPHPSEMLSLTPKSSVSCGC

SEQ ID NO: 18632 - protein, 85 aa, unidentified
  REGION 1..85: note = Description of Unknown:cds_NC_031955.1_cds_YP_009325416.1_5 target sequence
KISDIIKPRVSVSVLPSFDCRFDSRGPLKGYLGSSTSVSTQLFHAWEKVTNVHVVRRALSLKESINWFINRDSNLAKTLIRNIKS

SEQ ID NO: 18633 - protein, 85 aa, unidentified
  REGION 1..85: note = Description of Unknown:cds_NC_031955.1_cds_YP_009325416.1_5 target sequence
LTGPEFEIEEIPVFKRTGSALHRFKSARYSEGGYSSVCPNLLSHISVSTDTMSELTHGGLNFDFMFQPLMLYSQTWTAEIVQRDL

SEQ ID NO: 18634 - protein, 85 aa, unidentified
  REGION 1..85: note = Description of Unknown:cds_NC_031955.1_cds_YP_009325416.1_5 target sequence
KLRDSTYHWHLRCHNCIRIIDDVTLECPQVFDFPDISTRISRMVSGAVPEFKKLPEIHLQPGDLNTMTDKSKSFHIGTAQGLLYS

SEQ ID NO: 18635 - protein, 85 aa, unidentified
  REGION 1..85: note = Description of Unknown:cds_NC_031955.1_cds_YP_009325416.1_5 target sequence
ILVAIHDPGYNDHTLFPVNIYPKLSAKEYLLGLSRGILIGSSICFLTRMTNINVNRPLELMSGVISYILLKLDSHPSLYMMLKES

SEQ ID NO: 18636 - protein, 85 aa, unidentified
  REGION 1..85: note = Description of Unknown:cds_NC_031955.1_cds_YP_009325416.1_5 target sequence
DIRSEIFSIPQKIPAAYPTTMKEGNRAILSYLQHTLRYEKENLIEGSGKNWLWVFSDFRSSKMTYLTLITFQAHILLLRVSKNLS

SEQ ID NO: 18637 - protein, 85 aa, unidentified
  REGION 1..85: note = Description of Unknown:cds_NC_031955.1_cds_YP_009325416.1_5 target sequence
KQMKADLRQLNTLMRQVLGGQGESQSKEIDVDQRILSEAITRVKWVDQEVRHAARTLSPCKNSLPTLFRRPGQSEWICSSQFITI

SEQ ID NO: 18638 - protein, 85 aa, unidentified
  REGION 1..85: note = Description of Unknown:cds_NC_031955.1_cds_YP_009325416.1_5 target sequence
STSANPSEPSPIDVKSVSKRLQNPLISGLRVVQWATGAHYKIKPILNTLRFDPKLCLVIGDGSGGISRCILQFFPGTRLVFNSLL

SEQ ID NO: 18639 - protein, 85 aa, unidentified
  REGION 1..85: note = Description of Unknown:cds_NC_031955.1_cds_YP_009325416.1_5 target sequence
QVNDLMASGTHPLPPSALSHGGPDMTSRVIDFDSIWEKPSDLRNISTWRYFKDVQKDLGLNFDLIVCDAEVTDLVSVNKISLLLS

SEQ ID NO: 18640 - protein, 85 aa, unidentified
  REGION 1..85: note = Description of Unknown:cds_NC_031955.1_cds_YP_009325416.1_5 target sequence
DFILSIKSPLTLIFKTYGTMLVNPEYKALNHLSRSFPSISGVITQTTSSFSSEMYMIGTKSGAYFKEVEYITASTIRELSLVLFN

SEQ ID NO: 18641 - protein, 85 aa, unidentified
  REGION 1..85: note = Description of Unknown:cds_NC_031955.1_cds_YP_009325416.1_5 target sequence
CRSPKSEMIRARSLNYKDLTMGFPQEIISNPFNEMIITLIDSEVESFLVHKMIDDLELTKGSLQKLAKIIAIVIVYSNRVFNISK

SEQ ID NO: 18642 - protein, 85 aa, unidentified
  REGION 1..85: note = Description of Unknown:cds_NC_031955.1_cds_YP_009325416.1_5 target sequence
PLSSHKFYPPSDPKLLRHFNICAGTFLYISSLLGDTANFTRLHLLYNEKITYYFRKQTYRGRTYLSWNWTSESSVYKRVSCNSMF

SEQ ID NO: 18643 - protein, 85 aa, unidentified
  REGION 1..85: note = Description of Unknown:cds_NC_014397.1_cds_YP_003848704.1_1 target sequence
DSILSKQLVDKTGFVRVPIKHFDCTMLTLALPTFDVSKMVDRITIDFNLDDIQGASEIGSTLLPSMSIDVEDMANFVHDFTFGHL

SEQ ID NO: 18644 - protein, 85 aa, unidentified
  REGION 1..85: note = Description of Unknown:cds_NC_014397.1_cds_YP_003848704.1_1 target sequence
ADKTDRLLMREFPMMNDGFDHLSPDMIIKTTSGMYNIVEFTTFRGDERGAFQAAMTKLAKYEVPCENRSQGRTVVLYVVSAYRHG

SEQ ID NO: 18645 - protein, 85 aa, unidentified
  REGION 1..85: note = Description of Unknown:cds_NC_014397.1_cds_YP_003848704.1_1 target sequence
VWSNLELEDSEAEEMVYRYRLALSVMDELRTLFPELSSTDEELGKTERELLAMVSSIQINWSVTESVFPPFSREMFDRFRSSPPD

SEQ ID NO: 18646 - protein, 85 aa, unidentified
  REGION 1..85: note = Description of Unknown:cds_NC_014397.1_cds_YP_003848704.1_1 target sequence
SEYITRIVSRCLINSQEKLINSSFFAEGNDKALRFSKNAEECSLAVERALNQYRAEDNLRDLNDHKSTIQLPPWLSYHDVDGKDL

SEQ ID NO: 18647 - protein, 85 aa, unidentified
  REGION 1..85: note = Description of Unknown:cds_NC_014397.1_cds_YP_003848704.1_1 target sequence
CPLQGLDVRGDHPMCNLWREVVTSANLEEIERMHDDAAAELEFALSGVKDRPDERNRYHRVHLNMGSDDSVYIAALGVNGKKHKA

SEQ ID NO: 18648 - protein, 85 aa, unidentified
  REGION 1..85: note = Description of Unknown:cds_NC_014397.1_cds_YP_003848704.1_1 target sequence
DTLVQQMRDRSKQPFSPDHDVDHISEFLSACSSDLWATDEDLYSPLSCDKELRLAAQRIHQPSLSERGFNEIITEHYKFMGSRIG

SEQ ID NO: 18649 - protein, 85 aa, unidentified
  REGION 1..85: note = Description of Unknown:cds_NC_014397.1_cds_YP_003848704.1_1 target sequence
SWCQMVSLIGAELSASVKQHVKPNYFVIKRLLGSGIFLLIKPTSSKSHIFVSFAIKRSCWAFDLSTSRVFKPYIDAGDLLVTDFV

SEQ ID NO: 18650 - protein, 85 aa, unidentified
  REGION 1..85: note = Description of Unknown:cds_NC_014397.1_cds_YP_003848704.1_1 target sequence
SYKLSKLTNLCKCVSLMESSFSFWAEAFGIPSWNFVGDLFRSSDSAAMDASYMGKLSLLTLLEDKAATEELQTIARYIIMEGFVS

SEQ ID NO: 18651 - protein, 85 aa, unidentified
  REGION 1..85: note = Description of Unknown:cds_NC_014397.1_cds_YP_003848704.1_1 target sequence
PPEIPKPHKMTSKFPKVLRSELQVYLLNCLCRTIQRIAGEPFILKKKDGSISWGGMFNPFSGRPLLDMQPLISCCYNGYFKNKEE

SEQ ID NO: 18652 - protein, 85 aa, unidentified
  REGION 1..85: note = Description of Unknown:cds_NC_014397.1_cds_YP_003848704.1_1 target sequence
ETEPSSLSGMYKKIIELEHLRPQSDAFLGYKDPELPRMHEFSVSYLKEACNHAKLVLRSLYGQNFMEQIDNQIIRELSGLTLERL

SEQ ID NO: 18653 - protein, 85 aa, unidentified
  REGION 1..85: note = Description of Unknown:cds_NC_014397.1_cds_YP_003848704.1_1 target sequence
ATLKATSNFNENWYVYKDVADKNYTRDKLLVKMSKYASEGKSLAIQKFEDCMRQIESQGCMHICLFKKQQHGGLREIYVMGAEER

SEQ ID NO: 18654 - protein, 85 aa, unidentified
  REGION 1..85: note = Description of Unknown:cds_NC_014397.1_cds_YP_003848704.1_1 target sequence
IVQSVVETIARSIGKFFASDTLCNPPNKVKIPETHGIRARKQCKGPVWTCATSDDARKWNQGHFVTKFALMLCEFTSPKWWPLII

SEQ ID NO: 18655 - protein, 85 aa, unidentified
  REGION 1..85: note = Description of Unknown:cds_NC_014397.1_cds_YP_003848704.1_1 target sequence
RGCSMFTRKRMMMNLNYLKILDGHRELDIRDDFVMDLFKAYHGEAEVPWAFKGKTYLETTTGMMQGILHYTSSLLHTIHQEYIRS

SEQ ID NO: 18656 - protein, 85 aa, unidentified
  REGION 1..85: note = Description of Unknown:cds_NC_014397.1_cds_YP_003848704.1_1 target sequence
LSFKIFNLKVAPEMSKSLVCDMMQGSDDSSMLISFPADDEKVLTRCKVAAAICFRMKKELGVYLAIYPSEKSTANTDFVMEYNSE

SEQ ID NO: 18657 - protein, 85 aa, unidentified
  REGION 1..85: note = Description of Unknown:cds_NC_014397.1_cds_YP_003848704.1_1 target sequence
FYFHTQHVRPTIRWIAACCSLPEVETLVARQEEASNLMTSVTEGGGSFSLAAMIQQAQCTLHYMLMGMGVSELFLEYKKAVLKWN

SEQ ID NO: 18658 - protein, 85 aa, unidentified
  REGION 1..85: note = Description of Unknown:cds_NC_014397.1_cds_YP_003848704.1_1 target sequence
DPGLGFFLLDNPYACGLGGFRFNLFKAITRTDLQKLYAFFMKKVKGSAARDWADEDVTIPETCSVSPGGALILSSSLKWGSRKKF

SEQ ID NO: 18659 - protein, 85 aa, unidentified
  REGION 1..85: note = Description of Unknown:cds_NC_014397.1_cds_YP_003848704.1_1 target sequence
QKLRDRLNIPENWIELINENPEVLYRAPRTGPEILLRIAEKVHSPGVVSSLSSGNAVCKVMASAVYFLSATIFEDTGRPEFNFLE

SEQ ID NO: 18660 - protein, 85 aa, unidentified
  REGION 1..85: note = Description of Unknown:cds_NC_014397.1_cds_YP_003848704.1_1 target sequence
DSKYSLLQKMAAYSGFHGFNDMEPEDILFLFPNIEELESLDSIVYNKGEIDIIPRVNIRDATQTRVTIFNEQKTLRTSPEKLVSD

SEQ ID NO: 18661 - protein, 85 aa, unidentified
  REGION 1..85: note = Description of Unknown:cds_NC_014397.1_cds_YP_003848704.1_1 target sequence
KWFGTQKSRIGKTTFLAEWEKLKKIVKWLEDTPEATLAHTPLNNHIQVRNFFARMESKPRTVRITGAPVKKRSGVSKIAMVIRDN

SEQ ID NO: 18662 - protein, 85 aa, unidentified
  REGION 1..85: note = Description of Unknown:cds_NC_014397.1_cds_YP_003848704.1_1 target sequence
FSRMGHLRGVEDLAGFTRSVSAEILKHFLFCILQGPYSESYKLQLIYRVLSSVSNVEIKESDGKTKTNLIGILQRFLDGDHVVPI

SEQ ID NO: 18663 - protein, 85 aa, unidentified
  REGION 1..85: note = Description of Unknown:cds_NC_014397.1_cds_YP_003848704.1_1 target sequence
IEEMGAGTVGGFIKRQQSKVVQNKVVYYGVGIWRGFMDGYQVHLEIENDIGQPPRLRNVTTNCQSSPWDLSIPIRQWAEDMGVTN

SEQ ID NO: 18664 - protein, 85 aa, unidentified
  REGION 1..85: note = Description of Unknown:cds_NC_014397.1_cds_YP_003848704.1_1 target sequence
NQDYSSKSSRGARYWMHSFRMQGPSKPFGCPVYIIKGDMSDVIRLRKEEVEMKVRGSTLNLYTKHHSHQDLHILSYTASDNDLSP

SEQ ID NO: 18665 - protein, 85 aa, unidentified
  REGION 1..85: note = Description of Unknown:cds_NC_014397.1_cds_YP_003848704.1_1 target sequence
GIFKSISDEGVAQALQLFEREPSNCWVRCESVAPKFISAILEICEGKRQIKGINRTRLSEIVRICSESSLRSKVGSMFSFVANVE

SEQ ID NO: 18666 - protein, 85 aa, unidentified
  REGION 1..85: note = Description of Unknown:cds_NC_014397.1_cds_YP_003848704.1_1 target sequence
EAHDVDYDALMDLMIEDAKNNAFSHVVDCIELDVSGPYEMESFDTSDVNLFGPAHYKDISSLSMIAHPLMDKFVDYAISKMGRAS

SEQ ID NO: 18667 - protein, 84 aa, unidentified
  REGION 1..84: note = Description of Unknown:cds_NC_014397.1_cds_YP_003848704.1_1 target sequence
PAHYKDISSLSMIAHPLMDKFVDYAISKMGRASVRKVLETGRCSSKDYDLSKVLFRTLQRPEESIRIDDLELYEETDVADDMLG

SEQ ID NO: 18668 - protein, 85 aa, unidentified
  REGION 1..85: note = Description of Unknown:cds_NC_014397.1_cds_YP_003848704.1_1 target sequence
TLALPTFDVSKMVDRITIDFNLDDIQGASEIGSTLLPSMSIDVEDMANFVHDFTFGHLADKTDRLLMREFPMMNDGFDHLSPDMI

SEQ ID NO: 18669 - protein, 85 aa, unidentified
  REGION 1..85: note = Description of Unknown:cds_NC_014397.1_cds_YP_003848704.1_1 target sequence
IKTTSGMYNIVEFTTFRGDERGAFQAAMTKLAKYEVPCENRSQGRTVVLYVVSAYRHGVWSNLELEDSEAEEMVYRYRLALSVMD

SEQ ID NO: 18670 - protein, 85 aa, unidentified
  REGION 1..85: note = Description of Unknown:cds_NC_014397.1_cds_YP_003848704.1_1 target sequence
ELRTLFPELSSTDEELGKTERELLAMVSSIQINWSVTESVFPPFSREMFDRFRSSPPDSEYITRIVSRCLINSQEKLINSSFFAE

SEQ ID NO: 18671 - protein, 85 aa, unidentified
  REGION 1..85: note = Description of Unknown:cds_NC_014397.1_cds_YP_003848704.1_1 target sequence
GNDKALRFSKNAEECSLAVERALNQYRAEDNLRDLNDHKSTIQLPPWLSYHDVDGKDLCPLQGLDVRGDHPMCNLWREVVTSANL

SEQ ID NO: 18672 - protein, 85 aa, unidentified
  REGION 1..85: note = Description of Unknown:cds_NC_014397.1_cds_YP_003848704.1_1 target sequence
EEIERMHDDAAAELEFALSGVKDRPDERNRYHRVHLNMGSDDSVYIAALGVNGKKHKADTLVQQMRDRSKQPFSPDHDVDHISEF

SEQ ID NO: 18673 - protein, 85 aa, unidentified
  REGION 1..85: note = Description of Unknown:cds_NC_014397.1_cds_YP_003848704.1_1 target sequence
LSACSSDLWATDEDLYSPLSCDKELRLAAQRIHQPSLSERGFNEIITEHYKFMGSRIGSWCQMVSLIGAELSASVKQHVKPNYFV

SEQ ID NO: 18674 - protein, 85 aa, unidentified
  REGION 1..85: note = Description of Unknown:cds_NC_014397.1_cds_YP_003848704.1_1 target sequence
IKRLLGSGIFLLIKPTSSKSHIFVSFAIKRSCWAFDLSTSRVFKPYIDAGDLLVTDFVSYKLSKLTNLCKCVSLMESSFSFWAEA

SEQ ID NO: 18675 - protein, 85 aa, unidentified
  REGION 1..85: note = Description of Unknown:cds_NC_014397.1_cds_YP_003848704.1_1 target sequence
FGIPSWNFVGDLFRSSDSAAMDASYMGKLSLLTLLEDKAATEELQTIARYIIMEGFVSPPEIPKPHKMTSKFPKVLRSELQVYLL

SEQ ID NO: 18676 - protein, 85 aa, unidentified
  REGION 1..85: note = Description of Unknown:cds_NC_014397.1_cds_YP_003848704.1_1 target sequence
NCLCRTIQRIAGEPFILKKKDGSISWGGMFNPFSGRPLLDMQPLISCCYNGYFKNKEEETEPSSLSGMYKKIIELEHLRPQSDAF

SEQ ID NO: 18677 - protein, 85 aa, unidentified
  REGION 1..85: note = Description of Unknown:cds_NC_014397.1_cds_YP_003848704.1_1 target sequence
LGYKDPELPRMHEFSVSYLKEACNHAKLVLRSLYGQNFMEQIDNQIIRELSGLTLERLATLKATSNFNENWYVYKDVADKNYTRD

SEQ ID NO: 18678 - protein, 85 aa, unidentified
  REGION 1..85: note = Description of Unknown:cds_NC_014397.1_cds_YP_003848704.1_1 target sequence
KLLVKMSKYASEGKSLAIQKFEDCMRQIESQGCMHICLFKKQQHGGLREIYVMGAEERIVQSVVETIARSIGKFFASDTLCNPPN

SEQ ID NO: 18679 - protein, 85 aa, unidentified
  REGION 1..85: note = Description of Unknown:cds_NC_014397.1_cds_YP_003848704.1_1 target sequence
KVKIPETHGIRARKQCKGPVWTCATSDDARKWNQGHFVTKFALMLCEFTSPKWWPLIIRGCSMFTRKRMMMNLNYLKILDGHREL

SEQ ID NO: 18680 - protein, 85 aa, unidentified
  REGION 1..85: note = Description of Unknown:cds_NC_014397.1_cds_YP_003848704.1_1 target sequence
DIRDDFVMDLFKAYHGEAEVPWAFKGKTYLETTTGMMQGILHYTSSLLHTIHQEYIRSLSFKIFNLKVAPEMSKSLVCDMMQGSD

SEQ ID NO: 18681 - protein, 85 aa, unidentified
  REGION 1..85: note = Description of Unknown:cds_NC_014397.1_cds_YP_003848704.1_1 target sequence
DSSMLISFPADDEKVLTRCKVAAAICFRMKKELGVYLAIYPSEKSTANTDFVMEYNSEFYFHTQHVRPTIRWIAACCSLPEVETL

SEQ ID NO: 18682 - protein, 85 aa, unidentified
  REGION 1..85: note = Description of Unknown:cds_NC_014397.1_cds_YP_003848704.1_1 target sequence
VARQEEASNLMTSVTEGGGSFSLAAMIQQAQCTLHYMLMGMGVSELFLEYKKAVLKWNDPGLGFFLLDNPYACGLGGFRFNLFKA

SEQ ID NO: 18683 - protein, 85 aa, unidentified
  REGION 1..85: note = Description of Unknown:cds_NC_014397.1_cds_YP_003848704.1_1 target sequence
ITRTDLQKLYAFFMKKVKGSAARDWADEDVTIPETCSVSPGGALILSSSLKWGSRKKFQKLRDRLNIPENWIELINENPEVLYRA

SEQ ID NO: 18684 - protein, 85 aa, unidentified
  REGION 1..85: note = Description of Unknown:cds_NC_014397.1_cds_YP_003848704.1_1 target sequence
PRTGPEILLRIAEKVHSPGVVSSLSSGNAVCKVMASAVYFLSATIFEDTGRPEFNFLEDSKYSLLQKMAAYSGFHGFNDMEPEDI

SEQ ID NO: 18685 - protein, 85 aa, unidentified
  REGION 1..85: note = Description of Unknown:cds_NC_014397.1_cds_YP_003848704.1_1 target sequence
LFLFPNIEELESLDSIVYNKGEIDIIPRVNIRDATQTRVTIFNEQKTLRTSPEKLVSDKWFGTQKSRIGKTTFLAEWEKLKKIVK

SEQ ID NO: 18686 - protein, 85 aa, unidentified
  REGION 1..85: note = Description of Unknown:cds_NC_014397.1_cds_YP_003848704.1_1 target sequence
WLEDTPEATLAHTPLNNHIQVRNFFARMESKPRTVRITGAPVKKRSGVSKIAMVIRDNFSRMGHLRGVEDLAGFTRSVSAEILKH

SEQ ID NO: 18687 - protein, 85 aa, unidentified
  REGION 1..85: note = Description of Unknown:cds_NC_014397.1_cds_YP_003848704.1_1 target sequence
FLFCILQGPYSESYKLQLIYRVLSSVSNVEIKESDGKTKTNLIGILQRFLDGDHVVPIIEEMGAGTVGGFIKRQQSKVVQNKVVY

SEQ ID NO: 18688 - protein, 85 aa, unidentified
  REGION 1..85: note = Description of Unknown:cds_NC_014397.1_cds_YP_003848704.1_1 target sequence
YGVGIWRGFMDGYQVHLEIENDIGQPPRLRNVTTNCQSSPWDLSIPIRQWAEDMGVTNNQDYSSKSSRGARYWMHSFRMQGPSKP

SEQ ID NO: 18689 - protein, 85 aa, unidentified
  REGION 1..85: note = Description of Unknown:cds_NC_014397.1_cds_YP_003848704.1_1 target sequence
FGCPVYIIKGDMSDVIRLRKEEVEMKVRGSTLNLYTKHHSHQDLHILSYTASDNDLSPGIFKSISDEGVAQALQLFEREPSNCWV

SEQ ID NO: 18690 - protein, 85 aa, unidentified
  REGION 1..85: note = Description of Unknown:cds_NC_014397.1_cds_YP_003848704.1_1 target sequence
RCESVAPKFISAILEICEGKRQIKGINRTRLSEIVRICSESSLRSKVGSMFSFVANVEEAHDVDYDALMDLMIEDAKNNAFSHVV

SEQ ID NO: 18691 - protein, 85 aa, unidentified
  REGION 1..85: note = Description of Unknown:cds_NC_014397.1_cds_YP_003848704.1_1 target sequence
DCIELDVSGPYEMESFDTSDVNLFGPAHYKDISSLSMIAHPLMDKFVDYAISKMGRASVRKVLETGRCSSKDYDLSKVLFRTLQR

SEQ ID NO: 18692 - protein, 85 aa, unidentified
  REGION 1..85: note = Description of Unknown:cds_NC_024711.1_cds_YP_009052523.1_45 target sequence
DVLKFLQGGNKTPNPEYNPKTKKGAIQPPTLVDYNPGTSISDRGRGHLFSRIAGQSYNLNQYDIDKYAPYDVYVNPVDDPEKLDK

SEQ ID NO: 18693 - protein, 85 aa, unidentified
  REGION 1..85: note = Description of Unknown:cds_NC_024711.1_cds_YP_009052523.1_45 target sequence
ERAVNQSNWEQGLRMIGQIGNEITVGTAIGFADLADAFYNMVSNSPNDYQSEISSELESLKESINERLAIYRENPNAAFDIGDFA

SEQ ID NO: 18694 - protein, 85 aa, unidentified
  REGION 1..85: note = Description of Unknown:cds_NC_024711.1_cds_YP_009052523.1_45 target sequence
WWASNAPSIASSLTLMVPSTGLAKGVSLLGKGIKFNKLANKMANAINMTQKSRAITGRIAEATAIGVPSRYLENYQEARQTYNDI

SEQ ID NO: 18695 - protein, 85 aa, unidentified
  REGION 1..85: note = Description of Unknown:cds_NC_024711.1_cds_YP_009052523.1_45 target sequence
EDYSKTQLANMNDKQREEFYNNNPKYKDMSDEEVAKDIAKNSADITFAEDWANVLFDVWQVYSLKNLWKNALSGNTTSSRLRNLN

SEQ ID NO: 18696 - protein, 85 aa, unidentified
  REGION 1..85: note = Description of Unknown:cds_NC_024711.1_cds_YP_009052523.1_45 target sequence
IAFNSNIDDAAAITNALSNKTTKQAITSTLKDVGDDILHGVRAEWTEGVEEAINYIASQDGLYNGKKVFDKDIPQQTIKDYLQDP

SEQ ID NO: 18697 - protein, 85 aa, unidentified
  REGION 1..85: note = Description of Unknown:cds_NC_024711.1_cds_YP_009052523.1_45 target sequence
MLWEQAFWGALGGVTFSSVMNKAGEFINKRLDKDWTSAEKQRENEILGRTATFQAYQERLNSIANGKNPFITITDENGQQVNPNI

SEQ ID NO: 18698 - protein, 85 aa, unidentified
  REGION 1..85: note = Description of Unknown:cds_NC_024711.1_cds_YP_009052523.1_45 target sequence
ITGTEEELRNIAEKEYMDNIIINSMNAGNLGLLESSINSKEFNDSITNKLGLQQQDSNELINRFKTEINNLKNEYNTTLNKVNRL

SEQ ID NO: 18699 - protein, 85 aa, unidentified
  REGION 1..85: note = Description of Unknown:cds_NC_024711.1_cds_YP_009052523.1_45 target sequence
GGGFEVGRIIATQMVHARNRQENYNNLLNWANDVLNQDITNNHIEDVDINSAKNGIYQHIIDSIQRDIKTIQDNAAINNSVKQER

SEQ ID NO: 18700 - protein, 85 aa, unidentified
  REGION 1..85: note = Description of Unknown:cds_NC_024711.1_cds_YP_009052523.1_45 target sequence
IAQLNERLDAINKLYIPIDIENKNDVQSAIQLQKQYNEVFKDLAEVVNAEINVEVNKNQLNLSDDNIKSRITYLNNFFDNSRKKI

SEQ ID NO: 18701 - protein, 85 aa, unidentified
  REGION 1..85: note = Description of Unknown:cds_NC_024711.1_cds_YP_009052523.1_45 target sequence
VNKAMDDLRNAYKQYGKEYVNSVIKDANNGNKPNIDKIIRDAYAALDLSSKGNEHLKNTIEQLAEIAEIENDVNNTPKEEEVAPV

SEQ ID NO: 18702 - protein, 85 aa, unidentified
  REGION 1..85: note = Description of Unknown:cds_NC_024711.1_cds_YP_009052523.1_45 target sequence
NPDVNEVNKTDVDDTNSSPSSTGSIAERSEAVPSEPTNTEQHQSQTEQPISQEPISTPKSEVNNTLPDDDFERGQIGTDLVYESI

SEQ ID NO: 18703 - protein, 85 aa, unidentified
  REGION 1..85: note = Description of Unknown:cds_NC_024711.1_cds_YP_009052523.1_45 target sequence
ADLEDSLGHESTSSDLLNARQSFIDKLSQAGFEQTEATDIVNNIIDGLTGGSLYSSVQDNSTRRLLLNATYATVTGNERNIEAIM

SEQ ID NO: 18704 - protein, 85 aa, unidentified
  REGION 1..85: note = Description of Unknown:cds_NC_024711.1_cds_YP_009052523.1_45 target sequence
DDFANSVDSEGNTRGKIVNGKVYLSIGQLVEYIDSVTGNKIIKNYLFNQIKNYLYASTNNQGKYRATDESTIKKLNARQFVQYVD

SEQ ID NO: 18705 - protein, 85 aa, unidentified
  REGION 1..85: note = Description of Unknown:cds_NC_024711.1_cds_YP_009052523.1_45 target sequence
GIAKERLERLQVEHTNNVNLKYIVENENVKAFTSIKQGDYLETEYDSKLRRINILANGTIIGYIGVPNIDKFGNYDMVNQGWKYN

SEQ ID NO: 18706 - protein, 85 aa, unidentified
  REGION 1..85: note = Description of Unknown:cds_NC_024711.1_cds_YP_009052523.1_45 target sequence
IHAENGQVVSPLKDALISILDGDRFDEEFIGHLYELAVKEEVTQEELVNLFKEFETKYPDIVRDFTTPVASFDLAGHLVNLTKYI

SEQ ID NO: 18707 - protein, 85 aa, unidentified
  REGION 1..85: note = Description of Unknown:cds_NC_024711.1_cds_YP_009052523.1_45 target sequence
FNQPYENSHEASINRWFNNLLNSYDQAITIVKGDFKGKVKAVNVKYGVLNTIDDANGKWNDVQETVVNYNEDVNKLGVVVQGQVY

SEQ ID NO: 18708 - protein, 85 aa, unidentified
  REGION 1..85: note = Description of Unknown:cds_NC_024711.1_cds_YP_009052523.1_45 target sequence
LNGESKPTIIENLTTNGMPVISIPNSDSTSLYAFCKQVPLNSNLLKGDARRIINSIKNEVNNLCRDYISGKISFGELKQNLGDIF

SEQ ID NO: 18709 - protein, 85 aa, unidentified
  REGION 1..85: note = Description of Unknown:cds_NC_024711.1_cds_YP_009052523.1_45 target sequence
GNNKLINGDRNTGLQISINPTNIGFYVKGAHFNGKDYAFTINSDAGNYKRNIIINSPYVVNSAFKIGKSYGINASTIDELDNALR

SEQ ID NO: 18710 - protein, 85 aa, unidentified
  REGION 1..85: note = Description of Unknown:cds_NC_024711.1_cds_YP_009052523.1_45 target sequence
PVIDEMFNYAQFAISKDFINDSTKTNDKTNKYIYRKNGKTIINIDGKTYSYNSYQDFIISNGLVRTKLANTNTNETAGNWQIDIH

SEQ ID NO: 18711 - protein, 85 aa, unidentified
  REGION 1..85: note = Description of Unknown:cds_NC_024711.1_cds_YP_009052523.1_45 target sequence
SKLDITYELEGRPPVEDGTIPEQLSEFMLDDTLNAINFNAFESAITAKNLTRGLKKYFANDQTAIDYIDSLQKIGILPKNIQVVN

SEQ ID NO: 18712 - protein, 85 aa, unidentified
  REGION 1..85: note = Description of Unknown:cds_NC_024711.1_cds_YP_009052523.1_45 target sequence
SITDNNGNQVNAVYHRDTDTIELNSSAIAGQRVYRVVNIILHESLHRQLYTKYNTEQALALVKPIYDKFKAWLDIQDDATKERLK

SEQ ID NO: 18713 - protein, 85 aa, unidentified
  REGION 1..85: note = Description of Unknown:cds_NC_024711.1_cds_YP_009052523.1_45 target sequence
PYLFENFNTSEALEEFLVESITSNALMTALNEIKYDNRKVNKRKTLFSRLLEVIADMLGIKINEDSLLAAARDAYKAIKKMPKES

SEQ ID NO: 18714 - protein, 85 aa, unidentified
  REGION 1..85: note = Description of Unknown:cds_NC_024711.1_cds_YP_009052523.1_45 target sequence
NQEAIQGTFQFEEETASTEQTENPNEDNSQDYNYNNDNLNDGLDMFSSVDDDIVSNMAELTSRLPIDQQSEFATLLDTGRISFSC

SEQ ID NO: 18715 - protein, 84 aa, unidentified
  REGION 1..84: note = Description of Unknown:cds_NC_024711.1_cds_YP_009052523.1_45 target sequence
EAIQGTFQFEEETASTEQTENPNEDNSQDYNYNNDNLNDGLDMFSSVDDDIVSNMAELTSRLPIDQQSEFATLLDTGRISFSCM

SEQ ID NO: 18716 - protein, 85 aa, unidentified
  REGION 1..85: note = Description of Unknown:cds_NC_024711.1_cds_YP_009052523.1_45 target sequence
PPTLVDYNPGTSISDRGRGHLFSRIAGQSYNLNQYDIDKYAPYDVYVNPVDDPEKLDKERAVNQSNWEQGLRMIGQIGNEITVGT

SEQ ID NO: 18717 - protein, 85 aa, unidentified
  REGION 1..85: note = Description of Unknown:cds_NC_024711.1_cds_YP_009052523.1_45 target sequence
AIGFADLADAFYNMVSNSPNDYQSEISSELESLKESINERLAIYRENPNAAFDIGDFAWWASNAPSIASSLTLMVPSTGLAKGVS

SEQ ID NO: 18718 - protein, 85 aa, unidentified
  REGION 1..85: note = Description of Unknown:cds_NC_024711.1_cds_YP_009052523.1_45 target sequence
LLGKGIKFNKLANKMANAINMTQKSRAITGRIAEATAIGVPSRYLENYQEARQTYNDIEDYSKTQLANMNDKQREEFYNNNPKYK

SEQ ID NO: 18719 - protein, 85 aa, unidentified
  REGION 1..85: note = Description of Unknown:cds_NC_024711.1_cds_YP_009052523.1_45 target sequence
DMSDEEVAKDIAKNSADITFAEDWANVLFDVWQVYSLKNLWKNALSGNTTSSRLRNLNIAFNSNIDDAAAITNALSNKTTKQAIT

SEQ ID NO: 18720 - protein, 85 aa, unidentified
  REGION 1..85: note = Description of Unknown:cds_NC_024711.1_cds_YP_009052523.1_45 target sequence
STLKDVGDDILHGVRAEWTEGVEEAINYIASQDGLYNGKKVFDKDIPQQTIKDYLQDPMLWEQAFWGALGGVTFSSVMNKAGEFI

SEQ ID NO: 18721 - protein, 85 aa, unidentified
  REGION 1..85: note = Description of Unknown:cds_NC_024711.1_cds_YP_009052523.1_45 target sequence
NKRLDKDWTSAEKQRENEILGRTATFQAYQERLNSIANGKNPFITITDENGQQVNPNIITGTEEELRNIAEKEYMDNIIINSMNA

SEQ ID NO: 18722 - protein, 85 aa, unidentified
  REGION 1..85: note = Description of Unknown:cds_NC_024711.1_cds_YP_009052523.1_45 target sequence
GNLGLLESSINSKEFNDSITNKLGLQQQDSNELINRFKTEINNLKNEYNTTLNKVNRLGGGFEVGRIIATQMVHARNRQENYNNL

SEQ ID NO: 18723 - protein, 85 aa, unidentified
  REGION 1..85: note = Description of Unknown:cds_NC_024711.1_cds_YP_009052523.1_45 target sequence
LNWANDVLNQDITNNHIEDVDINSAKNGIYQHIIDSIQRDIKTIQDNAAINNSVKQERIAQLNERLDAINKLYIPIDIENKNDVQ

SEQ ID NO: 18724 - protein, 85 aa, unidentified
  REGION 1..85: note = Description of Unknown:cds_NC_024711.1_cds_YP_009052523.1_45 target sequence
SAIQLQKQYNEVFKDLAEVVNAEINVEVNKNQLNLSDDNIKSRITYLNNFFDNSRKKIVNKAMDDLRNAYKQYGKEYVNSVIKDA

SEQ ID NO: 18725 - protein, 85 aa, unidentified
  REGION 1..85: note = Description of Unknown:cds_NC_024711.1_cds_YP_009052523.1_45 target sequence
NNGNKPNIDKIIRDAYAALDLSSKGNEHLKNTIEQLAEIAEIENDVNNTPKEEEVAPVNPDVNEVNKTDVDDTNSSPSSTGSIAE

SEQ ID NO: 18726 - protein, 85 aa, unidentified
  REGION 1..85: note = Description of Unknown:cds_NC_024711.1_cds_YP_009052523.1_45 target sequence
RSEAVPSEPTNTEQHQSQTEQPISQEPISTPKSEVNNTLPDDDFERGQIGTDLVYESIADLEDSLGHESTSSDLLNARQSFIDKL

SEQ ID NO: 18727 - protein, 85 aa, unidentified
  REGION 1..85: note = Description of Unknown:cds_NC_024711.1_cds_YP_009052523.1_45 target sequence
SQAGFEQTEATDIVNNIIDGLTGGSLYSSVQDNSTRRLLLNATYATVTGNERNIEAIMDDFANSVDSEGNTRGKIVNGKVYLSIG

SEQ ID NO: 18728 - protein, 85 aa, unidentified
  REGION 1..85: note = Description of Unknown:cds_NC_024711.1_cds_YP_009052523.1_45 target sequence
QLVEYIDSVTGNKIIKNYLFNQIKNYLYASTNNQGKYRATDESTIKKLNARQFVQYVDGIAKERLERLQVEHTNNVNLKYIVENE

SEQ ID NO: 18729 - protein, 85 aa, unidentified
  REGION 1..85: note = Description of Unknown:cds_NC_024711.1_cds_YP_009052523.1_45 target sequence
NVKAFTSIKQGDYLETEYDSKLRRINILANGTIIGYIGVPNIDKFGNYDMVNQGWKYNIHAENGQVVSPLKDALISILDGDRFDE

SEQ ID NO: 18730 - protein, 85 aa, unidentified
  REGION 1..85: note = Description of Unknown:cds_NC_024711.1_cds_YP_009052523.1_45 target sequence
EFIGHLYELAVKEEVTQEELVNLFKEFETKYPDIVRDFTTPVASFDLAGHLVNLTKYIFNQPYENSHEASINRWFNNLLNSYDQA

SEQ ID NO: 18731 - protein, 85 aa, unidentified
  REGION 1..85: note = Description of Unknown:cds_NC_024711.1_cds_YP_009052523.1_45 target sequence
ITIVKGDFKGKVKAVNVKYGVLNTIDDANGKWNDVQETVVNYNEDVNKLGVVVQGQVYLNGESKPTIIENLTTNGMPVISIPNSD

SEQ ID NO: 18732 - protein, 85 aa, unidentified
  REGION 1..85: note = Description of Unknown:cds_NC_024711.1_cds_YP_009052523.1_45 target sequence
STSLYAFCKQVPLNSNLLKGDARRIINSIKNEVNNLCRDYISGKISFGELKQNLGDIFGNNKLINGDRNTGLQISINPTNIGFYV

SEQ ID NO: 18733 - protein, 85 aa, unidentified
  REGION 1..85: note = Description of Unknown:cds_NC_024711.1_cds_YP_009052523.1_45 target sequence
KGAHFNGKDYAFTINSDAGNYKRNIIINSPYVVNSAFKIGKSYGINASTIDELDNALRPVIDEMFNYAQFAISKDFINDSTKTND

SEQ ID NO: 18734 - protein, 85 aa, unidentified
  REGION 1..85: note = Description of Unknown:cds_NC_024711.1_cds_YP_009052523.1_45 target sequence
KTNKYIYRKNGKTIINIDGKTYSYNSYQDFIISNGLVRTKLANTNTNETAGNWQIDIHSKLDITYELEGRPPVEDGTIPEQLSEF

SEQ ID NO: 18735 - protein, 85 aa, unidentified
  REGION 1..85: note = Description of Unknown:cds_NC_024711.1_cds_YP_009052523.1_45 target sequence
MLDDTLNAINFNAFESAITAKNLTRGLKKYFANDQTAIDYIDSLQKIGILPKNIQVVNSITDNNGNQVNAVYHRDTDTIELNSSA

SEQ ID NO: 18736 - protein, 85 aa, unidentified
  REGION 1..85: note = Description of Unknown:cds_NC_024711.1_cds_YP_009052523.1_45 target sequence
IAGQRVYRVVNIILHESLHRQLYTKYNTEQALALVKPIYDKFKAWLDIQDDATKERLKPYLFENFNTSEALEEFLVESITSNALM

SEQ ID NO: 18737 - protein, 85 aa, unidentified
  REGION 1..85: note = Description of Unknown:cds_NC_024711.1_cds_YP_009052523.1_45 target sequence
TALNEIKYDNRKVNKRKTLFSRLLEVIADMLGIKINEDSLLAAARDAYKAIKKMPKESNQEAIQGTFQFEEETASTEQTENPNED

SEQ ID NO: 18738 - protein, 85 aa, unidentified
  REGION 1..85: note = Description of Unknown:cds_NC_007409.1_cds_YP_319881.1_50 target sequence
SSNYALPDVFRAMAVLTGALAKAYSVLPNDSSKTSNASDVAEASLDVARAFEEASQILKTAVSSPVVARALSETQNNGTLHDQLN

SEQ ID NO: 18739 - protein, 85 aa, unidentified
  REGION 1..85: note = Description of Unknown:cds_NC_007409.1_cds_YP_319881.1_50 target sequence
SSVQNIAKASTEFSAMGDIFKYQAKAQVSLAQIKACSNAQCSPETVESNFQEAIRDYEAASSIALQYGFQSLAEQLSDAVNQLKT

SEQ ID NO: 18740 - protein, 85 aa, unidentified
  REGION 1..85: note = Description of Unknown:cds_NC_007409.1_cds_YP_319881.1_50 target sequence
ALSNYEKTVATLQQIKQAQASGNYWQVLNLALSLASNQQNTQSSKNIAQAANNLKSALNAPLNSNNMSQYYSNVVSAIQSFPRCT

SEQ ID NO: 18741 - protein, 85 aa, unidentified
  REGION 1..85: note = Description of Unknown:cds_NC_007409.1_cds_YP_319881.1_50 target sequence
QVSTLVTTTSAVIAIQRLLQLGSSELQKAQQATQALLQSAEQMWSSAYNHAEKAYEAFSLAEQLASQFVSQELANEIEKGLEKVK

SEQ ID NO: 18742 - protein, 85 aa, unidentified
  REGION 1..85: note = Description of Unknown:cds_NC_007409.1_cds_YP_319881.1_50 target sequence
QFVAEAQANMNANKNILADAFNTVVDNISNAVNDLMNWVNDLIETHIPGIVGQILAGVVDGLIFVVISLIPGVGQIIDGIIAFSF

SEQ ID NO: 18743 - protein, 85 aa, unidentified
  REGION 1..85: note = Description of Unknown:cds_NC_007409.1_cds_YP_319881.1_50 target sequence
ISNLVEQGIIAVKTGYGAQFLQQLEESFLQPQNIAMIATSVIGGIGLERVLADRLPDIRIGAIDAAKEKIGDLMSDFKEKISIGL

SEQ ID NO: 18744 - protein, 85 aa, unidentified
  REGION 1..85: note = Description of Unknown:cds_NC_007409.1_cds_YP_319881.1_50 target sequence
HGISDDASKVLDDIKTKIKGNAVSLRDVGSTIVEKKIEVKAPDITKIDVKPEEITAKNVNVKLVKPLSTDLAKQLSEKFKSVKNL

SEQ ID NO: 18745 - protein, 85 aa, unidentified
  REGION 1..85: note = Description of Unknown:cds_NC_007409.1_cds_YP_319881.1_50 target sequence
KDLKAIVKVDKEFRIPYDLQGKSMGDKTVLTADYMEGEVLGLIKNYEADVKISPTSFEKTIKGAELKPPELHAKLSSFDYTGKGI

SEQ ID NO: 18746 - protein, 85 aa, unidentified
  REGION 1..85: note = Description of Unknown:cds_NC_007409.1_cds_YP_319881.1_50 target sequence
LDVEQDIIDAIKTSKDISLTSDGKGVAITTDKATTIVPVKKYFDAIMTGYAKGDFSDVKVAELLSKVNSSDLARLMTDDIIKKLK

SEQ ID NO: 18747 - protein, 85 aa, unidentified
  REGION 1..85: note = Description of Unknown:cds_NC_007409.1_cds_YP_319881.1_50 target sequence
DYKGSGELKIGDLVIAKEIKGDKTLYSVAKIGPDGKPQSINVVSDIDDPMFRATVYNNLLDMVKNKTEFDYLVTNLNKMKSLSPD

SEQ ID NO: 18748 - protein, 85 aa, unidentified
  REGION 1..85: note = Description of Unknown:cds_NC_007409.1_cds_YP_319881.1_50 target sequence
LQTTLDRLTVKPGERSISIEGSGGKYLNVTEKSLPGGSEIRAETNLEGVKAVDALEKELDGERQATLEQLLESYKNGGFRDVKAL

SEQ ID NO: 18749 - protein, 85 aa, unidentified
  REGION 1..85: note = Description of Unknown:cds_NC_007409.1_cds_YP_319881.1_50 target sequence
ADALGKIDKLPDTLKEALAKYFDRKMENSSLEEEVDLIKGLPKMYEDLKTKVIDPVDTFLNKLKAKGAPESEIDALRQLFYKRVL

SEQ ID NO: 18750 - protein, 85 aa, unidentified
  REGION 1..85: note = Description of Unknown:cds_NC_007409.1_cds_YP_319881.1_50 target sequence
NEINAGRSLDTIDLASAFVKANEVLDKVDDVVKDLKDRGLPDNLVNDIKASMFKQIEKDVLSGKPLDINRIEFDVLRQKEDAIFN

SEQ ID NO: 18751 - protein, 85 aa, unidentified
  REGION 1..85: note = Description of Unknown:cds_NC_007409.1_cds_YP_319881.1_50 target sequence
FVLDKFGFDKNLLKNLTPDQLDRFKTNVVDQFLLKHITDKNDLMDEYNNIVKGPSKVQNTTQPSATQNTTTQPTAQNTSLPGATQ

SEQ ID NO: 18752 - protein, 85 aa, unidentified
  REGION 1..85: note = Description of Unknown:cds_NC_007409.1_cds_YP_319881.1_50 target sequence
NTTLPTPSKVQNTTQPSTTPNTTLSTPSTTPNTTTQPTVQNTSLPGAVQNITPKDLQSIVKDPKVLDEINATVEKLKDLGLPDKL

SEQ ID NO: 18753 - protein, 85 aa, unidentified
  REGION 1..85: note = Description of Unknown:cds_NC_007409.1_cds_YP_319881.1_50 target sequence
VDDIKASIFKKIENDALSGKPIDINNIWTNILMQKEDAIFNFVLDKFGFDKNLLKNLTPEQLAKFKTDVVTDFMTNRIVDKTDLM

SEQ ID NO: 18754 - protein, 85 aa, unidentified
  REGION 1..85: note = Description of Unknown:cds_NC_007409.1_cds_YP_319881.1_50 target sequence
QTYMDVKATVKGPGTTQNTTTPSVAQNITLKDLQSIVKDPKVLEQVDATIKRLKDLGLPDKLVDDIKASMLEQIKKDALSGKPID

SEQ ID NO: 18755 - protein, 85 aa, unidentified
  REGION 1..85: note = Description of Unknown:cds_NC_007409.1_cds_YP_319881.1_50 target sequence
INNIWTNILMQKEDAIFDFVLDKFGFDKDLLKNLTPEQLAKFKTDVVTDFMTNRIVDKTDLMQTYMDAKTLVKGPSTTQNTTQPS

SEQ ID NO: 18756 - protein, 85 aa, unidentified
  REGION 1..85: note = Description of Unknown:cds_NC_007409.1_cds_YP_319881.1_50 target sequence
TTPNMTPPKIEFKDQNVKPPGTGAGTDVNTPGSGSQTVTSGSGLQLLVKPKEIAAQEEKIKLKDLQSILPEETLERFEKLPDSLK

SEQ ID NO: 18757 - protein, 85 aa, unidentified
  REGION 1..85: note = Description of Unknown:cds_NC_007409.1_cds_YP_319881.1_50 target sequence
EKVIDEIETRLRGKKVDEIEGIVNDVIDKYEKLYDSAVKDGMLNDLKNLIDAYSKKDNNATEVLTDVGKSLEVLKDLNKSVGTSV

SEQ ID NO: 18758 - protein, 85 aa, unidentified
  REGION 1..85: note = Description of Unknown:cds_NC_007409.1_cds_YP_319881.1_50 target sequence
VEEAKYNSTLQTYLAGLGIKDLNNVSDKQLIKIGTDVTNTLSEKFGTPVVVLTPEEAKILVKELNDTLNDTGLNTKFKIEEVKPL

SEQ ID NO: 18759 - protein, 85 aa, unidentified
  REGION 1..85: note = Description of Unknown:cds_NC_007409.1_cds_YP_319881.1_50 target sequence
PKTLEVILATLGIKNETKQRILLKELQKKLPKIRITDLIVISSKGTITPITWDDIMPTYYTNVQGQTLPIYTTQTTTTHHITPPP

SEQ ID NO: 18760 - protein, 84 aa, unidentified
  REGION 1..84: note = Description of Unknown:cds_NC_007409.1_cds_YP_319881.1_50 target sequence
YTTQTTTTHHITPPPPPPPPPPPPPPKTQTITTTTQITPPSPPPTPPPPPPPPKSPKMPASLSPSSGNAPSEAEAEQAEQVLLI

SEQ ID NO: 18761 - protein, 85 aa, unidentified
  REGION 1..85: note = Description of Unknown:cds_NC_007409.1_cds_YP_319881.1_50 target sequence
PNDSSKTSNASDVAEASLDVARAFEEASQILKTAVSSPVVARALSETQNNGTLHDQLNSSVQNIAKASTEFSAMGDIFKYQAKAQ

SEQ ID NO: 18762 - protein, 85 aa, unidentified
  REGION 1..85: note = Description of Unknown:cds_NC_007409.1_cds_YP_319881.1_50 target sequence
VSLAQIKACSNAQCSPETVESNFQEAIRDYEAASSIALQYGFQSLAEQLSDAVNQLKTALSNYEKTVATLQQIKQAQASGNYWQV

SEQ ID NO: 18763 - protein, 85 aa, unidentified
  REGION 1..85: note = Description of Unknown:cds_NC_007409.1_cds_YP_319881.1_50 target sequence
LNLALSLASNQQNTQSSKNIAQAANNLKSALNAPLNSNNMSQYYSNVVSAIQSFPRCTQVSTLVTTTSAVIAIQRLLQLGSSELQ

SEQ ID NO: 18764 - protein, 85 aa, unidentified
  REGION 1..85: note = Description of Unknown:cds_NC_007409.1_cds_YP_319881.1_50 target sequence
KAQQATQALLQSAEQMWSSAYNHAEKAYEAFSLAEQLASQFVSQELANEIEKGLEKVKQFVAEAQANMNANKNILADAFNTVVDN

SEQ ID NO: 18765 - protein, 85 aa, unidentified
  REGION 1..85: note = Description of Unknown:cds_NC_007409.1_cds_YP_319881.1_50 target sequence
ISNAVNDLMNWVNDLIETHIPGIVGQILAGVVDGLIFVVISLIPGVGQIIDGIIAFSFISNLVEQGIIAVKTGYGAQFLQQLEES

SEQ ID NO: 18766 - protein, 85 aa, unidentified
  REGION 1..85: note = Description of Unknown:cds_NC_007409.1_cds_YP_319881.1_50 target sequence
FLQPQNIAMIATSVIGGIGLERVLADRLPDIRIGAIDAAKEKIGDLMSDFKEKISIGLHGISDDASKVLDDIKTKIKGNAVSLRD

SEQ ID NO: 18767 - protein, 85 aa, unidentified
  REGION 1..85: note = Description of Unknown:cds_NC_007409.1_cds_YP_319881.1_50 target sequence
VGSTIVEKKIEVKAPDITKIDVKPEEITAKNVNVKLVKPLSTDLAKQLSEKFKSVKNLKDLKAIVKVDKEFRIPYDLQGKSMGDK

SEQ ID NO: 18768 - protein, 85 aa, unidentified
  REGION 1..85: note = Description of Unknown:cds_NC_007409.1_cds_YP_319881.1_50 target sequence
TVLTADYMEGEVLGLIKNYEADVKISPTSFEKTIKGAELKPPELHAKLSSFDYTGKGILDVEQDIIDAIKTSKDISLTSDGKGVA

SEQ ID NO: 18769 - protein, 85 aa, unidentified
  REGION 1..85: note = Description of Unknown:cds_NC_007409.1_cds_YP_319881.1_50 target sequence
ITTDKATTIVPVKKYFDAIMTGYAKGDFSDVKVAELLSKVNSSDLARLMTDDIIKKLKDYKGSGELKIGDLVIAKEIKGDKTLYS

SEQ ID NO: 18770 - protein, 85 aa, unidentified
  REGION 1..85: note = Description of Unknown:cds_NC_007409.1_cds_YP_319881.1_50 target sequence
VAKIGPDGKPQSINVVSDIDDPMFRATVYNNLLDMVKNKTEFDYLVTNLNKMKSLSPDLQTTLDRLTVKPGERSISIEGSGGKYL

SEQ ID NO: 18771 - protein, 85 aa, unidentified
  REGION 1..85: note = Description of Unknown:cds_NC_007409.1_cds_YP_319881.1_50 target sequence
NVTEKSLPGGSEIRAETNLEGVKAVDALEKELDGERQATLEQLLESYKNGGFRDVKALADALGKIDKLPDTLKEALAKYFDRKME

SEQ ID NO: 18772 - protein, 85 aa, unidentified
  REGION 1..85: note = Description of Unknown:cds_NC_007409.1_cds_YP_319881.1_50 target sequence
NSSLEEEVDLIKGLPKMYEDLKTKVIDPVDTFLNKLKAKGAPESEIDALRQLFYKRVLNEINAGRSLDTIDLASAFVKANEVLDK

SEQ ID NO: 18773 - protein, 85 aa, unidentified
  REGION 1..85: note = Description of Unknown:cds_NC_007409.1_cds_YP_319881.1_50 target sequence
VDDVVKDLKDRGLPDNLVNDIKASMFKQIEKDVLSGKPLDINRIEFDVLRQKEDAIFNFVLDKFGFDKNLLKNLTPDQLDRFKTN

SEQ ID NO: 18774 - protein, 85 aa, unidentified
  REGION 1..85: note = Description of Unknown:cds_NC_007409.1_cds_YP_319881.1_50 target sequence
VVDQFLLKHITDKNDLMDEYNNIVKGPSKVQNTTQPSATQNTTTQPTAQNTSLPGATQNTTLPTPSKVQNTTQPSTTPNTTLSTP

SEQ ID NO: 18775 - protein, 85 aa, unidentified
  REGION 1..85: note = Description of Unknown:cds_NC_007409.1_cds_YP_319881.1_50 target sequence
STTPNTTTQPTVQNTSLPGAVQNITPKDLQSIVKDPKVLDEINATVEKLKDLGLPDKLVDDIKASIFKKIENDALSGKPIDINNI

SEQ ID NO: 18776 - protein, 85 aa, unidentified
  REGION 1..85: note = Description of Unknown:cds_NC_007409.1_cds_YP_319881.1_50 target sequence
WTNILMQKEDAIFNFVLDKFGFDKNLLKNLTPEQLAKFKTDVVTDFMTNRIVDKTDLMQTYMDVKATVKGPGTTQNTTTPSVAQN

SEQ ID NO: 18777 - protein, 85 aa, unidentified
  REGION 1..85: note = Description of Unknown:cds_NC_007409.1_cds_YP_319881.1_50 target sequence
ITLKDLQSIVKDPKVLEQVDATIKRLKDLGLPDKLVDDIKASMLEQIKKDALSGKPIDINNIWTNILMQKEDAIFDFVLDKFGFD

SEQ ID NO: 18778 - protein, 85 aa, unidentified
  REGION 1..85: note = Description of Unknown:cds_NC_007409.1_cds_YP_319881.1_50 target sequence
KDLLKNLTPEQLAKFKTDVVTDFMTNRIVDKTDLMQTYMDAKTLVKGPSTTQNTTQPSTTPNMTPPKIEFKDQNVKPPGTGAGTD

SEQ ID NO: 18779 - protein, 85 aa, unidentified
  REGION 1..85: note = Description of Unknown:cds_NC_007409.1_cds_YP_319881.1_50 target sequence
VNTPGSGSQTVTSGSGLQLLVKPKEIAAQEEKIKLKDLQSILPEETLERFEKLPDSLKEKVIDEIETRLRGKKVDEIEGIVNDVI

SEQ ID NO: 18780 - protein, 85 aa, unidentified
  REGION 1..85: note = Description of Unknown:cds_NC_007409.1_cds_YP_319881.1_50 target sequence
DKYEKLYDSAVKDGMLNDLKNLIDAYSKKDNNATEVLTDVGKSLEVLKDLNKSVGTSVVEEAKYNSTLQTYLAGLGIKDLNNVSD

SEQ ID NO: 18781 - protein, 85 aa, unidentified
  REGION 1..85: note = Description of Unknown:cds_NC_007409.1_cds_YP_319881.1_50 target sequence
KQLIKIGTDVTNTLSEKFGTPVVVLTPEEAKILVKELNDTLNDTGLNTKFKIEEVKPLPKTLEVILATLGIKNETKQRILLKELQ

SEQ ID NO: 18782 - protein, 85 aa, unidentified
  REGION 1..85: note = Description of Unknown:cds_NC_007409.1_cds_YP_319881.1_50 target sequence
KKLPKIRITDLIVISSKGTITPITWDDIMPTYYTNVQGQTLPIYTTQTTTTHHITPPPPPPPPPPPPPPKTQTITTTTQITPPSP

SEQ ID NO: 18783 - protein, 84 aa, unidentified
  REGION 1..84: note = Description of Unknown:cds_NC_001449.1_cds_NP_040823.1_2 target sequence
RNPPHPAPRTRTPPLAHSRASSRTSLVSTPPGVNRVITREELEALTPSRAPSRSASRTSLVSNPPGVNRVITREEFEAFVAQQQ

SEQ ID NO: 18784 - protein, 85 aa, unidentified
  REGION 1..85: note = Description of Unknown:hvTR_Q9QJ16 target sequence
KLSGLYHDADVTHRQPLSENTHQDPISSQDSRKNSRTPQDPRRAAQIHRQCTSSASNLPSNGNNSIHMRFASELPDQVLQPMYAS

SEQ ID NO: 18785 - protein, 85 aa, unidentified
  REGION 1..85: note = Description of Unknown:hvTR_Q9QJ16 target sequence
QNQTTNSQCNFTSLPYQPNYDAYRSIESSYRESRNTDRGYDSNFRHHSHRPRGGKGRYDSRNYFNPNSKYQQPYGRFFPRSYNRR

SEQ ID NO: 18786 - protein, 85 aa, unidentified
  REGION 1..85: note = Description of Unknown:hvTR_Q9QJ16 target sequence
GRGHRLHDFSNRPADLSYQQYMHPNYEQYNPDLRMNNYKDVTQLTTNFNFQAQDYSMAFSQTSITTDPTYVQSDNHNYPTKTQTT

SEQ ID NO: 18787 - protein, 85 aa, unidentified
  REGION 1..85: note = Description of Unknown:hvTR_Q9QJ16 target sequence
PETTKTKEHENAKDNKEHKKQQVSTSPDAISLSYRPSSQKMDLIKKIYDTEVIPLPKEALIDNGSYCGVDTQKYKKTHIRCRSIQ

SEQ ID NO: 18788 - protein, 85 aa, unidentified
  REGION 1..85: note = Description of Unknown:hvTR_Q9QJ16 target sequence
KTKGHSSQTINKHKVQKHNENHVPSRSDLKQRKSNQHEDEAVTEARDFSKLDPLLSPLPMTPEPTLNFAVHKTKIHSDSELHHTK

SEQ ID NO: 18789 - protein, 85 aa, unidentified
  REGION 1..85: note = Description of Unknown:hvTR_Q9QJ16 target sequence
KNIHRSKTSLQDRVLISKHAPRAPTKDNSYKKHHDPKDTNDPKMKHSRGRTTSKKNTANSNGHQDVREVAVKNVSGKAAKNTSKK

SEQ ID NO: 18790 - protein, 85 aa, unidentified
  REGION 1..85: note = Description of Unknown:hvTR_Q9QJ16 target sequence
SDPSHNLHGKTSDEQYKTSPDNEKISTPPKSKTHHCIHDSSSSEEGQYKSPNNSESNYGNCLSDKFYDNFTKTTPNSKTNHKTEE

SEQ ID NO: 18791 - protein, 85 aa, unidentified
  REGION 1..85: note = Description of Unknown:hvTR_Q9QJ16 target sequence
STENTDLNSFSNENTNKTEIEDSNIIQPFSQLFCNETIIPSTSACPTQETPSTMNRNCASKKHSAGANKNLTDNSPIRSHSNPSS

SEQ ID NO: 18792 - protein, 85 aa, unidentified
  REGION 1..85: note = Description of Unknown:hvTR_Q9QJ16 target sequence
FTAFNKSNSGNSTMNSTSNGDECTDKKPNCSSTENKSETSNQTNGENSDKPLSKTFTEVSDRASSRASSRASSRASSRASSRASS

SEQ ID NO: 18793 - protein, 85 aa, unidentified
  REGION 1..85: note = Description of Unknown:hvTR_Q9QJ16 target sequence
RASSRASSRTSSRASSRAFSRASSRVSSRASSRASSRASSRASSRASSRASGRASGRASSRASSRVSSRASSRASSRASSRASSR

SEQ ID NO: 18794 - protein, 85 aa, unidentified
  REGION 1..85: note = Description of Unknown:hvTR_Q9QJ16 target sequence
ASSRASSRVSSKASSRASSRASSRASSRASSRASSRASSRASSRASSRASSRASSRASSRASSRASSRASSRASSRASSRASSRA

SEQ ID NO: 18795 - protein, 85 aa, unidentified
  REGION 1..85: note = Description of Unknown:hvTR_Q9QJ16 target sequence
SGRASSKASSRASSRASGKTPNNKLMSNIPSPQTYEKTSNKRKPRQIYCDSNKRQIYPHDTSISTEAEVSEIKFRCGPELNFYKN

SEQ ID NO: 18796 - protein, 85 aa, unidentified
  REGION 1..85: note = Description of Unknown:hvTR_Q9QJ16 target sequence
AAARLQSFNHNDQFYNPRFRPHIRTNRKKSESTNYTDSESSTSRSRSHSRYSPDSLNTPKRKKHKSGSSSISSSIEENSRSNSRT

SEQ ID NO: 18797 - protein, 85 aa, unidentified
  REGION 1..85: note = Description of Unknown:hvTR_Q9QJ16 target sequence
ETGTDKLITFNYQHSRTRSSSSSSVSSSCSSSRSKSWRKSRYKNSEDPATYSPRSRLQQLEKQTRPKSASRDKTKIKSPNHESKH

SEQ ID NO: 18798 - protein, 85 aa, unidentified
  REGION 1..85: note = Description of Unknown:hvTR_Q9QJ16 target sequence
RHADMFRNSQKTGEKFPLDNSSPSNTHEQSNHLENAIDQEQKKTPKTTNTTTNTIYRPRDNQSNISRNTTKCKKKRTRDDDSDSS

SEQ ID NO: 18799 - protein, 85 aa, unidentified
  REGION 1..85: note = Description of Unknown:hvTR_Q9QJ16 target sequence
MQNFFKKRISGTQKTDSEISEIEEELSYREYVRRKEKKESAKYKIHRGRVSTKDFRKLFRNTIRAFEYKQIPKKPFPENKLKEAV

SEQ ID NO: 18800 - protein, 85 aa, unidentified
  REGION 1..85: note = Description of Unknown:hvTR_Q9QJ16 target sequence
YNICSNGCSNTGAIIMYFTRSKQVAEIIKTMQRELMIRPNITVSEPFKMNHAPPNYYDKDAINQFIELQKQGPQELWDKLENNTH

SEQ ID NO: 18801 - protein, 84 aa, unidentified
  REGION 1..84: note = Description of Unknown:hvTR_Q9QJ16 target sequence
LWDKLENNTHDLFTRHSDVKTLMVYAATPIDFVMASKICNKYAKDKPKEIVLRVCSIIDGDNSISIYNSVSRDFKSKYLTLSKC

SEQ ID NO: 18802 - protein, 85 aa, unidentified
  REGION 1..85: note = Description of Unknown:hvTR_Q9QJ16 target sequence
SQDSRKNSRTPQDPRRAAQIHRQCTSSASNLPSNGNNSIHMRFASELPDQVLQPMYASQNQTTNSQCNFTSLPYQPNYDAYRSIE

SEQ ID NO: 18803 - protein, 85 aa, unidentified
  REGION 1..85: note = Description of Unknown:hvTR_Q9QJ16 target sequence
SSYRESRNTDRGYDSNFRHHSHRPRGGKGRYDSRNYFNPNSKYQQPYGRFFPRSYNRRGRGHRLHDFSNRPADLSYQQYMHPNYE

SEQ ID NO: 18804 - protein, 85 aa, unidentified
  REGION 1..85: note = Description of Unknown:hvTR_Q9QJ16 target sequence
QYNPDLRMNNYKDVTQLTTNFNFQAQDYSMAFSQTSITTDPTYVQSDNHNYPTKTQTTPETTKTKEHENAKDNKEHKKQQVSTSP

SEQ ID NO: 18805 - protein, 85 aa, unidentified
  REGION 1..85: note = Description of Unknown:hvTR_Q9QJ16 target sequence
DAISLSYRPSSQKMDLIKKIYDTEVIPLPKEALIDNGSYCGVDTQKYKKTHIRCRSIQKTKGHSSQTINKHKVQKHNENHVPSRS

SEQ ID NO: 18806 - protein, 85 aa, unidentified
  REGION 1..85: note = Description of Unknown:hvTR_Q9QJ16 target sequence
DLKQRKSNQHEDEAVTEARDFSKLDPLLSPLPMTPEPTLNFAVHKTKIHSDSELHHTKKNIHRSKTSLQDRVLISKHAPRAPTKD

SEQ ID NO: 18807 - protein, 85 aa, unidentified
  REGION 1..85: note = Description of Unknown:hvTR_Q9QJ16 target sequence
NSYKKHHDPKDTNDPKMKHSRGRTTSKKNTANSNGHQDVREVAVKNVSGKAAKNTSKKSDPSHNLHGKTSDEQYKTSPDNEKIST

SEQ ID NO: 18808 - protein, 85 aa, unidentified
  REGION 1..85: note = Description of Unknown:hvTR_Q9QJ16 target sequence
PPKSKTHHCIHDSSSSEEGQYKSPNNSESNYGNCLSDKFYDNFTKTTPNSKTNHKTEESTENTDLNSFSNENTNKTEIEDSNIIQ

SEQ ID NO: 18809 - protein, 85 aa, unidentified
  REGION 1..85: note = Description of Unknown:hvTR_Q9QJ16 target sequence
PFSQLFCNETIIPSTSACPTQETPSTMNRNCASKKHSAGANKNLTDNSPIRSHSNPSSFTAFNKSNSGNSTMNSTSNGDECTDKK

SEQ ID NO: 18810 - protein, 85 aa, unidentified
  REGION 1..85: note = Description of Unknown:hvTR_Q9QJ16 target sequence
PNCSSTENKSETSNQTNGENSDKPLSKTFTEVSDRASSRASSRASSRASSRASSRASSRASSRASSRTSSRASSRAFSRASSRVS

SEQ ID NO: 18811 - protein, 85 aa, unidentified
  REGION 1..85: note = Description of Unknown:hvTR_Q9QJ16 target sequence
SRASSRASSRASSRASSRASSRASGRASGRASSRASSRVSSRASSRASSRASSRASSRASSRASSRVSSKASSRASSRASSRASS

SEQ ID NO: 18812 - protein, 85 aa, unidentified
  REGION 1..85: note = Description of Unknown:hvTR_Q9QJ16 target sequence
RASSRASSRASSRASSRASSRASSRASSRASSRASSRASSRASSRASSRASSRASSRASGRASSKASSRASSRASGKTPNNKLMS

SEQ ID NO: 18813 - protein, 85 aa, unidentified
  REGION 1..85: note = Description of Unknown:hvTR_Q9QJ16 target sequence
NIPSPQTYEKTSNKRKPRQIYCDSNKRQIYPHDTSISTEAEVSEIKFRCGPELNFYKNAAARLQSFNHNDQFYNPRFRPHIRTNR

SEQ ID NO: 18814 - protein, 85 aa, unidentified
  REGION 1..85: note = Description of Unknown:hvTR_Q9QJ16 target sequence
KKSESTNYTDSESSTSRSRSHSRYSPDSLNTPKRKKHKSGSSSISSSIEENSRSNSRTETGTDKLITFNYQHSRTRSSSSSSVSS

SEQ ID NO: 18815 - protein, 85 aa, unidentified
  REGION 1..85: note = Description of Unknown:hvTR_Q9QJ16 target sequence
SCSSSRSKSWRKSRYKNSEDPATYSPRSRLQQLEKQTRPKSASRDKTKIKSPNHESKHRHADMFRNSQKTGEKFPLDNSSPSNTH

SEQ ID NO: 18816 - protein, 85 aa, unidentified
  REGION 1..85: note = Description of Unknown:hvTR_Q9QJ16 target sequence
EQSNHLENAIDQEQKKTPKTTNTTTNTIYRPRDNQSNISRNTTKCKKKRTRDDDSDSSMQNFFKKRISGTQKTDSEISEIEEELS

SEQ ID NO: 18817 - protein, 85 aa, unidentified
  REGION 1..85: note = Description of Unknown:hvTR_Q9QJ16 target sequence
YREYVRRKEKKESAKYKIHRGRVSTKDFRKLFRNTIRAFEYKQIPKKPFPENKLKEAVYNICSNGCSNTGAIIMYFTRSKQVAEI

SEQ ID NO: 18818 - protein, 85 aa, unidentified
  REGION 1..85: note = Description of Unknown:hvTR_Q9QJ16 target sequence
IKTMQRELMIRPNITVSEPFKMNHAPPNYYDKDAINQFIELQKQGPQELWDKLENNTHDLFTRHSDVKTLMVYAATPIDFVMASK

SEQ ID NO: 18819 - protein, 85 aa, unidentified
  REGION 1..85: note = Description of Unknown:cds_NC_024711.1_cds_YP_009052527.1_49 target sequence
NIQKKLSLNKHPGDCVPYSLVAAKNVKVSNDNRMIVNEEGLEDCKAIANSIHEDGINNFKIVGVIPTSTELILFIVNTDSNESYI

SEQ ID NO: 18820 - protein, 85 aa, unidentified
  REGION 1..85: note = Description of Unknown:cds_NC_024711.1_cds_YP_009052527.1_49 target sequence
YRYNEQADNCYRVNSNWKYNGGKIKGTYTYNVKNHLIVAIAESDASIDVPLKTINIDLDSDRPDSEMSVIPQITLPTISGLNYVS

SEQ ID NO: 18821 - protein, 85 aa, unidentified
  REGION 1..85: note = Description of Unknown:cds_NC_024711.1_cds_YP_009052527.1_49 target sequence
GGAYKGFYFIFIRYKIDKTNYTKWYSIGFPIFNDVIIPQVINKVCFRKTNVYEPKDEPNGYCYGNTDSFSDSKDICNQTFEINIS

SEQ ID NO: 18822 - protein, 85 aa, unidentified
  REGION 1..85: note = Description of Unknown:cds_NC_024711.1_cds_YP_009052527.1_49 target sequence
GGRSGLYQLGFIVCKKDSTQAFRTDDLNNNIFKFSRDVLVEYNVADLTTDYYNYYNVGNIINYKNRVYIANYNEHTDNDDRTLNN

SEQ ID NO: 18823 - protein, 85 aa, unidentified
  REGION 1..85: note = Description of Unknown:cds_NC_024711.1_cds_YP_009052527.1_49 target sequence
GKTLEEAVKDITIKLRNKAVNAYYNDYITVNAVSEKGPYFKMASLQITGTADWQIKDINKVFNNNQYPFRTFRTLFNDTVIQGIA

SEQ ID NO: 18824 - protein, 85 aa, unidentified
  REGION 1..85: note = Description of Unknown:cds_NC_024711.1_cds_YP_009052527.1_49 target sequence
AHEYLKINYNAKIKVGSRGSHNLKEYLACHCFIIPTSYKYENNQSVYTLPSTVKIACYVYNGTGFTEDAVFTSGQVLFGDTIFDI

SEQ ID NO: 18825 - protein, 85 aa, unidentified
  REGION 1..85: note = Description of Unknown:cds_NC_024711.1_cds_YP_009052527.1_49 target sequence
DNCKMRITHSIIEPSYDFNERKKNDTLIPGEVYNFFIHFVDKYGDASRGYKLSNKDKYINNIVNDGSHCTIITFNWNNQGNGNIP

SEQ ID NO: 18826 - protein, 85 aa, unidentified
  REGION 1..85: note = Description of Unknown:cds_NC_024711.1_cds_YP_009052527.1_49 target sequence
YWAVISGDIPISTISSNVKRYIANHKIVVYTAEPINNPTTNILLNSSGELEAANKDELYTLISNYFIDYQDKDKYNDLYVYQVIN

SEQ ID NO: 18827 - protein, 85 aa, unidentified
  REGION 1..85: note = Description of Unknown:cds_NC_024711.1_cds_YP_009052527.1_49 target sequence
SGSYTPCSNQVIGAIGVDNEAKFGYYENINGDELFRIPDLIFDAEAIGGEHTRGFIYNMNNTFNKFYIRANIDTTLWNQIKELGY

SEQ ID NO: 18828 - protein, 85 aa, unidentified
  REGION 1..85: note = Description of Unknown:cds_NC_024711.1_cds_YP_009052527.1_49 target sequence
VGWFISYEKVEPITRYTGLLTRKDYCNIASNVTWQDSSWGTKPGFVANNFTSDKCYLYSGRFDIDDSIKYDFNIIRIDGKCKFEP

SEQ ID NO: 18829 - protein, 85 aa, unidentified
  REGION 1..85: note = Description of Unknown:cds_NC_024711.1_cds_YP_009052527.1_49 target sequence
YKEKHGVVDMVVNTTYPYSYNMPVIGVISRNEYKPINNYKLVVADSVTDSRAGKGTALEMDDYKELLLDAETMFLATVLNCTKNI

SEQ ID NO: 18830 - protein, 85 aa, unidentified
  REGION 1..85: note = Description of Unknown:cds_NC_024711.1_cds_YP_009052527.1_49 target sequence
YTSKEKELVRLNDVCYNGGTYSIEHGYNGRMTYDGVLIYNDNGVIMNEGNYKLYTPTNNQYYYSGDEPCWFDIPFNVYIQFPLYS

SEQ ID NO: 18831 - protein, 85 aa, unidentified
  REGION 1..85: note = Description of Unknown:cds_NC_024711.1_cds_YP_009052527.1_49 target sequence
DKFFESKRFNNEPSKIAFSIKEDTDKKSVAFGTFVEPKNSVDLFKDPIGNVDQYVPKLLTQYRNDIINITRFDKTIRRSNVIQDE

SEQ ID NO: 18832 - protein, 85 aa, unidentified
  REGION 1..85: note = Description of Unknown:cds_NC_024711.1_cds_YP_009052527.1_49 target sequence
SEVNAWRIFPIEGYKNITENKGSITNLVGIGYYLLVHTQHSMFMFDISAALKTRDENVQLYQPDAFEVDYKEVFTSDKGYGGLQD

SEQ ID NO: 18833 - protein, 85 aa, unidentified
  REGION 1..85: note = Description of Unknown:cds_NC_024711.1_cds_YP_009052527.1_49 target sequence
DLAYIVGEFGYIFYNDDFHKLYQFDDGQLKIMDEDIKLWLDKYHPNKVRFAHDKFNNRILIKFDYTYDNINPNTKESIIESHNEV

SEQ ID NO: 18834 - protein, 85 aa, unidentified
  REGION 1..85: note = Description of Unknown:cds_NC_024711.1_cds_YP_009052527.1_49 target sequence
ISFNYKVGSFISLHDYYFNNAWSTKTKCYFQTEHNDDRLNCPLHVFTHEYNYGRFNTHMGDDSRSLYLVSKQEVGDKPILVHNSY

SEQ ID NO: 18835 - protein, 85 aa, unidentified
  REGION 1..85: note = Description of Unknown:cds_NC_024711.1_cds_YP_009052527.1_49 target sequence
IDIIVNESYELIKFLEFIKYKVRKIYIPIYSDNINNLVDLREHPYAGDILRIFNEDNDTDDIDINIDKLNEFNKYKKPWYELTQY

SEQ ID NO: 18836 - protein, 84 aa, unidentified
  REGION 1..84: note = Description of Unknown:cds_NC_024711.1_cds_YP_009052527.1_49 target sequence
TDDIDINIDKLNEFNKYKKPWYELTQYNFNYFRNAIKEHPNTVSDKLRRVYGNYFVVRFIFNNSDNKRIEFESLECAQTQFRKL

SEQ ID NO: 18837 - protein, 85 aa, unidentified
  REGION 1..85: note = Description of Unknown:cds_NC_024711.1_cds_YP_009052527.1_49 target sequence
VSNDNRMIVNEEGLEDCKAIANSIHEDGINNFKIVGVIPTSTELILFIVNTDSNESYIYRYNEQADNCYRVNSNWKYNGGKIKGT

SEQ ID NO: 18838 - protein, 85 aa, unidentified
  REGION 1..85: note = Description of Unknown:cds_NC_024711.1_cds_YP_009052527.1_49 target sequence
YTYNVKNHLIVAIAESDASIDVPLKTINIDLDSDRPDSEMSVIPQITLPTISGLNYVSGGAYKGFYFIFIRYKIDKTNYTKWYSI

SEQ ID NO: 18839 - protein, 85 aa, unidentified
  REGION 1..85: note = Description of Unknown:cds_NC_024711.1_cds_YP_009052527.1_49 target sequence
GFPIFNDVIIPQVINKVCFRKTNVYEPKDEPNGYCYGNTDSFSDSKDICNQTFEINISGGRSGLYQLGFIVCKKDSTQAFRTDDL

SEQ ID NO: 18840 - protein, 85 aa, unidentified
  REGION 1..85: note = Description of Unknown:cds_NC_024711.1_cds_YP_009052527.1_49 target sequence
NNNIFKFSRDVLVEYNVADLTTDYYNYYNVGNIINYKNRVYIANYNEHTDNDDRTLNNGKTLEEAVKDITIKLRNKAVNAYYNDY

SEQ ID NO: 18841 - protein, 85 aa, unidentified
  REGION 1..85: note = Description of Unknown:cds_NC_024711.1_cds_YP_009052527.1_49 target sequence
ITVNAVSEKGPYFKMASLQITGTADWQIKDINKVFNNNQYPFRTFRTLFNDTVIQGIAAHEYLKINYNAKIKVGSRGSHNLKEYL

SEQ ID NO: 18842 - protein, 85 aa, unidentified
  REGION 1..85: note = Description of Unknown:cds_NC_024711.1_cds_YP_009052527.1_49 target sequence
ACHCFIIPTSYKYENNQSVYTLPSTVKIACYVYNGTGFTEDAVFTSGQVLFGDTIFDIDNCKMRITHSIIEPSYDFNERKKNDTL

SEQ ID NO: 18843 - protein, 85 aa, unidentified
  REGION 1..85: note = Description of Unknown:cds_NC_024711.1_cds_YP_009052527.1_49 target sequence
IPGEVYNFFIHFVDKYGDASRGYKLSNKDKYINNIVNDGSHCTIITFNWNNQGNGNIPYWAVISGDIPISTISSNVKRYIANHKI

SEQ ID NO: 18844 - protein, 85 aa, unidentified
  REGION 1..85: note = Description of Unknown:cds_NC_024711.1_cds_YP_009052527.1_49 target sequence
VVYTAEPINNPTTNILLNSSGELEAANKDELYTLISNYFIDYQDKDKYNDLYVYQVINSGSYTPCSNQVIGAIGVDNEAKFGYYE

SEQ ID NO: 18845 - protein, 85 aa, unidentified
  REGION 1..85: note = Description of Unknown:cds_NC_024711.1_cds_YP_009052527.1_49 target sequence
NINGDELFRIPDLIFDAEAIGGEHTRGFIYNMNNTFNKFYIRANIDTTLWNQIKELGYVGWFISYEKVEPITRYTGLLTRKDYCN

SEQ ID NO: 18846 - protein, 85 aa, unidentified
  REGION 1..85: note = Description of Unknown:cds_NC_024711.1_cds_YP_009052527.1_49 target sequence
IASNVTWQDSSWGTKPGFVANNFTSDKCYLYSGRFDIDDSIKYDFNIIRIDGKCKFEPYKEKHGVVDMVVNTTYPYSYNMPVIGV

SEQ ID NO: 18847 - protein, 85 aa, unidentified
  REGION 1..85: note = Description of Unknown:cds_NC_024711.1_cds_YP_009052527.1_49 target sequence
ISRNEYKPINNYKLVVADSVTDSRAGKGTALEMDDYKELLLDAETMFLATVLNCTKNIYTSKEKELVRLNDVCYNGGTYSIEHGY

SEQ ID NO: 18848 - protein, 85 aa, unidentified
  REGION 1..85: note = Description of Unknown:cds_NC_024711.1_cds_YP_009052527.1_49 target sequence
NGRMTYDGVLIYNDNGVIMNEGNYKLYTPTNNQYYYSGDEPCWFDIPFNVYIQFPLYSDKFFESKRFNNEPSKIAFSIKEDTDKK

SEQ ID NO: 18849 - protein, 85 aa, unidentified
  REGION 1..85: note = Description of Unknown:cds_NC_024711.1_cds_YP_009052527.1_49 target sequence
SVAFGTFVEPKNSVDLFKDPIGNVDQYVPKLLTQYRNDIINITRFDKTIRRSNVIQDESEVNAWRIFPIEGYKNITENKGSITNL

SEQ ID NO: 18850 - protein, 85 aa, unidentified
  REGION 1..85: note = Description of Unknown:cds_NC_024711.1_cds_YP_009052527.1_49 target sequence
VGIGYYLLVHTQHSMFMFDISAALKTRDENVQLYQPDAFEVDYKEVFTSDKGYGGLQDDLAYIVGEFGYIFYNDDFHKLYQFDDG

SEQ ID NO: 18851 - protein, 85 aa, unidentified
  REGION 1..85: note = Description of Unknown:cds_NC_024711.1_cds_YP_009052527.1_49 target sequence
QLKIMDEDIKLWLDKYHPNKVRFAHDKFNNRILIKFDYTYDNINPNTKESIIESHNEVISFNYKVGSFISLHDYYFNNAWSTKTK

SEQ ID NO: 18852 - protein, 85 aa, unidentified
  REGION 1..85: note = Description of Unknown:cds_NC_024711.1_cds_YP_009052527.1_49 target sequence
CYFQTEHNDDRLNCPLHVFTHEYNYGRFNTHMGDDSRSLYLVSKQEVGDKPILVHNSYIDIIVNESYELIKFLEFIKYKVRKIYI

SEQ ID NO: 18853 - protein, 85 aa, unidentified
  REGION 1..85: note = Description of Unknown:cds_NC_024711.1_cds_YP_009052527.1_49 target sequence
PIYSDNINNLVDLREHPYAGDILRIFNEDNDTDDIDINIDKLNEFNKYKKPWYELTQYNFNYFRNAIKEHPNTVSDKLRRVYGNY

SEQ ID NO: 18854 - protein, 85 aa, unidentified
  REGION 1..85: note = Description of Unknown:hvTR_Q8BB47 target sequence
EPAKPSGNNMGSNDERMQDYRPDPMMEESIQQILEDSLMCDTSFDDLILPGLESFGLIIPESSNNIESNNVEEGSNEDLKTLAEH

SEQ ID NO: 18855 - protein, 85 aa, unidentified
  REGION 1..85: note = Description of Unknown:hvTR_Q8BB47 target sequence
KCKQGNDNDVIQSAMKLSGLYCDADITHTQPLSDNTHQDPIYSQETRIFSKTIQDPRIAAQTHRQCTSSASNLPSNESGSTQVRF

SEQ ID NO: 18856 - protein, 85 aa, unidentified
  REGION 1..85: note = Description of Unknown:hvTR_Q8BB47 target sequence
ASELPNQLLQPMYTSHNQNANLQNNFTSLPYQPYHDPYRDIESSYRESRNTNRGYDYNFRHHSYRPRGGNGKYNYYNPNSKYQQP

SEQ ID NO: 18857 - protein, 85 aa, unidentified
  REGION 1..85: note = Description of Unknown:hvTR_Q8BB47 target sequence
YKRCFTRTYNRRGRGHRSYDCSDRSADLPYEHYTYPNYEQQNPDPRMNNYKDFTQLTNKFNFGANDYSMAFSTDSTHVQSDNYNH

SEQ ID NO: 18858 - protein, 85 aa, unidentified
  REGION 1..85: note = Description of Unknown:hvTR_Q8BB47 target sequence
PTKAQTIPETTKTKKHKATKDNETSRGNQVLTSNDAISLSYRPSPIKLDIIKKIYDTDVIPLPKEALTANGSNRDVDIQKYKKAH

SEQ ID NO: 18859 - protein, 85 aa, unidentified
  REGION 1..85: note = Description of Unknown:hvTR_Q8BB47 target sequence
IRCRSVQKKKERSSQTNKHDENHASSRSDLKERKSNEHEDKAVTKARDFSKLDPLLSPLPLTPEPAIDFADHTDKFYSTPEFNQI

SEQ ID NO: 18860 - protein, 85 aa, unidentified
  REGION 1..85: note = Description of Unknown:hvTR_Q8BB47 target sequence
KQNLHRSKTSLQDTVPISKHTPRAPTKDNSYKKHHDSKDNYPKMKHSPGRTTSKKNTTNSNGHQNFKDVSVKNVSGKATSTSPKS

SEQ ID NO: 18861 - protein, 85 aa, unidentified
  REGION 1..85: note = Description of Unknown:hvTR_Q8BB47 target sequence
KTHHYSSSSDEEGQYKSPVKTITPSPSPYCKLKNPSIMDKNSAKNHTASADKNLTDNSPIRSNLNPTAFNKSNNNKSITNSTSNS

SEQ ID NO: 18862 - protein, 85 aa, unidentified
  REGION 1..85: note = Description of Unknown:hvTR_Q8BB47 target sequence
DECTDKKPNCNSTKNESKDPNRTCGKNSDKHLSKSCTMASKRAPSRASSRTSSRASSRASSRASSRASSRASSRASSRDSSRASS

SEQ ID NO: 18863 - protein, 85 aa, unidentified
  REGION 1..85: note = Description of Unknown:hvTR_Q8BB47 target sequence
RAPSRASSRDSSRASSRDSSRDSNRASSKASSRASSRDSSRASSRDSSRASSKASRKASSRASSRASSRASSKASGKASSKASSR

SEQ ID NO: 18864 - protein, 85 aa, unidentified
  REGION 1..85: note = Description of Unknown:hvTR_Q8BB47 target sequence
ASSRAFSRNSSRASSRASSRASSRASSRASSRASSRDSSRALSRAFGRDSSRASSRASSRDSSRASSKASRKASSRASSRASSRA

SEQ ID NO: 18865 - protein, 85 aa, unidentified
  REGION 1..85: note = Description of Unknown:hvTR_Q8BB47 target sequence
SSRASSRELRQIYCDSNKRQTPPHDTSINTKFEISEIKFRCGEDLNFYKNTAARLQCFNHNDQFYNPRFRPHIRTNRKKSESTND

SEQ ID NO: 18866 - protein, 85 aa, unidentified
  REGION 1..85: note = Description of Unknown:hvTR_Q8BB47 target sequence
TDSESSMSRCKSHCRNSPDSLTIVRRKKHKSGSSSISSSIEENCRSNSHIVTGKEKFTPFYYQSSRTRSSSSSSSSSSASLSCSK

SEQ ID NO: 18867 - protein, 85 aa, unidentified
  REGION 1..85: note = Description of Unknown:hvTR_Q8BB47 target sequence
STLKTCRKTQNRDNKQIKSKSDSKHKTTNMSSDYESNRHADVFRNSPEAGEKFPLHNSSPFNTHEQSNHSENAIDEEQKKAPNIT

SEQ ID NO: 18868 - protein, 85 aa, unidentified
  REGION 1..85: note = Description of Unknown:hvTR_Q8BB47 target sequence
TSHLHQKQNVKLHNTKKCKKKRPRDDDSDSSIKNFCKKRISGAQKTESEVSEIDDLCYRDYVRLKERKVSEKFKIHRGRVATKDF

SEQ ID NO: 18869 - protein, 85 aa, unidentified
  REGION 1..85: note = Description of Unknown:hvTR_Q8BB47 target sequence
QKLFRNTMRAFEYKQIPKKPCNDKNLKEAVYNICCNGLSNNAAIIMYFTRSKKVAQNIKIMQKELMIRPNITVSEAFKMNHAPPK

SEQ ID NO: 18870 - protein, 85 aa, unidentified
  REGION 1..85: note = Description of Unknown:hvTR_Q8BB47 target sequence
YYDKDEIKRFIQLQKQGPQELWDKFENNTTHDLFTRHSDVKTMIIYAATPIDFVGAVKTCNKYAKDNPKEIVLRVCSIIDGDNPI

SEQ ID NO: 18871 - protein, 84 aa, unidentified
  REGION 1..84: note = Description of Unknown:hvTR_Q8BB47 target sequence
WDKFENNTTHDLFTRHSDVKTMIIYAATPIDFVGAVKTCNKYAKDNPKEIVLRVCSIIDGDNPISIYNPISKDFKSKFSTLSKC

SEQ ID NO: 18872 - protein, 85 aa, unidentified
  REGION 1..85: note = Description of Unknown:hvTR_Q8BB47 target sequence
ESIQQILEDSLMCDTSFDDLILPGLESFGLIIPESSNNIESNNVEEGSNEDLKTLAEHKCKQGNDNDVIQSAMKLSGLYCDADIT

SEQ ID NO: 18873 - protein, 85 aa, unidentified
  REGION 1..85: note = Description of Unknown:hvTR_Q8BB47 target sequence
HTQPLSDNTHQDPIYSQETRIFSKTIQDPRIAAQTHRQCTSSASNLPSNESGSTQVRFASELPNQLLQPMYTSHNQNANLQNNFT

SEQ ID NO: 18874 - protein, 85 aa, unidentified
  REGION 1..85: note = Description of Unknown:hvTR_Q8BB47 target sequence
SLPYQPYHDPYRDIESSYRESRNTNRGYDYNFRHHSYRPRGGNGKYNYYNPNSKYQQPYKRCFTRTYNRRGRGHRSYDCSDRSAD

SEQ ID NO: 18875 - protein, 85 aa, unidentified
  REGION 1..85: note = Description of Unknown:hvTR_Q8BB47 target sequence
LPYEHYTYPNYEQQNPDPRMNNYKDFTQLTNKFNFGANDYSMAFSTDSTHVQSDNYNHPTKAQTIPETTKTKKHKATKDNETSRG

SEQ ID NO: 18876 - protein, 85 aa, unidentified
  REGION 1..85: note = Description of Unknown:hvTR_Q8BB47 target sequence
NQVLTSNDAISLSYRPSPIKLDIIKKIYDTDVIPLPKEALTANGSNRDVDIQKYKKAHIRCRSVQKKKERSSQTNKHDENHASSR

SEQ ID NO: 18877 - protein, 85 aa, unidentified
  REGION 1..85: note = Description of Unknown:hvTR_Q8BB47 target sequence
SDLKERKSNEHEDKAVTKARDFSKLDPLLSPLPLTPEPAIDFADHTDKFYSTPEFNQIKQNLHRSKTSLQDTVPISKHTPRAPTK

SEQ ID NO: 18878 - protein, 85 aa, unidentified
  REGION 1..85: note = Description of Unknown:hvTR_Q8BB47 target sequence
DNSYKKHHDSKDNYPKMKHSPGRTTSKKNTTNSNGHQNFKDVSVKNVSGKATSTSPKSKTHHYSSSSDEEGQYKSPVKTITPSPS

SEQ ID NO: 18879 - protein, 85 aa, unidentified
  REGION 1..85: note = Description of Unknown:hvTR_Q8BB47 target sequence
PYCKLKNPSIMDKNSAKNHTASADKNLTDNSPIRSNLNPTAFNKSNNNKSITNSTSNSDECTDKKPNCNSTKNESKDPNRTCGKN

SEQ ID NO: 18880 - protein, 85 aa, unidentified
  REGION 1..85: note = Description of Unknown:hvTR_Q8BB47 target sequence
SDKHLSKSCTMASKRAPSRASSRTSSRASSRASSRASSRASSRASSRASSRDSSRASSRAPSRASSRDSSRASSRDSSRDSNRAS

SEQ ID NO: 18881 - protein, 85 aa, unidentified
  REGION 1..85: note = Description of Unknown:hvTR_Q8BB47 target sequence
SKASSRASSRDSSRASSRDSSRASSKASRKASSRASSRASSRASSKASGKASSKASSRASSRAFSRNSSRASSRASSRASSRASS

SEQ ID NO: 18882 - protein, 85 aa, unidentified
  REGION 1..85: note = Description of Unknown:hvTR_Q8BB47 target sequence
RASSRASSRDSSRALSRAFGRDSSRASSRASSRDSSRASSKASRKASSRASSRASSRASSRASSRELRQIYCDSNKRQTPPHDTS

SEQ ID NO: 18883 - protein, 85 aa, unidentified
  REGION 1..85: note = Description of Unknown:hvTR_Q8BB47 target sequence
INTKFEISEIKFRCGEDLNFYKNTAARLQCFNHNDQFYNPRFRPHIRTNRKKSESTNDTDSESSMSRCKSHCRNSPDSLTIVRRK

SEQ ID NO: 18884 - protein, 85 aa, unidentified
  REGION 1..85: note = Description of Unknown:hvTR_Q8BB47 target sequence
KHKSGSSSISSSIEENCRSNSHIVTGKEKFTPFYYQSSRTRSSSSSSSSSSASLSCSKSTLKTCRKTQNRDNKQIKSKSDSKHKT

SEQ ID NO: 18885 - protein, 85 aa, unidentified
  REGION 1..85: note = Description of Unknown:hvTR_Q8BB47 target sequence
TNMSSDYESNRHADVFRNSPEAGEKFPLHNSSPFNTHEQSNHSENAIDEEQKKAPNITTSHLHQKQNVKLHNTKKCKKKRPRDDD

SEQ ID NO: 18886 - protein, 85 aa, unidentified
  REGION 1..85: note = Description of Unknown:hvTR_Q8BB47 target sequence
SDSSIKNFCKKRISGAQKTESEVSEIDDLCYRDYVRLKERKVSEKFKIHRGRVATKDFQKLFRNTMRAFEYKQIPKKPCNDKNLK

SEQ ID NO: 18887 - protein, 85 aa, unidentified
  REGION 1..85: note = Description of Unknown:hvTR_Q8BB47 target sequence
EAVYNICCNGLSNNAAIIMYFTRSKKVAQNIKIMQKELMIRPNITVSEAFKMNHAPPKYYDKDEIKRFIQLQKQGPQELWDKFEN

SEQ ID NO: 18888 - protein, 85 aa, unidentified
  REGION 1..85: note = Description of Unknown:hvTR_G3G929 target sequence
ADDLFDFIETEGNFSQLLAAAAAAAEEEGIASGPDGGSQGSRRRGSSGEDLLFGPGGLFSDDAAEAEAEAAVLAAAAGATRPPRP

SEQ ID NO: 18889 - protein, 85 aa, unidentified
  REGION 1..85: note = Description of Unknown:hvTR_G3G929 target sequence
PSAQQQQQPRRGSGEIVVLDDEDEEEDEPGSPAAGSPGRALHQGSEHGHLVLGPRSRAGSGPRPPTPAALAAAEAGAPGGPGRSS

SEQ ID NO: 18890 - protein, 85 aa, unidentified
  REGION 1..85: note = Description of Unknown:hvTR_G3G929 target sequence
PSAASPASSSGSSGPSAAPRRWSPARGDPVGEPGPAARPRTPAPPAQPAAVAAAPARRGSASPASPAAGPVSAPGGGGAPSAGGD

SEQ ID NO: 18891 - protein, 85 aa, unidentified
  REGION 1..85: note = Description of Unknown:hvTR_G3G929 target sequence
RGRHHHQHREPLLDEPAAARRLDPRPLGARSPVSSNPNSSSNSATTVAVEPVARGPEKDEDGLGLAGDGGAPLQRQPRRRRAGEG

SEQ ID NO: 18892 - protein, 85 aa, unidentified
  REGION 1..85: note = Description of Unknown:hvTR_G3G929 target sequence
ALRRGRGFSSSSSGGSDSDLSPARSPSAPRAPAAAAAARRSASSSSSSSSSSSSSSSSEGEEDEGVRPGAPLARAGPPPSPPAPA

SEQ ID NO: 18893 - protein, 85 aa, unidentified
  REGION 1..85: note = Description of Unknown:hvTR_G3G929 target sequence
AAPRPSASSASAASSSAAASPAPAPEPARPPRRKRRSTNNHLSLMADGPPPTDGPLLTPLGEPWPGSDPPADGRVRYGGAGDSRE

SEQ ID NO: 18894 - protein, 85 aa, unidentified
  REGION 1..85: note = Description of Unknown:hvTR_G3G929 target sequence
GLWDEDDVRQAAARYRAAAGPVPVFIPEMGDSRKQHEALVRLIYSGAAGEAMSWLQNPRMQAPDQRFNQFCQRRVHAPHGHGSFI

SEQ ID NO: 18895 - protein, 85 aa, unidentified
  REGION 1..85: note = Description of Unknown:hvTR_G3G929 target sequence
TGSVTPPLPHIGDAMAAQDPLWALPHAVSAVAMSRRYDRTQKTFILQSLRRAYADMAYPGRAADPRAGEATVEALCARVRAAFAA

SEQ ID NO: 18896 - protein, 85 aa, unidentified
  REGION 1..85: note = Description of Unknown:hvTR_G3G929 target sequence
AQPGRVPRELADACVLACRGVLERLLPCPLRLPAPARAPAALGPACLEEVTAALLALRDAIPGAGPAERQQAADSVALVARTVAP

SEQ ID NO: 18897 - protein, 85 aa, unidentified
  REGION 1..85: note = Description of Unknown:hvTR_G3G929 target sequence
LVRYSVDGARAREAAWTYAAALFAPANVAGARLAEAAARPGPAEPAPGLPPLWPEQPGLVVPAPAPAAAGAPSGLPGSGPSSPAS

SEQ ID NO: 18898 - protein, 85 aa, unidentified
  REGION 1..85: note = Description of Unknown:hvTR_G3G929 target sequence
TKSGSSTKSSSGTKSGLSGSSGYASSPAAGPDPAPERRKKKRRAPGARRPGDGEEDEGLSGSALRGDGHGHRDDEEDRGPRRKRR

SEQ ID NO: 18899 - protein, 85 aa, unidentified
  REGION 1..85: note = Description of Unknown:hvTR_G3G929 target sequence
SLGLGPAPDPAPALLSSSSSSSSSSEDDRLRRPLGPMPEHPAPDGGFRRVPAGETHTPRPSAAALAAYCPPEVARALVDQEVFPE

SEQ ID NO: 18900 - protein, 85 aa, unidentified
  REGION 1..85: note = Description of Unknown:hvTR_G3G929 target sequence
LWRPALTFDPAALAHIAARRGAAGAPLRRRAAWMRQIADPEDVRVVVLYDPLPHEELCAEPAEGAPRPAWDPRRGGLSALLAAFA

SEQ ID NO: 18901 - protein, 85 aa, unidentified
  REGION 1..85: note = Description of Unknown:hvTR_G3G929 target sequence
HRLCTPDSHAWAGNWTGRPDIGRLNAQGVLLLSARDLGFAGAVEYLCSRLGAARRRLIVLDTIEDWPADGPAVGDYHVYVRARLD

SEQ ID NO: 18902 - protein, 85 aa, unidentified
  REGION 1..85: note = Description of Unknown:hvTR_G3G929 target sequence
PAAQCAVRWPECRELRAAVLDSSSIVGPACFARVEASFARLHPGAEPLRLCRQDNVRYTVSTRAGPRTPVPLPPRAYRQRVLPTV

SEQ ID NO: 18903 - protein, 85 aa, unidentified
  REGION 1..85: note = Description of Unknown:hvTR_G3G929 target sequence
DGCKDMARQRSALGLGDPDFDAGAAFGHRAANRWGLGAPLRPVFVSCGRRGLAELRGPEGLPAELRAFCAAALLEPDAEAAPLVL

SEQ ID NO: 18904 - protein, 85 aa, unidentified
  REGION 1..85: note = Description of Unknown:hvTR_G3G929 target sequence
APGALAAAGAPPAVRWDFAPFETSVRAAAGGAVETHRPSGARGPGEDGEDSAAVEIVGFRGGDGRPRGPLGPIKVEAISDDEEAE

SEQ ID NO: 18905 - protein, 84 aa, unidentified
  REGION 1..84: note = Description of Unknown:hvTR_G3G929 target sequence
PAVRWDFAPFETSVRAAAGGAVETHRPSGARGPGEDGEDSAAVEIVGFRGGDGRPRGPLGPIKVEAISDDEEAEDAGNPYLLLR

SEQ ID NO: 18906 - protein, 85 aa, unidentified
  REGION 1..85: note = Description of Unknown:hvTR_G3G929 target sequence
EGIASGPDGGSQGSRRRGSSGEDLLFGPGGLFSDDAAEAEAEAAVLAAAAGATRPPRPPSAQQQQQPRRGSGEIVVLDDEDEEED

SEQ ID NO: 18907 - protein, 85 aa, unidentified
  REGION 1..85: note = Description of Unknown:hvTR_G3G929 target sequence
EPGSPAAGSPGRALHQGSEHGHLVLGPRSRAGSGPRPPTPAALAAAEAGAPGGPGRSSPSAASPASSSGSSGPSAAPRRWSPARG

SEQ ID NO: 18908 - protein, 85 aa, unidentified
  REGION 1..85: note = Description of Unknown:hvTR_G3G929 target sequence
DPVGEPGPAARPRTPAPPAQPAAVAAAPARRGSASPASPAAGPVSAPGGGGAPSAGGDRGRHHHQHREPLLDEPAAARRLDPRPL

SEQ ID NO: 18909 - protein, 85 aa, unidentified
  REGION 1..85: note = Description of Unknown:hvTR_G3G929 target sequence
GARSPVSSNPNSSSNSATTVAVEPVARGPEKDEDGLGLAGDGGAPLQRQPRRRRAGEGALRRGRGFSSSSSGGSDSDLSPARSPS

SEQ ID NO: 18910 - protein, 85 aa, unidentified
  REGION 1..85: note = Description of Unknown:hvTR_G3G929 target sequence
APRAPAAAAAARRSASSSSSSSSSSSSSSSSEGEEDEGVRPGAPLARAGPPPSPPAPAAAPRPSASSASAASSSAAASPAPAPEP

SEQ ID NO: 18911 - protein, 85 aa, unidentified
  REGION 1..85: note = Description of Unknown:hvTR_G3G929 target sequence
ARPPRRKRRSTNNHLSLMADGPPPTDGPLLTPLGEPWPGSDPPADGRVRYGGAGDSREGLWDEDDVRQAAARYRAAAGPVPVFIP

SEQ ID NO: 18912 - protein, 85 aa, unidentified
  REGION 1..85: note = Description of Unknown:hvTR_G3G929 target sequence
EMGDSRKQHEALVRLIYSGAAGEAMSWLQNPRMQAPDQRFNQFCQRRVHAPHGHGSFITGSVTPPLPHIGDAMAAQDPLWALPHA

SEQ ID NO: 18913 - protein, 85 aa, unidentified
  REGION 1..85: note = Description of Unknown:hvTR_G3G929 target sequence
VSAVAMSRRYDRTQKTFILQSLRRAYADMAYPGRAADPRAGEATVEALCARVRAAFAAAQPGRVPRELADACVLACRGVLERLLP

SEQ ID NO: 18914 - protein, 85 aa, unidentified
  REGION 1..85: note = Description of Unknown:hvTR_G3G929 target sequence
CPLRLPAPARAPAALGPACLEEVTAALLALRDAIPGAGPAERQQAADSVALVARTVAPLVRYSVDGARAREAAWTYAAALFAPAN

SEQ ID NO: 18915 - protein, 85 aa, unidentified
  REGION 1..85: note = Description of Unknown:hvTR_G3G929 target sequence
VAGARLAEAAARPGPAEPAPGLPPLWPEQPGLVVPAPAPAAAGAPSGLPGSGPSSPASTKSGSSTKSSSGTKSGLSGSSGYASSP

SEQ ID NO: 18916 - protein, 85 aa, unidentified
  REGION 1..85: note = Description of Unknown:hvTR_G3G929 target sequence
AAGPDPAPERRKKKRRAPGARRPGDGEEDEGLSGSALRGDGHGHRDDEEDRGPRRKRRSLGLGPAPDPAPALLSSSSSSSSSSED

SEQ ID NO: 18917 - protein, 85 aa, unidentified
  REGION 1..85: note = Description of Unknown:hvTR_G3G929 target sequence
DRLRRPLGPMPEHPAPDGGFRRVPAGETHTPRPSAAALAAYCPPEVARALVDQEVFPELWRPALTFDPAALAHIAARRGAAGAPL

SEQ ID NO: 18918 - protein, 85 aa, unidentified
  REGION 1..85: note = Description of Unknown:hvTR_G3G929 target sequence
RRRAAWMRQIADPEDVRVVVLYDPLPHEELCAEPAEGAPRPAWDPRRGGLSALLAAFAHRLCTPDSHAWAGNWTGRPDIGRLNAQ

SEQ ID NO: 18919 - protein, 85 aa, unidentified
  REGION 1..85: note = Description of Unknown:hvTR_G3G929 target sequence
GVLLLSARDLGFAGAVEYLCSRLGAARRRLIVLDTIEDWPADGPAVGDYHVYVRARLDPAAQCAVRWPECRELRAAVLDSSSIVG

SEQ ID NO: 18920 - protein, 85 aa, unidentified
  REGION 1..85: note = Description of Unknown:hvTR_G3G929 target sequence
PACFARVEASFARLHPGAEPLRLCRQDNVRYTVSTRAGPRTPVPLPPRAYRQRVLPTVDGCKDMARQRSALGLGDPDFDAGAAFG

SEQ ID NO: 18921 - protein, 85 aa, unidentified
  REGION 1..85: note = Description of Unknown:hvTR_G3G929 target sequence
HRAANRWGLGAPLRPVFVSCGRRGLAELRGPEGLPAELRAFCAAALLEPDAEAAPLVLAPGALAAAGAPPAVRWDFAPFETSVRA

SEQ ID NO: 18922 - protein, 85 aa, unidentified
  REGION 1..85: note = Description of Unknown:cds_NC_010438.1_cds_YP_001718612.1_3 target sequence
KSLLVLSLLALLATLSVNAQVTGEGGVAEGNYWVNASCAGWSYFYALKLGLPPNASAIVTGYLPKPKGWICPRFNGAGIYTRNNA

SEQ ID NO: 18923 - protein, 85 aa, unidentified
  REGION 1..85: note = Description of Unknown:cds_NC_010438.1_cds_YP_001718612.1_3 target sequence
NAVFVMYRTKALAFEIGVSSSAGGEQYSAYMAQQNGKYLVLRICKWQNGTLAAPTLQSTSGKDCIVNVKVDNHMFYHAAHDIVGM

SEQ ID NO: 18924 - protein, 85 aa, unidentified
  REGION 1..85: note = Description of Unknown:cds_NC_010438.1_cds_YP_001718612.1_3 target sequence
SWSGDAVRLYTQTDTKTYYIPNSWDRVSIRCPDKFSCSSQIVTKAITVNVTTFANGTIDKYAICDNCNGYPAHIFPVSEGGLIPA

SEQ ID NO: 18925 - protein, 85 aa, unidentified
  REGION 1..85: note = Description of Unknown:cds_NC_010438.1_cds_YP_001718612.1_3 target sequence
DFNFSNWFLLTNSSTIVDGRIVSEQPVLLMCLWAVPGLMSTNSFVYFNGTAPNKQCNGYATDSAFEALRFSLNFTDERVFAGSGS

SEQ ID NO: 18926 - protein, 85 aa, unidentified
  REGION 1..85: note = Description of Unknown:cds_NC_010438.1_cds_YP_001718612.1_3 target sequence
VVLLVSGLQYKFSCTNNSEAVIDSGIPFGNVVEPFYCFVSINGTSIFVGMLPAVLREIVITRYGSIYLNGFSIFQGPPIQGVLFN

SEQ ID NO: 18927 - protein, 85 aa, unidentified
  REGION 1..85: note = Description of Unknown:cds_NC_010438.1_cds_YP_001718612.1_3 target sequence
VTNRGATDLWTVALSNFTEVLAEVQSTAIKALLYCDDPLSQLKCQQLQFSLPDGFYATASLFQHELPRTFVTLPRHFTHSWINLR

SEQ ID NO: 18928 - protein, 85 aa, unidentified
  REGION 1..85: note = Description of Unknown:cds_NC_010438.1_cds_YP_001718612.1_3 target sequence
IKWKNGVCYNCPPASSWIDFVTFNSNGTENVLPERTLCVNTTQFTTNLTLIEEAFSYSTPVVVRADDCPFDFQSLNNYLTFGSIC

SEQ ID NO: 18929 - protein, 85 aa, unidentified
  REGION 1..85: note = Description of Unknown:cds_NC_010438.1_cds_YP_001718612.1_3 target sequence
FSLNGTIGKGCTLGIYKRASSQYIPIWNVWVAYTSGDNILGVREPNVGVRDQSVVHQNVCTSYTIFGHSGRGIIRPANISYIAGV

SEQ ID NO: 18930 - protein, 85 aa, unidentified
  REGION 1..85: note = Description of Unknown:cds_NC_010438.1_cds_YP_001718612.1_3 target sequence
YYTAASGQLLGFKNTTTGEVFSVTPCNPSQQAVVVKDRLVGVMSSTSTVSIPFNNTIPTPSFYYHSNATSSCDDPSVVYSSIGIC

SEQ ID NO: 18931 - protein, 85 aa, unidentified
  REGION 1..85: note = Description of Unknown:cds_NC_010438.1_cds_YP_001718612.1_3 target sequence
DDGGITFVNSTRVRGEPDPAISMGNISVPSNFTVSIQVEYLQMSIRPVSIDCAMYVCNGNPHCTRLLQQYISACRTIEEALQLSA

SEQ ID NO: 18932 - protein, 85 aa, unidentified
  REGION 1..85: note = Description of Unknown:cds_NC_010438.1_cds_YP_001718612.1_3 target sequence
RLESFEVNSMLTVSETALDLVNISTFGGDYNLTALLPQGGGKRSVIEDILFDKVVTSGLGTVDEDYKRCTNGIGIADVPCAQYYN

SEQ ID NO: 18933 - protein, 85 aa, unidentified
  REGION 1..85: note = Description of Unknown:cds_NC_010438.1_cds_YP_001718612.1_3 target sequence
GIMVLPGVVDEEKMSIYTASLLGGMTMGGFTPVAALPFALSVQSRLNYVALQTDVLQKNQQILANAFNSAIGNITVAFDQVTTAV

SEQ ID NO: 18934 - protein, 85 aa, unidentified
  REGION 1..85: note = Description of Unknown:cds_NC_010438.1_cds_YP_001718612.1_3 target sequence
QQTSDAIKTVASALNKVQSVVNSQGQALHQLTKQLASNFQAISASIEDIYNRLDGLAADANVDRLITGRLAALNAFVTQTLTKYT

SEQ ID NO: 18935 - protein, 85 aa, unidentified
  REGION 1..85: note = Description of Unknown:cds_NC_010438.1_cds_YP_001718612.1_3 target sequence
EVRASRLLAQEKINECVKSQSTRYGFCGNGTHLFSIPNAAPEGIMLFHTVLVPTEYVSVTAWSGYCHNGVGYAVKDVGNSLFQFN

SEQ ID NO: 18936 - protein, 85 aa, unidentified
  REGION 1..85: note = Description of Unknown:cds_NC_010438.1_cds_YP_001718612.1_3 target sequence
NTFYITPRNMYQPRTPTSADFIRISGCNVVYVNITDEQLPQVQPEFIDVNKTLEELMSRLPNNTGPNLPLDIFNQTYLNISAEID

SEQ ID NO: 18937 - protein, 85 aa, unidentified
  REGION 1..85: note = Description of Unknown:cds_NC_010438.1_cds_YP_001718612.1_3 target sequence
ALENKSLELQATADKLQLTIEQLNATLVDLEWLNRFEQYVKWPWWVWLTMIIALVLLTGLMLWCCLATGCCGCCSCMASTLDFRG

SEQ ID NO: 18938 - protein, 84 aa, unidentified
  REGION 1..84: note = Description of Unknown:cds_NC_010438.1_cds_YP_001718612.1_3 target sequence
LQLTIEQLNATLVDLEWLNRFEQYVKWPWWVWLTMIIALVLLTGLMLWCCLATGCCGCCSCMASTLDFRGSRLQQYEVEKVHIQ

SEQ ID NO: 18939 - protein, 85 aa, unidentified
  REGION 1..85: note = Description of Unknown:cds_NC_010438.1_cds_YP_001718612.1_3 target sequence
AEGNYWVNASCAGWSYFYALKLGLPPNASAIVTGYLPKPKGWICPRFNGAGIYTRNNANAVFVMYRTKALAFEIGVSSSAGGEQY

SEQ ID NO: 18940 - protein, 85 aa, unidentified
  REGION 1..85: note = Description of Unknown:cds_NC_010438.1_cds_YP_001718612.1_3 target sequence
SAYMAQQNGKYLVLRICKWQNGTLAAPTLQSTSGKDCIVNVKVDNHMFYHAAHDIVGMSWSGDAVRLYTQTDTKTYYIPNSWDRV

SEQ ID NO: 18941 - protein, 85 aa, unidentified
  REGION 1..85: note = Description of Unknown:cds_NC_010438.1_cds_YP_001718612.1_3 target sequence
SIRCPDKFSCSSQIVTKAITVNVTTFANGTIDKYAICDNCNGYPAHIFPVSEGGLIPADFNFSNWFLLTNSSTIVDGRIVSEQPV

SEQ ID NO: 18942 - protein, 85 aa, unidentified
  REGION 1..85: note = Description of Unknown:cds_NC_010438.1_cds_YP_001718612.1_3 target sequence
LLMCLWAVPGLMSTNSFVYFNGTAPNKQCNGYATDSAFEALRFSLNFTDERVFAGSGSVVLLVSGLQYKFSCTNNSEAVIDSGIP

SEQ ID NO: 18943 - protein, 85 aa, unidentified
  REGION 1..85: note = Description of Unknown:cds_NC_010438.1_cds_YP_001718612.1_3 target sequence
FGNVVEPFYCFVSINGTSIFVGMLPAVLREIVITRYGSIYLNGFSIFQGPPIQGVLFNVTNRGATDLWTVALSNFTEVLAEVQST

SEQ ID NO: 18944 - protein, 85 aa, unidentified
  REGION 1..85: note = Description of Unknown:cds_NC_010438.1_cds_YP_001718612.1_3 target sequence
AIKALLYCDDPLSQLKCQQLQFSLPDGFYATASLFQHELPRTFVTLPRHFTHSWINLRIKWKNGVCYNCPPASSWIDFVTFNSNG

SEQ ID NO: 18945 - protein, 85 aa, unidentified
  REGION 1..85: note = Description of Unknown:cds_NC_010438.1_cds_YP_001718612.1_3 target sequence
TENVLPERTLCVNTTQFTTNLTLIEEAFSYSTPVVVRADDCPFDFQSLNNYLTFGSICFSLNGTIGKGCTLGIYKRASSQYIPIW

SEQ ID NO: 18946 - protein, 85 aa, unidentified
  REGION 1..85: note = Description of Unknown:cds_NC_010438.1_cds_YP_001718612.1_3 target sequence
NVWVAYTSGDNILGVREPNVGVRDQSVVHQNVCTSYTIFGHSGRGIIRPANISYIAGVYYTAASGQLLGFKNTTTGEVFSVTPCN

SEQ ID NO: 18947 - protein, 85 aa, unidentified
  REGION 1..85: note = Description of Unknown:cds_NC_010438.1_cds_YP_001718612.1_3 target sequence
PSQQAVVVKDRLVGVMSSTSTVSIPFNNTIPTPSFYYHSNATSSCDDPSVVYSSIGICDDGGITFVNSTRVRGEPDPAISMGNIS

SEQ ID NO: 18948 - protein, 85 aa, unidentified
  REGION 1..85: note = Description of Unknown:cds_NC_010438.1_cds_YP_001718612.1_3 target sequence
VPSNFTVSIQVEYLQMSIRPVSIDCAMYVCNGNPHCTRLLQQYISACRTIEEALQLSARLESFEVNSMLTVSETALDLVNISTFG

SEQ ID NO: 18949 - protein, 85 aa, unidentified
  REGION 1..85: note = Description of Unknown:cds_NC_010438.1_cds_YP_001718612.1_3 target sequence
GDYNLTALLPQGGGKRSVIEDILFDKVVTSGLGTVDEDYKRCTNGIGIADVPCAQYYNGIMVLPGVVDEEKMSIYTASLLGGMTM

SEQ ID NO: 18950 - protein, 85 aa, unidentified
  REGION 1..85: note = Description of Unknown:cds_NC_010438.1_cds_YP_001718612.1_3 target sequence
GGFTPVAALPFALSVQSRLNYVALQTDVLQKNQQILANAFNSAIGNITVAFDQVTTAVQQTSDAIKTVASALNKVQSVVNSQGQA

SEQ ID NO: 18951 - protein, 85 aa, unidentified
  REGION 1..85: note = Description of Unknown:cds_NC_010438.1_cds_YP_001718612.1_3 target sequence
LHQLTKQLASNFQAISASIEDIYNRLDGLAADANVDRLITGRLAALNAFVTQTLTKYTEVRASRLLAQEKINECVKSQSTRYGFC

SEQ ID NO: 18952 - protein, 85 aa, unidentified
  REGION 1..85: note = Description of Unknown:cds_NC_010438.1_cds_YP_001718612.1_3 target sequence
GNGTHLFSIPNAAPEGIMLFHTVLVPTEYVSVTAWSGYCHNGVGYAVKDVGNSLFQFNNTFYITPRNMYQPRTPTSADFIRISGC

SEQ ID NO: 18953 - protein, 85 aa, unidentified
  REGION 1..85: note = Description of Unknown:cds_NC_010438.1_cds_YP_001718612.1_3 target sequence
NVVYVNITDEQLPQVQPEFIDVNKTLEELMSRLPNNTGPNLPLDIFNQTYLNISAEIDALENKSLELQATADKLQLTIEQLNATL

SEQ ID NO: 18954 - protein, 85 aa, unidentified
  REGION 1..85: note = Description of Unknown:cds_NC_019843.3_cds_YP_009047204.1_3 target sequence
IHSVFLLMFLLTPTESYVDVGPDSVKSACIEVDIQQTFFDKTWPRPIDVSKADGIIYPQGRTYSNITITYQGLFPYQGDHGDMYV

SEQ ID NO: 18955 - protein, 85 aa, unidentified
  REGION 1..85: note = Description of Unknown:cds_NC_019843.3_cds_YP_009047204.1_3 target sequence
YSAGHATGTTPQKLFVANYSQDVKQFANGFVVRIGAAANSTGTVIISPSTSATIRKIYPAFMLGSSVGNFSDGKMGRFFNHTLVL

SEQ ID NO: 18956 - protein, 85 aa, unidentified
  REGION 1..85: note = Description of Unknown:cds_NC_019843.3_cds_YP_009047204.1_3 target sequence
LPDGCGTLLRAFYCILEPRSGNHCPAGNSYTSFATYHTPATDCSDGNYNRNASLNSFKEYFNLRNCTFMYTYNITEDEILEWFGI

SEQ ID NO: 18957 - protein, 85 aa, unidentified
  REGION 1..85: note = Description of Unknown:cds_NC_019843.3_cds_YP_009047204.1_3 target sequence
TQTAQGVHLFSSRYVDLYGGNMFQFATLPVYDTIKYYSIIPHSIRSIQSDRKAWAAFYVYKLQPLTFLLDFSVDGYIRRAIDCGF

SEQ ID NO: 18958 - protein, 85 aa, unidentified
  REGION 1..85: note = Description of Unknown:cds_NC_019843.3_cds_YP_009047204.1_3 target sequence
NDLSQLHCSYESFDVESGVYSVSSFEAKPSGSVVEQAEGVECDFSPLLSGTPPQVYNFKRLVFTNCNYNLTKLLSLFSVNDFTCS

SEQ ID NO: 18959 - protein, 85 aa, unidentified
  REGION 1..85: note = Description of Unknown:cds_NC_019843.3_cds_YP_009047204.1_3 target sequence
QISPAAIASNCYSSLILDYFSYPLSMKSDLSVSSAGPISQFNYKQSFSNPTCLILATVPHNLTTITKPLKYSYINKCSRLLSDDR

SEQ ID NO: 18960 - protein, 85 aa, unidentified
  REGION 1..85: note = Description of Unknown:cds_NC_019843.3_cds_YP_009047204.1_3 target sequence
TEVPQLVNANQYSPCVSIVPSTVWEDGDYYRKQLSPLEGGGWLVASGSTVAMTEQLQMGFGITVQYGTDTNSVCPKLEFANDTKI

SEQ ID NO: 18961 - protein, 85 aa, unidentified
  REGION 1..85: note = Description of Unknown:cds_NC_019843.3_cds_YP_009047204.1_3 target sequence
ASQLGNCVEYSLYGVSGRGVFQNCTAVGVRQQRFVYDAYQNLVGYYSDDGNYYCLRACVSVPVSVIYDKETKTHATLFGSVACEH

SEQ ID NO: 18962 - protein, 85 aa, unidentified
  REGION 1..85: note = Description of Unknown:cds_NC_019843.3_cds_YP_009047204.1_3 target sequence
ISSTMSQYSRSTRSMLKRRDSTYGPLQTPVGCVLGLVNSSLFVEDCKLPLGQSLCALPDTPSTLTPRSVRSVPGEMRLASIAFNH

SEQ ID NO: 18963 - protein, 85 aa, unidentified
  REGION 1..85: note = Description of Unknown:cds_NC_019843.3_cds_YP_009047204.1_3 target sequence
PIQVDQLNSSYFKLSIPTNFSFGVTQEYIQTTIQKVTVDCKQYVCNGFQKCEQLLREYGQFCSKINQALHGANLRQDDSVRNLFA

SEQ ID NO: 18964 - protein, 85 aa, unidentified
  REGION 1..85: note = Description of Unknown:cds_NC_019843.3_cds_YP_009047204.1_3 target sequence
SVKSSQSSPIIPGFGGDFNLTLLEPVSISTGSRSARSAIEDLLFDKVTIADPGYMQGYDDCMQQGPASARDLICAQYVAGYKVLP

SEQ ID NO: 18965 - protein, 85 aa, unidentified
  REGION 1..85: note = Description of Unknown:cds_NC_019843.3_cds_YP_009047204.1_3 target sequence
PLMDVNMEAAYTSSLLGSIAGVGWTAGLSSFAAIPFAQSIFYRLNGVGITQQVLSENQKLIANKFNQALGAMQTGFTTTNEAFQK

SEQ ID NO: 18966 - protein, 85 aa, unidentified
  REGION 1..85: note = Description of Unknown:cds_NC_019843.3_cds_YP_009047204.1_3 target sequence
VQDAVNNNAQALSKLASELSNTFGAISASIGDIIQRLDVLEQDAQIDRLINGRLTTLNAFVAQQLVRSESAALSAQLAKDKVNEC

SEQ ID NO: 18967 - protein, 85 aa, unidentified
  REGION 1..85: note = Description of Unknown:cds_NC_019843.3_cds_YP_009047204.1_3 target sequence
VKAQSKRSGFCGQGTHIVSFVVNAPNGLYFMHVGYYPSNHIEVVSAYGLCDAANPTNCIAPVNGYFIKTNNTRIVDEWSYTGSSF

SEQ ID NO: 18968 - protein, 85 aa, unidentified
  REGION 1..85: note = Description of Unknown:cds_NC_019843.3_cds_YP_009047204.1_3 target sequence
YAPEPITSLNTKYVAPQVTYQNISTNLPPPLLGNSTGIDFQDELDEFFKNVSTSIPNFGSLTQINTTLLDLTYEMLSLQQVVKAL

SEQ ID NO: 18969 - protein, 84 aa, unidentified
  REGION 1..84: note = Description of Unknown:cds_NC_019843.3_cds_YP_009047204.1_3 target sequence
QQVVKALNESYIDLKELGNYTYYNKWPWYIWLGFIAGLVALALCVFFILCCTGCGTNCMGKLKCNRCCDRYEEYDLEPHKVHVH

SEQ ID NO: 18970 - protein, 85 aa, unidentified
  REGION 1..85: note = Description of Unknown:cds_NC_019843.3_cds_YP_009047204.1_3 target sequence
ACIEVDIQQTFFDKTWPRPIDVSKADGIIYPQGRTYSNITITYQGLFPYQGDHGDMYVYSAGHATGTTPQKLFVANYSQDVKQFA

SEQ ID NO: 18971 - protein, 85 aa, unidentified
  REGION 1..85: note = Description of Unknown:cds_NC_019843.3_cds_YP_009047204.1_3 target sequence
NGFVVRIGAAANSTGTVIISPSTSATIRKIYPAFMLGSSVGNFSDGKMGRFFNHTLVLLPDGCGTLLRAFYCILEPRSGNHCPAG

SEQ ID NO: 18972 - protein, 85 aa, unidentified
  REGION 1..85: note = Description of Unknown:cds_NC_019843.3_cds_YP_009047204.1_3 target sequence
NSYTSFATYHTPATDCSDGNYNRNASLNSFKEYFNLRNCTFMYTYNITEDEILEWFGITQTAQGVHLFSSRYVDLYGGNMFQFAT

SEQ ID NO: 18973 - protein, 85 aa, unidentified
  REGION 1..85: note = Description of Unknown:cds_NC_019843.3_cds_YP_009047204.1_3 target sequence
LPVYDTIKYYSIIPHSIRSIQSDRKAWAAFYVYKLQPLTFLLDFSVDGYIRRAIDCGFNDLSQLHCSYESFDVESGVYSVSSFEA

SEQ ID NO: 18974 - protein, 85 aa, unidentified
  REGION 1..85: note = Description of Unknown:cds_NC_019843.3_cds_YP_009047204.1_3 target sequence
KPSGSVVEQAEGVECDFSPLLSGTPPQVYNFKRLVFTNCNYNLTKLLSLFSVNDFTCSQISPAAIASNCYSSLILDYFSYPLSMK

SEQ ID NO: 18975 - protein, 85 aa, unidentified
  REGION 1..85: note = Description of Unknown:cds_NC_019843.3_cds_YP_009047204.1_3 target sequence
SDLSVSSAGPISQFNYKQSFSNPTCLILATVPHNLTTITKPLKYSYINKCSRLLSDDRTEVPQLVNANQYSPCVSIVPSTVWEDG

SEQ ID NO: 18976 - protein, 85 aa, unidentified
  REGION 1..85: note = Description of Unknown:cds_NC_019843.3_cds_YP_009047204.1_3 target sequence
DYYRKQLSPLEGGGWLVASGSTVAMTEQLQMGFGITVQYGTDTNSVCPKLEFANDTKIASQLGNCVEYSLYGVSGRGVFQNCTAV

SEQ ID NO: 18977 - protein, 85 aa, unidentified
  REGION 1..85: note = Description of Unknown:cds_NC_019843.3_cds_YP_009047204.1_3 target sequence
GVRQQRFVYDAYQNLVGYYSDDGNYYCLRACVSVPVSVIYDKETKTHATLFGSVACEHISSTMSQYSRSTRSMLKRRDSTYGPLQ

SEQ ID NO: 18978 - protein, 85 aa, unidentified
  REGION 1..85: note = Description of Unknown:cds_NC_019843.3_cds_YP_009047204.1_3 target sequence
TPVGCVLGLVNSSLFVEDCKLPLGQSLCALPDTPSTLTPRSVRSVPGEMRLASIAFNHPIQVDQLNSSYFKLSIPTNFSFGVTQE

SEQ ID NO: 18979 - protein, 85 aa, unidentified
  REGION 1..85: note = Description of Unknown:cds_NC_019843.3_cds_YP_009047204.1_3 target sequence
YIQTTIQKVTVDCKQYVCNGFQKCEQLLREYGQFCSKINQALHGANLRQDDSVRNLFASVKSSQSSPIIPGFGGDFNLTLLEPVS

SEQ ID NO: 18980 - protein, 85 aa, unidentified
  REGION 1..85: note = Description of Unknown:cds_NC_019843.3_cds_YP_009047204.1_3 target sequence
ISTGSRSARSAIEDLLFDKVTIADPGYMQGYDDCMQQGPASARDLICAQYVAGYKVLPPLMDVNMEAAYTSSLLGSIAGVGWTAG

SEQ ID NO: 18981 - protein, 85 aa, unidentified
  REGION 1..85: note = Description of Unknown:cds_NC_019843.3_cds_YP_009047204.1_3 target sequence
LSSFAAIPFAQSIFYRLNGVGITQQVLSENQKLIANKFNQALGAMQTGFTTTNEAFQKVQDAVNNNAQALSKLASELSNTFGAIS

SEQ ID NO: 18982 - protein, 85 aa, unidentified
  REGION 1..85: note = Description of Unknown:cds_NC_019843.3_cds_YP_009047204.1_3 target sequence
ASIGDIIQRLDVLEQDAQIDRLINGRLTTLNAFVAQQLVRSESAALSAQLAKDKVNECVKAQSKRSGFCGQGTHIVSFVVNAPNG

SEQ ID NO: 18983 - protein, 85 aa, unidentified
  REGION 1..85: note = Description of Unknown:cds_NC_019843.3_cds_YP_009047204.1_3 target sequence
LYFMHVGYYPSNHIEVVSAYGLCDAANPTNCIAPVNGYFIKTNNTRIVDEWSYTGSSFYAPEPITSLNTKYVAPQVTYQNISTNL

SEQ ID NO: 18984 - protein, 85 aa, unidentified
  REGION 1..85: note = Description of Unknown:cds_NC_019843.3_cds_YP_009047204.1_3 target sequence
PPPLLGNSTGIDFQDELDEFFKNVSTSIPNFGSLTQINTTLLDLTYEMLSLQQVVKALNESYIDLKELGNYTYYNKWPWYIWLGF

SEQ ID NO: 18985 - protein, 85 aa, unidentified
  REGION 1..85: note = Description of Unknown:cds_NC_034440.1_cds_YP_009361857.1_3 target sequence
TYSVSLLMCLLTFIGANAKIVSIPGGVGTGACPQVDMQPSYFIKHNWPEPIDMNKADGVIYPNGRTYSNITLQTTNLFPRNGDLG

SEQ ID NO: 18986 - protein, 85 aa, unidentified
  REGION 1..85: note = Description of Unknown:cds_NC_034440.1_cds_YP_009361857.1_3 target sequence
TQYVYSASNEKSRTSNVAFISNYSYYGNPFGDGIVIRIGQNSNKTGSVIVGTAQTTIKKIYPALMLGSSFGNFSVNNKSGAYFNH

SEQ ID NO: 18987 - protein, 85 aa, unidentified
  REGION 1..85: note = Description of Unknown:cds_NC_034440.1_cds_YP_009361857.1_3 target sequence
TLLILPSKCGTVFQVAYCLLQPRTDSYCPGNANYVSYALIDSPTDCTSADESKRRNGLEDIKKYFNLVNCTYFEEFNVTADERAE

SEQ ID NO: 18988 - protein, 85 aa, unidentified
  REGION 1..85: note = Description of Unknown:cds_NC_034440.1_cds_YP_009361857.1_3 target sequence
WFGITQDSQGVHLYTSRKNGFNSNNLFLFASVPIYDKINYYTVIPRSIITPANQRSAWAAFYVYPLHQLSYLLNFDVNGYITQAA

SEQ ID NO: 18989 - protein, 85 aa, unidentified
  REGION 1..85: note = Description of Unknown:cds_NC_034440.1_cds_YP_009361857.1_3 target sequence
DCGYNDYTQLVCSYGDFNMKSGVYSTSYYSAKPVGAYYEAHVYPDCNFTDLFRENAPTIMQYKRQVFTRCNYNLTLLLSLVQVDE

SEQ ID NO: 18990 - protein, 85 aa, unidentified
  REGION 1..85: note = Description of Unknown:cds_NC_034440.1_cds_YP_009361857.1_3 target sequence
FVCDKITPEALATGCYSSLTVDWFAFPYAWKSYLAIGSADRIVRFNYNQDYSNPSCRIHSKVNSSVGISYSGLYSYITNCNYGGF

SEQ ID NO: 18991 - protein, 85 aa, unidentified
  REGION 1..85: note = Description of Unknown:cds_NC_034440.1_cds_YP_009361857.1_3 target sequence
NKDDVVKPGGRASQPCVTGALNSPTNGQVWSFNFGGVPYRTSRLTYTDHLKNPLDMVYVITVKYEPGAETVCPKQVRPDYSTNIT

SEQ ID NO: 18992 - protein, 85 aa, unidentified
  REGION 1..85: note = Description of Unknown:cds_NC_034440.1_cds_YP_009361857.1_3 target sequence
GLLGSCISYDIYGITGTGVFQLCNATGIPQQKFVYDKFDNIIGFHSDDGNYYCVAPCVSVPVSVIYDDNTNQYATLFGSVACQHI

SEQ ID NO: 18993 - protein, 85 aa, unidentified
  REGION 1..85: note = Description of Unknown:cds_NC_034440.1_cds_YP_009361857.1_3 target sequence
STMAAQFSRETRASLVSRNMQNLLQTSVGCVMGFHETNDTVEDCNLSLGQSLCAIPPNTNLRVGRSTFGLGSLAYNSPLRVDALN

SEQ ID NO: 18994 - protein, 85 aa, unidentified
  REGION 1..85: note = Description of Unknown:cds_NC_034440.1_cds_YP_009361857.1_3 target sequence
SSEFKVSLPLNFTFGVTQEYIETSIQKITVDCKQYVCNGFAKCEKLLEQYGQFCSKINQALHGANLRQDDFVRNLFESVKTPQTV

SEQ ID NO: 18995 - protein, 85 aa, unidentified
  REGION 1..85: note = Description of Unknown:cds_NC_034440.1_cds_YP_009361857.1_3 target sequence
PLTTGFGGEFNLTLLEPLSVSTGSSNARSALEELLFDKVTIADPGYMQGYDDCMQQGPASARDLICAQYVAGYKVLPPLMDVNME

SEQ ID NO: 18996 - protein, 85 aa, unidentified
  REGION 1..85: note = Description of Unknown:cds_NC_034440.1_cds_YP_009361857.1_3 target sequence
AAYTSSLLGSIAGAGWTAGLSSFAAIPFAQSIFYRLNGVGITQQVLSENQKIIANKFNQALGAMQTGFTTTNEAFQKVQDAVNTN

SEQ ID NO: 18997 - protein, 85 aa, unidentified
  REGION 1..85: note = Description of Unknown:cds_NC_034440.1_cds_YP_009361857.1_3 target sequence
AQALAKLASELSNTFGAISSSIGDIIQRLDVLEQEVQIDRLINGRLTTLNAFVAQQLVRSESAARSAQLAKDKVNECVKSQSTRS

SEQ ID NO: 18998 - protein, 85 aa, unidentified
  REGION 1..85: note = Description of Unknown:cds_NC_034440.1_cds_YP_009361857.1_3 target sequence
GFCGQGTHIVSFVINAPNGLYFMHVGYHPSQHIEVVAAYGLCDAANPTNCIAPVNGYFIKNQTTRGVDDWSYTGSSFYAPEPITT

SEQ ID NO: 18999 - protein, 85 aa, unidentified
  REGION 1..85: note = Description of Unknown:cds_NC_034440.1_cds_YP_009361857.1_3 target sequence
LNTRYVAPQVTFQNISTNLPPPLLGNSTGTDFKDELDEFFKNVSTSIPNFGALTQINTTLLDLSDEMLALQQVVKALNESYIDLK

SEQ ID NO: 19000 - protein, 84 aa, unidentified
  REGION 1..84: note = Description of Unknown:cds_NC_034440.1_cds_YP_009361857.1_3 target sequence
QQVVKALNESYIDLKELGNYTYYNKWPWYIWLGFIAGLLALALCVFFILCCTGCGTSCLGKLKCNRCCDKYEEYDLEPHKIHIH

SEQ ID NO: 19001 - protein, 85 aa, unidentified
  REGION 1..85: note = Description of Unknown:cds_NC_034440.1_cds_YP_009361857.1_3 target sequence
GTGACPQVDMQPSYFIKHNWPEPIDMNKADGVIYPNGRTYSNITLQTTNLFPRNGDLGTQYVYSASNEKSRTSNVAFISNYSYYG

SEQ ID NO: 19002 - protein, 85 aa, unidentified
  REGION 1..85: note = Description of Unknown:cds_NC_034440.1_cds_YP_009361857.1_3 target sequence
NPFGDGIVIRIGQNSNKTGSVIVGTAQTTIKKIYPALMLGSSFGNFSVNNKSGAYFNHTLLILPSKCGTVFQVAYCLLQPRTDSY

SEQ ID NO: 19003 - protein, 85 aa, unidentified
  REGION 1..85: note = Description of Unknown:cds_NC_034440.1_cds_YP_009361857.1_3 target sequence
CPGNANYVSYALIDSPTDCTSADESKRRNGLEDIKKYFNLVNCTYFEEFNVTADERAEWFGITQDSQGVHLYTSRKNGFNSNNLF

SEQ ID NO: 19004 - protein, 85 aa, unidentified
  REGION 1..85: note = Description of Unknown:cds_NC_034440.1_cds_YP_009361857.1_3 target sequence
LFASVPIYDKINYYTVIPRSIITPANQRSAWAAFYVYPLHQLSYLLNFDVNGYITQAADCGYNDYTQLVCSYGDFNMKSGVYSTS

SEQ ID NO: 19005 - protein, 85 aa, unidentified
  REGION 1..85: note = Description of Unknown:cds_NC_034440.1_cds_YP_009361857.1_3 target sequence
YYSAKPVGAYYEAHVYPDCNFTDLFRENAPTIMQYKRQVFTRCNYNLTLLLSLVQVDEFVCDKITPEALATGCYSSLTVDWFAFP

SEQ ID NO: 19006 - protein, 85 aa, unidentified
  REGION 1..85: note = Description of Unknown:cds_NC_034440.1_cds_YP_009361857.1_3 target sequence
YAWKSYLAIGSADRIVRFNYNQDYSNPSCRIHSKVNSSVGISYSGLYSYITNCNYGGFNKDDVVKPGGRASQPCVTGALNSPTNG

SEQ ID NO: 19007 - protein, 85 aa, unidentified
  REGION 1..85: note = Description of Unknown:cds_NC_034440.1_cds_YP_009361857.1_3 target sequence
QVWSFNFGGVPYRTSRLTYTDHLKNPLDMVYVITVKYEPGAETVCPKQVRPDYSTNITGLLGSCISYDIYGITGTGVFQLCNATG

SEQ ID NO: 19008 - protein, 85 aa, unidentified
  REGION 1..85: note = Description of Unknown:cds_NC_034440.1_cds_YP_009361857.1_3 target sequence
IPQQKFVYDKFDNIIGFHSDDGNYYCVAPCVSVPVSVIYDDNTNQYATLFGSVACQHISTMAAQFSRETRASLVSRNMQNLLQTS

SEQ ID NO: 19009 - protein, 85 aa, unidentified
  REGION 1..85: note = Description of Unknown:cds_NC_034440.1_cds_YP_009361857.1_3 target sequence
VGCVMGFHETNDTVEDCNLSLGQSLCAIPPNTNLRVGRSTFGLGSLAYNSPLRVDALNSSEFKVSLPLNFTFGVTQEYIETSIQK

SEQ ID NO: 19010 - protein, 85 aa, unidentified
  REGION 1..85: note = Description of Unknown:cds_NC_034440.1_cds_YP_009361857.1_3 target sequence
ITVDCKQYVCNGFAKCEKLLEQYGQFCSKINQALHGANLRQDDFVRNLFESVKTPQTVPLTTGFGGEFNLTLLEPLSVSTGSSNA

SEQ ID NO: 19011 - protein, 85 aa, unidentified
  REGION 1..85: note = Description of Unknown:cds_NC_034440.1_cds_YP_009361857.1_3 target sequence
RSALEELLFDKVTIADPGYMQGYDDCMQQGPASARDLICAQYVAGYKVLPPLMDVNMEAAYTSSLLGSIAGAGWTAGLSSFAAIP

SEQ ID NO: 19012 - protein, 85 aa, unidentified
  REGION 1..85: note = Description of Unknown:cds_NC_034440.1_cds_YP_009361857.1_3 target sequence
FAQSIFYRLNGVGITQQVLSENQKIIANKFNQALGAMQTGFTTTNEAFQKVQDAVNTNAQALAKLASELSNTFGAISSSIGDIIQ

SEQ ID NO: 19013 - protein, 85 aa, unidentified
  REGION 1..85: note = Description of Unknown:cds_NC_034440.1_cds_YP_009361857.1_3 target sequence
RLDVLEQEVQIDRLINGRLTTLNAFVAQQLVRSESAARSAQLAKDKVNECVKSQSTRSGFCGQGTHIVSFVINAPNGLYFMHVGY

SEQ ID NO: 19014 - protein, 85 aa, unidentified
  REGION 1..85: note = Description of Unknown:cds_NC_034440.1_cds_YP_009361857.1_3 target sequence
HPSQHIEVVAAYGLCDAANPTNCIAPVNGYFIKNQTTRGVDDWSYTGSSFYAPEPITTLNTRYVAPQVTFQNISTNLPPPLLGNS

SEQ ID NO: 19015 - protein, 85 aa, unidentified
  REGION 1..85: note = Description of Unknown:cds_NC_034440.1_cds_YP_009361857.1_3 target sequence
TGTDFKDELDEFFKNVSTSIPNFGALTQINTTLLDLSDEMLALQQVVKALNESYIDLKELGNYTYYNKWPWYIWLGFIAGLLALA

SEQ ID NO: 19016 - protein, 85 aa, unidentified
  REGION 1..85: note = Description of Unknown:cds_NC_007409.1_cds_YP_319902.1_71 target sequence
VFSLISLSHEESAESANKYVWRVSLWVESERQTPPSEVFLPFFRVEYMKVRKVSIVVLVLTLFIIPVIIPPAHSSINTSTTYATA

SEQ ID NO: 19017 - protein, 85 aa, unidentified
  REGION 1..85: note = Description of Unknown:cds_NC_007409.1_cds_YP_319902.1_71 target sequence
YVGETSISSEPFILDVANLPWLNPQGSNIRFFEYSNLTGQLYAYEQLFSKTTWTVNTVESTGWETLPYWQNGQLVFNCPSAPHGG

SEQ ID NO: 19018 - protein, 85 aa, unidentified
  REGION 1..85: note = Description of Unknown:cds_NC_007409.1_cds_YP_319902.1_71 target sequence
QYIAWRYTPSSNTFNVTIHITSWPSGINNPYSPGIAIYSPTVGDQPTDIGTSGFLALLVTFNGQIWYHETNGNWVELSVVYPTPS

SEQ ID NO: 19019 - protein, 85 aa, unidentified
  REGION 1..85: note = Description of Unknown:cds_NC_007409.1_cds_YP_319902.1_71 target sequence
TAYPFTFTVTFTENSAGNVTVSTVYINSTAYTVNVNTPFPWSQIGYVGIRGDIDNLFYVSYFAVSPSPFVNSVESTDWKTLPYWQ

SEQ ID NO: 19020 - protein, 85 aa, unidentified
  REGION 1..85: note = Description of Unknown:cds_NC_007409.1_cds_YP_319902.1_71 target sequence
NGELVINGTGASAGGQYIAWRFTPSSNTFNVTIHITSWPSGISGGTYPGIEIFSPNVGNQPYAQASGFLALLVTFNGNIWYHGIS

SEQ ID NO: 19021 - protein, 85 aa, unidentified
  REGION 1..85: note = Description of Unknown:cds_NC_007409.1_cds_YP_319902.1_71 target sequence
GISGCDLLKSSAYPTPSTAYPFTFTVTFTENSAGNVTVSTVYINSTAHTVNLNTPFPWSQIGYIGITSCYDLFYVSYFAVSPSPF

SEQ ID NO: 19022 - protein, 85 aa, unidentified
  REGION 1..85: note = Description of Unknown:cds_NC_007409.1_cds_YP_319902.1_71 target sequence
VNSVESTDWKTLPYWQNGQLVFNVTGASGSQYIAWRYTPVGNTINVTIHITSFPSGIPSGDNPGIEIFSPNVGDQPYDEVSGFLS

SEQ ID NO: 19023 - protein, 85 aa, unidentified
  REGION 1..85: note = Description of Unknown:cds_NC_007409.1_cds_YP_319902.1_71 target sequence
LLVAFNGNIWYHGLNGFVLLKSSAFPTPSTAYPFTFTVTFTENSAGNVTVSTVYINSTAYTLNFNTPFPWSQIGYIGIRGDPSNL

SEQ ID NO: 19024 - protein, 85 aa, unidentified
  REGION 1..85: note = Description of Unknown:cds_NC_007409.1_cds_YP_319902.1_71 target sequence
FYVSYFSTTQQLYAYELVTNPYTNTPYTGTVYMAIFPYPISYDVYVSQAPIVYSQATLPLVTVSSPSQVTTQYPIISTSTYMVIP

SEQ ID NO: 19025 - protein, 85 aa, unidentified
  REGION 1..85: note = Description of Unknown:cds_NC_007409.1_cds_YP_319902.1_71 target sequence
SIGAYSGNTPLFLYPQMAVSEGIVPVIPMVESTSWKTLPYWQNGQLVLDVAAACSSQYVAWRYTPSSNTMNVTIHITSYPSGIQY

SEQ ID NO: 19026 - protein, 85 aa, unidentified
  REGION 1..85: note = Description of Unknown:cds_NC_007409.1_cds_YP_319902.1_71 target sequence
NPGISIYSPNIGDQPYDYASGFLALLVTFSGNIWYHGTNANWVELRSSAYPTPSTAYPFTFTVTFTENSAGNVTISTVYINSTAY

SEQ ID NO: 19027 - protein, 85 aa, unidentified
  REGION 1..85: note = Description of Unknown:cds_NC_007409.1_cds_YP_319902.1_71 target sequence
TLNVNTPFPWSQIGYVAIRVDTQNLFYVSYFSISQGSSPFVLVSPSYAQGFVGSQYAYPYFMNTTTVLVNNTAVPKGLSVFSGYM

SEQ ID NO: 19028 - protein, 85 aa, unidentified
  REGION 1..85: note = Description of Unknown:cds_NC_007409.1_cds_YP_319902.1_71 target sequence
PGANTVFSTFLYMNTTPQSPVLVLMPAPYVSFNALSNGFSITADAQILSLYGYPATYTNPSFTYTPPGIIGMSGTNTFTFKGAQT

SEQ ID NO: 19029 - protein, 85 aa, unidentified
  REGION 1..85: note = Description of Unknown:cds_NC_007409.1_cds_YP_319902.1_71 target sequence
QLSASTTPPSSTTPTPPSSSSSSSSSSSISTSPNTIQVVLNGSVYVHVPLLFHPALSTPNGSVLFSTSVNSTGVYISSYVTSAIT

SEQ ID NO: 19030 - protein, 85 aa, unidentified
  REGION 1..85: note = Description of Unknown:cds_NC_007409.1_cds_YP_319902.1_71 target sequence
TPLNVTIEYTNGTVIKSFTIEPGQTFQVPLVNGDENVIISYGNHTVTIPISANNVNVLSLRNAISAVLPPIYALPLFLLFAGSFF

SEQ ID NO: 19031 - protein, 84 aa, unidentified
  REGION 1..84: note = Description of Unknown:cds_NC_007409.1_cds_YP_319902.1_71 target sequence
RNAISAVLPPIYALPLFLLFAGSFFISLAVRSVPKFAGMGSIIYIFFVAPFLIVIGIPTSVVYGTVVGALIIIIIGLWASRSQD

SEQ ID NO: 19032 - protein, 85 aa, unidentified
  REGION 1..85: note = Description of Unknown:cds_NC_007409.1_cds_YP_319902.1_71 target sequence
ESERQTPPSEVFLPFFRVEYMKVRKVSIVVLVLTLFIIPVIIPPAHSSINTSTTYATAYVGETSISSEPFILDVANLPWLNPQGS

SEQ ID NO: 19033 - protein, 85 aa, unidentified
  REGION 1..85: note = Description of Unknown:cds_NC_007409.1_cds_YP_319902.1_71 target sequence
NIRFFEYSNLTGQLYAYEQLFSKTTWTVNTVESTGWETLPYWQNGQLVFNCPSAPHGGQYIAWRYTPSSNTFNVTIHITSWPSGI

SEQ ID NO: 19034 - protein, 85 aa, unidentified
  REGION 1..85: note = Description of Unknown:cds_NC_007409.1_cds_YP_319902.1_71 target sequence
NNPYSPGIAIYSPTVGDQPTDIGTSGFLALLVTFNGQIWYHETNGNWVELSVVYPTPSTAYPFTFTVTFTENSAGNVTVSTVYIN

SEQ ID NO: 19035 - protein, 85 aa, unidentified
  REGION 1..85: note = Description of Unknown:cds_NC_007409.1_cds_YP_319902.1_71 target sequence
STAYTVNVNTPFPWSQIGYVGIRGDIDNLFYVSYFAVSPSPFVNSVESTDWKTLPYWQNGELVINGTGASAGGQYIAWRFTPSSN

SEQ ID NO: 19036 - protein, 85 aa, unidentified
  REGION 1..85: note = Description of Unknown:cds_NC_007409.1_cds_YP_319902.1_71 target sequence
TFNVTIHITSWPSGISGGTYPGIEIFSPNVGNQPYAQASGFLALLVTFNGNIWYHGISGISGCDLLKSSAYPTPSTAYPFTFTVT

SEQ ID NO: 19037 - protein, 85 aa, unidentified
  REGION 1..85: note = Description of Unknown:cds_NC_007409.1_cds_YP_319902.1_71 target sequence
FTENSAGNVTVSTVYINSTAHTVNLNTPFPWSQIGYIGITSCYDLFYVSYFAVSPSPFVNSVESTDWKTLPYWQNGQLVFNVTGA

SEQ ID NO: 19038 - protein, 85 aa, unidentified
  REGION 1..85: note = Description of Unknown:cds_NC_007409.1_cds_YP_319902.1_71 target sequence
SGSQYIAWRYTPVGNTINVTIHITSFPSGIPSGDNPGIEIFSPNVGDQPYDEVSGFLSLLVAFNGNIWYHGLNGFVLLKSSAFPT

SEQ ID NO: 19039 - protein, 85 aa, unidentified
  REGION 1..85: note = Description of Unknown:cds_NC_007409.1_cds_YP_319902.1_71 target sequence
PSTAYPFTFTVTFTENSAGNVTVSTVYINSTAYTLNFNTPFPWSQIGYIGIRGDPSNLFYVSYFSTTQQLYAYELVTNPYTNTPY

SEQ ID NO: 19040 - protein, 85 aa, unidentified
  REGION 1..85: note = Description of Unknown:cds_NC_007409.1_cds_YP_319902.1_71 target sequence
TGTVYMAIFPYPISYDVYVSQAPIVYSQATLPLVTVSSPSQVTTQYPIISTSTYMVIPSIGAYSGNTPLFLYPQMAVSEGIVPVI

SEQ ID NO: 19041 - protein, 85 aa, unidentified
  REGION 1..85: note = Description of Unknown:cds_NC_007409.1_cds_YP_319902.1_71 target sequence
PMVESTSWKTLPYWQNGQLVLDVAAACSSQYVAWRYTPSSNTMNVTIHITSYPSGIQYNPGISIYSPNIGDQPYDYASGFLALLV

SEQ ID NO: 19042 - protein, 85 aa, unidentified
  REGION 1..85: note = Description of Unknown:cds_NC_007409.1_cds_YP_319902.1_71 target sequence
TFSGNIWYHGTNANWVELRSSAYPTPSTAYPFTFTVTFTENSAGNVTISTVYINSTAYTLNVNTPFPWSQIGYVAIRVDTQNLFY

SEQ ID NO: 19043 - protein, 85 aa, unidentified
  REGION 1..85: note = Description of Unknown:cds_NC_007409.1_cds_YP_319902.1_71 target sequence
VSYFSISQGSSPFVLVSPSYAQGFVGSQYAYPYFMNTTTVLVNNTAVPKGLSVFSGYMPGANTVFSTFLYMNTTPQSPVLVLMPA

SEQ ID NO: 19044 - protein, 85 aa, unidentified
  REGION 1..85: note = Description of Unknown:cds_NC_007409.1_cds_YP_319902.1_71 target sequence
PYVSFNALSNGFSITADAQILSLYGYPATYTNPSFTYTPPGIIGMSGTNTFTFKGAQTQLSASTTPPSSTTPTPPSSSSSSSSSS

SEQ ID NO: 19045 - protein, 85 aa, unidentified
  REGION 1..85: note = Description of Unknown:cds_NC_007409.1_cds_YP_319902.1_71 target sequence
SISTSPNTIQVVLNGSVYVHVPLLFHPALSTPNGSVLFSTSVNSTGVYISSYVTSAITTPLNVTIEYTNGTVIKSFTIEPGQTFQ

SEQ ID NO: 19046 - protein, 85 aa, unidentified
  REGION 1..85: note = Description of Unknown:cds_NC_007409.1_cds_YP_319902.1_71 target sequence
VPLVNGDENVIISYGNHTVTIPISANNVNVLSLRNAISAVLPPIYALPLFLLFAGSFFISLAVRSVPKFAGMGSIIYIFFVAPFL

SEQ ID NO: 19047 - protein, 85 aa, unidentified
  REGION 1..85: note = Description of Unknown:hvTR_P90493 target sequence
SAEQRKKKKTTTTTQGRGAEVAMADEDGGRLRAAAETTGGPGSPDPADGPPPTPNPDRRPAARPGFGWHGGPEENEDEADDAAAD

SEQ ID NO: 19048 - protein, 85 aa, unidentified
  REGION 1..85: note = Description of Unknown:hvTR_P90493 target sequence
ADADEAAPASGEAVDEPAADGVVSPRQLALLASMVDEAVRTIPSPPPERDGAQEEAARSPSPPRTPSMRADYGEENDDDDDDDDD

SEQ ID NO: 19049 - protein, 85 aa, unidentified
  REGION 1..85: note = Description of Unknown:hvTR_P90493 target sequence
DDRDAGRWVRGPETTSAVRGAYPDPMASLSPRPPAPRRHHHHHHHRRRRAPRRRSAASDSSKSGSSSSASSASSSASSSSSASAS

SEQ ID NO: 19050 - protein, 85 aa, unidentified
  REGION 1..85: note = Description of Unknown:hvTR_P90493 target sequence
SSDDDDDDDAARAPASAADHAAGGTLGADDEEAGVPARAPGAAPRPSPPRAEPAPARTPAATAGRLERRRARAAVAGRDATGRFT

SEQ ID NO: 19051 - protein, 85 aa, unidentified
  REGION 1..85: note = Description of Unknown:hvTR_P90493 target sequence
AGRPRRVELDADAASGAFYARYRDGYVSGEPWPGAGPPPPGRVLYGGLGDSRPGLWGAPEAEEARARFEASGAPAPVWAPELGDA

SEQ ID NO: 19052 - protein, 85 aa, unidentified
  REGION 1..85: note = Description of Unknown:hvTR_P90493 target sequence
AQQYALITRLLYTPDAEAMGWLQNPRVAPGDVALDQACFRISGAARNSSSFISGSVARAVPHLGYAMAAGRFGWGLAHVAAAVAM

SEQ ID NO: 19053 - protein, 85 aa, unidentified
  REGION 1..85: note = Description of Unknown:hvTR_P90493 target sequence
SRRYDRAQKGFLLTSLRRAYAPLLARENAALTGARTPDDGGDANRHDGDDARGKPAAAAAPLPSAAASPADERAVPAGYGAAGVL

SEQ ID NO: 19054 - protein, 85 aa, unidentified
  REGION 1..85: note = Description of Unknown:hvTR_P90493 target sequence
AALGRLSAAPASAPAGADDDDDDDGAGGGGGGRRAEAGRVAVECLAACRGILEALAEGFDGDLAAVPGLAGARPAAPPRPGPAGA

SEQ ID NO: 19055 - protein, 85 aa, unidentified
  REGION 1..85: note = Description of Unknown:hvTR_P90493 target sequence
AAPPHADAPRLRAWLRELRFVRDALVLMRLRGDLRVAGGSEAAVAAVRAVSLVAGALGPALPRSPRLLSSAAAAAADLLFQNQSL

SEQ ID NO: 19056 - protein, 85 aa, unidentified
  REGION 1..85: note = Description of Unknown:hvTR_P90493 target sequence
RPLLADTVAAADSLAAPASAPREARKRKSPAPARAPPGGAPRPPKKSRADAPRPAAAPPAGAAPPAPPTPPPRPPRPAALTRRPA

SEQ ID NO: 19057 - protein, 85 aa, unidentified
  REGION 1..85: note = Description of Unknown:hvTR_P90493 target sequence
EGPDPQGGWRRQPPGPSHTPAPSAAALEAYCAPRAVAELTDHPLFPAPWRPALMFDPRALASLAARCAAPPPGGAPAAFGPLRAS

SEQ ID NO: 19058 - protein, 85 aa, unidentified
  REGION 1..85: note = Description of Unknown:hvTR_P90493 target sequence
GPLRRAAAWMRQVPDPEDVRVVILYSPLPGEDLAAGRAGGGPPPEWSAERGGLSCLLAALGNRLCGPATAAWAGNWTGAPDVSAL

SEQ ID NO: 19059 - protein, 85 aa, unidentified
  REGION 1..85: note = Description of Unknown:hvTR_P90493 target sequence
GAQGVLLLSTRDLAFAGAVEFLGLLAGACDRRLIVVNAVRAADWPADGPVVSRQHAYLACEVLPAVQCAVRWPAARDLRRTVLAS

SEQ ID NO: 19060 - protein, 85 aa, unidentified
  REGION 1..85: note = Description of Unknown:hvTR_P90493 target sequence
GRVFGPGVFARVEAAHARLYPDAPPLRLCRGANVRYRVRTRFGPDTLVPMSPREYRRAVLPALDGRAAASGAGDAMAPGAPDFCE

SEQ ID NO: 19061 - protein, 85 aa, unidentified
  REGION 1..85: note = Description of Unknown:hvTR_P90493 target sequence
DEAHSHRACARWGLGAPLRPVYVALGRDAVRGGPAELRGPRREFCARALLEPDGDAPPLVLRDDADAGPPPQIRWASAAGRAGTV

SEQ ID NO: 19062 - protein, 84 aa, unidentified
  REGION 1..84: note = Description of Unknown:hvTR_P90493 target sequence
FCARALLEPDGDAPPLVLRDDADAGPPPQIRWASAAGRAGTVLAAAGGGVEVVGTAAGLATPPRREPVDMDAELEDDDDGLFGE

SEQ ID NO: 19063 - protein, 85 aa, unidentified
  REGION 1..85: note = Description of Unknown:hvTR_P90493 target sequence
GGRLRAAAETTGGPGSPDPADGPPPTPNPDRRPAARPGFGWHGGPEENEDEADDAAADADADEAAPASGEAVDEPAADGVVSPRQ

SEQ ID NO: 19064 - protein, 85 aa, unidentified
  REGION 1..85: note = Description of Unknown:hvTR_P90493 target sequence
LALLASMVDEAVRTIPSPPPERDGAQEEAARSPSPPRTPSMRADYGEENDDDDDDDDDDDRDAGRWVRGPETTSAVRGAYPDPMA

SEQ ID NO: 19065 - protein, 85 aa, unidentified
  REGION 1..85: note = Description of Unknown:hvTR_P90493 target sequence
SLSPRPPAPRRHHHHHHHRRRRAPRRRSAASDSSKSGSSSSASSASSSASSSSSASASSSDDDDDDDAARAPASAADHAAGGTLG

SEQ ID NO: 19066 - protein, 85 aa, unidentified
  REGION 1..85: note = Description of Unknown:hvTR_P90493 target sequence
ADDEEAGVPARAPGAAPRPSPPRAEPAPARTPAATAGRLERRRARAAVAGRDATGRFTAGRPRRVELDADAASGAFYARYRDGYV

SEQ ID NO: 19067 - protein, 85 aa, unidentified
  REGION 1..85: note = Description of Unknown:hvTR_P90493 target sequence
SGEPWPGAGPPPPGRVLYGGLGDSRPGLWGAPEAEEARARFEASGAPAPVWAPELGDAAQQYALITRLLYTPDAEAMGWLQNPRV

SEQ ID NO: 19068 - protein, 85 aa, unidentified
  REGION 1..85: note = Description of Unknown:hvTR_P90493 target sequence
APGDVALDQACFRISGAARNSSSFISGSVARAVPHLGYAMAAGRFGWGLAHVAAAVAMSRRYDRAQKGFLLTSLRRAYAPLLARE

SEQ ID NO: 19069 - protein, 85 aa, unidentified
  REGION 1..85: note = Description of Unknown:hvTR_P90493 target sequence
NAALTGARTPDDGGDANRHDGDDARGKPAAAAAPLPSAAASPADERAVPAGYGAAGVLAALGRLSAAPASAPAGADDDDDDDGAG

SEQ ID NO: 19070 - protein, 85 aa, unidentified
  REGION 1..85: note = Description of Unknown:hvTR_P90493 target sequence
GGGGGRRAEAGRVAVECLAACRGILEALAEGFDGDLAAVPGLAGARPAAPPRPGPAGAAAPPHADAPRLRAWLRELRFVRDALVL

SEQ ID NO: 19071 - protein, 85 aa, unidentified
  REGION 1..85: note = Description of Unknown:hvTR_P90493 target sequence
MRLRGDLRVAGGSEAAVAAVRAVSLVAGALGPALPRSPRLLSSAAAAAADLLFQNQSLRPLLADTVAAADSLAAPASAPREARKR

SEQ ID NO: 19072 - protein, 85 aa, unidentified
  REGION 1..85: note = Description of Unknown:hvTR_P90493 target sequence
KSPAPARAPPGGAPRPPKKSRADAPRPAAAPPAGAAPPAPPTPPPRPPRPAALTRRPAEGPDPQGGWRRQPPGPSHTPAPSAAAL

SEQ ID NO: 19073 - protein, 85 aa, unidentified
  REGION 1..85: note = Description of Unknown:hvTR_P90493 target sequence
EAYCAPRAVAELTDHPLFPAPWRPALMFDPRALASLAARCAAPPPGGAPAAFGPLRASGPLRRAAAWMRQVPDPEDVRVVILYSP

SEQ ID NO: 19074 - protein, 85 aa, unidentified
  REGION 1..85: note = Description of Unknown:hvTR_P90493 target sequence
LPGEDLAAGRAGGGPPPEWSAERGGLSCLLAALGNRLCGPATAAWAGNWTGAPDVSALGAQGVLLLSTRDLAFAGAVEFLGLLAG

SEQ ID NO: 19075 - protein, 85 aa, unidentified
  REGION 1..85: note = Description of Unknown:hvTR_P90493 target sequence
ACDRRLIVVNAVRAADWPADGPVVSRQHAYLACEVLPAVQCAVRWPAARDLRRTVLASGRVFGPGVFARVEAAHARLYPDAPPLR

SEQ ID NO: 19076 - protein, 85 aa, unidentified
  REGION 1..85: note = Description of Unknown:hvTR_P90493 target sequence
LCRGANVRYRVRTRFGPDTLVPMSPREYRRAVLPALDGRAAASGAGDAMAPGAPDFCEDEAHSHRACARWGLGAPLRPVYVALGR

SEQ ID NO: 19077 - protein, 85 aa, unidentified
  REGION 1..85: note = Description of Unknown:hvTR_P90493 target sequence
DAVRGGPAELRGPRREFCARALLEPDGDAPPLVLRDDADAGPPPQIRWASAAGRAGTVLAAAGGGVEVVGTAAGLATPPRREPVD

SEQ ID NO: 19078 - protein, 85 aa, unidentified
  REGION 1..85: note = Description of Unknown:hvTR_P09310 target sequence
DTPPMQRSTPQRAGSPDTLELMDLLDAAAAAAEHRARVVTSSQPDDLLFGENGVMVGREHEIVSIPSVSGLQPEPRTEDVGEELT

SEQ ID NO: 19079 - protein, 85 aa, unidentified
  REGION 1..85: note = Description of Unknown:hvTR_P09310 target sequence
QDDYVCEDGQDLMGSPVIPLAEVFHTRFSEAGAREPTGADRSLETVSLGTKLARSPKPPMNDGETGRGTTPPFPQAFSPVSPASP

SEQ ID NO: 19080 - protein, 85 aa, unidentified
  REGION 1..85: note = Description of Unknown:hvTR_P09310 target sequence
VGDAAGNDQREDQRSIPRQTTRGNSPGLPSVVHRDRQTQSISGKKPGDEQAGHAHASGDGVVLQKTQRPAQGKSPKKKTLKVKVP

SEQ ID NO: 19081 - protein, 85 aa, unidentified
  REGION 1..85: note = Description of Unknown:hvTR_P09310 target sequence
LPARKPGGPVPGPVEQLYHVLSDSVPAKGAKADLPFETDDTRPRKHDARGITPRVPGRSSGGKPRAFLALPGRSHAPDPIEDDSP

SEQ ID NO: 19082 - protein, 85 aa, unidentified
  REGION 1..85: note = Description of Unknown:hvTR_P09310 target sequence
VEKKPKSREFVSSSSSSSSWGSSSEDEDDEPRRVSVGSETTGSRSGREHAPSPSNSDDSDSNDGGSTKQNIQPGYRSISGPDPRI

SEQ ID NO: 19083 - protein, 85 aa, unidentified
  REGION 1..85: note = Description of Unknown:hvTR_P09310 target sequence
RKTKRLAGEPGRQRQKSFSLPRSRTPIIPPVSGPLMMPDGSPWPGSAPLPSNRVRFGPSGETREGHWEDEAVRAARARYEASTEP

SEQ ID NO: 19084 - protein, 85 aa, unidentified
  REGION 1..85: note = Description of Unknown:hvTR_P09310 target sequence
VPLYVPELGDPARQYRALINLIYCPDRDPIAWLQNPKLTGVNSALNQFYQKLLPPGRAGTAVTGSVASPVPHVGEAMATGEALWA

SEQ ID NO: 19085 - protein, 85 aa, unidentified
  REGION 1..85: note = Description of Unknown:hvTR_P09310 target sequence
LPHAAAAVAMSRRYDRAQKHFILQSLRRAFASMAYPEATGSSPAARISRGHPSPTTPATQAPDPQPSAAARSLSVCPPDDRLRTP

SEQ ID NO: 19086 - protein, 85 aa, unidentified
  REGION 1..85: note = Description of Unknown:hvTR_P09310 target sequence
RKRKSQPVESRSLLDKIRETPVADARVADDHVVSKAKRRVSEPVTITSGPVVDPPAVITMPLDGPAPNGGFRRIPRGALHTPVPS

SEQ ID NO: 19087 - protein, 85 aa, unidentified
  REGION 1..85: note = Description of Unknown:hvTR_P09310 target sequence
DQARKAYCTPETIARLVDDPLFPTAWRPALSFDPGALAEIAARRPGGGDRRFGPPSGVEALRRRCAWMRQIPDPEDVRLLIIYDP

SEQ ID NO: 19088 - protein, 85 aa, unidentified
  REGION 1..85: note = Description of Unknown:hvTR_P09310 target sequence
LPGEDINGPLESTLATDPGPSWSPSRGGLSVVLAALSNRLCLPSTHAWAGNWTGPPDVSALNARGVLLLSTRDLAFAGAVEYLGS

SEQ ID NO: 19089 - protein, 85 aa, unidentified
  REGION 1..85: note = Description of Unknown:hvTR_P09310 target sequence
RLASARRRLLVLDAVALERWPRDGPALSQYHVYVRAPARPDAQAVVRWPDSAVTEGLARAVFASSRTFGPASFARIETAFANLYP

SEQ ID NO: 19090 - protein, 85 aa, unidentified
  REGION 1..85: note = Description of Unknown:hvTR_P09310 target sequence
GEQPLCLCRGGNVAYTVCTRAGPKTRVPLSPREYRQYVLPGFDGCKDLARQSRGLGLGAADFVDEAAHSHRAANRWGLGAALRPV

SEQ ID NO: 19091 - protein, 85 aa, unidentified
  REGION 1..85: note = Description of Unknown:hvTR_P09310 target sequence
FLPEGRRPGAAGPEAGDVPTWARVFCRHALLEPDPAAEPLVLPPVAGRSVALYASADEARNALPPIPRVMWPPGFGAAETVLEGS

SEQ ID NO: 19092 - protein, 85 aa, unidentified
  REGION 1..85: note = Description of Unknown:hvTR_P09310 target sequence
DGTRFVFGHHGGSERPSETQAGRQRRTADDREHALELDDWEVGCEDAWDSEEGGGDDGDAPGSSFGVSIVSVAPGVLRDRRVGLR

SEQ ID NO: 19093 - protein, 84 aa, unidentified
  REGION 1..84: note = Description of Unknown:hvTR_P09310 target sequence
ELDDWEVGCEDAWDSEEGGGDDGDAPGSSFGVSIVSVAPGVLRDRRVGLRPAVKVELLSSSSSSEDEDDVWGGRGGRSPPQSRG

SEQ ID NO: 19094 - protein, 85 aa, unidentified
  REGION 1..85: note = Description of Unknown:hvTR_P09310 target sequence
AAAAAEHRARVVTSSQPDDLLFGENGVMVGREHEIVSIPSVSGLQPEPRTEDVGEELTQDDYVCEDGQDLMGSPVIPLAEVFHTR

SEQ ID NO: 19095 - protein, 85 aa, unidentified
  REGION 1..85: note = Description of Unknown:hvTR_P09310 target sequence
FSEAGAREPTGADRSLETVSLGTKLARSPKPPMNDGETGRGTTPPFPQAFSPVSPASPVGDAAGNDQREDQRSIPRQTTRGNSPG

SEQ ID NO: 19096 - protein, 85 aa, unidentified
  REGION 1..85: note = Description of Unknown:hvTR_P09310 target sequence
LPSVVHRDRQTQSISGKKPGDEQAGHAHASGDGVVLQKTQRPAQGKSPKKKTLKVKVPLPARKPGGPVPGPVEQLYHVLSDSVPA

SEQ ID NO: 19097 - protein, 85 aa, unidentified
  REGION 1..85: note = Description of Unknown:hvTR_P09310 target sequence
KGAKADLPFETDDTRPRKHDARGITPRVPGRSSGGKPRAFLALPGRSHAPDPIEDDSPVEKKPKSREFVSSSSSSSSWGSSSEDE

SEQ ID NO: 19098 - protein, 85 aa, unidentified
  REGION 1..85: note = Description of Unknown:hvTR_P09310 target sequence
DDEPRRVSVGSETTGSRSGREHAPSPSNSDDSDSNDGGSTKQNIQPGYRSISGPDPRIRKTKRLAGEPGRQRQKSFSLPRSRTPI

SEQ ID NO: 19099 - protein, 85 aa, unidentified
  REGION 1..85: note = Description of Unknown:hvTR_P09310 target sequence
IPPVSGPLMMPDGSPWPGSAPLPSNRVRFGPSGETREGHWEDEAVRAARARYEASTEPVPLYVPELGDPARQYRALINLIYCPDR

SEQ ID NO: 19100 - protein, 85 aa, unidentified
  REGION 1..85: note = Description of Unknown:hvTR_P09310 target sequence
DPIAWLQNPKLTGVNSALNQFYQKLLPPGRAGTAVTGSVASPVPHVGEAMATGEALWALPHAAAAVAMSRRYDRAQKHFILQSLR

SEQ ID NO: 19101 - protein, 85 aa, unidentified
  REGION 1..85: note = Description of Unknown:hvTR_P09310 target sequence
RAFASMAYPEATGSSPAARISRGHPSPTTPATQAPDPQPSAAARSLSVCPPDDRLRTPRKRKSQPVESRSLLDKIRETPVADARV

SEQ ID NO: 19102 - protein, 85 aa, unidentified
  REGION 1..85: note = Description of Unknown:hvTR_P09310 target sequence
ADDHVVSKAKRRVSEPVTITSGPVVDPPAVITMPLDGPAPNGGFRRIPRGALHTPVPSDQARKAYCTPETIARLVDDPLFPTAWR

SEQ ID NO: 19103 - protein, 85 aa, unidentified
  REGION 1..85: note = Description of Unknown:hvTR_P09310 target sequence
PALSFDPGALAEIAARRPGGGDRRFGPPSGVEALRRRCAWMRQIPDPEDVRLLIIYDPLPGEDINGPLESTLATDPGPSWSPSRG

SEQ ID NO: 19104 - protein, 85 aa, unidentified
  REGION 1..85: note = Description of Unknown:hvTR_P09310 target sequence
GLSVVLAALSNRLCLPSTHAWAGNWTGPPDVSALNARGVLLLSTRDLAFAGAVEYLGSRLASARRRLLVLDAVALERWPRDGPAL

SEQ ID NO: 19105 - protein, 85 aa, unidentified
  REGION 1..85: note = Description of Unknown:hvTR_P09310 target sequence
SQYHVYVRAPARPDAQAVVRWPDSAVTEGLARAVFASSRTFGPASFARIETAFANLYPGEQPLCLCRGGNVAYTVCTRAGPKTRV

SEQ ID NO: 19106 - protein, 85 aa, unidentified
  REGION 1..85: note = Description of Unknown:hvTR_P09310 target sequence
PLSPREYRQYVLPGFDGCKDLARQSRGLGLGAADFVDEAAHSHRAANRWGLGAALRPVFLPEGRRPGAAGPEAGDVPTWARVFCR

SEQ ID NO: 19107 - protein, 85 aa, unidentified
  REGION 1..85: note = Description of Unknown:hvTR_P09310 target sequence
HALLEPDPAAEPLVLPPVAGRSVALYASADEARNALPPIPRVMWPPGFGAAETVLEGSDGTRFVFGHHGGSERPSETQAGRQRRT

SEQ ID NO: 19108 - protein, 85 aa, unidentified
  REGION 1..85: note = Description of Unknown:hvTR_P09310 target sequence
ADDREHALELDDWEVGCEDAWDSEEGGGDDGDAPGSSFGVSIVSVAPGVLRDRRVGLRPAVKVELLSSSSSSEDEDDVWGGRGGR

SEQ ID NO: 19109 - protein, 85 aa, unidentified
  REGION 1..85: note = Description of Unknown:cds_NZ_WFIY01000004.1_cds_WP_155864039.1_1973 target sequence
KSALVFLLVFIIFLSSVTGGIEIVYSQTAKNCYIAPEINGTPLGKLPSNTPIYINIFLPPKNMNELLLLMQEEYHGQVHLSRQQI

SEQ ID NO: 19110 - protein, 85 aa, unidentified
  REGION 1..85: note = Description of Unknown:cds_NZ_WFIY01000004.1_cds_WP_155864039.1_1973 target sequence
INEFGDQEKINEISSYLKSNGFNVVFTTPFSLMAEAPAFKVNALFETQLYLYKNGQEIFYKPYSKPNIPPALQNVLIGGLTNYTA

SEQ ID NO: 19111 - protein, 85 aa, unidentified
  REGION 1..85: note = Description of Unknown:cds_NZ_WFIY01000004.1_cds_WP_155864039.1_1973 target sequence
VKTQYLVLGKLVDGVLKPTNSSKQVPLGLNFAYTMYSPQDLEGAYNVTGPEGKNVTVAIIDAWGDPLICQDIQEFDQEFHLPPAN

SEQ ID NO: 19112 - protein, 85 aa, unidentified
  REGION 1..85: note = Description of Unknown:cds_NZ_WFIY01000004.1_cds_WP_155864039.1_1973 target sequence
LTIVPIGPYKPIFGLFTGWYIETALDVEAVHTMAPYAHIELVLSHGCLFCDILQAIIYIVSADNAQVVDMSFGAPENEFTASGMY

SEQ ID NO: 19113 - protein, 85 aa, unidentified
  REGION 1..85: note = Description of Unknown:cds_NZ_WFIY01000004.1_cds_WP_155864039.1_1973 target sequence
AYYEGFPIVNYPLVNYYFELGSAEGITFIGASGDQGAYEGTYTTFGGVVFPSSSPFVLSVGGTSLYPQITSGYIASMNSTAVYGY

SEQ ID NO: 19114 - protein, 85 aa, unidentified
  REGION 1..85: note = Description of Unknown:cds_NZ_WFIY01000004.1_cds_WP_155864039.1_1973 target sequence
ENAWSVLPQYLGVGTSTVASGGGYSTFFPAPYWQASITKSDTRATPDVSADANPYTGFITIVLGNKEVIGGTSLSTQLWGGVIAD

SEQ ID NO: 19115 - protein, 85 aa, unidentified
  REGION 1..85: note = Description of Unknown:cds_NZ_WFIY01000004.1_cds_WP_155864039.1_1973 target sequence
IDSYIGRPLGLVAPILYSIYENSTLYQEAFHEVTQGFNGKYLAHAGYNLVTGLGTPNVGVLEEVIKDYLSSHPELEISLSTCEPG

SEQ ID NO: 19116 - protein, 85 aa, unidentified
  REGION 1..85: note = Description of Unknown:cds_NZ_WFIY01000004.1_cds_WP_155864039.1_1973 target sequence
FTMPWYCYCTTFRIVAEISYPNGTIVTSGNFNAYIYTLKGFLASVPLKYNGTYWVGNFTISKGDPANCWTIVVNGTAGGLSGISQ

SEQ ID NO: 19117 - protein, 85 aa, unidentified
  REGION 1..85: note = Description of Unknown:cds_NZ_WFIY01000004.1_cds_WP_155864039.1_1973 target sequence
VDIDVGYSFNIISPPEGIIPPNAPVRFCVCIYNPEGQPVINTTVTMTMLYHGKVVSVTPLVHTRHYGDYRGTLILLYPQPEGTYI

SEQ ID NO: 19118 - protein, 85 aa, unidentified
  REGION 1..85: note = Description of Unknown:cds_NZ_WFIY01000004.1_cds_WP_155864039.1_1973 target sequence
IEANNTCGFAYEWEYFGLVVYGAVIPPINDGMTSAYPGENITVIGFIFNPCFQGIFNATAYAELISLNGKIIAKVPMTLAPDKTI

SEQ ID NO: 19119 - protein, 85 aa, unidentified
  REGION 1..85: note = Description of Unknown:cds_NZ_WFIY01000004.1_cds_WP_155864039.1_1973 target sequence
LGVYNLFEFHIANITIPNNVTPGYYKVVITSYLHSIFGPCYGNFTTFIYISNSSLSYQVKSVSEVYEGQCIKVFANITYSNGTEV

SEQ ID NO: 19120 - protein, 85 aa, unidentified
  REGION 1..85: note = Description of Unknown:cds_NZ_WFIY01000004.1_cds_WP_155864039.1_1973 target sequence
KYGEFTAGFIPAELNFEQLLVEFYAGVPMQYNSTLGEWEAVYQIPSILNEQCTIYKGDPIQSLSGFWDVVIEGTSASGENIITGY

SEQ ID NO: 19121 - protein, 85 aa, unidentified
  REGION 1..85: note = Description of Unknown:cds_NZ_WFIY01000004.1_cds_WP_155864039.1_1973 target sequence
SYFDVLPYTYIGSKIITPQNVSKVPLLIFNGTNYILQGIYSPSITIECLHGLVVKCSEIGFVDSINSTLIVERSELASIHAISSS

SEQ ID NO: 19122 - protein, 85 aa, unidentified
  REGION 1..85: note = Description of Unknown:cds_NZ_WFIY01000004.1_cds_WP_155864039.1_1973 target sequence
LCLIQDTIGHVINASALNLVKSNATLVSTVIEDSKYAFNITCSKVNLEGVYYKNVMEVTNLPTPTIVAYSPINVTTSSSTIQFNI

SEQ ID NO: 19123 - protein, 85 aa, unidentified
  REGION 1..85: note = Description of Unknown:cds_NZ_WFIY01000004.1_cds_WP_155864039.1_1973 target sequence
SGKNLKVIGAYIDGKLVSFTSEATSNGVLVTVPFNASIEPSGAYYITIEVCDGLEYNLSAVIFNSYHEVVDAQISSSLSHDVSSL

SEQ ID NO: 19124 - protein, 84 aa, unidentified
  REGION 1..84: note = Description of Unknown:cds_NZ_WFIY01000004.1_cds_WP_155864039.1_1973 target sequence
ASIEPSGAYYITIEVCDGLEYNLSAVIFNSYHEVVDAQISSSLSHDVSSLRSSLTTGEILGSIGIVLGIIAIFLFIFKGRGEKK

SEQ ID NO: 19125 - protein, 85 aa, unidentified
  REGION 1..85: note = Description of Unknown:cds_NZ_WFIY01000004.1_cds_WP_155864039.1_1973 target sequence
TAKNCYIAPEINGTPLGKLPSNTPIYINIFLPPKNMNELLLLMQEEYHGQVHLSRQQIINEFGDQEKINEISSYLKSNGFNVVFT

SEQ ID NO: 19126 - protein, 85 aa, unidentified
  REGION 1..85: note = Description of Unknown:cds_NZ_WFIY01000004.1_cds_WP_155864039.1_1973 target sequence
TPFSLMAEAPAFKVNALFETQLYLYKNGQEIFYKPYSKPNIPPALQNVLIGGLTNYTAVKTQYLVLGKLVDGVLKPTNSSKQVPL

SEQ ID NO: 19127 - protein, 85 aa, unidentified
  REGION 1..85: note = Description of Unknown:cds_NZ_WFIY01000004.1_cds_WP_155864039.1_1973 target sequence
GLNFAYTMYSPQDLEGAYNVTGPEGKNVTVAIIDAWGDPLICQDIQEFDQEFHLPPANLTIVPIGPYKPIFGLFTGWYIETALDV

SEQ ID NO: 19128 - protein, 85 aa, unidentified
  REGION 1..85: note = Description of Unknown:cds_NZ_WFIY01000004.1_cds_WP_155864039.1_1973 target sequence
EAVHTMAPYAHIELVLSHGCLFCDILQAIIYIVSADNAQVVDMSFGAPENEFTASGMYAYYEGFPIVNYPLVNYYFELGSAEGIT

SEQ ID NO: 19129 - protein, 85 aa, unidentified
  REGION 1..85: note = Description of Unknown:cds_NZ_WFIY01000004.1_cds_WP_155864039.1_1973 target sequence
FIGASGDQGAYEGTYTTFGGVVFPSSSPFVLSVGGTSLYPQITSGYIASMNSTAVYGYENAWSVLPQYLGVGTSTVASGGGYSTF

SEQ ID NO: 19130 - protein, 85 aa, unidentified
  REGION 1..85: note = Description of Unknown:cds_NZ_WFIY01000004.1_cds_WP_155864039.1_1973 target sequence
FPAPYWQASITKSDTRATPDVSADANPYTGFITIVLGNKEVIGGTSLSTQLWGGVIADIDSYIGRPLGLVAPILYSIYENSTLYQ

SEQ ID NO: 19131 - protein, 85 aa, unidentified
  REGION 1..85: note = Description of Unknown:cds_NZ_WFIY01000004.1_cds_WP_155864039.1_1973 target sequence
EAFHEVTQGFNGKYLAHAGYNLVTGLGTPNVGVLEEVIKDYLSSHPELEISLSTCEPGFTMPWYCYCTTFRIVAEISYPNGTIVT

SEQ ID NO: 19132 - protein, 85 aa, unidentified
  REGION 1..85: note = Description of Unknown:cds_NZ_WFIY01000004.1_cds_WP_155864039.1_1973 target sequence
SGNFNAYIYTLKGFLASVPLKYNGTYWVGNFTISKGDPANCWTIVVNGTAGGLSGISQVDIDVGYSFNIISPPEGIIPPNAPVRF

SEQ ID NO: 19133 - protein, 85 aa, unidentified
  REGION 1..85: note = Description of Unknown:cds_NZ_WFIY01000004.1_cds_WP_155864039.1_1973 target sequence
CVCIYNPEGQPVINTTVTMTMLYHGKVVSVTPLVHTRHYGDYRGTLILLYPQPEGTYIIEANNTCGFAYEWEYFGLVVYGAVIPP

SEQ ID NO: 19134 - protein, 85 aa, unidentified
  REGION 1..85: note = Description of Unknown:cds_NZ_WFIY01000004.1_cds_WP_155864039.1_1973 target sequence
INDGMTSAYPGENITVIGFIFNPCFQGIFNATAYAELISLNGKIIAKVPMTLAPDKTILGVYNLFEFHIANITIPNNVTPGYYKV

SEQ ID NO: 19135 - protein, 85 aa, unidentified
  REGION 1..85: note = Description of Unknown:cds_NZ_WFIY01000004.1_cds_WP_155864039.1_1973 target sequence
VITSYLHSIFGPCYGNFTTFIYISNSSLSYQVKSVSEVYEGQCIKVFANITYSNGTEVKYGEFTAGFIPAELNFEQLLVEFYAGV

SEQ ID NO: 19136 - protein, 85 aa, unidentified
  REGION 1..85: note = Description of Unknown:cds_NZ_WFIY01000004.1_cds_WP_155864039.1_1973 target sequence
PMQYNSTLGEWEAVYQIPSILNEQCTIYKGDPIQSLSGFWDVVIEGTSASGENIITGYSYFDVLPYTYIGSKIITPQNVSKVPLL

SEQ ID NO: 19137 - protein, 85 aa, unidentified
  REGION 1..85: note = Description of Unknown:cds_NZ_WFIY01000004.1_cds_WP_155864039.1_1973 target sequence
IFNGTNYILQGIYSPSITIECLHGLVVKCSEIGFVDSINSTLIVERSELASIHAISSSLCLIQDTIGHVINASALNLVKSNATLV

SEQ ID NO: 19138 - protein, 85 aa, unidentified
  REGION 1..85: note = Description of Unknown:cds_NZ_WFIY01000004.1_cds_WP_155864039.1_1973 target sequence
STVIEDSKYAFNITCSKVNLEGVYYKNVMEVTNLPTPTIVAYSPINVTTSSSTIQFNISGKNLKVIGAYIDGKLVSFTSEATSNG

SEQ ID NO: 19139 - protein, 85 aa, unidentified
  REGION 1..85: note = Description of Unknown:cds_NZ_WFIY01000004.1_cds_WP_155864039.1_1973 target sequence
VLVTVPFNASIEPSGAYYITIEVCDGLEYNLSAVIFNSYHEVVDAQISSSLSHDVSSLRSSLTTGEILGSIGIVLGIIAIFLFIF

SEQ ID NO: 19140 - protein, 85 aa, unidentified
  REGION 1..85: note = Description of Unknown:hvTR_P08392 target sequence
ASENKQRPGSPGPTDGPPPTPSPDRDERGALGWGAETEEGGDDPDHDPDHPHDLDDARRDGRAPAAGTDAGEDAGDAVSPRQLAL

SEQ ID NO: 19141 - protein, 85 aa, unidentified
  REGION 1..85: note = Description of Unknown:hvTR_P08392 target sequence
LASMVEEAVRTIPTPDPAASPPRTPAFRADDDDGDEYDDAADAAGDRAPARGREREAPLRGAYPDPTDRLSPRPPAQPPRRRRHG

SEQ ID NO: 19142 - protein, 85 aa, unidentified
  REGION 1..85: note = Description of Unknown:hvTR_P08392 target sequence
RWRPSASSTSSDSGSSSSSSASSSSSSSDEDEDDDGNDAADHAREARAVGRGPSSAAPAAPGRTPPPPGPPPLSEAAPKPRAAAR

SEQ ID NO: 19143 - protein, 85 aa, unidentified
  REGION 1..85: note = Description of Unknown:hvTR_P08392 target sequence
TPAASAGRIERRRARAAVAGRDATGRFTAGQPRRVELDADATSGAFYARYRDGYVSGEPWPGAGPPPPGRVLYGGLGDSRPGLWG

SEQ ID NO: 19144 - protein, 85 aa, unidentified
  REGION 1..85: note = Description of Unknown:hvTR_P08392 target sequence
APEAEEARRRFEASGAPAAVWAPELGDAAQQYALITRLLYTPDAEAMGWLQNPRVVPGDVALDQACFRISGAARNSSSFITGSVA

SEQ ID NO: 19145 - protein, 85 aa, unidentified
  REGION 1..85: note = Description of Unknown:hvTR_P08392 target sequence
RAVPHLGYAMAAGRFGWGLAHAAAAVAMSRRYDRAQKGFLLTSLRRAYAPLLARENAALTGAAGSPGAGADDEGVAAVAAAAPGE

SEQ ID NO: 19146 - protein, 85 aa, unidentified
  REGION 1..85: note = Description of Unknown:hvTR_P08392 target sequence
RAVPAGYGAAGILAALGRLSAAPASPAGGDDPDAARHADADDDAGRRAQAGRVAVECLAACRGILEALAEGFDGDLAAVPGLAGA

SEQ ID NO: 19147 - protein, 85 aa, unidentified
  REGION 1..85: note = Description of Unknown:hvTR_P08392 target sequence
RPASPPRPEGPAGPASPPPPHADAPRLRAWLRELRFVRDALVLMRLRGDLRVAGGSEAAVAAVRAVSLVAGALGPALPRDPRLPS

SEQ ID NO: 19148 - protein, 85 aa, unidentified
  REGION 1..85: note = Description of Unknown:hvTR_P08392 target sequence
SAAAAAADLLFDNQSLRPLLAAAASAPDAADALAAAAASAAPREGRKRKSPGPARPPGGGGPRPPKTKKSGADAPGSDARAPLPA

SEQ ID NO: 19149 - protein, 85 aa, unidentified
  REGION 1..85: note = Description of Unknown:hvTR_P08392 target sequence
PAPPSTPPGPEPAPAQPAAPRAAAAQARPRPVAVSRRPAEGPDPLGGWRRQPPGPSHTAAPAAAALEAYCSPRAVAELTDHPLFP

SEQ ID NO: 19150 - protein, 85 aa, unidentified
  REGION 1..85: note = Description of Unknown:hvTR_P08392 target sequence
VPWRPALMFDPRALASIAARCAGPAPAAQAACGGGDDDDNPHPHGAAGGRLFGPLRASGPLRRMAAWMRQIPDPEDVRVVVLYSP

SEQ ID NO: 19151 - protein, 85 aa, unidentified
  REGION 1..85: note = Description of Unknown:hvTR_P08392 target sequence
LPGEDLAGGGASGGPPEWSAERGGLSCLLAALANRLCGPDTAAWAGNWTGAPDVSALGAQGVLLLSTRDLAFAGAVEFLGLLASA

SEQ ID NO: 19152 - protein, 85 aa, unidentified
  REGION 1..85: note = Description of Unknown:hvTR_P08392 target sequence
GDRRLIVVNTVRACDWPADGPAVSRQHAYLACELLPAVQCAVRWPAARDLRRTVLASGRVFGPGVFARVEAAHARLYPDAPPLRL

SEQ ID NO: 19153 - protein, 85 aa, unidentified
  REGION 1..85: note = Description of Unknown:hvTR_P08392 target sequence
CRGGNVRYRVRTRFGPDTPVPMSPREYRRAVLPALDGRAAASGTTDAMAPGAPDFCEEEAHSHAACARWGLGAPLRPVYVALGRE

SEQ ID NO: 19154 - protein, 85 aa, unidentified
  REGION 1..85: note = Description of Unknown:hvTR_P08392 target sequence
AVRAGPARWRGPRRDFCARALLEPDDDAPPLVLRGDDDGPGALPPAPPGIRWASATGRSGTVLAAAGAVEVLGAEAGLATPPRRE

SEQ ID NO: 19155 - protein, 84 aa, unidentified
  REGION 1..84: note = Description of Unknown:hvTR_P08392 target sequence
PDDDAPPLVLRGDDDGPGALPPAPPGIRWASATGRSGTVLAAAGAVEVLGAEAGLATPPRREVVDWEGAWDEDDGGAFEGDGVL

SEQ ID NO: 19156 - protein, 85 aa, unidentified
  REGION 1..85: note = Description of Unknown:hvTR_P08392 target sequence
RGALGWGAETEEGGDDPDHDPDHPHDLDDARRDGRAPAAGTDAGEDAGDAVSPRQLALLASMVEEAVRTIPTPDPAASPPRTPAF

SEQ ID NO: 19157 - protein, 85 aa, unidentified
  REGION 1..85: note = Description of Unknown:hvTR_P08392 target sequence
RADDDDGDEYDDAADAAGDRAPARGREREAPLRGAYPDPTDRLSPRPPAQPPRRRRHGRWRPSASSTSSDSGSSSSSSASSSSSS

SEQ ID NO: 19158 - protein, 85 aa, unidentified
  REGION 1..85: note = Description of Unknown:hvTR_P08392 target sequence
SDEDEDDDGNDAADHAREARAVGRGPSSAAPAAPGRTPPPPGPPPLSEAAPKPRAAARTPAASAGRIERRRARAAVAGRDATGRF

SEQ ID NO: 19159 - protein, 85 aa, unidentified
  REGION 1..85: note = Description of Unknown:hvTR_P08392 target sequence
TAGQPRRVELDADATSGAFYARYRDGYVSGEPWPGAGPPPPGRVLYGGLGDSRPGLWGAPEAEEARRRFEASGAPAAVWAPELGD

SEQ ID NO: 19160 - protein, 85 aa, unidentified
  REGION 1..85: note = Description of Unknown:hvTR_P08392 target sequence
AAQQYALITRLLYTPDAEAMGWLQNPRVVPGDVALDQACFRISGAARNSSSFITGSVARAVPHLGYAMAAGRFGWGLAHAAAAVA

SEQ ID NO: 19161 - protein, 85 aa, unidentified
  REGION 1..85: note = Description of Unknown:hvTR_P08392 target sequence
MSRRYDRAQKGFLLTSLRRAYAPLLARENAALTGAAGSPGAGADDEGVAAVAAAAPGERAVPAGYGAAGILAALGRLSAAPASPA

SEQ ID NO: 19162 - protein, 85 aa, unidentified
  REGION 1..85: note = Description of Unknown:hvTR_P08392 target sequence
GGDDPDAARHADADDDAGRRAQAGRVAVECLAACRGILEALAEGFDGDLAAVPGLAGARPASPPRPEGPAGPASPPPPHADAPRL

SEQ ID NO: 19163 - protein, 85 aa, unidentified
  REGION 1..85: note = Description of Unknown:hvTR_P08392 target sequence
RAWLRELRFVRDALVLMRLRGDLRVAGGSEAAVAAVRAVSLVAGALGPALPRDPRLPSSAAAAAADLLFDNQSLRPLLAAAASAP

SEQ ID NO: 19164 - protein, 85 aa, unidentified
  REGION 1..85: note = Description of Unknown:hvTR_P08392 target sequence
DAADALAAAAASAAPREGRKRKSPGPARPPGGGGPRPPKTKKSGADAPGSDARAPLPAPAPPSTPPGPEPAPAQPAAPRAAAAQA

SEQ ID NO: 19165 - protein, 85 aa, unidentified
  REGION 1..85: note = Description of Unknown:hvTR_P08392 target sequence
RPRPVAVSRRPAEGPDPLGGWRRQPPGPSHTAAPAAAALEAYCSPRAVAELTDHPLFPVPWRPALMFDPRALASIAARCAGPAPA

SEQ ID NO: 19166 - protein, 85 aa, unidentified
  REGION 1..85: note = Description of Unknown:hvTR_P08392 target sequence
AQAACGGGDDDDNPHPHGAAGGRLFGPLRASGPLRRMAAWMRQIPDPEDVRVVVLYSPLPGEDLAGGGASGGPPEWSAERGGLSC

SEQ ID NO: 19167 - protein, 85 aa, unidentified
  REGION 1..85: note = Description of Unknown:hvTR_P08392 target sequence
LLAALANRLCGPDTAAWAGNWTGAPDVSALGAQGVLLLSTRDLAFAGAVEFLGLLASAGDRRLIVVNTVRACDWPADGPAVSRQH

SEQ ID NO: 19168 - protein, 85 aa, unidentified
  REGION 1..85: note = Description of Unknown:hvTR_P08392 target sequence
AYLACELLPAVQCAVRWPAARDLRRTVLASGRVFGPGVFARVEAAHARLYPDAPPLRLCRGGNVRYRVRTRFGPDTPVPMSPREY

SEQ ID NO: 19169 - protein, 85 aa, unidentified
  REGION 1..85: note = Description of Unknown:hvTR_P08392 target sequence
RRAVLPALDGRAAASGTTDAMAPGAPDFCEEEAHSHAACARWGLGAPLRPVYVALGREAVRAGPARWRGPRRDFCARALLEPDDD

SEQ ID NO: 19170 - protein, 85 aa, unidentified
  REGION 1..85: note = Description of Unknown:cds_NC_024711.1_cds_YP_009052541.1_64 target sequence
AIYQGAIGIHNIKLGSIDVFEIYQGSKLVYPENTEITITFKLNVSGTVTINGYTPVISENNTKFVFTIPVKTDYTAIVTAEHYKP

SEQ ID NO: 19171 - protein, 85 aa, unidentified
  REGION 1..85: note = Description of Unknown:cds_NC_024711.1_cds_YP_009052541.1_64 target sequence
QTISGNSGYLPITHNVELEWEEQFISYTVTFPTDGVKVLFDGIEKGVITNGKLVVLIDDTEAKDSYTVTFKGSKASTYDTSTLIV

SEQ ID NO: 19172 - protein, 85 aa, unidentified
  REGION 1..85: note = Description of Unknown:cds_NC_024711.1_cds_YP_009052541.1_64 target sequence
VNSSIANTGGSYDLKLPTSSVKSGYKRTDYASSTGSITKGSTYAGTWIETVVNLTASFTSSTTLGSISNNVLTIPNNESTNTKSG

SEQ ID NO: 19173 - protein, 85 aa, unidentified
  REGION 1..85: note = Description of Unknown:cds_NC_024711.1_cds_YP_009052541.1_64 target sequence
TLTVTFTLENSQTKQASGALNQAAGAKVYTNWVLDLQTDGTSVEAKGGTRTVTANIARRTYKWNNTGTVYSETATPTLSISGSAS

SEQ ID NO: 19174 - protein, 85 aa, unidentified
  REGION 1..85: note = Description of Unknown:cds_NC_024711.1_cds_YP_009052541.1_64 target sequence
LSGNQIKFTSNESVSARSATLTASYVGLSKTVTITQQAGAKVYSAWSAWTVSISASTQTIAASGGSSTITTNASRSRTWTWNGVG

SEQ ID NO: 19175 - protein, 85 aa, unidentified
  REGION 1..85: note = Description of Unknown:cds_NC_024711.1_cds_YP_009052541.1_64 target sequence
TTHTDTETATPTLSGSAGGFTLSGKTVTASNNTTTNSRSITITATSNSVSKSITITQSAGAKVYGNWSSWTINISADKTSIGATG

SEQ ID NO: 19176 - protein, 85 aa, unidentified
  REGION 1..85: note = Description of Unknown:cds_NC_024711.1_cds_YP_009052541.1_64 target sequence
GTATISTSASRTRSYTWNGVAGSGGTETGNGSPTLSKVSGSGNWTSPKVTYGNNTSTSGKSTVIRATIDSTTKDITISQSAGAKQ

SEQ ID NO: 19177 - protein, 85 aa, unidentified
  REGION 1..85: note = Description of Unknown:cds_NC_024711.1_cds_YP_009052541.1_64 target sequence
YSAWSAWTVNISNSGNVAASGGSSNITTSASRTRTWTWNGVNGSGGTETGTGTPTLSKISGAGSFASNKVTYDNNTSTSVRSTVI

SEQ ID NO: 19178 - protein, 85 aa, unidentified
  REGION 1..85: note = Description of Unknown:cds_NC_024711.1_cds_YP_009052541.1_64 target sequence
RATMDSVTKDTTVTQNAGSKTYSSWGAWSISLSANVTTIAAAGGNATLSTSATRNRTWQWNGTGTTYTENASGSPTLSKVNGAAS

SEQ ID NO: 19179 - protein, 85 aa, unidentified
  REGION 1..85: note = Description of Unknown:cds_NC_024711.1_cds_YP_009052541.1_64 target sequence
LSGSTVSYGNNTSTSSRSSVFRATIDSATKDITISQSAGSKSYGSWSSWSVYCNASSYTVAASGGSVTIYYGASRSRTWTWNGVA

SEQ ID NO: 19180 - protein, 85 aa, unidentified
  REGION 1..85: note = Description of Unknown:cds_NC_024711.1_cds_YP_009052541.1_64 target sequence
GSGGTETENATPSISTGSGGGTLSGSTLSYSNNTSTSVRRTRVTANYNGAINFCDIEQRAGSKVYGSWGAWSVSISASPTNIAAA

SEQ ID NO: 19181 - protein, 85 aa, unidentified
  REGION 1..85: note = Description of Unknown:cds_NC_024711.1_cds_YP_009052541.1_64 target sequence
GGSSTITCNAVRSRQYTWNGVGQNFPETENGNPTLSKSGDGTLSGTTSGSKLTYGNRTATTSRSTTVTATYNGVSKSINITQSAG

SEQ ID NO: 19182 - protein, 85 aa, unidentified
  REGION 1..85: note = Description of Unknown:cds_NC_024711.1_cds_YP_009052541.1_64 target sequence
AKSYGAKVYHTKYYGTNPDGSGLDFTGYPYTNEIDTVADANTISISVYYRLYTTQLWTWNGVAGSGGTETVYYNPDYVNVTNKVN

SEQ ID NO: 19183 - protein, 85 aa, unidentified
  REGION 1..85: note = Description of Unknown:cds_NC_024711.1_cds_YP_009052541.1_64 target sequence
CDVSVANAFNYASMIIITFKLSANDSNTAREYKIEWNWLNHNVITKGTQRANPVRGRLVIKNDYFTSQNVALSIYLDSENVDLIY

SEQ ID NO: 19184 - protein, 85 aa, unidentified
  REGION 1..85: note = Description of Unknown:cds_NC_024711.1_cds_YP_009052541.1_64 target sequence
KGEASYNDIKKTPIGVYVYIPTNTAIMNAGKLQFWFENKDGDGSKYTCTLSSVSTPMNNVSVSNSNNIISVTANTTTSSFTILCQ

SEQ ID NO: 19185 - protein, 84 aa, unidentified
  REGION 1..84: note = Description of Unknown:cds_NC_024711.1_cds_YP_009052541.1_64 target sequence
IPTNTAIMNAGKLQFWFENKDGDGSKYTCTLSSVSTPMNNVSVSNSNNIISVTANTTTSSFTILCQFTMTSNSTLFNVRVLIEP

SEQ ID NO: 19186 - protein, 85 aa, unidentified
  REGION 1..85: note = Description of Unknown:cds_NC_024711.1_cds_YP_009052541.1_64 target sequence
LVYPENTEITITFKLNVSGTVTINGYTPVISENNTKFVFTIPVKTDYTAIVTAEHYKPQTISGNSGYLPITHNVELEWEEQFISY

SEQ ID NO: 19187 - protein, 85 aa, unidentified
  REGION 1..85: note = Description of Unknown:cds_NC_024711.1_cds_YP_009052541.1_64 target sequence
TVTFPTDGVKVLFDGIEKGVITNGKLVVLIDDTEAKDSYTVTFKGSKASTYDTSTLIVVNSSIANTGGSYDLKLPTSSVKSGYKR

SEQ ID NO: 19188 - protein, 85 aa, unidentified
  REGION 1..85: note = Description of Unknown:cds_NC_024711.1_cds_YP_009052541.1_64 target sequence
TDYASSTGSITKGSTYAGTWIETVVNLTASFTSSTTLGSISNNVLTIPNNESTNTKSGTLTVTFTLENSQTKQASGALNQAAGAK

SEQ ID NO: 19189 - protein, 85 aa, unidentified
  REGION 1..85: note = Description of Unknown:cds_NC_024711.1_cds_YP_009052541.1_64 target sequence
VYTNWVLDLQTDGTSVEAKGGTRTVTANIARRTYKWNNTGTVYSETATPTLSISGSASLSGNQIKFTSNESVSARSATLTASYVG

SEQ ID NO: 19190 - protein, 85 aa, unidentified
  REGION 1..85: note = Description of Unknown:cds_NC_024711.1_cds_YP_009052541.1_64 target sequence
LSKTVTITQQAGAKVYSAWSAWTVSISASTQTIAASGGSSTITTNASRSRTWTWNGVGTTHTDTETATPTLSGSAGGFTLSGKTV

SEQ ID NO: 19191 - protein, 85 aa, unidentified
  REGION 1..85: note = Description of Unknown:cds_NC_024711.1_cds_YP_009052541.1_64 target sequence
TASNNTTTNSRSITITATSNSVSKSITITQSAGAKVYGNWSSWTINISADKTSIGATGGTATISTSASRTRSYTWNGVAGSGGTE

SEQ ID NO: 19192 - protein, 85 aa, unidentified
  REGION 1..85: note = Description of Unknown:cds_NC_024711.1_cds_YP_009052541.1_64 target sequence
TGNGSPTLSKVSGSGNWTSPKVTYGNNTSTSGKSTVIRATIDSTTKDITISQSAGAKQYSAWSAWTVNISNSGNVAASGGSSNIT

SEQ ID NO: 19193 - protein, 85 aa, unidentified
  REGION 1..85: note = Description of Unknown:cds_NC_024711.1_cds_YP_009052541.1_64 target sequence
TSASRTRTWTWNGVNGSGGTETGTGTPTLSKISGAGSFASNKVTYDNNTSTSVRSTVIRATMDSVTKDTTVTQNAGSKTYSSWGA

SEQ ID NO: 19194 - protein, 85 aa, unidentified
  REGION 1..85: note = Description of Unknown:cds_NC_024711.1_cds_YP_009052541.1_64 target sequence
WSISLSANVTTIAAAGGNATLSTSATRNRTWQWNGTGTTYTENASGSPTLSKVNGAASLSGSTVSYGNNTSTSSRSSVFRATIDS

SEQ ID NO: 19195 - protein, 85 aa, unidentified
  REGION 1..85: note = Description of Unknown:cds_NC_024711.1_cds_YP_009052541.1_64 target sequence
ATKDITISQSAGSKSYGSWSSWSVYCNASSYTVAASGGSVTIYYGASRSRTWTWNGVAGSGGTETENATPSISTGSGGGTLSGST

SEQ ID NO: 19196 - protein, 85 aa, unidentified
  REGION 1..85: note = Description of Unknown:cds_NC_024711.1_cds_YP_009052541.1_64 target sequence
LSYSNNTSTSVRRTRVTANYNGAINFCDIEQRAGSKVYGSWGAWSVSISASPTNIAAAGGSSTITCNAVRSRQYTWNGVGQNFPE

SEQ ID NO: 19197 - protein, 85 aa, unidentified
  REGION 1..85: note = Description of Unknown:cds_NC_024711.1_cds_YP_009052541.1_64 target sequence
TENGNPTLSKSGDGTLSGTTSGSKLTYGNRTATTSRSTTVTATYNGVSKSINITQSAGAKSYGAKVYHTKYYGTNPDGSGLDFTG

SEQ ID NO: 19198 - protein, 85 aa, unidentified
  REGION 1..85: note = Description of Unknown:cds_NC_024711.1_cds_YP_009052541.1_64 target sequence
YPYTNEIDTVADANTISISVYYRLYTTQLWTWNGVAGSGGTETVYYNPDYVNVTNKVNCDVSVANAFNYASMIIITFKLSANDSN

SEQ ID NO: 19199 - protein, 85 aa, unidentified
  REGION 1..85: note = Description of Unknown:cds_NC_024711.1_cds_YP_009052541.1_64 target sequence
TAREYKIEWNWLNHNVITKGTQRANPVRGRLVIKNDYFTSQNVALSIYLDSENVDLIYKGEASYNDIKKTPIGVYVYIPTNTAIM

SEQ ID NO: 19200 - protein, 85 aa, unidentified
  REGION 1..85: note = Description of Unknown:cds_NC_025803.1_cds_YP_009110698.1_3 target sequence
MRKTARRRHKDAATSDADDKSSTKTKDNVTVPKDNDPTKNKVLVPPAKNPAATGVPSTDGSSQLAVAINVEKIDHSTKSTSPPPE

SEQ ID NO: 19201 - protein, 85 aa, unidentified
  REGION 1..85: note = Description of Unknown:cds_NC_025803.1_cds_YP_009110698.1_3 target sequence
NVVGNKVDLVAPVSSEASAANDKLRQDGVKHVEFTAASDGNTNVIGRTKAVDNEGAIQVVPAKSAAVASAKAMMEQKIPVQGLPK

SEQ ID NO: 19202 - protein, 85 aa, unidentified
  REGION 1..85: note = Description of Unknown:cds_NC_025803.1_cds_YP_009110698.1_3 target sequence
VTRNNGFLCTVCMAQFMNSEALAIHQTTHSIGLDSSLTSYSIATAVEDFIQSWASSTSTANNKTVLTVSEVDDLMMTEGIRLVTW

SEQ ID NO: 19203 - protein, 85 aa, unidentified
  REGION 1..85: note = Description of Unknown:cds_NC_025803.1_cds_YP_009110698.1_3 target sequence
DSGLCSSFELLPIVSSNVIQDVISYSWFTASYNIATPFPQASVVRIVLRTNWAAKLDSQASSRECSVYLAPPTENNIRAFTTVLN

SEQ ID NO: 19204 - protein, 85 aa, unidentified
  REGION 1..85: note = Description of Unknown:cds_NC_025803.1_cds_YP_009110698.1_3 target sequence
SGLTPDGAFNPNTFRMNVLTMCLKFVLSNLHLNRSTPFTMDLTSAAPNLSASQLRVLPGEDNAKWFPVMYPSRVLVPLYNKTADF

SEQ ID NO: 19205 - protein, 85 aa, unidentified
  REGION 1..85: note = Description of Unknown:cds_NC_025803.1_cds_YP_009110698.1_3 target sequence
VNQCIRDRIGRYDRAQIFAGAPSEWADMYETCDSLTLAVRELWMNRVMQMNISPSDIADAISRCSKMLLTVSAPTAPSVARLLPW

SEQ ID NO: 19206 - protein, 85 aa, unidentified
  REGION 1..85: note = Description of Unknown:cds_NC_025803.1_cds_YP_009110698.1_3 target sequence
RVSTQERQLLQCLMYLNVGTNADFIQPILSSFAQVLARVSPLKINPTMIATAMSSIVESTTNTQSPAAAILSKLKPVASDFSDFR

SEQ ID NO: 19207 - protein, 85 aa, unidentified
  REGION 1..85: note = Description of Unknown:cds_NC_025803.1_cds_YP_009110698.1_3 target sequence
LSCAAWLFNGCVTTYLSESSFPANGGSITSIDTLVDMFICLLALPLVTDPNAPCQAFMIVANAMVGYENLPMDDPNFSQQRLAAA

SEQ ID NO: 19208 - protein, 85 aa, unidentified
  REGION 1..85: note = Description of Unknown:cds_NC_025803.1_cds_YP_009110698.1_3 target sequence
FNNPSTWPNCFLNPANIDRRQCPVLRWWAETIHRAWPNPSQIQYGAPDIIGSANIFTPPDVLLLPIQNRPIRITNPTWSVDNEMT

SEQ ID NO: 19209 - protein, 85 aa, unidentified
  REGION 1..85: note = Description of Unknown:cds_NC_025803.1_cds_YP_009110698.1_3 target sequence
VWRGAVIDLIVRIISNGRYQPNWNQSIRASMMNAMTNFRIIKTCTPAYLAELLPVELAAIAPTLPFQPFQVPFARLNRDAVVVHV

SEQ ID NO: 19210 - protein, 85 aa, unidentified
  REGION 1..85: note = Description of Unknown:cds_NC_025803.1_cds_YP_009110698.1_3 target sequence
NVSRQAPDVIAQPALNMPMTQQRTGVPIAVSARPLAVALLSGEYPSDPPLQTNVWYVNTLTPVYSNDGLFNNIQHAMVASEAFST

SEQ ID NO: 19211 - protein, 85 aa, unidentified
  REGION 1..85: note = Description of Unknown:cds_NC_025803.1_cds_YP_009110698.1_3 target sequence
LIALLAQCTDMQLPVARPLQWLRQITLAANEATVFGKLINELFLNCFDLSDKTVLLQPFLESDPRATQLALSYVRYDTTTEVFIP

SEQ ID NO: 19212 - protein, 85 aa, unidentified
  REGION 1..85: note = Description of Unknown:cds_NC_025803.1_cds_YP_009110698.1_3 target sequence
QVRPSALVEATMLVEETLSHEYNLFGICRGDVIIGQHMTPAGFNPLAPPPTVVFTRGDPGVHEFGERSFAHFGLNGDDVTVLDAH

SEQ ID NO: 19213 - protein, 85 aa, unidentified
  REGION 1..85: note = Description of Unknown:cds_NC_025803.1_cds_YP_009110698.1_3 target sequence
GVRRPLLGDWVMPVQVMMLNIGIFPRLMLDRILKGKLRVRLEMGAYPYQLHYYKGRDFTDGFTLLEQWMSKLSPLGVPTVPFLMP

SEQ ID NO: 19214 - protein, 85 aa, unidentified
  REGION 1..85: note = Description of Unknown:cds_NC_025803.1_cds_YP_009110698.1_3 target sequence
ESENHSISSGMATHYMWATEFNDGSLFATNTDLPVTVFGPDKAVPIERFRHLVDPAAQPTTNQLPFTIDLYSAMRRYYLETPPIT

SEQ ID NO: 19215 - protein, 84 aa, unidentified
  REGION 1..84: note = Description of Unknown:cds_NC_025803.1_cds_YP_009110698.1_3 target sequence
MWATEFNDGSLFATNTDLPVTVFGPDKAVPIERFRHLVDPAAQPTTNQLPFTIDLYSAMRRYYLETPPITATVTTFGNGLPALN

SEQ ID NO: 19216 - protein, 85 aa, unidentified
  REGION 1..85: note = Description of Unknown:cds_NC_025803.1_cds_YP_009110698.1_3 target sequence
NVTVPKDNDPTKNKVLVPPAKNPAATGVPSTDGSSQLAVAINVEKIDHSTKSTSPPPENVVGNKVDLVAPVSSEASAANDKLRQD

SEQ ID NO: 19217 - protein, 85 aa, unidentified
  REGION 1..85: note = Description of Unknown:cds_NC_025803.1_cds_YP_009110698.1_3 target sequence
GVKHVEFTAASDGNTNVIGRTKAVDNEGAIQVVPAKSAAVASAKAMMEQKIPVQGLPKVTRNNGFLCTVCMAQFMNSEALAIHQT

SEQ ID NO: 19218 - protein, 85 aa, unidentified
  REGION 1..85: note = Description of Unknown:cds_NC_025803.1_cds_YP_009110698.1_3 target sequence
THSIGLDSSLTSYSIATAVEDFIQSWASSTSTANNKTVLTVSEVDDLMMTEGIRLVTWDSGLCSSFELLPIVSSNVIQDVISYSW

SEQ ID NO: 19219 - protein, 85 aa, unidentified
  REGION 1..85: note = Description of Unknown:cds_NC_025803.1_cds_YP_009110698.1_3 target sequence
FTASYNIATPFPQASVVRIVLRTNWAAKLDSQASSRECSVYLAPPTENNIRAFTTVLNSGLTPDGAFNPNTFRMNVLTMCLKFVL

SEQ ID NO: 19220 - protein, 85 aa, unidentified
  REGION 1..85: note = Description of Unknown:cds_NC_025803.1_cds_YP_009110698.1_3 target sequence
SNLHLNRSTPFTMDLTSAAPNLSASQLRVLPGEDNAKWFPVMYPSRVLVPLYNKTADFVNQCIRDRIGRYDRAQIFAGAPSEWAD

SEQ ID NO: 19221 - protein, 85 aa, unidentified
  REGION 1..85: note = Description of Unknown:cds_NC_025803.1_cds_YP_009110698.1_3 target sequence
MYETCDSLTLAVRELWMNRVMQMNISPSDIADAISRCSKMLLTVSAPTAPSVARLLPWRVSTQERQLLQCLMYLNVGTNADFIQP

SEQ ID NO: 19222 - protein, 85 aa, unidentified
  REGION 1..85: note = Description of Unknown:cds_NC_025803.1_cds_YP_009110698.1_3 target sequence
ILSSFAQVLARVSPLKINPTMIATAMSSIVESTTNTQSPAAAILSKLKPVASDFSDFRLSCAAWLFNGCVTTYLSESSFPANGGS

SEQ ID NO: 19223 - protein, 85 aa, unidentified
  REGION 1..85: note = Description of Unknown:cds_NC_025803.1_cds_YP_009110698.1_3 target sequence
ITSIDTLVDMFICLLALPLVTDPNAPCQAFMIVANAMVGYENLPMDDPNFSQQRLAAAFNNPSTWPNCFLNPANIDRRQCPVLRW

SEQ ID NO: 19224 - protein, 85 aa, unidentified
  REGION 1..85: note = Description of Unknown:cds_NC_025803.1_cds_YP_009110698.1_3 target sequence
WAETIHRAWPNPSQIQYGAPDIIGSANIFTPPDVLLLPIQNRPIRITNPTWSVDNEMTVWRGAVIDLIVRIISNGRYQPNWNQSI

SEQ ID NO: 19225 - protein, 85 aa, unidentified
  REGION 1..85: note = Description of Unknown:cds_NC_025803.1_cds_YP_009110698.1_3 target sequence
RASMMNAMTNFRIIKTCTPAYLAELLPVELAAIAPTLPFQPFQVPFARLNRDAVVVHVNVSRQAPDVIAQPALNMPMTQQRTGVP

SEQ ID NO: 19226 - protein, 85 aa, unidentified
  REGION 1..85: note = Description of Unknown:cds_NC_025803.1_cds_YP_009110698.1_3 target sequence
IAVSARPLAVALLSGEYPSDPPLQTNVWYVNTLTPVYSNDGLFNNIQHAMVASEAFSTLIALLAQCTDMQLPVARPLQWLRQITL

SEQ ID NO: 19227 - protein, 85 aa, unidentified
  REGION 1..85: note = Description of Unknown:cds_NC_025803.1_cds_YP_009110698.1_3 target sequence
AANEATVFGKLINELFLNCFDLSDKTVLLQPFLESDPRATQLALSYVRYDTTTEVFIPQVRPSALVEATMLVEETLSHEYNLFGI

SEQ ID NO: 19228 - protein, 85 aa, unidentified
  REGION 1..85: note = Description of Unknown:cds_NC_025803.1_cds_YP_009110698.1_3 target sequence
CRGDVIIGQHMTPAGFNPLAPPPTVVFTRGDPGVHEFGERSFAHFGLNGDDVTVLDAHGVRRPLLGDWVMPVQVMMLNIGIFPRL

SEQ ID NO: 19229 - protein, 85 aa, unidentified
  REGION 1..85: note = Description of Unknown:cds_NC_025803.1_cds_YP_009110698.1_3 target sequence
MLDRILKGKLRVRLEMGAYPYQLHYYKGRDFTDGFTLLEQWMSKLSPLGVPTVPFLMPESENHSISSGMATHYMWATEFNDGSLF

SEQ ID NO: 19230 - protein, 85 aa, unidentified
  REGION 1..85: note = Description of Unknown:cds_NC_038662.1_cds_YP_009507780.1_3 target sequence
MRKTARRRHKDAAISDADDKSSTKNKDDVTVPKDSDTAKNKVSVPPAKNPAATGIPSTDGSSQLAVAVNVEKVDHSTKSTSPPPE

SEQ ID NO: 19231 - protein, 85 aa, unidentified
  REGION 1..85: note = Description of Unknown:cds_NC_038662.1_cds_YP_009507780.1_3 target sequence
NVIGNKVDLVAPVSSEASAANDKLRQDGVKHVEFTAAGDGNTNVIGRTKAVDNEGAIQVVPAKSAAVASAKAMMEQKIPVQGLPK

SEQ ID NO: 19232 - protein, 85 aa, unidentified; identical to SEQ ID NO: 19202
  REGION 1..85: note = Description of Unknown:cds_NC_038662.1_cds_YP_009507780.1_3 target sequence

SEQ ID NO: 19233 - protein, 85 aa, unidentified; identical to SEQ ID NO: 19203
  REGION 1..85: note = Description of Unknown:cds_NC_038662.1_cds_YP_009507780.1_3 target sequence

SEQ ID NO: 19234 - protein, 85 aa, unidentified; identical to SEQ ID NO: 19204
  REGION 1..85: note = Description of Unknown:cds_NC_038662.1_cds_YP_009507780.1_3 target sequence

SEQ ID NO: 19235 - protein, 85 aa, unidentified; identical to SEQ ID NO: 19205
  REGION 1..85: note = Description of Unknown:cds_NC_038662.1_cds_YP_009507780.1_3 target sequence

SEQ ID NO: 19236 - protein, 85 aa, unidentified; identical to SEQ ID NO: 19206
  REGION 1..85: note = Description of Unknown:cds_NC_038662.1_cds_YP_009507780.1_3 target sequence

SEQ ID NO: 19237 - protein, 85 aa, unidentified; identical to SEQ ID NO: 19207
  REGION 1..85: note = Description of Unknown:cds_NC_038662.1_cds_YP_009507780.1_3 target sequence

SEQ ID NO: 19238 - protein, 85 aa, unidentified; identical to SEQ ID NO: 19208
  REGION 1..85: note = Description of Unknown:cds_NC_038662.1_cds_YP_009507780.1_3 target sequence

SEQ ID NO: 19239 - protein, 85 aa, unidentified
  REGION 1..85: note = Description of Unknown:cds_NC_038662.1_cds_YP_009507780.1_3 target sequence
IWRGAVIDLIVRIISNGRYQPNWNQSIRASMMNAITNFRIIKTCTPAYLAELLPVELAAIAPTLPFQPFQVPFARLNRDAVVVHV

SEQ ID NO: 19240 - protein, 85 aa, unidentified; identical to SEQ ID NO: 19210
  REGION 1..85: note = Description of Unknown:cds_NC_038662.1_cds_YP_009507780.1_3 target sequence

SEQ ID NO: 19241 - protein, 85 aa, unidentified
  REGION 1..85: note = Description of Unknown:cds_NC_038662.1_cds_YP_009507780.1_3 target sequence
LIALLAQCTDMQLPVARPLQWLRQITLAANEATVFGKLINELFLNCFDLSEKTVLLQPFLESDPRATQLALSYVRYDTTTEVFIP

SEQ ID NO: 19242 - protein, 85 aa, unidentified
  REGION 1..85: note = Description of Unknown:cds_NC_038662.1_cds_YP_009507780.1_3 target sequence
QVRPSALVEATMLVEETLSHEYNLFGICRGDVIIGQHMTPSGFNPLAPPPTVVFTRGDPGVHEFGERSFAHFGLNGDDVTVLDAH

SEQ ID NO: 19243 - protein, 85 aa, unidentified; identical to SEQ ID NO: 19213
  REGION 1..85: note = Description of Unknown:cds_NC_038662.1_cds_YP_009507780.1_3 target sequence

SEQ ID NO: 19244 - protein, 85 aa, unidentified
  REGION 1..85: note = Description of Unknown:cds_NC_038662.1_cds_YP_009507780.1_3 target sequence
ESENHSISSGMATHYIWATEFNDGSLFATNTDLPVTVFGPDKAVPIERFRHLVDPAAQSTTNQLPFTIDLYSAMRRYYLETPPIT

SEQ ID NO: 19245 - protein, 84 aa, unidentified
  REGION 1..84: note = Description of Unknown:cds_NC_038662.1_cds_YP_009507780.1_3 target sequence
IWATEFNDGSLFATNTDLPVTVFGPDKAVPIERFRHLVDPAAQSTTNQLPFTIDLYSAMRRYYLETPPITATVTTFGNGLPALN

SEQ ID NO: 19246 - protein, 85 aa, unidentified
  REGION 1..85: note = Description of Unknown:cds_NC_038662.1_cds_YP_009507780.1_3 target sequence
DVTVPKDSDTAKNKVSVPPAKNPAATGIPSTDGSSQLAVAVNVEKVDHSTKSTSPPPENVIGNKVDLVAPVSSEASAANDKLRQD

SEQ ID NO: 19247 - protein, 85 aa, unidentified
  REGION 1..85: note = Description of Unknown:cds_NC_038662.1_cds_YP_009507780.1_3 target sequence
GVKHVEFTAAGDGNTNVIGRTKAVDNEGAIQVVPAKSAAVASAKAMMEQKIPVQGLPKVTRNNGFLCTVCMAQFMNSEALAIHQT

SEQ ID NO: 19248 - protein, 85 aa, unidentified; identical to SEQ ID NO: 19218
  REGION 1..85: note = Description of Unknown:cds_NC_038662.1_cds_YP_009507780.1_3 target sequence

SEQ ID NO: 19249 - protein, 85 aa, unidentified; identical to SEQ ID NO: 19219
  REGION 1..85: note = Description of Unknown:cds_NC_038662.1_cds_YP_009507780.1_3 target sequence

SEQ ID NO: 19250 - protein, 85 aa, unidentified; identical to SEQ ID NO: 19220
  REGION 1..85: note = Description of Unknown:cds_NC_038662.1_cds_YP_009507780.1_3 target sequence

SEQ ID NO: 19251 - protein, 85 aa, unidentified; identical to SEQ ID NO: 19221
  REGION 1..85: note = Description of Unknown:cds_NC_038662.1_cds_YP_009507780.1_3 target sequence

SEQ ID NO: 19252 - protein, 85 aa, unidentified; identical to SEQ ID NO: 19222
  REGION 1..85: note = Description of Unknown:cds_NC_038662.1_cds_YP_009507780.1_3 target sequence

SEQ ID NO: 19253 - protein, 85 aa, unidentified; identical to SEQ ID NO: 19223
  REGION 1..85: note = Description of Unknown:cds_NC_038662.1_cds_YP_009507780.1_3 target sequence

SEQ ID NO: 19254 - protein, 85 aa, unidentified
  REGION 1..85: note = Description of Unknown:cds_NC_038662.1_cds_YP_009507780.1_3 target sequence
WAETIHRAWPNPSQIQYGAPDIIGSANIFTPPDVLLLPIQNRPIRITNPTWSVDNEMTIWRGAVIDLIVRIISNGRYQPNWNQSI

SEQ ID NO: 19255 - protein, 85 aa, unidentified
  REGION 1..85: note = Description of Unknown:cds_NC_038662.1_cds_YP_009507780.1_3 target sequence
RASMMNAITNFRIIKTCTPAYLAELLPVELAAIAPTLPFQPFQVPFARLNRDAVVVHVNVSRQAPDVIAQPALNMPMTQQRTGVP

SEQ ID NO: 19256 - protein, 85 aa, unidentified; identical to SEQ ID NO: 19226
  REGION 1..85: note = Description of Unknown:cds_NC_038662.1_cds_YP_009507780.1_3 target sequence

SEQ ID NO: 19257 - protein, 85 aa, unidentified
  REGION 1..85: note = Description of Unknown:cds_NC_038662.1_cds_YP_009507780.1_3 target sequence
AANEATVFGKLINELFLNCFDLSEKTVLLQPFLESDPRATQLALSYVRYDTTTEVFIPQVRPSALVEATMLVEETLSHEYNLFGI

SEQ ID NO: 19258 - protein, 85 aa, unidentified
  REGION 1..85: note = Description of Unknown:cds_NC_038662.1_cds_YP_009507780.1_3 target sequence
CRGDVIIGQHMTPSGFNPLAPPPTVVFTRGDPGVHEFGERSFAHFGLNGDDVTVLDAHGVRRPLLGDWVMPVQVMMLNIGIFPRL

SEQ ID NO: 19259 - protein, 85 aa, unidentified
  REGION 1..85: note = Description of Unknown:cds_NC_038662.1_cds_YP_009507780.1_3 target sequence
MLDRILKGKLRVRLEMGAYPYQLHYYKGRDFTDGFTLLEQWMSKLSPLGVPTVPFLMPESENHSISSGMATHYIWATEFNDGSLF

SEQ ID NO: 19260 - protein, 85 aa, unidentified
  REGION 1..85: note = Description of Unknown:cds_NZ_WFIY01000004.1_cds_WP_155864105.1_2053 target sequence
RGKSIIILFLLIFATIQFLPITHSQPTAPTGFKTVGSLQPNKEVLFTVYIPLKCTCKIFYYAEETSNPSSPLYHHFLTRSQIQQF

SEQ ID NO: 19261 - protein, 85 aa, unidentified
  REGION 1..85: note = Description of Unknown:cds_NZ_WFIY01000004.1_cds_WP_155864105.1_2053 target sequence
LPTEKYEEVLNQLKAGGFKIILSTLDSVIVAEGTVSQIHKYLGLNFAVYTNGTLTFYESYGNPTIPGVVIVSQNLTAYLFAHPQF

SEQ ID NO: 19262 - protein, 85 aa, unidentified
  REGION 1..85: note = Description of Unknown:cds_NZ_WFIY01000004.1_cds_WP_155864105.1_2053 target sequence
LVTQKEIQSFASKLANQVNITAPTEAYWPTALQKVYNATALYAIKDYGQGYNIGILDFCGDPYIFQQLAYFDKVTGLPPTNFTVI

SEQ ID NO: 19263 - protein, 85 aa, unidentified
  REGION 1..85: note = Description of Unknown:cds_NZ_WFIY01000004.1_cds_WP_155864105.1_2053 target sequence
PIGPYNPSTGIITGWAGEISLDVEVAHAMAPKANITLYIANGALSLPAVIACIVNQDIVDDLSQSFGIPESIFSLFNAQEFYTCV

SEQ ID NO: 19264 - protein, 85 aa, unidentified
  REGION 1..85: note = Description of Unknown:cds_NZ_WFIY01000004.1_cds_WP_155864105.1_2053 target sequence
YESDVYYALGSAEGITFLASSGDGGGSGYSNGPIGSVIYPSTSPFVTAVGGTTTYIQFPGNSTQTAWSNYGFVPDDVNFGGSTGG

SEQ ID NO: 19265 - protein, 85 aa, unidentified
  REGION 1..85: note = Description of Unknown:cds_NZ_WFIY01000004.1_cds_WP_155864105.1_2053 target sequence
VSVIEPKPYYEWGIPTPSTYPAGKTTPAISANANVYPGVYIIFPGNVTEITGGTSEASPLTAGLLALIMNYAHSRLGNLNPVIYM

SEQ ID NO: 19266 - protein, 85 aa, unidentified
  REGION 1..85: note = Description of Unknown:cds_NZ_WFIY01000004.1_cds_WP_155864105.1_2053 target sequence
FGENSTIYSKVFNPITFGYNIPWTATYGYNLVTGFGTLNVGEFALYYNMTMKEKKELNIQVQVVNSSGESQPQYFPGEVVEIIAN

SEQ ID NO: 19267 - protein, 85 aa, unidentified
  REGION 1..85: note = Description of Unknown:cds_NZ_WFIY01000004.1_cds_WP_155864105.1_2053 target sequence
VTYNNTPVSSGNFNAIISNVMGNISRVIMAYNPLTKEWYGIVKLPSNANGILSVTVVGESGGIIGYGMDEIFSGYYAQFLLPETF

SEQ ID NO: 19268 - protein, 85 aa, unidentified
  REGION 1..85: note = Description of Unknown:cds_NZ_WFIY01000004.1_cds_WP_155864105.1_2053 target sequence
VPILANECIIISNVTNALGQLYNFSTVNITIYKYCILNNSYTFVANTTLSITPSGVAWVGKYPCLLPGDYLIMADNVFGFVAFTN

SEQ ID NO: 19269 - protein, 85 aa, unidentified
  REGION 1..85: note = Description of Unknown:cds_NZ_WFIY01000004.1_cds_WP_155864105.1_2053 target sequence
GVSLQGEYPYGLFIIPPVIEEPGSVYPGENIIIEGIIQPPSILFEYISSSLGICEYSAVLDGSNVTAELVNPEGKVVSTTKIFFN

SEQ ID NO: 19270 - protein, 85 aa, unidentified
  REGION 1..85: note = Description of Unknown:cds_NZ_WFIY01000004.1_cds_WP_155864105.1_2053 target sequence
CQGIYFGELHVPSDATPGLYTILLHSSYFSLSLGQYINGSFYGQIYVQEPSTVNVKVQSYSFEGQTLTIYANITYPNGTEVKYGM

SEQ ID NO: 19271 - protein, 85 aa, unidentified
  REGION 1..85: note = Description of Unknown:cds_NZ_WFIY01000004.1_cds_WP_155864105.1_2053 target sequence
YSATVYPQSLCFEYSQISTMVELPLWYNAKLGLWVGNVTLPSTLYPGNLTYLAGLNYYGAPFRILITGESYNGYSTSPSPTLAGT

SEQ ID NO: 19272 - protein, 85 aa, unidentified
  REGION 1..85: note = Description of Unknown:cds_NZ_WFIY01000004.1_cds_WP_155864105.1_2053 target sequence
TYVLPYTAIEGKTLDGFQTYNSALINDTIITTNGTLTNDILINDTIIGNVTIVGSNLTNVKFLNSSITLISSSASNLYLDDSNIT

SEQ ID NO: 19273 - protein, 85 aa, unidentified
  REGION 1..85: note = Description of Unknown:cds_NZ_WFIY01000004.1_cds_WP_155864105.1_2053 target sequence
LVDSSVNGITLVNSMIAIENSRISNISPALPEIEIISPTANQNLTGVYTISFNVIGQDVSKVIVLLNGQEITEFSGNGTFSYALN

SEQ ID NO: 19274 - protein, 85 aa, unidentified
  REGION 1..85: note = Description of Unknown:cds_NZ_WFIY01000004.1_cds_WP_155864105.1_2053 target sequence
TTKYPDGSYTIEVEAIQTDGLHTKSSVTVNFENKLENLCKTVNTDETSLSSSISNLDNSLTSVKTSLSTLIYITLGLAVIAIIIG

SEQ ID NO: 19275 - protein, 84 aa, unidentified
  REGION 1..84: note = Description of Unknown:cds_NZ_WFIY01000004.1_cds_WP_155864105.1_2053 target sequence
VEAIQTDGLHTKSSVTVNFENKLENLCKTVNTDETSLSSSISNLDNSLTSVKTSLSTLIYITLGLAVIAIIIGIVAIIMSRRRK

SEQ ID NO: 19276 - protein, 85 aa, unidentified
  REGION 1..85: note = Description of Unknown:cds_NZ_WFIY01000004.1_cds_WP_155864105.1_2053 target sequence
APTGFKTVGSLQPNKEVLFTVYIPLKCTCKIFYYAEETSNPSSPLYHHFLTRSQIQQFLPTEKYEEVLNQLKAGGFKIILSTLDS

SEQ ID NO: 19277 - protein, 85 aa, unidentified
  REGION 1..85: note = Description of Unknown:cds_NZ_WFIY01000004.1_cds_WP_155864105.1_2053 target sequence
VIVAEGTVSQIHKYLGLNFAVYTNGTLTFYESYGNPTIPGVVIVSQNLTAYLFAHPQFLVTQKEIQSFASKLANQVNITAPTEAY

SEQ ID NO: 19278 - protein, 85 aa, unidentified
  REGION 1..85: note = Description of Unknown:cds_NZ_WFIY01000004.1_cds_WP_155864105.1_2053 target sequence
WPTALQKVYNATALYAIKDYGQGYNIGILDFCGDPYIFQQLAYFDKVTGLPPTNFTVIPIGPYNPSTGIITGWAGEISLDVEVAH

SEQ ID NO: 19279 - protein, 85 aa, unidentified
  REGION 1..85: note = Description of Unknown:cds_NZ_WFIY01000004.1_cds_WP_155864105.1_2053 target sequence
AMAPKANITLYIANGALSLPAVIACIVNQDIVDDLSQSFGIPESIFSLFNAQEFYTCVYESDVYYALGSAEGITFLASSGDGGGS

SEQ ID NO: 19280 - protein, 85 aa, unidentified
  REGION 1..85: note = Description of Unknown:cds_NZ_WFIY01000004.1_cds_WP_155864105.1_2053 target sequence
GYSNGPIGSVIYPSTSPFVTAVGGTTTYIQFPGNSTQTAWSNYGFVPDDVNFGGSTGGVSVIEPKPYYEWGIPTPSTYPAGKTTP

SEQ ID NO: 19281 - protein, 85 aa, unidentified
  REGION 1..85: note = Description of Unknown:cds_NZ_WFIY01000004.1_cds_WP_155864105.1_2053 target sequence
AISANANVYPGVYIIFPGNVTEITGGTSEASPLTAGLLALIMNYAHSRLGNLNPVIYMFGENSTIYSKVFNPITFGYNIPWTATY

SEQ ID NO: 19282 - protein, 85 aa, unidentified
  REGION 1..85: note = Description of Unknown:cds_NZ_WFIY01000004.1_cds_WP_155864105.1_2053 target sequence
GYNLVTGFGTLNVGEFALYYNMTMKEKKELNIQVQVVNSSGESQPQYFPGEVVEIIANVTYNNTPVSSGNFNAIISNVMGNISRV

SEQ ID NO: 19283 - protein, 85 aa, unidentified
  REGION 1..85: note = Description of Unknown:cds_NZ_WFIY01000004.1_cds_WP_155864105.1_2053 target sequence
IMAYNPLTKEWYGIVKLPSNANGILSVTVVGESGGIIGYGMDEIFSGYYAQFLLPETFVPILANECIIISNVTNALGQLYNFSTV

SEQ ID NO: 19284 - protein, 85 aa, unidentified
  REGION 1..85: note = Description of Unknown:cds_NZ_WFIY01000004.1_cds_WP_155864105.1_2053 target sequence
NITIYKYCILNNSYTFVANTTLSITPSGVAWVGKYPCLLPGDYLIMADNVFGFVAFTNGVSLQGEYPYGLFIIPPVIEEPGSVYP

SEQ ID NO: 19285 - protein, 85 aa, unidentified
  REGION 1..85: note = Description of Unknown:cds_NZ_WFIY01000004.1_cds_WP_155864105.1_2053 target sequence
GENIIIEGIIQPPSILFEYISSSLGICEYSAVLDGSNVTAELVNPEGKVVSTTKIFFNCQGIYFGELHVPSDATPGLYTILLHSS

SEQ ID NO: 19286 - protein, 85 aa, unidentified
  REGION 1..85: note = Description of Unknown:cds_NZ_WFIY01000004.1_cds_WP_155864105.1_2053 target sequence
YFSLSLGQYINGSFYGQIYVQEPSTVNVKVQSYSFEGQTLTIYANITYPNGTEVKYGMYSATVYPQSLCFEYSQISTMVELPLWY

SEQ ID NO: 19287 - protein, 85 aa, unidentified
  REGION 1..85: note = Description of Unknown:cds_NZ_WFIY01000004.1_cds_WP_155864105.1_2053 target sequence
NAKLGLWVGNVTLPSTLYPGNLTYLAGLNYYGAPFRILITGESYNGYSTSPSPTLAGTTYVLPYTAIEGKTLDGFQTYNSALIND

SEQ ID NO: 19288 - protein, 85 aa, unidentified
  REGION 1..85: note = Description of Unknown:cds_NZ_WFIY01000004.1_cds_WP_155864105.1_2053 target sequence
TIITTNGTLTNDILINDTIIGNVTIVGSNLTNVKFLNSSITLISSSASNLYLDDSNITLVDSSVNGITLVNSMIAIENSRISNIS

SEQ ID NO: 19289 - protein, 85 aa, unidentified
  REGION 1..85: note = Description of Unknown:cds_NZ_WFIY01000004.1_cds_WP_155864105.1_2053 target sequence
PALPEIEIISPTANQNLTGVYTISFNVIGQDVSKVIVLLNGQEITEFSGNGTFSYALNTTKYPDGSYTIEVEAIQTDGLHTKSSV

SEQ ID NO: 19290 - protein, 85 aa, unidentified
  REGION 1..85: note = Description of Unknown:cds_NC_030656.1_cds_YP_009268789.1_74 target sequence
AVIAKVSYSLYSQNEINATDVLISHIKNDDEIGTVKDPRLGANDGALCKTCNKTELECFGHWGKVRLYESHIVKPEYINEVVRLL

SEQ ID NO: 19291 - protein, 85 aa, unidentified
  REGION 1..85: note = Description of Unknown:cds_NC_030656.1_cds_YP_009268789.1_74 target sequence
GHICIRCGLMRSRDPYIVENIEKLDSHSIKKLKDKVLSKKKICWNNKCMQPYQKVTFSKKKICFVNKADDIPIPNALIYQKLTSI

SEQ ID NO: 19292 - protein, 85 aa, unidentified
  REGION 1..85: note = Description of Unknown:cds_NC_030656.1_cds_YP_009268789.1_74 target sequence
HRKFWPLLDLQQYPGTLFYRGSFPVPPLIIRPSVNFWVDSIPKETNELTYLLGVIVKLCNNNAEEHAIQKAVIEYDNIKIIANNS

SEQ ID NO: 19293 - protein, 85 aa, unidentified
  REGION 1..85: note = Description of Unknown:cds_NC_030656.1_cds_YP_009268789.1_74 target sequence
TSINLAYITSGKQNMIRSYIVARRKDQTARSVIGPDPNLSINNVGVPNYIRNTLTEKIFVNNFTISLVKELFEKNEIKFYYNKQL

SEQ ID NO: 19294 - protein, 85 aa, unidentified
  REGION 1..85: note = Description of Unknown:cds_NC_030656.1_cds_YP_009268789.1_74 target sequence
KQLTRIKSGKFIRNKIHLVPGDWVEVSMRENTSIIVGRQPSLHKYNVIASSAKPADGFTITIPPGIANSQNADFDGDEEWMILEQ

SEQ ID NO: 19295 - protein, 85 aa, unidentified
  REGION 1..85: note = Description of Unknown:cds_NC_030656.1_cds_YP_009268789.1_74 target sequence
NPKSVVEQSILMYPTTILKHDIHGAPVYGSIQDEIVAAYSLYKENDLSLSSVCNILGKYSLSFTGNKKTFTGKDIFEFLINEKIS

SEQ ID NO: 19296 - protein, 85 aa, unidentified
  REGION 1..85: note = Description of Unknown:cds_NC_030656.1_cds_YP_009268789.1_74 target sequence
YPGIIDDGKLITDVIDNNFVVSMRQMSFAGLISDYASNVEGAAFVDKLSYVLKRYLTQYGFSVTFRDLRPSPTFTNQLRALNLNK

SEQ ID NO: 19297 - protein, 85 aa, unidentified
  REGION 1..85: note = Description of Unknown:cds_NC_030656.1_cds_YP_009268789.1_74 target sequence
MELIKESYKNYLNDVAAKKILPMFEADESDAVETVFANLTNLNITEINTYMQETLKNNPNNNLLKMAQAGYKVNSTELMYILGTY

SEQ ID NO: 19298 - protein, 85 aa, unidentified
  REGION 1..85: note = Description of Unknown:cds_NC_030656.1_cds_YP_009268789.1_74 target sequence
GQQRVNGEIPKPRVLGRILPYNLPDSKDPEGFGYITNSLMQGLTGSQYYYAMLVARSQSTDIVCETSRTGTLARKVIKKMEDMVI

SEQ ID NO: 19299 - protein, 85 aa, unidentified
  REGION 1..85: note = Description of Unknown:cds_NC_030656.1_cds_YP_009268789.1_74 target sequence
DGYGQVVYGNILIKYAANYTKISGQYGKPVELLFPNENMTWYLEISALWNSIYKGFIYSQRQKLTKKILSPFNFQVFVKKAKDNE

SEQ ID NO: 19300 - protein, 85 aa, unidentified
  REGION 1..85: note = Description of Unknown:cds_NC_030656.1_cds_YP_009268789.1_74 target sequence
TAISAKELYDMIQNVILNIKENYYFNITNIQFIEYVLLTHLNPSRVKITKQTAILIFEKLYEKLNYTLGGGTPIGIISAQVLSEK

SEQ ID NO: 19301 - protein, 85 aa, unidentified
  REGION 1..85: note = Description of Unknown:cds_NC_030656.1_cds_YP_009268789.1_74 target sequence
FTQQALSSFHTTEKSGGVMRKLGFNEFHNLTNLSKNKAEIITLITEDVDKLKTLKVNFEFVCLGELLPDISVTKEPDYYVISVVI

SEQ ID NO: 19302 - protein, 85 aa, unidentified
  REGION 1..85: note = Description of Unknown:cds_NC_030656.1_cds_YP_009268789.1_74 target sequence
NRLYIKRLNLTELIVEHIIERFVSYNVMVTEWGLDTIIEDDQTIKFNIYANFAEPQVLNVNKFMIVLPGAASKGKISKFKIPITE

SEQ ID NO: 19303 - protein, 85 aa, unidentified
  REGION 1..85: note = Description of Unknown:cds_NC_030656.1_cds_YP_009268789.1_74 target sequence
YLAYYDFDSTKKMYRITVELMSLKELGSFDLENVNVIPGVWNTFEIFGIESVQNYLCESLLNTYGDGFDYLYQACDLLSSLLCSN

SEQ ID NO: 19304 - protein, 85 aa, unidentified
  REGION 1..85: note = Description of Unknown:cds_NC_030656.1_cds_YP_009268789.1_74 target sequence
YEPESINKFKFWSVSALKKATFGDNRALLNAALHNKTEPVNDNSSCHFFSKVPKIGTGYYKYYINLDMLTRLEKKISANIATKKV

SEQ ID NO: 19305 - protein, 84 aa, unidentified
  REGION 1..84: note = Description of Unknown:cds_NC_030656.1_cds_YP_009268789.1_74 target sequence
WSVSALKKATFGDNRALLNAALHNKTEPVNDNSSCHFFSKVPKIGTGYYKYYINLDMLTRLEKKISANIATKKVEEIDETAEEF

SEQ ID NO: 19306 - protein, 85 aa, unidentified
  REGION 1..85: note = Description of Unknown:cds_NC_030656.1_cds_YP_009268789.1_74 target sequence
NDDEIGTVKDPRLGANDGALCKTCNKTELECFGHWGKVRLYESHIVKPEYINEVVRLLGHICIRCGLMRSRDPYIVENIEKLDSH

SEQ ID NO: 19307 - protein, 85 aa, unidentified
  REGION 1..85: note = Description of Unknown:cds_NC_030656.1_cds_YP_009268789.1_74 target sequence
SIKKLKDKVLSKKKICWNNKCMQPYQKVTFSKKKICFVNKADDIPIPNALIYQKLTSIHRKFWPLLDLQQYPGTLFYRGSFPVPP

SEQ ID NO: 19308 - protein, 85 aa, unidentified
  REGION 1..85: note = Description of Unknown:cds_NC_030656.1_cds_YP_009268789.1_74 target sequence
LIIRPSVNFWVDSIPKETNELTYLLGVIVKLCNNNAEEHAIQKAVIEYDNIKIIANNSTSINLAYITSGKQNMIRSYIVARRKDQ

SEQ ID NO: 19309 - protein, 85 aa, unidentified
  REGION 1..85: note = Description of Unknown:cds_NC_030656.1_cds_YP_009268789.1_74 target sequence
TARSVIGPDPNLSINNVGVPNYIRNTLTEKIFVNNFTISLVKELFEKNEIKFYYNKQLKQLTRIKSGKFIRNKIHLVPGDWVEVS

SEQ ID NO: 19310 - protein, 85 aa, unidentified
  REGION 1..85: note = Description of Unknown:cds_NC_030656.1_cds_YP_009268789.1_74 target sequence
MRENTSIIVGRQPSLHKYNVIASSAKPADGFTITIPPGIANSQNADFDGDEEWMILEQNPKSVVEQSILMYPTTILKHDIHGAPV

SEQ ID NO: 19311 - protein, 85 aa, unidentified
  REGION 1..85: note = Description of Unknown:cds_NC_030656.1_cds_YP_009268789.1_74 target sequence
YGSIQDEIVAAYSLYKENDLSLSSVCNILGKYSLSFTGNKKTFTGKDIFEFLINEKISYPGIIDDGKLITDVIDNNFVVSMRQMS

SEQ ID NO: 19312 - protein, 85 aa, unidentified
  REGION 1..85: note = Description of Unknown:cds_NC_030656.1_cds_YP_009268789.1_74 target sequence
FAGLISDYASNVEGAAFVDKLSYVLKRYLTQYGFSVTFRDLRPSPTFTNQLRALNLNKMELIKESYKNYLNDVAAKKILPMFEAD

SEQ ID NO: 19313 - protein, 85 aa, unidentified
  REGION 1..85: note = Description of Unknown:cds_NC_030656.1_cds_YP_009268789.1_74 target sequence
ESDAVETVFANLTNLNITEINTYMQETLKNNPNNNLLKMAQAGYKVNSTELMYILGTYGQQRVNGEIPKPRVLGRILPYNLPDSK

SEQ ID NO: 19314 - protein, 85 aa, unidentified
  REGION 1..85: note = Description of Unknown:cds_NC_030656.1_cds_YP_009268789.1_74 target sequence
DPEGFGYITNSLMQGLTGSQYYYAMLVARSQSTDIVCETSRTGTLARKVIKKMEDMVIDGYGQVVYGNILIKYAANYTKISGQYG

SEQ ID NO: 19315 - protein, 85 aa, unidentified
  REGION 1..85: note = Description of Unknown:cds_NC_030656.1_cds_YP_009268789.1_74 target sequence
KPVELLFPNENMTWYLEISALWNSIYKGFIYSQRQKLTKKILSPFNFQVFVKKAKDNETAISAKELYDMIQNVILNIKENYYFNI

SEQ ID NO: 19316 - protein, 85 aa, unidentified
  REGION 1..85: note = Description of Unknown:cds_NC_030656.1_cds_YP_009268789.1_74 target sequence
TNIQFIEYVLLTHLNPSRVKITKQTAILIFEKLYEKLNYTLGGGTPIGIISAQVLSEKFTQQALSSFHTTEKSGGVMRKLGFNEF

SEQ ID NO: 19317 - protein, 85 aa, unidentified
  REGION 1..85: note = Description of Unknown:cds_NC_030656.1_cds_YP_009268789.1_74 target sequence
HNLTNLSKNKAEIITLITEDVDKLKTLKVNFEFVCLGELLPDISVTKEPDYYVISVVINRLYIKRLNLTELIVEHIIERFVSYNV

SEQ ID NO: 19318 - protein, 85 aa, unidentified
  REGION 1..85: note = Description of Unknown:cds_NC_030656.1_cds_YP_009268789.1_74 target sequence
MVTEWGLDTIIEDDQTIKFNIYANFAEPQVLNVNKFMIVLPGAASKGKISKFKIPITEYLAYYDFDSTKKMYRITVELMSLKELG

SEQ ID NO: 19319 - protein, 85 aa, unidentified
  REGION 1..85: note = Description of Unknown:cds_NC_030656.1_cds_YP_009268789.1_74 target sequence
SFDLENVNVIPGVWNTFEIFGIESVQNYLCESLLNTYGDGFDYLYQACDLLSSLLCSNYEPESINKFKFWSVSALKKATFGDNRA

SEQ ID NO: 19320 - protein, 85 aa, unidentified
  REGION 1..85: note = Description of Unknown:cds_NC_035460.1_cds_YP_009408026.1_75 target sequence
AVISKVTYSLYSREEINATDILINHLKNEDDIGTVKDGRLGATDNALCRTCGRTELQCFGHWGKVKLYETHIVKPEFIGEVIRIL

SEQ ID NO: 19321 - protein, 85 aa, unidentified
  REGION 1..85: note = Description of Unknown:cds_NC_035460.1_cds_YP_009408026.1_75 target sequence
NHICIRCGFLRSRDPYIEDITKMSSHALRKLKDKILSKKKSCWNSNCMQQYQKITFSKKKVCFVNKSDDITVPNALIYQKIVSIY

SEQ ID NO: 19322 - protein, 85 aa, unidentified
  REGION 1..85: note = Description of Unknown:cds_NC_035460.1_cds_YP_009408026.1_75 target sequence
KKFWPLLEIHQHPRNLFYKDYFPVPPLIIRPAISFWIDSMPKETNELTYLLGMIVKYCNMNAEEQVIQKAVIEYDDIKIISSNTT

SEQ ID NO: 19323 - protein, 85 aa, unidentified
  REGION 1..85: note = Description of Unknown:cds_NC_035460.1_cds_YP_009408026.1_75 target sequence
SINLSYITSGKNNMIRSFIVARRKDQTARSVIGPDINLTINEVGVPNYIRNTLTEKIFVNSFTADEVKKLFTNNEIKFYFNKRLN

SEQ ID NO: 19324 - protein, 85 aa, unidentified
  REGION 1..85: note = Description of Unknown:cds_NC_035460.1_cds_YP_009408026.1_75 target sequence
QLTRIRSGKFIKNKIHMLPGDWVEVSVRENTSIIFGRQPSLHRYNVIASSIKETPGDTIKIPPGIANSQNADFDGDEEWMILEQN

SEQ ID NO: 19325 - protein, 85 aa, unidentified
  REGION 1..85: note = Description of Unknown:cds_NC_035460.1_cds_YP_009408026.1_75 target sequence
PKAVIEQSILMYPTTLLKHDIHGAPVYGSIQDEIVAAYSLYRMENLSIDEVLNILGKYGYGFETKGKTSFTGKDIYEFLIGEKVN

SEQ ID NO: 19326 - protein, 85 aa, unidentified
  REGION 1..85: note = Description of Unknown:cds_NC_035460.1_cds_YP_009408026.1_75 target sequence
YPNILENGKLIAKDIGSDFVVAMRQSSLAGLVADYKSNVEGIKFIIKSSYVFKRYLEIYGFGVTFRDLRPNSDFTNKLEAINTEK

SEQ ID NO: 19327 - protein, 85 aa, unidentified
  REGION 1..85: note = Description of Unknown:cds_NC_035460.1_cds_YP_009408026.1_75 target sequence
IELIKDAYANYLSDIESGKILPLSKAIESDAVETMLSNLTNLNIKEIEDYMKQTLQDNPDNNLLKMAKAGYKVNPTELMYILGTY

SEQ ID NO: 19328 - protein, 85 aa, unidentified
  REGION 1..85: note = Description of Unknown:cds_NC_035460.1_cds_YP_009408026.1_75 target sequence
GQQRIDGEPAETRILGRVLPYYLPDSKDPEGRGYILNSLSKGLTGSQYYFSMLVARSQSTDIVCETSRTGTLARKIIKKMEDIVV

SEQ ID NO: 19329 - protein, 85 aa, unidentified
  REGION 1..85: note = Description of Unknown:cds_NC_035460.1_cds_YP_009408026.1_75 target sequence
DGYGQIVYGNILLKYAANYTKILGSVCKPVELIYPNESMTWYLEISALWNKIKQGFVYNQRQKLTRKTLAPFNFLVFINPATDKE

SEQ ID NO: 19330 - protein, 85 aa, unidentified
  REGION 1..85: note = Description of Unknown:cds_NC_035460.1_cds_YP_009408026.1_75 target sequence
AINAKDLYSMIQAVIEDVKEKYFFTISNIDFIEYIFLTHLNPTRIKISKETAINIFKKFYDKLNYTLGGGTPIGIISAQVLSEKF

SEQ ID NO: 19331 - protein, 85 aa, unidentified
  REGION 1..85: note = Description of Unknown:cds_NC_035460.1_cds_YP_009408026.1_75 target sequence
TQQALSSFHTTEKSGAVKQKLGFNEFNNLTNLSKNRTEIITLVSEDISKLQSVKINFEFVCLGELNPKITLRKEKDNYAIDIIVN

SEQ ID NO: 19332 - protein, 85 aa, unidentified
  REGION 1..85: note = Description of Unknown:cds_NC_035460.1_cds_YP_009408026.1_75 target sequence
RLMIKRAELTELVVEYMIERFVSFNVLVKDWGLETSIIDNMNIQFTIFVNFVEPQILNLNKFMMVLPGAANKGKISKFKIPISNF

SEQ ID NO: 19333 - protein, 85 aa, unidentified
  REGION 1..85: note = Description of Unknown:cds_NC_035460.1_cds_YP_009408026.1_75 target sequence
TSYVDFDKTKTMNKLTVELMNLKELGSFDLENVIVYPGIWNVYDIFGIEAARNYLCEALLSTYGEGFDYLYQPCDLLASLLCASY

SEQ ID NO: 19334 - protein, 85 aa, unidentified
  REGION 1..85: note = Description of Unknown:cds_NC_035460.1_cds_YP_009408026.1_75 target sequence
EPESVNKFKFGSTSALKRATFGDNKALLNAALHKKSEYVSDNSSCHFFSKVPKIGTGYYKYFMNLELLTRLEKKLSAKISNNKVE

SEQ ID NO: 19335 - protein, 84 aa, unidentified
  REGION 1..84: note = Description of Unknown:cds_NC_035460.1_cds_YP_009408026.1_75 target sequence
GSTSALKRATFGDNKALLNAALHKKSEYVSDNSSCHFFSKVPKIGTGYYKYFMNLELLTRLEKKLSAKISNNKVEELKEIIEDF

SEQ ID NO: 19336 - protein, 85 aa, unidentified
  REGION 1..85: note = Description of Unknown:cds_NC_035460.1_cds_YP_009408026.1_75 target sequence
NEDDIGTVKDGRLGATDNALCRTCGRTELQCFGHWGKVKLYETHIVKPEFIGEVIRILNHICIRCGFLRSRDPYIEDITKMSSHA

SEQ ID NO: 19337 - protein, 85 aa, unidentified
  REGION 1..85: note = Description of Unknown:cds_NC_035460.1_cds_YP_009408026.1_75 target sequence
LRKLKDKILSKKKSCWNSNCMQQYQKITFSKKKVCFVNKSDDITVPNALIYQKIVSIYKKFWPLLEIHQHPRNLFYKDYFPVPPL

SEQ ID NO: 19338 - protein, 85 aa, unidentified
  REGION 1..85: note = Description of Unknown:cds_NC_035460.1_cds_YP_009408026.1_75 target sequence
IIRPAISFWIDSMPKETNELTYLLGMIVKYCNMNAEEQVIQKAVIEYDDIKIISSNTTSINLSYITSGKNNMIRSFIVARRKDQT

SEQ ID NO: 19339 - protein, 85 aa, unidentified
  REGION 1..85: note = Description of Unknown:cds_NC_035460.1_cds_YP_009408026.1_75 target sequence
ARSVIGPDINLTINEVGVPNYIRNTLTEKIFVNSFTADEVKKLFTNNEIKFYFNKRLNQLTRIRSGKFIKNKIHMLPGDWVEVSV

SEQ ID NO: 19340 - protein, 85 aa, unidentified
  REGION 1..85: note = Description of Unknown:cds_NC_035460.1_cds_YP_009408026.1_75 target sequence
RENTSIIFGRQPSLHRYNVIASSIKETPGDTIKIPPGIANSQNADFDGDEEWMILEQNPKAVIEQSILMYPTTLLKHDIHGAPVY

SEQ ID NO: 19341 - protein, 85 aa, unidentified
  REGION 1..85: note = Description of Unknown:cds_NC_035460.1_cds_YP_009408026.1_75 target sequence
GSIQDEIVAAYSLYRMENLSIDEVLNILGKYGYGFETKGKTSFTGKDIYEFLIGEKVNYPNILENGKLIAKDIGSDFVVAMRQSS

SEQ ID NO: 19342 - protein, 85 aa, unidentified
  REGION 1..85: note = Description of Unknown:cds_NC_035460.1_cds_YP_009408026.1_75 target sequence
LAGLVADYKSNVEGIKFIIKSSYVFKRYLEIYGFGVTFRDLRPNSDFTNKLEAINTEKIELIKDAYANYLSDIESGKILPLSKAI

SEQ ID NO: 19343 - protein, 85 aa, unidentified
  REGION 1..85: note = Description of Unknown:cds_NC_035460.1_cds_YP_009408026.1_75 target sequence
ESDAVETMLSNLTNLNIKEIEDYMKQTLQDNPDNNLLKMAKAGYKVNPTELMYILGTYGQQRIDGEPAETRILGRVLPYYLPDSK

SEQ ID NO: 19344 - protein, 85 aa, unidentified
  REGION 1..85: note = Description of Unknown:cds_NC_035460.1_cds_YP_009408026.1_75 target sequence
DPEGRGYILNSLSKGLTGSQYYFSMLVARSQSTDIVCETSRTGTLARKIIKKMEDIVVDGYGQIVYGNILLKYAANYTKILGSVC

SEQ ID NO: 19345 - protein, 85 aa, unidentified
  REGION 1..85: note = Description of Unknown:cds_NC_035460.1_cds_YP_009408026.1_75 target sequence
KPVELIYPNESMTWYLEISALWNKIKQGFVYNQRQKLTRKTLAPFNFLVFINPATDKEAINAKDLYSMIQAVIEDVKEKYFFTIS

SEQ ID NO: 19346 - protein, 85 aa, unidentified
  REGION 1..85: note = Description of Unknown:cds_NC_035460.1_cds_YP_009408026.1_75 target sequence
NIDFIEYIFLTHLNPTRIKISKETAINIFKKFYDKLNYTLGGGTPIGIISAQVLSEKFTQQALSSFHTTEKSGAVKQKLGFNEFN

SEQ ID NO: 19347 - protein, 85 aa, unidentified
  REGION 1..85: note = Description of Unknown:cds_NC_035460.1_cds_YP_009408026.1_75 target sequence
NLTNLSKNRTEIITLVSEDISKLQSVKINFEFVCLGELNPKITLRKEKDNYAIDIIVNRLMIKRAELTELVVEYMIERFVSFNVL

SEQ ID NO: 19348 - protein, 85 aa, unidentified
  REGION 1..85: note = Description of Unknown:cds_NC_035460.1_cds_YP_009408026.1_75 target sequence
VKDWGLETSIIDNMNIQFTIFVNFVEPQILNLNKFMMVLPGAANKGKISKFKIPISNFTSYVDFDKTKTMNKLTVELMNLKELGS

SEQ ID NO: 19349 - protein, 85 aa, unidentified
  REGION 1..85: note = Description of Unknown:cds_NC_035460.1_cds_YP_009408026.1_75 target sequence
FDLENVIVYPGIWNVYDIFGIEAARNYLCEALLSTYGEGFDYLYQPCDLLASLLCASYEPESVNKFKFGSTSALKRATFGDNKAL

SEQ ID NO: 19350 - protein, 85 aa, unidentified
  REGION 1..85: note = Description of Unknown:cds_NC_025801.1_cds_YP_009110696.1_1 target sequence
AQIRGLRLAESFNVPSKSSSPSFITYDFLLSRLQCASTPWTALTTSSGSDVTVVRLLFPLQGIQSPTLESPIPTTFSEWKTWMQE

SEQ ID NO: 19351 - protein, 85 aa, unidentified
  REGION 1..85: note = Description of Unknown:cds_NC_025801.1_cds_YP_009110696.1_1 target sequence
RLAVIYEDLIRRYPISEFHGRHVNPLICNTIVASFFSNSPYSSLLDHVMLRVSPAADILDANLLQRNHFWPLSNDLLMMPAGKKY

SEQ ID NO: 19352 - protein, 85 aa, unidentified
  REGION 1..85: note = Description of Unknown:cds_NC_025801.1_cds_YP_009110696.1_1 target sequence
WTFDGYQTSADAPCLFGKNQTPYADVIYGRDLTSLLTFVDSAPSQLTPLVHLDRPSYGPHVLLPTENVIPAIATSSKDCAFWLLL

SEQ ID NO: 19353 - protein, 85 aa, unidentified
  REGION 1..85: note = Description of Unknown:cds_NC_025801.1_cds_YP_009110696.1_1 target sequence
ESCLDQLRANQSSSRSTPVTRRIHSYLVVRSPYFAFPESVEYALLALNNASFCGSQLTVPVPNHPTCSMVATLVSQLSDSSKAIT

SEQ ID NO: 19354 - protein, 85 aa, unidentified
  REGION 1..85: note = Description of Unknown:cds_NC_025801.1_cds_YP_009110696.1_1 target sequence
VPSPKPRSFTLYSNLKFDYPQSLTPFISISPLTFTGTLGSASLLKPTAASVRWQPQFDDSTSSPVDLALNLMNSALTLPVTPDYG

SEQ ID NO: 19355 - protein, 85 aa, unidentified
  REGION 1..85: note = Description of Unknown:cds_NC_025801.1_cds_YP_009110696.1_1 target sequence
YAWTGSPLFSYAVSDRHDAAVPIDLVPDFPADYFSTEQQDARARFRDYRLIADRSLHKDTANLACVSQQQDALGNRFVFNGMSVA

SEQ ID NO: 19356 - protein, 85 aa, unidentified
  REGION 1..85: note = Description of Unknown:cds_NC_025801.1_cds_YP_009110696.1_1 target sequence
YMGASGTHPDDQPSVITPWLSGKLASVFKPSSIRQFGWDVTKGVILDVTHSIASGDFGFVYSDVDQVQCNSDDLVSSTRAFILQC

SEQ ID NO: 19357 - protein, 85 aa, unidentified
  REGION 1..85: note = Description of Unknown:cds_NC_025801.1_cds_YP_009110696.1_1 target sequence
QNLLTLVQVGGSLIVKCNFPTSRVLAWVYTELSPWFNRIIVMKPLLSNNLEIYVGLLQKLAITSPPFGPSSSVVVFLTKQIRRYS

SEQ ID NO: 19358 - protein, 85 aa, unidentified
  REGION 1..85: note = Description of Unknown:cds_NC_025801.1_cds_YP_009110696.1_1 target sequence
SLIEASVTLPDRGASVTLDNSLTCLSLNFVNVTSVGSEDDLRALACFSLLSSPSTIRLSRHEYFDSFRTAVTSVVTPDSRRLWSR

SEQ ID NO: 19359 - protein, 85 aa, unidentified
  REGION 1..85: note = Description of Unknown:cds_NC_025801.1_cds_YP_009110696.1_1 target sequence
LAYVPRIFPSSLTVQSRSIAYSPPSLFKTKTSLWTLLSVYYDWVLSGIPGRPNLWMDLGTGPECRLLSKISEDIPVCMVDVRPSY

SEQ ID NO: 19360 - protein, 85 aa, unidentified
  REGION 1..85: note = Description of Unknown:cds_NC_025801.1_cds_YP_009110696.1_1 target sequence
LPMNCWKTQTDYIVKDYTDMQVILDYSPDYVSAILTLGAASFSSGVSLSSLVRDFLNSCKQVGATKIIFQLNSPADTRVDSPHRE

SEQ ID NO: 19361 - protein, 85 aa, unidentified
  REGION 1..85: note = Description of Unknown:cds_NC_025801.1_cds_YP_009110696.1_1 target sequence
LQIDVSKQMFFFPTLGRKEPYLPLTDVIQLLSQTFPGATVEIRYPEDDYSWLSNPLVNGLSIDTDAISKLLVLSQFFPLFIVHAD

SEQ ID NO: 19362 - protein, 85 aa, unidentified
  REGION 1..85: note = Description of Unknown:cds_NC_025801.1_cds_YP_009110696.1_1 target sequence
VKSVTFSNVTSVGSEMSLTIHGFSSTSSYDVTLDGVSLLTISGAKVDSSLVSASLSVANDDAVLRFTPASAGILRVSQTAPVVLP

SEQ ID NO: 19363 - protein, 85 aa, unidentified
  REGION 1..85: note = Description of Unknown:cds_NC_025801.1_cds_YP_009110696.1_1 target sequence
IGSTVISAPDDAITVVWPSSLDYSDAGTNVSITCNSWFTLRLFAERDGEVIRVSDDKYDIRPAGSNSWTLNVILDRSDAFYRFFL

SEQ ID NO: 19364 - protein, 85 aa, unidentified
  REGION 1..85: note = Description of Unknown:cds_NC_025801.1_cds_YP_009110696.1_1 target sequence
RDVQSAVPGQYIDFELQQLSIHVWDPSKPSFLSPPYNGDFVISTPGGPVQLSRPFTQIPADWKTVNVSVSVISDLPSFLVPPSEY

SEQ ID NO: 19365 - protein, 84 aa, unidentified
  REGION 1..84: note = Description of Unknown:cds_NC_025801.1_cds_YP_009110696.1_1 target sequence
PGQYIDFELQQLSIHVWDPSKPSFLSPPYNGDFVISTPGGPVQLSRPFTQIPADWKTVNVSVSVISDLPSFLVPPSEYYGIVPV

SEQ ID NO: 19366 - protein, 85 aa, unidentified
  REGION 1..85: note = Description of Unknown:cds_NC_025801.1_cds_YP_009110696.1_1 target sequence
FLLSRLQCASTPWTALTTSSGSDVTVVRLLFPLQGIQSPTLESPIPTTFSEWKTWMQERLAVIYEDLIRRYPISEFHGRHVNPLI

SEQ ID NO: 19367 - protein, 85 aa, unidentified
  REGION 1..85: note = Description of Unknown:cds_NC_025801.1_cds_YP_009110696.1_1 target sequence
CNTIVASFFSNSPYSSLLDHVMLRVSPAADILDANLLQRNHFWPLSNDLLMMPAGKKYWTFDGYQTSADAPCLFGKNQTPYADVI

SEQ ID NO: 19368 - protein, 85 aa, unidentified
  REGION 1..85: note = Description of Unknown:cds_NC_025801.1_cds_YP_009110696.1_1 target sequence
YGRDLTSLLTFVDSAPSQLTPLVHLDRPSYGPHVLLPTENVIPAIATSSKDCAFWLLLESCLDQLRANQSSSRSTPVTRRIHSYL

SEQ ID NO: 19369 - protein, 85 aa, unidentified
  REGION 1..85: note = Description of Unknown:cds_NC_025801.1_cds_YP_009110696.1_1 target sequence
VVRSPYFAFPESVEYALLALNNASFCGSQLTVPVPNHPTCSMVATLVSQLSDSSKAITVPSPKPRSFTLYSNLKFDYPQSLTPFI

SEQ ID NO: 19370 - protein, 85 aa, unidentified
  REGION 1..85: note = Description of Unknown:cds_NC_025801.1_cds_YP_009110696.1_1 target sequence
SISPLTFTGTLGSASLLKPTAASVRWQPQFDDSTSSPVDLALNLMNSALTLPVTPDYGYAWTGSPLFSYAVSDRHDAAVPIDLVP

SEQ ID NO: 19371 - protein, 85 aa, unidentified
  REGION 1..85: note = Description of Unknown:cds_NC_025801.1_cds_YP_009110696.1_1 target sequence
DFPADYFSTEQQDARARFRDYRLIADRSLHKDTANLACVSQQQDALGNRFVFNGMSVAYMGASGTHPDDQPSVITPWLSGKLASV

SEQ ID NO: 19372 - protein, 85 aa, unidentified
  REGION 1..85: note = Description of Unknown:cds_NC_025801.1_cds_YP_009110696.1_1 target sequence
FKPSSIRQFGWDVTKGVILDVTHSIASGDFGFVYSDVDQVQCNSDDLVSSTRAFILQCQNLLTLVQVGGSLIVKCNFPTSRVLAW

SEQ ID NO: 19373 - protein, 85 aa, unidentified
  REGION 1..85: note = Description of Unknown:cds_NC_025801.1_cds_YP_009110696.1_1 target sequence
VYTELSPWFNRIIVMKPLLSNNLEIYVGLLQKLAITSPPFGPSSSVVVFLTKQIRRYSSLIEASVTLPDRGASVTLDNSLTCLSL

SEQ ID NO: 19374 - protein, 85 aa, unidentified
  REGION 1..85: note = Description of Unknown:cds_NC_025801.1_cds_YP_009110696.1_1 target sequence
NFVNVTSVGSEDDLRALACFSLLSSPSTIRLSRHEYFDSFRTAVTSVVTPDSRRLWSRLAYVPRIFPSSLTVQSRSIAYSPPSLF

SEQ ID NO: 19375 - protein, 85 aa, unidentified
  REGION 1..85: note = Description of Unknown:cds_NC_025801.1_cds_YP_009110696.1_1 target sequence
KTKTSLWTLLSVYYDWVLSGIPGRPNLWMDLGTGPECRLLSKISEDIPVCMVDVRPSYLPMNCWKTQTDYIVKDYTDMQVILDYS

SEQ ID NO: 19376 - protein, 85 aa, unidentified
  REGION 1..85: note = Description of Unknown:cds_NC_025801.1_cds_YP_009110696.1_1 target sequence
PDYVSAILTLGAASFSSGVSLSSLVRDFLNSCKQVGATKIIFQLNSPADTRVDSPHRELQIDVSKQMFFFPTLGRKEPYLPLTDV

SEQ ID NO: 19377 - protein, 85 aa, unidentified
  REGION 1..85: note = Description of Unknown:cds_NC_025801.1_cds_YP_009110696.1_1 target sequence
IQLLSQTFPGATVEIRYPEDDYSWLSNPLVNGLSIDTDAISKLLVLSQFFPLFIVHADVKSVTFSNVTSVGSEMSLTIHGFSSTS

SEQ ID NO: 19378 - protein, 85 aa, unidentified
  REGION 1..85: note = Description of Unknown:cds_NC_025801.1_cds_YP_009110696.1_1 target sequence
SYDVTLDGVSLLTISGAKVDSSLVSASLSVANDDAVLRFTPASAGILRVSQTAPVVLPIGSTVISAPDDAITVVWPSSLDYSDAG

SEQ ID NO: 19379 - protein, 85 aa, unidentified
  REGION 1..85: note = Description of Unknown:cds_NC_025801.1_cds_YP_009110696.1_1 target sequence
TNVSITCNSWFTLRLFAERDGEVIRVSDDKYDIRPAGSNSWTLNVILDRSDAFYRFFLRDVQSAVPGQYIDFELQQLSIHVWDPS

SEQ ID NO: 19380 - protein, 85 aa, unidentified
  REGION 1..85: note = Description of Unknown:cds_NC_038665.1_cds_YP_009507783.1_1 target sequence
AQIRGLRLAESFNVPSKSSSPSFITYDFLLSRLQCASTPWTALTTSSGSDITVVRLLFPLQGIQSPTLESPIPTTFPEWRTWMQE

SEQ ID NO: 19381 - protein, 85 aa, unidentified
  REGION 1..85: note = Description of Unknown:cds_NC_038665.1_cds_YP_009507783.1_1 target sequence
RLAVIYEDLIRRYPISEFHGRHVNPLICNTIVASFFSNSPYSSLLDHVMLKVSPAVDILDANLLQRNHFWPLSNDLLMMPAGKKY

SEQ ID NO: 19382 - protein, 85 aa, unidentified; identical to SEQ ID NO: 19352
  REGION 1..85: note = Description of Unknown:cds_NC_038665.1_cds_YP_009507783.1_1 target sequence

SEQ ID NO: 19383 - protein, 85 aa, unidentified; identical to SEQ ID NO: 19353
  REGION 1..85: note = Description of Unknown:cds_NC_038665.1_cds_YP_009507783.1_1 target sequence

SEQ ID NO: 19384 - protein, 85 aa, unidentified; identical to SEQ ID NO: 19354
  REGION 1..85: note = Description of Unknown:cds_NC_038665.1_cds_YP_009507783.1_1 target sequence

SEQ ID NO: 19385 - protein, 85 aa, unidentified
  REGION 1..85: note = Description of Unknown:cds_NC_038665.1_cds_YP_009507783.1_1 target sequence
HAWTGSPLFSYAVSDRHDAAVPIDLVPDFPADYFSTEQQDARARFRDYRLIADRSLHKDTANLTCVSQQQDVLGNKFVFNGMSVA

SEQ ID NO: 19386 - protein, 85 aa, unidentified
  REGION 1..85: note = Description of Unknown:cds_NC_038665.1_cds_YP_009507783.1_1 target sequence
YMGASGTHPDDQPSVIAPWLSGKLASVFKPSSIRQFGWDVTRGVILDVTHSIASGDFSFVYSDVDQVQCNSDDLVSSTRAFILQC

SEQ ID NO: 19387 - protein, 85 aa, unidentified
  REGION 1..85: note = Description of Unknown:cds_NC_038665.1_cds_YP_009507783.1_1 target sequence
QNLLTLVQVGGSLVVKCNFPTSRVLAWVYAELSSWFNRVVVMKPLLSNNLEIYIGLLQKLAIASPSFGPSSSVVVFLTKQIRRYS

SEQ ID NO: 19388 - protein, 85 aa, unidentified
  REGION 1..85: note = Description of Unknown:cds_NC_038665.1_cds_YP_009507783.1_1 target sequence
SLIEASVTLPDRGASVTLDNPLTCLSLNFVNVTSVGSEDDLRALACFSLLSSPSTIRLSRHEYFDSFRTAVTSVVTPDSRRLWSR

SEQ ID NO: 19389 - protein, 85 aa, unidentified
  REGION 1..85: note = Description of Unknown:cds_NC_038665.1_cds_YP_009507783.1_1 target sequence
LAYVPRIFPSSLTVQSRSIAYSPPTLFKTKTNLWTLLSVYYDWVLSGIPGRPNLWMDLGTGPECRLLSKISEDIPVCMVDVRPSY

SEQ ID NO: 19390 - protein, 85 aa, unidentified; identical to SEQ ID NO: 19360
  REGION 1..85: note = Description of Unknown:cds_NC_038665.1_cds_YP_009507783.1_1 target sequence

SEQ ID NO: 19391 - protein, 85 aa, unidentified
  REGION 1..85: note = Description of Unknown:cds_NC_038665.1_cds_YP_009507783.1_1 target sequence
LQIDVTKQMFFFPTLGRKEPYLPLADVIQLLSQTFPGATVEIRYPEDDYSWLSNPLVNGLSIDTDAISKLLVLSQFFPLFIVHAD

SEQ ID NO: 19392 - protein, 85 aa, unidentified
  REGION 1..85: note = Description of Unknown:cds_NC_038665.1_cds_YP_009507783.1_1 target sequence
VKSVTFSNMTSVGSEMSLTIHGFSSTSSYDVTLDGVSLLTISGAKVDSSLVSASLSVTNDDAVLRFTPASAGILRVSQTAPVVLP

SEQ ID NO: 19393 - protein, 85 aa, unidentified
  REGION 1..85: note = Description of Unknown:cds_NC_038665.1_cds_YP_009507783.1_1 target sequence
IGSTVISAPDDAITVIWPSSLDYSDAGTNVSITCNSWFTLRLFAERDGEVIRVSDDKYDIRPAGSNSWTLNVILDRSDAFYRFFL

SEQ ID NO: 19394 - protein, 85 aa, unidentified; identical to SEQ ID NO: 19364
  REGION 1..85: note = Description of Unknown:cds_NC_038665.1_cds_YP_009507783.1_1 target sequence

SEQ ID NO: 19395 - protein, 84 aa, unidentified; identical to SEQ ID NO: 19365
  REGION 1..84: note = Description of Unknown:cds_NC_038665.1_cds_YP_009507783.1_1 target sequence

SEQ ID NO: 19396 - protein, 85 aa, unidentified
  REGION 1..85: note = Description of Unknown:cds_NC_038665.1_cds_YP_009507783.1_1 target sequence
FLLSRLQCASTPWTALTTSSGSDITVVRLLFPLQGIQSPTLESPIPTTFPEWRTWMQERLAVIYEDLIRRYPISEFHGRHVNPLI

SEQ ID NO: 19397 - protein, 85 aa, unidentified
  REGION 1..85: note = Description of Unknown:cds_NC_038665.1_cds_YP_009507783.1_1 target sequence
CNTIVASFFSNSPYSSLLDHVMLKVSPAVDILDANLLQRNHFWPLSNDLLMMPAGKKYWTFDGYQTSADAPCLFGKNQTPYADVI

SEQ ID NO: 19398 - protein, 85 aa, unidentified; identical to SEQ ID NO: 19368
  REGION 1..85: note = Description of Unknown:cds_NC_038665.1_cds_YP_009507783.1_1 target sequence

SEQ ID NO: 19399 - protein, 85 aa, unidentified; identical to SEQ ID NO: 19369
  REGION 1..85: note = Description of Unknown:cds_NC_038665.1_cds_YP_009507783.1_1 target sequence

SEQ ID NO: 19400 - protein, 85 aa, unidentified
  REGION 1..85: note = Description of Unknown:cds_NC_038665.1_cds_YP_009507783.1_1 target sequence
SISPLTFTGTLGSASLLKPTAASVRWQPQFDDSTSSPVDLALNLMNSALTLPVTPDYGHAWTGSPLFSYAVSDRHDAAVPIDLVP

SEQ ID NO: 19401 - protein, 85 aa, unidentified
  REGION 1..85: note = Description of Unknown:cds_NC_038665.1_cds_YP_009507783.1_1 target sequence
DFPADYFSTEQQDARARFRDYRLIADRSLHKDTANLTCVSQQQDVLGNKFVFNGMSVAYMGASGTHPDDQPSVIAPWLSGKLASV

SEQ ID NO: 19402 - protein, 85 aa, unidentified
  REGION 1..85: note = Description of Unknown:cds_NC_038665.1_cds_YP_009507783.1_1 target sequence
FKPSSIRQFGWDVTRGVILDVTHSIASGDFSFVYSDVDQVQCNSDDLVSSTRAFILQCQNLLTLVQVGGSLVVKCNFPTSRVLAW

SEQ ID NO: 19403 - protein, 85 aa, unidentified
  REGION 1..85: note = Description of Unknown:cds_NC_038665.1_cds_YP_009507783.1_1 target sequence
VYAELSSWFNRVVVMKPLLSNNLEIYIGLLQKLAIASPSFGPSSSVVVFLTKQIRRYSSLIEASVTLPDRGASVTLDNPLTCLSL

SEQ ID NO: 19404 - protein, 85 aa, unidentified
  REGION 1..85: note = Description of Unknown:cds_NC_038665.1_cds_YP_009507783.1_1 target sequence
NFVNVTSVGSEDDLRALACFSLLSSPSTIRLSRHEYFDSFRTAVTSVVTPDSRRLWSRLAYVPRIFPSSLTVQSRSIAYSPPTLF

SEQ ID NO: 19405 - protein, 85 aa, unidentified
  REGION 1..85: note = Description of Unknown:cds_NC_038665.1_cds_YP_009507783.1_1 target sequence
KTKTNLWTLLSVYYDWVLSGIPGRPNLWMDLGTGPECRLLSKISEDIPVCMVDVRPSYLPMNCWKTQTDYIVKDYTDMQVILDYS

SEQ ID NO: 19406 - protein, 85 aa, unidentified
  REGION 1..85: note = Description of Unknown:cds_NC_038665.1_cds_YP_009507783.1_1 target sequence
PDYVSAILTLGAASFSSGVSLSSLVRDFLNSCKQVGATKIIFQLNSPADTRVDSPHRELQIDVTKQMFFFPTLGRKEPYLPLADV

SEQ ID NO: 19407 - protein, 85 aa, unidentified
  REGION 1..85: note = Description of Unknown:cds_NC_038665.1_cds_YP_009507783.1_1 target sequence
IQLLSQTFPGATVEIRYPEDDYSWLSNPLVNGLSIDTDAISKLLVLSQFFPLFIVHADVKSVTFSNMTSVGSEMSLTIHGFSSTS

SEQ ID NO: 19408 - protein, 85 aa, unidentified
  REGION 1..85: note = Description of Unknown:cds_NC_038665.1_cds_YP_009507783.1_1 target sequence
SYDVTLDGVSLLTISGAKVDSSLVSASLSVTNDDAVLRFTPASAGILRVSQTAPVVLPIGSTVISAPDDAITVIWPSSLDYSDAG

SEQ ID NO: 19409 - protein, 85 aa, unidentified; identical to SEQ ID NO: 19379
  REGION 1..85: note = Description of Unknown:cds_NC_038665.1_cds_YP_009507783.1_1 target sequence

SEQ ID NO: 19410 - protein, 85 aa, unidentified
  REGION 1..85: note = Description of Unknown:cds_NC_025802.1_cds_YP_009110697.1_2 target sequence
HVKGLDDVLLEYAASISGTAPMSNSLFEKAADIINSKRRSFPYELLSSIDFSVSIVIPQNIFHPPPCDDFYYIDGLNRVRRRRII

SEQ ID NO: 19411 - protein, 85 aa, unidentified
  REGION 1..85: note = Description of Unknown:cds_NC_025802.1_cds_YP_009110697.1_2 target sequence
DDDDVFVPNCSIFPLLSQMELLPNYGQLNPIIAANSKDGLANARILHTFYNTATNQARQVKCPLETFLLALLLSESSPMSVDPTG

SEQ ID NO: 19412 - protein, 85 aa, unidentified
  REGION 1..85: note = Description of Unknown:cds_NC_025802.1_cds_YP_009110697.1_2 target sequence
LDESSSPPLSSNLPLYVLRRLSEILTNGFEDKSPWLLLDVGVAWIRSPLLSASIPPLMADLTNLAIYRQICPLDDDLTSMAVQMY

SEQ ID NO: 19413 - protein, 85 aa, unidentified
  REGION 1..85: note = Description of Unknown:cds_NC_025802.1_cds_YP_009110697.1_2 target sequence
LQAAASGSYAHYILKTKAIFPQNTLHNMFRHLTGGLVPIVSWLEPRSDYKFALQGSRMVSSQDVNQTPDNTEVAEKVGHDYGCLD

SEQ ID NO: 19414 - protein, 85 aa, unidentified
  REGION 1..85: note = Description of Unknown:cds_NC_025802.1_cds_YP_009110697.1_2 target sequence
VVKRLRSKTATYTKSDHSAMTFVRDAMACTSGIFITRAPTETVMKEYTQAPSIEVPIPSRDWSSPIGSLRYLRPSCVLPAKFLWD

SEQ ID NO: 19415 - protein, 85 aa, unidentified
  REGION 1..85: note = Description of Unknown:cds_NC_025802.1_cds_YP_009110697.1_2 target sequence
TWRRAASAVADSPSTWDPLTQAIMRSQYVTSRGGSGAALRDALRSADVELPTFPGVSVKVSTKIYQAAQTADVPFEKLSRAVLAP

SEQ ID NO: 19416 - protein, 85 aa, unidentified
  REGION 1..85: note = Description of Unknown:cds_NC_025802.1_cds_YP_009110697.1_2 target sequence
LSMGLRNQVQRRPRTIMPMNVVQQQVAAVHTLSADYINYHLNLSTTSGSAVIEKVVPLGMYASSPPAQAINIDIKACDASITYSY

SEQ ID NO: 19417 - protein, 85 aa, unidentified
  REGION 1..85: note = Description of Unknown:cds_NC_025802.1_cds_YP_009110697.1_2 target sequence
FLSVIVGAIHSGVSGRRVTSPFMGVPPSVISLTDDTGVNSVMPLSGMQVMAQWLAKLYSRGFEYQVTDSFSPGNVFTHHTTTFPS

SEQ ID NO: 19418 - protein, 85 aa, unidentified
  REGION 1..85: note = Description of Unknown:cds_NC_025802.1_cds_YP_009110697.1_2 target sequence
GSTATSTEHTANNSTMMECFLKEWIPRSQCSDNLRKFCSMITTRNNYVCQGDDGMLIVDGLSSGKVSGDILMEFVTEIRAYGKTF

SEQ ID NO: 19419 - protein, 85 aa, unidentified
  REGION 1..85: note = Description of Unknown:cds_NC_025802.1_cds_YP_009110697.1_2 target sequence
GWNYDVEFTGNAEYLKLYFLNGCRIPNISRHPICGKERASGDKLEMWPSSIDIFLGIYVNGVHDCLHWRRWLRFIWALALSYSRR

SEQ ID NO: 19420 - protein, 85 aa, unidentified
  REGION 1..85: note = Description of Unknown:cds_NC_025802.1_cds_YP_009110697.1_2 target sequence
VVKHGDVPRVIQYPMWSFVYWGIPPVSAFNSDPWMFSPYMPPGDHGMYSLLSLLRPYIIVSCDASDVDGPFGSVDHISLFNADHL

SEQ ID NO: 19421 - protein, 85 aa, unidentified
  REGION 1..85: note = Description of Unknown:cds_NC_025802.1_cds_YP_009110697.1_2 target sequence
FQGYYMAQLPRSPVRSNRRDDPSAVRKFTHALDQYLFNSPELRARVRFGRDRWQKLMGDSLGRPPSLDDVAVKWFKGAQEADVPS

SEQ ID NO: 19422 - protein, 85 aa, unidentified
  REGION 1..85: note = Description of Unknown:cds_NC_025802.1_cds_YP_009110697.1_2 target sequence
SDEIQAMDLQLIKARQHKYTGFSSLLNAYLKVSWGLCESMQVVVDPRVPLCAGVNPDNSELFLKLYSVGPMMQSTKKYFNNTLFI

SEQ ID NO: 19423 - protein, 85 aa, unidentified
  REGION 1..85: note = Description of Unknown:cds_NC_025802.1_cds_YP_009110697.1_2 target sequence
HRTVSGLDVDTIDKSLLRLRSLNVPNDAIIAQLMMVGLSESDAATMAAKVRTADINAVQLARVVNLSVPDTWMSLDFDHLLKYVV

SEQ ID NO: 19424 - protein, 84 aa, unidentified
  REGION 1..84: note = Description of Unknown:cds_NC_025802.1_cds_YP_009110697.1_2 target sequence
DTWMSLDFDHLLKYVVDLTPPSVRTLTTDIPSGHSWVRAILQFLGAGVAMTAVGPVRRTVLLSVHGGMSSFIRQFRKWMRASAK

SEQ ID NO: 19425 - protein, 85 aa, unidentified
  REGION 1..85: note = Description of Unknown:cds_NC_025802.1_cds_YP_009110697.1_2 target sequence
EKAADIINSKRRSFPYELLSSIDFSVSIVIPQNIFHPPPCDDFYYIDGLNRVRRRRIIDDDDVFVPNCSIFPLLSQMELLPNYGQ

SEQ ID NO: 19426 - protein, 85 aa, unidentified
  REGION 1..85: note = Description of Unknown:cds_NC_025802.1_cds_YP_009110697.1_2 target sequence
LNPIIAANSKDGLANARILHTFYNTATNQARQVKCPLETFLLALLLSESSPMSVDPTGLDESSSPPLSSNLPLYVLRRLSEILTN

SEQ ID NO: 19427 - protein, 85 aa, unidentified
  REGION 1..85: note = Description of Unknown:cds_NC_025802.1_cds_YP_009110697.1_2 target sequence
GFEDKSPWLLLDVGVAWIRSPLLSASIPPLMADLTNLAIYRQICPLDDDLTSMAVQMYLQAAASGSYAHYILKTKAIFPQNTLHN

SEQ ID NO: 19428 - protein, 85 aa, unidentified
  REGION 1..85: note = Description of Unknown:cds_NC_025802.1_cds_YP_009110697.1_2 target sequence
MFRHLTGGLVPIVSWLEPRSDYKFALQGSRMVSSQDVNQTPDNTEVAEKVGHDYGCLDVVKRLRSKTATYTKSDHSAMTFVRDAM

SEQ ID NO: 19429 - protein, 85 aa, unidentified
  REGION 1..85: note = Description of Unknown:cds_NC_025802.1_cds_YP_009110697.1_2 target sequence
ACTSGIFITRAPTETVMKEYTQAPSIEVPIPSRDWSSPIGSLRYLRPSCVLPAKFLWDTWRRAASAVADSPSTWDPLTQAIMRSQ

SEQ ID NO: 19430 - protein, 85 aa, unidentified
  REGION 1..85: note = Description of Unknown:cds_NC_025802.1_cds_YP_009110697.1_2 target sequence
YVTSRGGSGAALRDALRSADVELPTFPGVSVKVSTKIYQAAQTADVPFEKLSRAVLAPLSMGLRNQVQRRPRTIMPMNVVQQQVA

SEQ ID NO: 19431 - protein, 85 aa, unidentified
  REGION 1..85: note = Description of Unknown:cds_NC_025802.1_cds_YP_009110697.1_2 target sequence
AVHTLSADYINYHLNLSTTSGSAVIEKVVPLGMYASSPPAQAINIDIKACDASITYSYFLSVIVGAIHSGVSGRRVTSPFMGVPP

SEQ ID NO: 19432 - protein, 85 aa, unidentified
  REGION 1..85: note = Description of Unknown:cds_NC_025802.1_cds_YP_009110697.1_2 target sequence
SVISLTDDTGVNSVMPLSGMQVMAQWLAKLYSRGFEYQVTDSFSPGNVFTHHTTTFPSGSTATSTEHTANNSTMMECFLKEWIPR

SEQ ID NO: 19433 - protein, 85 aa, unidentified
  REGION 1..85: note = Description of Unknown:cds_NC_025802.1_cds_YP_009110697.1_2 target sequence
SQCSDNLRKFCSMITTRNNYVCQGDDGMLIVDGLSSGKVSGDILMEFVTEIRAYGKTFGWNYDVEFTGNAEYLKLYFLNGCRIPN

SEQ ID NO: 19434 - protein, 85 aa, unidentified
  REGION 1..85: note = Description of Unknown:cds_NC_025802.1_cds_YP_009110697.1_2 target sequence
ISRHPICGKERASGDKLEMWPSSIDIFLGIYVNGVHDCLHWRRWLRFIWALALSYSRRVVKHGDVPRVIQYPMWSFVYWGIPPVS

SEQ ID NO: 19435 - protein, 85 aa, unidentified
  REGION 1..85: note = Description of Unknown:cds_NC_025802.1_cds_YP_009110697.1_2 target sequence
AFNSDPWMFSPYMPPGDHGMYSLLSLLRPYIIVSCDASDVDGPFGSVDHISLFNADHLFQGYYMAQLPRSPVRSNRRDDPSAVRK

SEQ ID NO: 19436 - protein, 85 aa, unidentified
  REGION 1..85: note = Description of Unknown:cds_NC_025802.1_cds_YP_009110697.1_2 target sequence
FTHALDQYLFNSPELRARVRFGRDRWQKLMGDSLGRPPSLDDVAVKWFKGAQEADVPSSDEIQAMDLQLIKARQHKYTGFSSLLN

SEQ ID NO: 19437 - protein, 85 aa, unidentified
  REGION 1..85: note = Description of Unknown:cds_NC_025802.1_cds_YP_009110697.1_2 target sequence
AYLKVSWGLCESMQVVVDPRVPLCAGVNPDNSELFLKLYSVGPMMQSTKKYFNNTLFIHRTVSGLDVDTIDKSLLRLRSLNVPND

SEQ ID NO: 19438 - protein, 85 aa, unidentified
  REGION 1..85: note = Description of Unknown:cds_NC_025802.1_cds_YP_009110697.1_2 target sequence
AIIAQLMMVGLSESDAATMAAKVRTADINAVQLARVVNLSVPDTWMSLDFDHLLKYVVDLTPPSVRTLTTDIPSGHSWVRAILQF

SEQ ID NO: 19439 - protein, 85 aa, unidentified
  REGION 1..85: note = Description of Unknown:cds_NC_038660.1_cds_YP_009507778.1_2 target sequence
HVKGLDDVLLEYAASISGTAPMSNSLFEKAADIINSKRRSFPYELLASIDFSVSTVIPQNIFHPPPCDDFYYIDGLNRVRRRRII

SEQ ID NO: 19440 - protein, 85 aa, unidentified
  REGION 1..85: note = Description of Unknown:cds_NC_038660.1_cds_YP_009507778.1_2 target sequence
DDDDVFVPNCSIFPLLFQMELLPNYGQLNPIIAANSKDGLANARILHTFYNTATNQARQVKCPLETFLLALLLSESSPMSADPTG

SEQ ID NO: 19441 - protein, 85 aa, unidentified; identical to SEQ ID NO: 19412
  REGION 1..85: note = Description of Unknown:cds_NC_038660.1_cds_YP_009507778.1_2 target sequence

SEQ ID NO: 19442 - protein, 85 aa, unidentified
  REGION 1..85: note = Description of Unknown:cds_NC_038660.1_cds_YP_009507778.1_2 target sequence
LQAAASGSYAHYILKTKAIFAQNTLHNMFRQLTGGLVPIVSWLEPRSDYKFSLQGSRMVSSQDVNQTPDNTEVAEKVGHDYGCLD

SEQ ID NO: 19443 - protein, 85 aa, unidentified; identical to SEQ ID NO: 19414
  REGION 1..85: note = Description of Unknown:cds_NC_038660.1_cds_YP_009507778.1_2 target sequence

SEQ ID NO: 19444 - protein, 85 aa, unidentified; identical to SEQ ID NO: 19415
  REGION 1..85: note = Description of Unknown:cds_NC_038660.1_cds_YP_009507778.1_2 target sequence

SEQ ID NO: 19445 - protein, 85 aa, unidentified
  REGION 1..85: note = Description of Unknown:cds_NC_038660.1_cds_YP_009507778.1_2 target sequence
LSMGLRNQVQRRPRTIMPMNVVQQQVAAVHTLSADYINYHLNLSTTSGSAVIEKVVPLGMYASAPPAQAINIDIKACDASITYSY

SEQ ID NO: 19446 - protein, 85 aa, unidentified; identical to SEQ ID NO: 19417
  REGION 1..85: note = Description of Unknown:cds_NC_038660.1_cds_YP_009507778.1_2 target sequence

SEQ ID NO: 19447 - protein, 85 aa, unidentified
  REGION 1..85: note = Description of Unknown:cds_NC_038660.1_cds_YP_009507778.1_2 target sequence
GSIATSTEHTANNSTMMECFLKEWIPRSQCSDNLRKFCSMITTRNNYVCQGDDGMLIVDGLSSGKVSGDILMEFVTEIRAYGKTF

SEQ ID NO: 19448 - protein, 85 aa, unidentified
  REGION 1..85: note = Description of Unknown:cds_NC_038660.1_cds_YP_009507778.1_2 target sequence
GWNYDVEFTGNAEYLKLYFLNGCRIPNISRHPICGKERASGDKLEMWPSSIDIFLGIYVNGVHDCLHWRRWLRFTWALALSYSRR

SEQ ID NO: 19449 - protein, 85 aa, unidentified
  REGION 1..85: note = Description of Unknown:cds_NC_038660.1_cds_YP_009507778.1_2 target sequence
VVKHGDVPRVIQYPMWSFVYWGIPPVSAFNSDPWMFSPYMPPGDHGMYSLLSLLRPYIMVSCDASDVDGPFGLVDHISLFNTDRL

SEQ ID NO: 19450 - protein, 85 aa, unidentified; identical to SEQ ID NO: 19421
  REGION 1..85: note = Description of Unknown:cds_NC_038660.1_cds_YP_009507778.1_2 target sequence

SEQ ID NO: 19451 - protein, 85 aa, unidentified
  REGION 1..85: note = Description of Unknown:cds_NC_038660.1_cds_YP_009507778.1_2 target sequence
SDEIQAMDLQLIKARQHNYTGFSSLLNAYLKVSWGLCESMQVVVDPRVPLCAGVNPDNSELFLKLYSVGPMMQSTKKYFNNTLFI

SEQ ID NO: 19452 - protein, 85 aa, unidentified; identical to SEQ ID NO: 19423
  REGION 1..85: note = Description of Unknown:cds_NC_038660.1_cds_YP_009507778.1_2 target sequence

SEQ ID NO: 19453 - protein, 84 aa, unidentified; identical to SEQ ID NO: 19424
  REGION 1..84: note = Description of Unknown:cds_NC_038660.1_cds_YP_009507778.1_2 target sequence

SEQ ID NO: 19454 - protein, 85 aa, unidentified
  REGION 1..85: note = Description of Unknown:cds_NC_038660.1_cds_YP_009507778.1_2 target sequence
EKAADIINSKRRSFPYELLASIDFSVSTVIPQNIFHPPPCDDFYYIDGLNRVRRRRIIDDDDVFVPNCSIFPLLFQMELLPNYGQ

SEQ ID NO: 19455 - protein, 85 aa, unidentified
  REGION 1..85: note = Description of Unknown:cds_NC_038660.1_cds_YP_009507778.1_2 target sequence
LNPIIAANSKDGLANARILHTFYNTATNQARQVKCPLETFLLALLLSESSPMSADPTGLDESSSPPLSSNLPLYVLRRLSEILTN

SEQ ID NO: 19456 - protein, 85 aa, unidentified
  REGION 1..85: note = Description of Unknown:cds_NC_038660.1_cds_YP_009507778.1_2 target sequence
GFEDKSPWLLLDVGVAWIRSPLLSASIPPLMADLTNLAIYRQICPLDDDLTSMAVQMYLQAAASGSYAHYILKTKAIFAQNTLHN

SEQ ID NO: 19457 - protein, 85 aa, unidentified
  REGION 1..85: note = Description of Unknown:cds_NC_038660.1_cds_YP_009507778.1_2 target sequence
MFRQLTGGLVPIVSWLEPRSDYKFSLQGSRMVSSQDVNQTPDNTEVAEKVGHDYGCLDVVKRLRSKTATYTKSDHSAMTFVRDAM

SEQ ID NO: 19458 - protein, 85 aa, unidentified; identical to SEQ ID NO: 19429
  REGION 1..85: note = Description of Unknown:cds_NC_038660.1_cds_YP_009507778.1_2 target sequence

SEQ ID NO: 19459 - protein, 85 aa, unidentified; identical to SEQ ID NO: 19430
  REGION 1..85: note = Description of Unknown:cds_NC_038660.1_cds_YP_009507778.1_2 target sequence

SEQ ID NO: 19460 - protein, 85 aa, unidentified
  REGION 1..85: note = Description of Unknown:cds_NC_038660.1_cds_YP_009507778.1_2 target sequence
AVHTLSADYINYHLNLSTTSGSAVIEKVVPLGMYASAPPAQAINIDIKACDASITYSYFLSVIVGAIHSGVSGRRVTSPFMGVPP

SEQ ID NO: 19461 - protein, 85 aa, unidentified
  REGION 1..85: note = Description of Unknown:cds_NC_038660.1_cds_YP_009507778.1_2 target sequence
SVISLTDDTGVNSVMPLSGMQVMAQWLAKLYSRGFEYQVTDSFSPGNVFTHHTTTFPSGSIATSTEHTANNSTMMECFLKEWIPR

SEQ ID NO: 19462 - protein, 85 aa, unidentified; identical to SEQ ID NO: 19433
  REGION 1..85: note = Description of Unknown:cds_NC_038660.1_cds_YP_009507778.1_2 target sequence

SEQ ID NO: 19463 - protein, 85 aa, unidentified
  REGION 1..85: note = Description of Unknown:cds_NC_038660.1_cds_YP_009507778.1_2 target sequence
ISRHPICGKERASGDKLEMWPSSIDIFLGIYVNGVHDCLHWRRWLRFTWALALSYSRRVVKHGDVPRVIQYPMWSFVYWGIPPVS

SEQ ID NO: 19464 - protein, 85 aa, unidentified
  REGION 1..85: note = Description of Unknown:cds_NC_038660.1_cds_YP_009507778.1_2 target sequence
AFNSDPWMFSPYMPPGDHGMYSLLSLLRPYIMVSCDASDVDGPFGLVDHISLFNTDRLFQGYYMAQLPRSPVRSNRRDDPSAVRK

SEQ ID NO: 19465 - protein, 85 aa, unidentified
  REGION 1..85: note = Description of Unknown:cds_NC_038660.1_cds_YP_009507778.1_2 target sequence
FTHALDQYLFNSPELRARVRFGRDRWQKLMGDSLGRPPSLDDVAVKWFKGAQEADVPSSDEIQAMDLQLIKARQHNYTGFSSLLN

SEQ ID NO: 19466 - protein, 85 aa, unidentified; identical to SEQ ID NO: 19437
  REGION 1..85: note = Description of Unknown:cds_NC_038660.1_cds_YP_009507778.1_2 target sequence

SEQ ID NO: 19467 - protein, 85 aa, unidentified; identical to SEQ ID NO: 19438
  REGION 1..85: note = Description of Unknown:cds_NC_038660.1_cds_YP_009507778.1_2 target sequence

SEQ ID NO: 19468 - protein, 85 aa, unidentified
  REGION 1..85: note = Description of Unknown:cds_NC_001449.1_cds_NP_040824.1_3 target sequence
FPFQPMYPMQPMPYRNPFAAPRRPWFPRTDPFLAMQVQELTRSMANLTFKQRRDAPPEGPPAKKPKREAPQKQKGGGQGKKKKNQ

SEQ ID NO: 19469 - protein, 85 aa, unidentified
  REGION 1..85: note = Description of Unknown:cds_NC_001449.1_cds_NP_040824.1_3 target sequence
GKKKAKTGPPNPKAQSGNKKKPNKKPGKRQRMVMKLESDKTFPIMLEGKINGYACVVGGKLFRPMHVEGKIDNDVLAALKTKKAS

SEQ ID NO: 19470 - protein, 85 aa, unidentified
  REGION 1..85: note = Description of Unknown:cds_NC_001449.1_cds_NP_040824.1_3 target sequence
KYDLEYADVPQNMRADTFKYTHEKPQGYYSWHHGAVQYENGRFTVPKGVGAKGDSGRPILDNQGRVVAIVLGGVNEGSRTALSVV

SEQ ID NO: 19471 - protein, 85 aa, unidentified
  REGION 1..85: note = Description of Unknown:cds_NC_001449.1_cds_NP_040824.1_3 target sequence
MWNEKGVTVKYTPENCEQWSLVTTMCLLANVTFPCAEPPICYDRKPAETLAMLSVNVDNPGYDELLEAAVKCPGRKRRSTEELFK

SEQ ID NO: 19472 - protein, 85 aa, unidentified
  REGION 1..85: note = Description of Unknown:cds_NC_001449.1_cds_NP_040824.1_3 target sequence
EYKLTRPYMARCIRCAVGSCHSPIAIEAVKSDGHDGYVRLQTSSQYGLDSSGNLKGRTMRYDMHGTIEEIPLHQVSLHTSRPCHI

SEQ ID NO: 19473 - protein, 85 aa, unidentified
  REGION 1..85: note = Description of Unknown:cds_NC_001449.1_cds_NP_040824.1_3 target sequence
VDGHGYFLLARCPAGDSITMEFKKGSVTHSCSVPYEVKFNPVGRELYTHPPEHGAEQACQVYAHDAQNRGAYVEMHLPGSEVDSS

SEQ ID NO: 19474 - protein, 85 aa, unidentified
  REGION 1..85: note = Description of Unknown:cds_NC_001449.1_cds_NP_040824.1_3 target sequence
LISLSGSSVTVTPPVGTSALVKCKCGGTKISETINKAKQFSQCTKKEQCRAYRLQNDKWVYNSDKLPKAAGATLKGKLHVPFLLA

SEQ ID NO: 19475 - protein, 85 aa, unidentified
  REGION 1..85: note = Description of Unknown:cds_NC_001449.1_cds_NP_040824.1_3 target sequence
DGKCTVPLAPEPMITFGFRSVSLKLHPKNPTYLTTRQLADEPHYTHELISEPAVRNFTVTEKGWEFVWGNHPPKRFWAQETAPGN

SEQ ID NO: 19476 - protein, 85 aa, unidentified
  REGION 1..85: note = Description of Unknown:cds_NC_001449.1_cds_NP_040824.1_3 target sequence
PHGLPHEVITHYYHRYPMSTILGLSICAAIVTVSVAASTWLFCKSRVSCLTPYRLTPNARMPLCLAVLCCARTARAETTWESLDH

SEQ ID NO: 19477 - protein, 85 aa, unidentified
  REGION 1..85: note = Description of Unknown:cds_NC_001449.1_cds_NP_040824.1_3 target sequence
LWNNNQQMFWIQLLIPLAALIVVTRLLKCVCCVVPFLVVAGAAGAGAYEHATTMPSQAGISYNTIVNRAGYAPLPISITPTKIKL

SEQ ID NO: 19478 - protein, 85 aa, unidentified
  REGION 1..85: note = Description of Unknown:cds_NC_001449.1_cds_NP_040824.1_3 target sequence
IPTVNLEYVTCHYKTGMDSPAIKCCGSQECTPTNRPDEQCKVFTGVYPFMWGGAYCFCDTENTQVSKAYVMKSDDCLADHAEAYK

SEQ ID NO: 19479 - protein, 85 aa, unidentified
  REGION 1..85: note = Description of Unknown:cds_NC_001449.1_cds_NP_040824.1_3 target sequence
AHTASVQAFLNITVGEHSIVTTVYVNGETPVNFNGVKLTAGPLSTAWTPFDRKIVQYAGEIYNYDFPEYGAGQPGAFGDIQSRTV

SEQ ID NO: 19480 - protein, 85 aa, unidentified
  REGION 1..85: note = Description of Unknown:cds_NC_001449.1_cds_NP_040824.1_3 target sequence
SSSDLYANTNLVLQRPKAGAIHVPYTQAPSGFEQWKKDKAPSLKFTAPFGCEIYTNPIRAENCAVGSIPLAFDIPDALFTRVSET

SEQ ID NO: 19481 - protein, 85 aa, unidentified
  REGION 1..85: note = Description of Unknown:cds_NC_001449.1_cds_NP_040824.1_3 target sequence
PTLSAAECTLNECVYSSDFGGIATVKYSASKSGKCAVHVPSGTATLKEAAVELTEQGSATIHFSTANIHPEFRLQICTSYVTCKG

SEQ ID NO: 19482 - protein, 84 aa, unidentified
  REGION 1..84: note = Description of Unknown:cds_NC_001449.1_cds_NP_040824.1_3 target sequence
ANIHPEFRLQICTSYVTCKGDCHPPKDHIVTHPQYHAQTFTAAVSKTAWTWLTSLLGGSAVIIIIGLVLATIVAMYVLTNQKHN

SEQ ID NO: 19483 - protein, 85 aa, unidentified
  REGION 1..85: note = Description of Unknown:cds_NC_001449.1_cds_NP_040824.1_3 target sequence
RTDPFLAMQVQELTRSMANLTFKQRRDAPPEGPPAKKPKREAPQKQKGGGQGKKKKNQGKKKAKTGPPNPKAQSGNKKKPNKKPG

SEQ ID NO: 19484 - protein, 85 aa, unidentified
  REGION 1..85: note = Description of Unknown:cds_NC_001449.1_cds_NP_040824.1_3 target sequence
KRQRMVMKLESDKTFPIMLEGKINGYACVVGGKLFRPMHVEGKIDNDVLAALKTKKASKYDLEYADVPQNMRADTFKYTHEKPQG

SEQ ID NO: 19485 - protein, 85 aa, unidentified
  REGION 1..85: note = Description of Unknown:cds_NC_001449.1_cds_NP_040824.1_3 target sequence
YYSWHHGAVQYENGRFTVPKGVGAKGDSGRPILDNQGRVVAIVLGGVNEGSRTALSVVMWNEKGVTVKYTPENCEQWSLVTTMCL

SEQ ID NO: 19486 - protein, 85 aa, unidentified
  REGION 1..85: note = Description of Unknown:cds_NC_001449.1_cds_NP_040824.1_3 target sequence
LANVTFPCAEPPICYDRKPAETLAMLSVNVDNPGYDELLEAAVKCPGRKRRSTEELFKEYKLTRPYMARCIRCAVGSCHSPIAIE

SEQ ID NO: 19487 - protein, 85 aa, unidentified
  REGION 1..85: note = Description of Unknown:cds_NC_001449.1_cds_NP_040824.1_3 target sequence
AVKSDGHDGYVRLQTSSQYGLDSSGNLKGRTMRYDMHGTIEEIPLHQVSLHTSRPCHIVDGHGYFLLARCPAGDSITMEFKKGSV

SEQ ID NO: 19488 - protein, 85 aa, unidentified
  REGION 1..85: note = Description of Unknown:cds_NC_001449.1_cds_NP_040824.1_3 target sequence
THSCSVPYEVKFNPVGRELYTHPPEHGAEQACQVYAHDAQNRGAYVEMHLPGSEVDSSLISLSGSSVTVTPPVGTSALVKCKCGG

SEQ ID NO: 19489 - protein, 85 aa, unidentified
  REGION 1..85: note = Description of Unknown:cds_NC_001449.1_cds_NP_040824.1_3 target sequence
TKISETINKAKQFSQCTKKEQCRAYRLQNDKWVYNSDKLPKAAGATLKGKLHVPFLLADGKCTVPLAPEPMITFGFRSVSLKLHP

SEQ ID NO: 19490 - protein, 85 aa, unidentified
  REGION 1..85: note = Description of Unknown:cds_NC_001449.1_cds_NP_040824.1_3 target sequence
KNPTYLTTRQLADEPHYTHELISEPAVRNFTVTEKGWEFVWGNHPPKRFWAQETAPGNPHGLPHEVITHYYHRYPMSTILGLSIC

SEQ ID NO: 19491 - protein, 85 aa, unidentified
  REGION 1..85: note = Description of Unknown:cds_NC_001449.1_cds_NP_040824.1_3 target sequence
AAIVTVSVAASTWLFCKSRVSCLTPYRLTPNARMPLCLAVLCCARTARAETTWESLDHLWNNNQQMFWIQLLIPLAALIVVTRLL

SEQ ID NO: 19492 - protein, 85 aa, unidentified
  REGION 1..85: note = Description of Unknown:cds_NC_001449.1_cds_NP_040824.1_3 target sequence
KCVCCVVPFLVVAGAAGAGAYEHATTMPSQAGISYNTIVNRAGYAPLPISITPTKIKLIPTVNLEYVTCHYKTGMDSPAIKCCGS

SEQ ID NO: 19493 - protein, 85 aa, unidentified
  REGION 1..85: note = Description of Unknown:cds_NC_001449.1_cds_NP_040824.1_3 target sequence
QECTPTNRPDEQCKVFTGVYPFMWGGAYCFCDTENTQVSKAYVMKSDDCLADHAEAYKAHTASVQAFLNITVGEHSIVTTVYVNG

SEQ ID NO: 19494 - protein, 85 aa, unidentified
  REGION 1..85: note = Description of Unknown:cds_NC_001449.1_cds_NP_040824.1_3 target sequence
ETPVNFNGVKLTAGPLSTAWTPFDRKIVQYAGEIYNYDFPEYGAGQPGAFGDIQSRTVSSSDLYANTNLVLQRPKAGAIHVPYTQ

SEQ ID NO: 19495 - protein, 85 aa, unidentified
  REGION 1..85: note = Description of Unknown:cds_NC_001449.1_cds_NP_040824.1_3 target sequence
APSGFEQWKKDKAPSLKFTAPFGCEIYTNPIRAENCAVGSIPLAFDIPDALFTRVSETPTLSAAECTLNECVYSSDFGGIATVKY

SEQ ID NO: 19496 - protein, 85 aa, unidentified
  REGION 1..85: note = Description of Unknown:cds_NC_001449.1_cds_NP_040824.1_3 target sequence
SASKSGKCAVHVPSGTATLKEAAVELTEQGSATIHFSTANIHPEFRLQICTSYVTCKGDCHPPKDHIVTHPQYHAQTFTAAVSKT

SEQ ID NO: 19497 - protein, 85 aa, unidentified
  REGION 1..85: note = Description of Unknown:cds_NC_004162.2_cds_NP_690589.2_2 target sequence
EFIPTQTFYNRRYQPRPWTPRPTIQVIRPRPRPQRQAGQLAQLISAVNKLTMRAVPQQKPRKNRKNKKQKQKQQAPQNNTNQKKQ

SEQ ID NO: 19498 - protein, 85 aa, unidentified
  REGION 1..85: note = Description of Unknown:cds_NC_004162.2_cds_NP_690589.2_2 target sequence
PPKKKPAQKKKKPGRRERMCMKIENDCIFEVKHEGKVTGYACLVGDKVMKPAHVKGTIDNADLAKLAFKRSSKYDLECAQIPVHM

SEQ ID NO: 19499 - protein, 85 aa, unidentified
  REGION 1..85: note = Description of Unknown:cds_NC_004162.2_cds_NP_690589.2_2 target sequence
KSDASKFTHEKPEGYYNWHHGAVQYSGGRFTIPTGAGKPGDSGRPIFDNKGRVVAIVLGGANEGARTALSVVTWNKDIVTKITPE

SEQ ID NO: 19500 - protein, 85 aa, unidentified
  REGION 1..85: note = Description of Unknown:cds_NC_004162.2_cds_NP_690589.2_2 target sequence
GAEEWSLAIPVMCLLANTTFPCSQPPCIPCCYEKEPEETLRMLEDNVMRPGYYQLLQASLTCSPHRQRRSTKDNFNVYKATRPYL

SEQ ID NO: 19501 - protein, 85 aa, unidentified
  REGION 1..85: note = Description of Unknown:cds_NC_004162.2_cds_NP_690589.2_2 target sequence
AHCPDCGEGHSCHSPVALERIRNEATDGTLKIQVSLQIGIGTDDSHDWTKLRYMDNHIPADAGRAGLFVRTSAPCTITGTMGHFI

SEQ ID NO: 19502 - protein, 85 aa, unidentified
  REGION 1..85: note = Description of Unknown:cds_NC_004162.2_cds_NP_690589.2_2 target sequence
LARCPKGETLTVGFTDSRKISHSCTHPFHHDPPVIGREKFHSRPQHGKELPCSTYVQSNAATAEEIEVHMPPDTPDRTLLSQQSG

SEQ ID NO: 19503 - protein, 85 aa, unidentified
  REGION 1..85: note = Description of Unknown:cds_NC_004162.2_cds_NP_690589.2_2 target sequence
NVKITVNSQTVRYKCNCGGSNEGLITTDKVINNCKVDQCHAAVTNHKKWQYNSPLVPRNAELGDRKGKIHIPFPLANVTCMVPKA

SEQ ID NO: 19504 - protein, 85 aa, unidentified
  REGION 1..85: note = Description of Unknown:cds_NC_004162.2_cds_NP_690589.2_2 target sequence
RNPTVTYGKNQVIMLLYPDHPTLLSYRSMGEEPNYQEEWVTHKKEVVLTVPTEGLEVTWGNNEPYKYWPQLSANGTAHGHPHEII

SEQ ID NO: 19505 - protein, 85 aa, unidentified
  REGION 1..85: note = Description of Unknown:cds_NC_004162.2_cds_NP_690589.2_2 target sequence
LYYYELYPTMTVVVVSVASFILLSMVGMAVGMCMCARRRCITPYELTPGATVPFLLSLICCIRTAKAATYQEAAVYLWNEQQPLF

SEQ ID NO: 19506 - protein, 85 aa, unidentified
  REGION 1..85: note = Description of Unknown:cds_NC_004162.2_cds_NP_690589.2_2 target sequence
WLQALIPLAALIVLCNCLRLLPCCCKTLAFLAVMSIGAHTVSAYEHVTVIPNTVGVPYKTLVNRPGYSPMVLEMELLSVTLEPTL

SEQ ID NO: 19507 - protein, 85 aa, unidentified
  REGION 1..85: note = Description of Unknown:cds_NC_004162.2_cds_NP_690589.2_2 target sequence
SLDYITCEYKTVIPSPYVKCCGTAECKDKNLPDYSCKVFTGVYPFMWGGAYCFCDAENTQLSEAHVEKSESCKTEFASAYRAHTA

SEQ ID NO: 19508 - protein, 85 aa, unidentified
  REGION 1..85: note = Description of Unknown:cds_NC_004162.2_cds_NP_690589.2_2 target sequence
SASAKLRVLYQGNNITVTAYANGDHAVTVKDAKFIVGPMSSAWTPFDNKIVVYKGDVYNMDYPPFGAGRPGQFGDIQSRTPESKD

SEQ ID NO: 19509 - protein, 85 aa, unidentified
  REGION 1..85: note = Description of Unknown:cds_NC_004162.2_cds_NP_690589.2_2 target sequence
VYANTQLVLQRPAAGTVHVPYSQAPSGFKYWLKERGASLQHTAPFGCQIATNPVRAMNCAVGNMPISIDIPDAAFTRVVDAPSLT

SEQ ID NO: 19510 - protein, 85 aa, unidentified
  REGION 1..85: note = Description of Unknown:cds_NC_004162.2_cds_NP_690589.2_2 target sequence
DMSCEVPACTHSSDFGGVAIIKYAVSKKGKCAVHSMTNAVTIREAEIEVEGNSQLQISFSTALASAEFRVQVCSTQVHCAAECHP

SEQ ID NO: 19511 - protein, 84 aa, unidentified
  REGION 1..84: note = Description of Unknown:cds_NC_004162.2_cds_NP_690589.2_2 target sequence
FSTALASAEFRVQVCSTQVHCAAECHPPKDHIVNYPASHTTLGVQDISATAMSWVQKITGGVGLVVAVAALILIVVLCVSFSRH

SEQ ID NO: 19512 - protein, 85 aa, unidentified
  REGION 1..85: note = Description of Unknown:cds_NC_004162.2_cds_NP_690589.2_2 target sequence
RPRPRPQRQAGQLAQLISAVNKLTMRAVPQQKPRKNRKNKKQKQKQQAPQNNTNQKKQPPKKKPAQKKKKPGRRERMCMKIENDC

SEQ ID NO: 19513 - protein, 85 aa, unidentified
  REGION 1..85: note = Description of Unknown:cds_NC_004162.2_cds_NP_690589.2_2 target sequence
IFEVKHEGKVTGYACLVGDKVMKPAHVKGTIDNADLAKLAFKRSSKYDLECAQIPVHMKSDASKFTHEKPEGYYNWHHGAVQYSG

SEQ ID NO: 19514 - protein, 85 aa, unidentified
  REGION 1..85: note = Description of Unknown:cds_NC_004162.2_cds_NP_690589.2_2 target sequence
GRFTIPTGAGKPGDSGRPIFDNKGRVVAIVLGGANEGARTALSVVTWNKDIVTKITPEGAEEWSLAIPVMCLLANTTFPCSQPPC

SEQ ID NO: 19515 - protein, 85 aa, unidentified
  REGION 1..85: note = Description of Unknown:cds_NC_004162.2_cds_NP_690589.2_2 target sequence
IPCCYEKEPEETLRMLEDNVMRPGYYQLLQASLTCSPHRQRRSTKDNFNVYKATRPYLAHCPDCGEGHSCHSPVALERIRNEATD

SEQ ID NO: 19516 - protein, 85 aa, unidentified
  REGION 1..85: note = Description of Unknown:cds_NC_004162.2_cds_NP_690589.2_2 target sequence
GTLKIQVSLQIGIGTDDSHDWTKLRYMDNHIPADAGRAGLFVRTSAPCTITGTMGHFILARCPKGETLTVGFTDSRKISHSCTHP

SEQ ID NO: 19517 - protein, 85 aa, unidentified
  REGION 1..85: note = Description of Unknown:cds_NC_004162.2_cds_NP_690589.2_2 target sequence
FHHDPPVIGREKFHSRPQHGKELPCSTYVQSNAATAEEIEVHMPPDTPDRTLLSQQSGNVKITVNSQTVRYKCNCGGSNEGLITT

SEQ ID NO: 19518 - protein, 85 aa, unidentified
  REGION 1..85: note = Description of Unknown:cds_NC_004162.2_cds_NP_690589.2_2 target sequence
DKVINNCKVDQCHAAVTNHKKWQYNSPLVPRNAELGDRKGKIHIPFPLANVTCMVPKARNPTVTYGKNQVIMLLYPDHPTLLSYR

SEQ ID NO: 19519 - protein, 85 aa, unidentified
  REGION 1..85: note = Description of Unknown:cds_NC_004162.2_cds_NP_690589.2_2 target sequence
SMGEEPNYQEEWVTHKKEVVLTVPTEGLEVTWGNNEPYKYWPQLSANGTAHGHPHEIILYYYELYPTMTVVVVSVASFILLSMVG

SEQ ID NO: 19520 - protein, 85 aa, unidentified
  REGION 1..85: note = Description of Unknown:cds_NC_004162.2_cds_NP_690589.2_2 target sequence
MAVGMCMCARRRCITPYELTPGATVPFLLSLICCIRTAKAATYQEAAVYLWNEQQPLFWLQALIPLAALIVLCNCLRLLPCCCKT

SEQ ID NO: 19521 - protein, 85 aa, unidentified
  REGION 1..85: note = Description of Unknown:cds_NC_004162.2_cds_NP_690589.2_2 target sequence
LAFLAVMSIGAHTVSAYEHVTVIPNTVGVPYKTLVNRPGYSPMVLEMELLSVTLEPTLSLDYITCEYKTVIPSPYVKCCGTAECK

SEQ ID NO: 19522 - protein, 85 aa, unidentified
  REGION 1..85: note = Description of Unknown:cds_NC_004162.2_cds_NP_690589.2_2 target sequence
DKNLPDYSCKVFTGVYPFMWGGAYCFCDAENTQLSEAHVEKSESCKTEFASAYRAHTASASAKLRVLYQGNNITVTAYANGDHAV

SEQ ID NO: 19523 - protein, 85 aa, unidentified
  REGION 1..85: note = Description of Unknown:cds_NC_004162.2_cds_NP_690589.2_2 target sequence
TVKDAKFIVGPMSSAWTPFDNKIVVYKGDVYNMDYPPFGAGRPGQFGDIQSRTPESKDVYANTQLVLQRPAAGTVHVPYSQAPSG

SEQ ID NO: 19524 - protein, 85 aa, unidentified
  REGION 1..85: note = Description of Unknown:cds_NC_004162.2_cds_NP_690589.2_2 target sequence
FKYWLKERGASLQHTAPFGCQIATNPVRAMNCAVGNMPISIDIPDAAFTRVVDAPSLTDMSCEVPACTHSSDFGGVAIIKYAVSK

SEQ ID NO: 19525 - protein, 85 aa, unidentified
  REGION 1..85: note = Description of Unknown:cds_NC_004162.2_cds_NP_690589.2_2 target sequence
KGKCAVHSMTNAVTIREAEIEVEGNSQLQISFSTALASAEFRVQVCSTQVHCAAECHPPKDHIVNYPASHTTLGVQDISATAMSW

SEQ ID NO: 19526 - protein, 85 aa, unidentified
  REGION 1..85: note = Description of Unknown:cds_NC_029316.1_cds_YP_009230289.1_36 target sequence
KPKPLNPSNSFSTFRFFSSDLYLLTMDKKKALVGILFLLFLIELAPTIVTNSQTPPSASAYVGSISVSSNPFILNTTLPAINQLG

SEQ ID NO: 19527 - protein, 85 aa, unidentified
  REGION 1..85: note = Description of Unknown:cds_NC_029316.1_cds_YP_009230289.1_36 target sequence
SNIRFFQYPNLTGQLYAYEQQLPQTTPTVNDVESTSWKTYPYWENGELVVNSTGASNGGQYIAWRYSPVSNTINVTIHVTSFPEQ

SEQ ID NO: 19528 - protein, 85 aa, unidentified
  REGION 1..85: note = Description of Unknown:cds_NC_029316.1_cds_YP_009230289.1_36 target sequence
DYNPGIDIFSANPSTTSDVQSGNYYWLAIQWSGYYQYETPTSGVTSPISSSSIPNLMGKVFTETVILTENSAGNITISQIYVNGT

SEQ ID NO: 19529 - protein, 85 aa, unidentified
  REGION 1..85: note = Description of Unknown:cds_NC_029316.1_cds_YP_009230289.1_36 target sequence
LYSSPDINIPFPWNQIYWIGIRGDINNLFYVSYFSVSPSPYYNDEQFVNNVESTSWKIYPYWQNGELVVNSTGASTYGQYIAWRY

SEQ ID NO: 19530 - protein, 85 aa, unidentified
  REGION 1..85: note = Description of Unknown:cds_NC_029316.1_cds_YP_009230289.1_36 target sequence
SPVSNVINITIHMTSFPSRYGNPGIDILSPNIGDQTSDGDSGFYVLLVDFYGDSIYFHSPTSGFTQLYSSLPQPNPNYPFTMTVI

SEQ ID NO: 19531 - protein, 85 aa, unidentified
  REGION 1..85: note = Description of Unknown:cds_NC_029316.1_cds_YP_009230289.1_36 target sequence
FTENSAGNVTVSTVYINGTAYSVNVNTPFPWKCIGYVGIRGDWNDLFYVSYFSVTQMLDAYSLVTNPTTNTPYTGTVYVAVFPYP

SEQ ID NO: 19532 - protein, 85 aa, unidentified
  REGION 1..85: note = Description of Unknown:cds_NC_029316.1_cds_YP_009230289.1_36 target sequence
ISYDVYVSPAPIVNSQSPLPMFSPSFTSTTTLYPVISTNANFGVINIWTTSGSVTVSSGTVIPSIGAWTSVSLSTNTVPNFLVNG

SEQ ID NO: 19533 - protein, 85 aa, unidentified
  REGION 1..85: note = Description of Unknown:cds_NC_029316.1_cds_YP_009230289.1_36 target sequence
TVKSGSVSGNTITLSGLTGTSTVVFPDNFIPSSTAGVTPYNATFNEIKTTASSLTFTVNTQMFESGVPVIGATLGENWYYYGFYS

SEQ ID NO: 19534 - protein, 85 aa, unidentified
  REGION 1..85: note = Description of Unknown:cds_NC_029316.1_cds_YP_009230289.1_36 target sequence
TAGSYNIPLFLTTLAVGNQIYANIPTVESTSWRVYPYWEDGELVINSTGASIYGQYIAWKYSPISNVINITIHVTSFPSRNGNPG

SEQ ID NO: 19535 - protein, 85 aa, unidentified
  REGION 1..85: note = Description of Unknown:cds_NC_029316.1_cds_YP_009230289.1_36 target sequence
IEILSPNVGDQSYDGASGFYVLLVDFYGNSIFYHTPTSGWGQPDSSLPQPNPNYPFTMTVILTENSAGNVTVSTVYINSTAYSVN

SEQ ID NO: 19536 - protein, 85 aa, unidentified
  REGION 1..85: note = Description of Unknown:cds_NC_029316.1_cds_YP_009230289.1_36 target sequence
LNIPFPWSWIGYVGIRGDIGNLFYVSYFGVNSIPLVTQRGATNVNTFYSPYSLNYIINETVVCVCKTKLSSGFNSIVIPGSGFVA

SEQ ID NO: 19537 - protein, 85 aa, unidentified
  REGION 1..85: note = Description of Unknown:cds_NC_029316.1_cds_YP_009230289.1_36 target sequence
SSFAYVNTTSKSAVLVILNCPYVIFDATSNGFEIDAPRYSEIVTDTGMPQSGSFIYEDPTIILCSASTFVLPSYITTAPPPPPPS

SEQ ID NO: 19538 - protein, 85 aa, unidentified
  REGION 1..85: note = Description of Unknown:cds_NC_029316.1_cds_YP_009230289.1_36 target sequence
TTSTPPPSSSSSSSCVVIEPNSMKIEYNGSLSLTLDIPTYPEIVKYNNVMYALPFTNSSGAYFYLYDYNTSAKFDVTFKITCNGK

SEQ ID NO: 19539 - protein, 85 aa, unidentified
  REGION 1..85: note = Description of Unknown:cds_NC_029316.1_cds_YP_009230289.1_36 target sequence
TIVDETVPVNSIVKIPVVNSTSTVCISALNETIKFTLCPVQLHNFYCNVKKAVHCALSGTPLAPFGCILVFLFFGSFALSALLRN

SEQ ID NO: 19540 - protein, 84 aa, unidentified
  REGION 1..84: note = Description of Unknown:cds_NC_029316.1_cds_YP_009230289.1_36 target sequence
AVHCALSGTPLAPFGCILVFLFFGSFALSALLRNDLRLMGMGGITYAVFIAPGLLQLGFPSPIIIPTEIVSFVIGVYALWISSK

SEQ ID NO: 19541 - protein, 85 aa, unidentified
  REGION 1..85: note = Description of Unknown:cds_NC_029316.1_cds_YP_009230289.1_36 target sequence
KKKALVGILFLLFLIELAPTIVTNSQTPPSASAYVGSISVSSNPFILNTTLPAINQLGSNIRFFQYPNLTGQLYAYEQQLPQTTP

SEQ ID NO: 19542 - protein, 85 aa, unidentified
  REGION 1..85: note = Description of Unknown:cds_NC_029316.1_cds_YP_009230289.1_36 target sequence
TVNDVESTSWKTYPYWENGELVVNSTGASNGGQYIAWRYSPVSNTINVTIHVTSFPEQDYNPGIDIFSANPSTTSDVQSGNYYWL

SEQ ID NO: 19543 - protein, 85 aa, unidentified
  REGION 1..85: note = Description of Unknown:cds_NC_029316.1_cds_YP_009230289.1_36 target sequence
AIQWSGYYQYETPTSGVTSPISSSSIPNLMGKVFTETVILTENSAGNITISQIYVNGTLYSSPDINIPFPWNQIYWIGIRGDINN

SEQ ID NO: 19544 - protein, 85 aa, unidentified
  REGION 1..85: note = Description of Unknown:cds_NC_029316.1_cds_YP_009230289.1_36 target sequence
LFYVSYFSVSPSPYYNDEQFVNNVESTSWKIYPYWQNGELVVNSTGASTYGQYIAWRYSPVSNVINITIHMTSFPSRYGNPGIDI

SEQ ID NO: 19545 - protein, 85 aa, unidentified
  REGION 1..85: note = Description of Unknown:cds_NC_029316.1_cds_YP_009230289.1_36 target sequence
LSPNIGDQTSDGDSGFYVLLVDFYGDSIYFHSPTSGFTQLYSSLPQPNPNYPFTMTVIFTENSAGNVTVSTVYINGTAYSVNVNT

SEQ ID NO: 19546 - protein, 85 aa, unidentified
  REGION 1..85: note = Description of Unknown:cds_NC_029316.1_cds_YP_009230289.1_36 target sequence
PFPWKCIGYVGIRGDWNDLFYVSYFSVTQMLDAYSLVTNPTTNTPYTGTVYVAVFPYPISYDVYVSPAPIVNSQSPLPMFSPSFT

SEQ ID NO: 19547 - protein, 85 aa, unidentified
  REGION 1..85: note = Description of Unknown:cds_NC_029316.1_cds_YP_009230289.1_36 target sequence
STTTLYPVISTNANFGVINIWTTSGSVTVSSGTVIPSIGAWTSVSLSTNTVPNFLVNGTVKSGSVSGNTITLSGLTGTSTVVFPD

SEQ ID NO: 19548 - protein, 85 aa, unidentified
  REGION 1..85: note = Description of Unknown:cds_NC_029316.1_cds_YP_009230289.1_36 target sequence
NFIPSSTAGVTPYNATFNEIKTTASSLTFTVNTQMFESGVPVIGATLGENWYYYGFYSTAGSYNIPLFLTTLAVGNQIYANIPTV

SEQ ID NO: 19549 - protein, 85 aa, unidentified
  REGION 1..85: note = Description of Unknown:cds_NC_029316.1_cds_YP_009230289.1_36 target sequence
ESTSWRVYPYWEDGELVINSTGASIYGQYIAWKYSPISNVINITIHVTSFPSRNGNPGIEILSPNVGDQSYDGASGFYVLLVDFY

SEQ ID NO: 19550 - protein, 85 aa, unidentified
  REGION 1..85: note = Description of Unknown:cds_NC_029316.1_cds_YP_009230289.1_36 target sequence
GNSIFYHTPTSGWGQPDSSLPQPNPNYPFTMTVILTENSAGNVTVSTVYINSTAYSVNLNIPFPWSWIGYVGIRGDIGNLFYVSY

SEQ ID NO: 19551 - protein, 85 aa, unidentified
  REGION 1..85: note = Description of Unknown:cds_NC_029316.1_cds_YP_009230289.1_36 target sequence
FGVNSIPLVTQRGATNVNTFYSPYSLNYIINETVVCVCKTKLSSGFNSIVIPGSGFVASSFAYVNTTSKSAVLVILNCPYVIFDA

SEQ ID NO: 19552 - protein, 85 aa, unidentified
  REGION 1..85: note = Description of Unknown:cds_NC_029316.1_cds_YP_009230289.1_36 target sequence
TSNGFEIDAPRYSEIVTDTGMPQSGSFIYEDPTIILCSASTFVLPSYITTAPPPPPPSTTSTPPPSSSSSSSCVVIEPNSMKIEY

SEQ ID NO: 19553 - protein, 85 aa, unidentified
  REGION 1..85: note = Description of Unknown:cds_NC_029316.1_cds_YP_009230289.1_36 target sequence
NGSLSLTLDIPTYPEIVKYNNVMYALPFTNSSGAYFYLYDYNTSAKFDVTFKITCNGKTIVDETVPVNSIVKIPVVNSTSTVCIS

SEQ ID NO: 19554 - protein, 85 aa, unidentified
  REGION 1..85: note = Description of Unknown:cds_NC_029316.1_cds_YP_009230289.1_36 target sequence
ALNETIKFTLCPVQLHNFYCNVKKAVHCALSGTPLAPFGCILVFLFFGSFALSALLRNDLRLMGMGGITYAVFIAPGLLQLGFPS

SEQ ID NO: 19555 - protein, 85 aa, unidentified
  REGION 1..85: note = Description of Unknown:hvTR_P17147 target sequence
SHEELTALAPVGPAAFLYFSRLNAETQEILATLSLCDRSSSVVIAPLLAGLTVEADFGVSVRTPVLCYDGGVLTKVTSFCPFALY

SEQ ID NO: 19556 - protein, 85 aa, unidentified
  REGION 1..85: note = Description of Unknown:hvTR_P17147 target sequence
FHHTQGIVAFTEDHGDVHRLCEDARQKYALEAYMPEADRVPTDLAALCAAVGCQASETTVHVVVGNGLKEFLFAGQLIPCVEEAT

SEQ ID NO: 19557 - protein, 85 aa, unidentified
  REGION 1..85: note = Description of Unknown:hvTR_P17147 target sequence
TVRLHGGEAVRVPLYPPTLFNSLQLDAEADEVSLDARSAFVEARGLYVPAVSETLFYYVYTSWCQSLRFSEPRVLIEAALRQFVH

SEQ ID NO: 19558 - protein, 85 aa, unidentified
  REGION 1..85: note = Description of Unknown:hvTR_P17147 target sequence
DSQQSVKLAPHKRYLGYMSQRLSSLEKDHLMLSDAVVCELAFSFASVFFDSAYQPAESMLFSEWPLVTNATDHRDLIRALTELKL

SEQ ID NO: 19559 - protein, 85 aa, unidentified
  REGION 1..85: note = Description of Unknown:hvTR_P17147 target sequence
HLSTHVAALVFSANSVLYQHRLVYLQSSARHPSAGGTASQETLLKAIQFTNGLSAACEDVYNDARKVLKFQGAPLKDERYGPQHL

SEQ ID NO: 19560 - protein, 85 aa, unidentified
  REGION 1..85: note = Description of Unknown:hvTR_P17147 target sequence
ALVCGTCPQLVSGFVWYLNRVSVYNTGLSGSSTLTNHLVGCAAGLCEACGGTCCHTCYQTAFVRVRTRLPVVPKQPKKEPCVITV

SEQ ID NO: 19561 - protein, 85 aa, unidentified
  REGION 1..85: note = Description of Unknown:hvTR_P17147 target sequence
QSRFLNDVDILGSFGRRYNVDAKDGGLDGKGDDGVPGGGAGGGGGRDVSGGPSDGLGGGRGGGGGGDSGGMMGRGGRMLGASVDR

SEQ ID NO: 19562 - protein, 85 aa, unidentified
  REGION 1..85: note = Description of Unknown:hvTR_P17147 target sequence
TYRLNRILDYCRKMRLIDPVTGEDTFSAHGKSDFVAVFSALNKFVDDEALGFVSEVRLKSSRDEVAGATQAFNLDLNPYAVAFQP

SEQ ID NO: 19563 - protein, 85 aa, unidentified
  REGION 1..85: note = Description of Unknown:hvTR_P17147 target sequence
LLAYAYFRSVFYVIQNVALITATSYIVDNPLTTNLVSKWMTQHFQSIHGAFSTTSSRKGFLFTKQIKSSKNSDHDRLLDFRLYAQ

SEQ ID NO: 19564 - protein, 85 aa, unidentified
  REGION 1..85: note = Description of Unknown:hvTR_P17147 target sequence
GTYAVVPMEIKLSRLSVPTLIMVRVKNRPIYRAGKGNAGSVFFRRDHVPRRNPAKGCLGFLLYRHHERLFPECGLPCLQFWQKVC

SEQ ID NO: 19565 - protein, 85 aa, unidentified
  REGION 1..85: note = Description of Unknown:hvTR_P17147 target sequence
SNALPKNVPIGDMGEFNAFVKFLVAVTADYQEHDLLDVAPDCVLSYVESRFHNKFLCYYGFKDYIGSLHGLTTRLTTQNHAQFPH

SEQ ID NO: 19566 - protein, 85 aa, unidentified
  REGION 1..85: note = Description of Unknown:hvTR_P17147 target sequence
VLGASPRFSSPAEFALHVKGLKTAGVPAPMAATVARESLVRSVFEHRSLVTVPVSVEKYAGINNSKEIYQFGQIGYFSGNGVERS

SEQ ID NO: 19567 - protein, 85 aa, unidentified
  REGION 1..85: note = Description of Unknown:hvTR_P17147 target sequence
LNVSSMSGQDYRFMRQRYLLATRLADVLIKRSRRENVLFDADLIKNRVMLALDAENLDCDPEVMAVYEILSVREEIPASDDVLFF

SEQ ID NO: 19568 - protein, 85 aa, unidentified
  REGION 1..85: note = Description of Unknown:hvTR_P17147 target sequence
VDGCEALAASLMDKFAALQEQGVEDFSLENLRRVLDADAQRLTDAAGGEVHDLSALFAPSGVGAASGVGGGGLLLGESVAGNSIC

SEQ ID NO: 19569 - protein, 84 aa, unidentified
  REGION 1..84: note = Description of Unknown:hvTR_P17147 target sequence
AGGEVHDLSALFAPSGVGAASGVGGGGLLLGESVAGNSICFGVPGETGGGCFLVNAGEDEAGGVGGSSGGGGGSGLLPAKRSRL

SEQ ID NO: 19570 - protein, 85 aa, unidentified
  REGION 1..85: note = Description of Unknown:hvTR_P17147 target sequence
EILATLSLCDRSSSVVIAPLLAGLTVEADFGVSVRTPVLCYDGGVLTKVTSFCPFALYFHHTQGIVAFTEDHGDVHRLCEDARQK

SEQ ID NO: 19571 - protein, 85 aa, unidentified
  REGION 1..85: note = Description of Unknown:hvTR_P17147 target sequence
YALEAYMPEADRVPTDLAALCAAVGCQASETTVHVVVGNGLKEFLFAGQLIPCVEEATTVRLHGGEAVRVPLYPPTLFNSLQLDA

SEQ ID NO: 19572 - protein, 85 aa, unidentified
  REGION 1..85: note = Description of Unknown:hvTR_P17147 target sequence
EADEVSLDARSAFVEARGLYVPAVSETLFYYVYTSWCQSLRFSEPRVLIEAALRQFVHDSQQSVKLAPHKRYLGYMSQRLSSLEK

SEQ ID NO: 19573 - protein, 85 aa, unidentified
  REGION 1..85: note = Description of Unknown:hvTR_P17147 target sequence
DHLMLSDAVVCELAFSFASVFFDSAYQPAESMLFSEWPLVTNATDHRDLIRALTELKLHLSTHVAALVFSANSVLYQHRLVYLQS

SEQ ID NO: 19574 - protein, 85 aa, unidentified
  REGION 1..85: note = Description of Unknown:hvTR_P17147 target sequence
SARHPSAGGTASQETLLKAIQFTNGLSAACEDVYNDARKVLKFQGAPLKDERYGPQHLALVCGTCPQLVSGFVWYLNRVSVYNTG

SEQ ID NO: 19575 - protein, 85 aa, unidentified
  REGION 1..85: note = Description of Unknown:hvTR_P17147 target sequence
LSGSSTLTNHLVGCAAGLCEACGGTCCHTCYQTAFVRVRTRLPVVPKQPKKEPCVITVQSRFLNDVDILGSFGRRYNVDAKDGGL

SEQ ID NO: 19576 - protein, 85 aa, unidentified
  REGION 1..85: note = Description of Unknown:hvTR_P17147 target sequence
DGKGDDGVPGGGAGGGGGRDVSGGPSDGLGGGRGGGGGGDSGGMMGRGGRMLGASVDRTYRLNRILDYCRKMRLIDPVTGEDTFS

SEQ ID NO: 19577 - protein, 85 aa, unidentified
  REGION 1..85: note = Description of Unknown:hvTR_P17147 target sequence
AHGKSDFVAVFSALNKFVDDEALGFVSEVRLKSSRDEVAGATQAFNLDLNPYAVAFQPLLAYAYFRSVFYVIQNVALITATSYIV

SEQ ID NO: 19578 - protein, 85 aa, unidentified
  REGION 1..85: note = Description of Unknown:hvTR_P17147 target sequence
DNPLTTNLVSKWMTQHFQSIHGAFSTTSSRKGFLFTKQIKSSKNSDHDRLLDFRLYAQGTYAVVPMEIKLSRLSVPTLIMVRVKN

SEQ ID NO: 19579 - protein, 85 aa, unidentified
  REGION 1..85: note = Description of Unknown:hvTR_P17147 target sequence
RPIYRAGKGNAGSVFFRRDHVPRRNPAKGCLGFLLYRHHERLFPECGLPCLQFWQKVCSNALPKNVPIGDMGEFNAFVKFLVAVT

SEQ ID NO: 19580 - protein, 85 aa, unidentified
  REGION 1..85: note = Description of Unknown:hvTR_P17147 target sequence
ADYQEHDLLDVAPDCVLSYVESRFHNKFLCYYGFKDYIGSLHGLTTRLTTQNHAQFPHVLGASPRFSSPAEFALHVKGLKTAGVP

SEQ ID NO: 19581 - protein, 85 aa, unidentified
  REGION 1..85: note = Description of Unknown:hvTR_P17147 target sequence
APMAATVARESLVRSVFEHRSLVTVPVSVEKYAGINNSKEIYQFGQIGYFSGNGVERSLNVSSMSGQDYRFMRQRYLLATRLADV

SEQ ID NO: 19582 - protein, 85 aa, unidentified
  REGION 1..85: note = Description of Unknown:hvTR_P17147 target sequence
LIKRSRRENVLFDADLIKNRVMLALDAENLDCDPEVMAVYEILSVREEIPASDDVLFFVDGCEALAASLMDKFAALQEQGVEDFS

SEQ ID NO: 19583 - protein, 85 aa, unidentified
  REGION 1..85: note = Description of Unknown:hvTR_P17147 target sequence
LENLRRVLDADAQRLTDAAGGEVHDLSALFAPSGVGAASGVGGGGLLLGESVAGNSICFGVPGETGGGCFLVNAGEDEAGGVGGS

SEQ ID NO: 19584 - protein, 85 aa, unidentified
  REGION 1..85: note = Description of Unknown:cds_NZ_WFIY01000004.1_cds_WP_155863020.1_902 target sequence
SEELPNLVYMNSCPNCGGEITANRLYRGSVCEKCIKEDIQFNSVYDLALYLLKNKSLINLRSSYEILKELKEVERLFKRVLGSPP

SEQ ID NO: 19585 - protein, 85 aa, unidentified
  REGION 1..85: note = Description of Unknown:cds_NZ_WFIY01000004.1_cds_WP_155863020.1_902 target sequence
LGPQRSWIVRALRGESFAIIAPPGLGKTTFGILMSLYFSEKQRKTLMIFPTKTLVNQVVQRIQEMSKNLEEVPKLAYYYSGITQS

SEQ ID NO: 19586 - protein, 85 aa, unidentified
  REGION 1..85: note = Description of Unknown:cds_NZ_WFIY01000004.1_cds_WP_155863020.1_902 target sequence
QKDELNKILESGDFDIFVSTSRYIINNVDYISTKDYKYLFVDDVDSVLKSSKSANAVLKLVGFTEDDIQNVRELLRKSKNSEEVY

SEQ ID NO: 19587 - protein, 85 aa, unidentified
  REGION 1..85: note = Description of Unknown:cds_NZ_WFIY01000004.1_cds_WP_155863020.1_902 target sequence
DEIRKIREKKTGDKIAIFSSATITKGNPVFSALMGFRPGSAVIYLRNVIDSYVQLSSATDEEIIDIVNKIVNKLGSGGLIFVPID

SEQ ID NO: 19588 - protein, 85 aa, unidentified
  REGION 1..85: note = Description of Unknown:cds_NZ_WFIY01000004.1_cds_WP_155863020.1_902 target sequence
KGVSFANEIASNISGLKAEAISSTSITKLDKFEKGEIDVLVGVATHYGILVRGIDIPWRIRYAIFAGIPRFRFKIGETMHPLAML

SEQ ID NO: 19589 - protein, 85 aa, unidentified
  REGION 1..85: note = Description of Unknown:cds_NZ_WFIY01000004.1_cds_WP_155863020.1_902 target sequence
KMLTLISLVTKDEEVTKILRIVRNKLRRISPAALAMLANSVKSGKIEDKYIQEAYDLTNKYLRNEEILEKIAEIGEISINNGYIS

SEQ ID NO: 19590 - protein, 85 aa, unidentified
  REGION 1..85: note = Description of Unknown:cds_NZ_WFIY01000004.1_cds_WP_155863020.1_902 target sequence
TPDYLTYIQASGRTSRIFGGELTTGLSVLLVDNPRLFELLNRRLSIVLDEVTWNPFDIDNDKIGNNNLHEILKRIDSEREKIRKI

SEQ ID NO: 19591 - protein, 85 aa, unidentified
  REGION 1..85: note = Description of Unknown:cds_NZ_WFIY01000004.1_cds_WP_155863020.1_902 target sequence
KKEGLLTSTSVKNIKTVLFIVESPNKARTISNFFSKPSIRVFNGAIIYETVIGDKVLMVTASGGHVYDLTTKNIGIHGIEVRKNS

SEQ ID NO: 19592 - protein, 85 aa, unidentified
  REGION 1..85: note = Description of Unknown:cds_NZ_WFIY01000004.1_cds_WP_155863020.1_902 target sequence
NLEFIPYYNTIKRCNNGHQFTEYAEGNKCPTCGSTIIKDKIDVINSFRQLALEADEILIGTDPDVEGEKISWDLYLALKPYNPNI

SEQ ID NO: 19593 - protein, 85 aa, unidentified
  REGION 1..85: note = Description of Unknown:cds_NZ_WFIY01000004.1_cds_WP_155863020.1_902 target sequence
KRAEFHEVTRRAIVEAINNSRQFSIPLLQSQVVRRVEDRWIGFSLSTKLQTVFWPQYCSDVLKRTDCGENKNLSAGRVQTPVLGW

SEQ ID NO: 19594 - protein, 85 aa, unidentified
  REGION 1..85: note = Description of Unknown:cds_NZ_WFIY01000004.1_cds_WP_155863020.1_902 target sequence
VINRYNKYNETKRMVFVVKFLNSLSVLVPKQADLDRNDVKVVVYNISKSSETFGPMPPYTTDEMLSDASNLYGISAPEAMRVAQD

SEQ ID NO: 19595 - protein, 85 aa, unidentified
  REGION 1..85: note = Description of Unknown:cds_NZ_WFIY01000004.1_cds_WP_155863020.1_902 target sequence
LFEMGLITYHRTDSTRISNTGIAVAENYLKEVLEDKYKEIFKPRTWGEGGAHEAIRPTRPLDENQLRALIEEGELELPKRLTLNH

SEQ ID NO: 19596 - protein, 85 aa, unidentified
  REGION 1..85: note = Description of Unknown:cds_NZ_WFIY01000004.1_cds_WP_155863020.1_902 target sequence
YRIYGLIFSRFISSQIVPLNVDKLKFNIKVLSNGKELKVENPEIELITNVSLPGGIDVRKLSLYYPRSYFASRDSSYADTIKKLE

SEQ ID NO: 19597 - protein, 85 aa, unidentified
  REGION 1..85: note = Description of Unknown:cds_NZ_WFIY01000004.1_cds_WP_155863020.1_902 target sequence
ECSNSSQCEFTGSIVSSFVKSDYQLYTQGELITEMKNKKIGRPSTYATIIATLLKRGYMLESKKVKRLVPSKLGINVYNFLTSKY

SEQ ID NO: 19598 - protein, 84 aa, unidentified
  REGION 1..84: note = Description of Unknown:cds_NZ_WFIY01000004.1_cds_WP_155863020.1_902 target sequence
PSTYATIIATLLKRGYMLESKKVKRLVPSKLGINVYNFLTSKYFKFVSEERTRQLLELMDLIEDGKEDYRQVLKQLYDEIQSIG

SEQ ID NO: 19599 - protein, 85 aa, unidentified
  REGION 1..85: note = Description of Unknown:cds_NZ_WFIY01000004.1_cds_WP_155863020.1_902 target sequence
GSVCEKCIKEDIQFNSVYDLALYLLKNKSLINLRSSYEILKELKEVERLFKRVLGSPPLGPQRSWIVRALRGESFAIIAPPGLGK

SEQ ID NO: 19600 - protein, 85 aa, unidentified
  REGION 1..85: note = Description of Unknown:cds_NZ_WFIY01000004.1_cds_WP_155863020.1_902 target sequence
TTFGILMSLYFSEKQRKTLMIFPTKTLVNQVVQRIQEMSKNLEEVPKLAYYYSGITQSQKDELNKILESGDFDIFVSTSRYIINN

SEQ ID NO: 19601 - protein, 85 aa, unidentified
  REGION 1..85: note = Description of Unknown:cds_NZ_WFIY01000004.1_cds_WP_155863020.1_902 target sequence
VDYISTKDYKYLFVDDVDSVLKSSKSANAVLKLVGFTEDDIQNVRELLRKSKNSEEVYDEIRKIREKKTGDKIAIFSSATITKGN

SEQ ID NO: 19602 - protein, 85 aa, unidentified
  REGION 1..85: note = Description of Unknown:cds_NZ_WFIY01000004.1_cds_WP_155863020.1_902 target sequence
PVFSALMGFRPGSAVIYLRNVIDSYVQLSSATDEEIIDIVNKIVNKLGSGGLIFVPIDKGVSFANEIASNISGLKAEAISSTSIT

SEQ ID NO: 19603 - protein, 85 aa, unidentified
  REGION 1..85: note = Description of Unknown:cds_NZ_WFIY01000004.1_cds_WP_155863020.1_902 target sequence
KLDKFEKGEIDVLVGVATHYGILVRGIDIPWRIRYAIFAGIPRFRFKIGETMHPLAMLKMLTLISLVTKDEEVTKILRIVRNKLR

SEQ ID NO: 19604 - protein, 85 aa, unidentified
  REGION 1..85: note = Description of Unknown:cds_NZ_WFIY01000004.1_cds_WP_155863020.1_902 target sequence
RISPAALAMLANSVKSGKIEDKYIQEAYDLTNKYLRNEEILEKIAEIGEISINNGYISTPDYLTYIQASGRTSRIFGGELTTGLS

SEQ ID NO: 19605 - protein, 85 aa, unidentified
  REGION 1..85: note = Description of Unknown:cds_NZ_WFIY01000004.1_cds_WP_155863020.1_902 target sequence
VLLVDNPRLFELLNRRLSIVLDEVTWNPFDIDNDKIGNNNLHEILKRIDSEREKIRKIKKEGLLTSTSVKNIKTVLFIVESPNKA

SEQ ID NO: 19606 - protein, 85 aa, unidentified
  REGION 1..85: note = Description of Unknown:cds_NZ_WFIY01000004.1_cds_WP_155863020.1_902 target sequence
RTISNFFSKPSIRVFNGAIIYETVIGDKVLMVTASGGHVYDLTTKNIGIHGIEVRKNSNLEFIPYYNTIKRCNNGHQFTEYAEGN

SEQ ID NO: 19607 - protein, 85 aa, unidentified
  REGION 1..85: note = Description of Unknown:cds_NZ_WFIY01000004.1_cds_WP_155863020.1_902 target sequence
KCPTCGSTIIKDKIDVINSFRQLALEADEILIGTDPDVEGEKISWDLYLALKPYNPNIKRAEFHEVTRRAIVEAINNSRQFSIPL

SEQ ID NO: 19608 - protein, 85 aa, unidentified
  REGION 1..85: note = Description of Unknown:cds_NZ_WFIY01000004.1_cds_WP_155863020.1_902 target sequence
LQSQVVRRVEDRWIGFSLSTKLQTVFWPQYCSDVLKRTDCGENKNLSAGRVQTPVLGWVINRYNKYNETKRMVFVVKFLNSLSVL

SEQ ID NO: 19609 - protein, 85 aa, unidentified
  REGION 1..85: note = Description of Unknown:cds_NZ_WFIY01000004.1_cds_WP_155863020.1_902 target sequence
VPKQADLDRNDVKVVVYNISKSSETFGPMPPYTTDEMLSDASNLYGISAPEAMRVAQDLFEMGLITYHRTDSTRISNTGIAVAEN

SEQ ID NO: 19610 - protein, 85 aa, unidentified
  REGION 1..85: note = Description of Unknown:cds_NZ_WFIY01000004.1_cds_WP_155863020.1_902 target sequence
YLKEVLEDKYKEIFKPRTWGEGGAHEAIRPTRPLDENQLRALIEEGELELPKRLTLNHYRIYGLIFSRFISSQIVPLNVDKLKFN

SEQ ID NO: 19611 - protein, 85 aa, unidentified
  REGION 1..85: note = Description of Unknown:cds_NZ_WFIY01000004.1_cds_WP_155863020.1_902 target sequence
IKVLSNGKELKVENPEIELITNVSLPGGIDVRKLSLYYPRSYFASRDSSYADTIKKLEECSNSSQCEFTGSIVSSFVKSDYQLYT

SEQ ID NO: 19612 - protein, 85 aa, unidentified
  REGION 1..85: note = Description of Unknown:cds_NZ_WFIY01000004.1_cds_WP_155863020.1_902 target sequence
QGELITEMKNKKIGRPSTYATIIATLLKRGYMLESKKVKRLVPSKLGINVYNFLTSKYFKFVSEERTRQLLELMDLIEDGKEDYR

SEQ ID NO: 19613 - protein, 85 aa, unidentified
  REGION 1..85: note = Description of Unknown:hvTR_Q69513 target sequence
STTADVVREAMTLSGLYNEIHDHTKPENEITYSNFNNQEIVTSKTLQDPRRAIPLKSRSTFTSESSPNTTETGQFRFASELPHQG

SEQ ID NO: 19614 - protein, 85 aa, unidentified
  REGION 1..85: note = Description of Unknown:hvTR_Q69513 target sequence
LQSLYYNYPQASGENFISLPYQPQSSVDIFNNLDYKNRELCHNSFDTTYRQHHYRGRNNRGKYDSRNYCNPNSKYQNHYGKHFHR

SEQ ID NO: 19615 - protein, 85 aa, unidentified
  REGION 1..85: note = Description of Unknown:hvTR_Q69513 target sequence
PYNRRGRGYAKFHDFSNRNEFTFPEYMQRDQSYDSYNSDFRHNPYRDNYQQLCPNYGFQSRDYSMAFSQIPSSSMITDSQNLQKE

SEQ ID NO: 19616 - protein, 85 aa, unidentified
  REGION 1..85: note = Description of Unknown:hvTR_Q69513 target sequence
CISSGLTLSKKSEYSQNTPIQTNHKETKLISNVNNLEKPARKKTDKDKTPQNEDVVSLSYIPSSHKMDLIKRIYNADIVPLAKDS

SEQ ID NO: 19617 - protein, 85 aa, unidentified
  REGION 1..85: note = Description of Unknown:hvTR_Q69513 target sequence
LSSTSDVDKCKYNKSSQEKTFMKARTRPSTSKEKQITSTTDSKHCPNLDKGSSNLKKKDKSPDEAIENLRKLSKLEPMLSPLPLT

SEQ ID NO: 19618 - protein, 85 aa, unidentified
  REGION 1..85: note = Description of Unknown:hvTR_Q69513 target sequence
PKPDVQESNQRAPTKLINFKRLLEKNDKDISASDIEFIKQSSRCTVSTALNCNSSTVFSDTKCTGKNSYRVGRPRQAKTTVNSKI

SEQ ID NO: 19619 - protein, 85 aa, unidentified
  REGION 1..85: note = Description of Unknown:hvTR_Q69513 target sequence
DAKENDFEGKVTAPCNIPSIDNPPVESEKSNTTDSMCNDNLTQRTRSDSSSTEEGQYKSPVNDYSQSEVEHVHSIENQHMEQIIS

SEQ ID NO: 19620 - protein, 85 aa, unidentified
  REGION 1..85: note = Description of Unknown:hvTR_Q69513 target sequence
QTTDEIAQNFVSPEQEFLAKSDTENGLFEFFDNELQCTQNSSETKKFPISDRSMSPKSTRSSSSDSDTDTSSSSSSSSSKCSCKS

SEQ ID NO: 19621 - protein, 85 aa, unidentified
  REGION 1..85: note = Description of Unknown:hvTR_Q69513 target sequence
SSSASSKNSVLSRNSCSSTELKPSYTESPNSNGNRQCDFVSKVDMSEFEFRCGKELNLYKHVESRLQLDQNNEHLYNPRFRPHIR

SEQ ID NO: 19622 - protein, 85 aa, unidentified
  REGION 1..85: note = Description of Unknown:hvTR_Q69513 target sequence
KKRPPSTESESDTNSDLQSQSFSSSKKRRHEHRNTESESCSESTKTRHRQKHRSRSSSDTSRSRSASKSRTCKVCSNNKQDSQSE

SEQ ID NO: 19623 - protein, 85 aa, unidentified
  REGION 1..85: note = Description of Unknown:hvTR_Q69513 target sequence
TQCKHLISISRSNSEHSISESTYQSCKNKNSETLRSRSRSSESDCKKRSERSCSNHSWSSGSTQKSKRVDIDFTHGAKSIPNEYE

SEQ ID NO: 19624 - protein, 85 aa, unidentified
  REGION 1..85: note = Description of Unknown:hvTR_Q69513 target sequence
QKKSTNKFFKNKRRNARKRFSDDSDSSMQLFYKKRISGTQKSDSELSDNDLSYREYVKLQEQKQSAKFKVQRGRVPTKDFEKLFR

SEQ ID NO: 19625 - protein, 85 aa, unidentified
  REGION 1..85: note = Description of Unknown:hvTR_Q69513 target sequence
KTIRAFEYKQIPKKPFPEAKLKESVYALCCNGSSKSGALIIYFTRSKTVAEDIKAMQKELMVRPNITMSEPFKMNHAPPRYYDKD

SEQ ID NO: 19626 - protein, 85 aa, unidentified
  REGION 1..85: note = Description of Unknown:hvTR_Q69513 target sequence
SIKNFIELQKKGPHELWENISNSAHTLYTRHSDLKTIIIYAATPIDFFMAAKICNNYAKKRPKEIVLRLSSITDGDNPISIYNPV

SEQ ID NO: 19627 - protein, 84 aa, unidentified
  REGION 1..84: note = Description of Unknown:hvTR_Q69513 target sequence
LWENISNSAHTLYTRHSDLKTIIIYAATPIDFFMAAKICNNYAKKRPKEIVLRLSSITDGDNPISIYNPVSRDFLSKYTALCKF

SEQ ID NO: 19628 - protein, 85 aa, unidentified
  REGION 1..85: note = Description of Unknown:hvTR_Q69513 target sequence
NEITYSNFNNQEIVTSKTLQDPRRAIPLKSRSTFTSESSPNTTETGQFRFASELPHQGLQSLYYNYPQASGENFISLPYQPQSSV

SEQ ID NO: 19629 - protein, 85 aa, unidentified
  REGION 1..85: note = Description of Unknown:hvTR_Q69513 target sequence
DIFNNLDYKNRELCHNSFDTTYRQHHYRGRNNRGKYDSRNYCNPNSKYQNHYGKHFHRPYNRRGRGYAKFHDFSNRNEFTFPEYM

SEQ ID NO: 19630 - protein, 85 aa, unidentified
  REGION 1..85: note = Description of Unknown:hvTR_Q69513 target sequence
QRDQSYDSYNSDFRHNPYRDNYQQLCPNYGFQSRDYSMAFSQIPSSSMITDSQNLQKECISSGLTLSKKSEYSQNTPIQTNHKET

SEQ ID NO: 19631 - protein, 85 aa, unidentified
  REGION 1..85: note = Description of Unknown:hvTR_Q69513 target sequence
KLISNVNNLEKPARKKTDKDKTPQNEDVVSLSYIPSSHKMDLIKRIYNADIVPLAKDSLSSTSDVDKCKYNKSSQEKTFMKARTR

SEQ ID NO: 19632 - protein, 85 aa, unidentified
  REGION 1..85: note = Description of Unknown:hvTR_Q69513 target sequence
PSTSKEKQITSTTDSKHCPNLDKGSSNLKKKDKSPDEAIENLRKLSKLEPMLSPLPLTPKPDVQESNQRAPTKLINFKRLLEKND

SEQ ID NO: 19633 - protein, 85 aa, unidentified
  REGION 1..85: note = Description of Unknown:hvTR_Q69513 target sequence
KDISASDIEFIKQSSRCTVSTALNCNSSTVFSDTKCTGKNSYRVGRPRQAKTTVNSKIDAKENDFEGKVTAPCNIPSIDNPPVES

SEQ ID NO: 19634 - protein, 85 aa, unidentified
  REGION 1..85: note = Description of Unknown:hvTR_Q69513 target sequence
EKSNTTDSMCNDNLTQRTRSDSSSTEEGQYKSPVNDYSQSEVEHVHSIENQHMEQIISQTTDEIAQNFVSPEQEFLAKSDTENGL

SEQ ID NO: 19635 - protein, 85 aa, unidentified
  REGION 1..85: note = Description of Unknown:hvTR_Q69513 target sequence
FEFFDNELQCTQNSSETKKFPISDRSMSPKSTRSSSSDSDTDTSSSSSSSSSKCSCKSSSSASSKNSVLSRNSCSSTELKPSYTE

SEQ ID NO: 19636 - protein, 85 aa, unidentified
  REGION 1..85: note = Description of Unknown:hvTR_Q69513 target sequence
SPNSNGNRQCDFVSKVDMSEFEFRCGKELNLYKHVESRLQLDQNNEHLYNPRFRPHIRKKRPPSTESESDTNSDLQSQSFSSSKK

SEQ ID NO: 19637 - protein, 85 aa, unidentified
  REGION 1..85: note = Description of Unknown:hvTR_Q69513 target sequence
RRHEHRNTESESCSESTKTRHRQKHRSRSSSDTSRSRSASKSRTCKVCSNNKQDSQSETQCKHLISISRSNSEHSISESTYQSCK

SEQ ID NO: 19638 - protein, 85 aa, unidentified
  REGION 1..85: note = Description of Unknown:hvTR_Q69513 target sequence
NKNSETLRSRSRSSESDCKKRSERSCSNHSWSSGSTQKSKRVDIDFTHGAKSIPNEYEQKKSTNKFFKNKRRNARKRFSDDSDSS

SEQ ID NO: 19639 - protein, 85 aa, unidentified
  REGION 1..85: note = Description of Unknown:hvTR_Q69513 target sequence
MQLFYKKRISGTQKSDSELSDNDLSYREYVKLQEQKQSAKFKVQRGRVPTKDFEKLFRKTIRAFEYKQIPKKPFPEAKLKESVYA

SEQ ID NO: 19640 - protein, 85 aa, unidentified
  REGION 1..85: note = Description of Unknown:hvTR_Q69513 target sequence
LCCNGSSKSGALIIYFTRSKTVAEDIKAMQKELMVRPNITMSEPFKMNHAPPRYYDKDSIKNFIELQKKGPHELWENISNSAHTL

SEQ ID NO: 19641 - protein, 85 aa, unidentified
  REGION 1..85: note = Description of Unknown:hvTR_P09246 target sequence
ENTQKTVTVPTGPLGYVYACRVEDLDLEEISFLAARSTDSDLALLPLMRNLTVEKTFTSSLAVVSGARTTGLAGAGITLKLTTSH

SEQ ID NO: 19642 - protein, 85 aa, unidentified
  REGION 1..85: note = Description of Unknown:hvTR_P09246 target sequence
FYPSVFVFHGGKHVLPSSAAPNLTRACNAARERFGFSRCQGPPVDGAVETTGAEICTRLGLEPENTILYLVVTALFKEAVFMCNV

SEQ ID NO: 19643 - protein, 85 aa, unidentified
  REGION 1..85: note = Description of Unknown:hvTR_P09246 target sequence
FLHYGGLDIVHINHGDVIRIPLFPVQLFMPDVNRLVPDPFNTHHRSIGEGFVYPTPFYNTGLCHLIHDCVIAPMAVALRVRNVTA

SEQ ID NO: 19644 - protein, 85 aa, unidentified
  REGION 1..85: note = Description of Unknown:hvTR_P09246 target sequence
VARGAAHLAFDENHEGAVLPPDITYTYFQSSSSGTTTARGARRNDVNSTSKPSPSGGFERRLASIMAADTALHAEVIFNTGIYEE

SEQ ID NO: 19645 - protein, 85 aa, unidentified
  REGION 1..85: note = Description of Unknown:hvTR_P09246 target sequence
TPTDIKEWPMFIGMEGTLPRLNALGSYTARVAGVIGAMVFSPNSALYLTEVEDSGMTEAKDGGPGPSFNRFYQFAGPHLAANPQT

SEQ ID NO: 19646 - protein, 85 aa, unidentified
  REGION 1..85: note = Description of Unknown:hvTR_P09246 target sequence
DRDGHVLSSQSTGSSNTEFSVDYLALICGFGAPLLARLLFYLERCDAGAFTGGHGDALKYVTGTFDSEIPCSLCEKHTRPVCAHT

SEQ ID NO: 19647 - protein, 85 aa, unidentified
  REGION 1..85: note = Description of Unknown:hvTR_P09246 target sequence
TVHRLRQRMPRFGQATRQPIGVFGTMNSQYSDCDPLGNYAPYLILRKPGDQTEAAKATMQDTYRATLERLFIDLEQERLLDRGAP

SEQ ID NO: 19648 - protein, 85 aa, unidentified
  REGION 1..85: note = Description of Unknown:hvTR_P09246 target sequence
CSSEGLSSVIVDHPTFRRILDTLRARIEQTTTQFMKVLVETRDYKIREGLSEATHSMALTFDPYSGAFCPITNFLVKRTHLAVVQ

SEQ ID NO: 19649 - protein, 85 aa, unidentified
  REGION 1..85: note = Description of Unknown:hvTR_P09246 target sequence
DLALSQCHCVFYGQQVEGRNFRNQFQPVLRRRFVDLFNGGFISTRSITVTLSEGPVSAPNPTLGQDAPAGRTFDGDLARVSVEVI

SEQ ID NO: 19650 - protein, 85 aa, unidentified
  REGION 1..85: note = Description of Unknown:hvTR_P09246 target sequence
RDIRVKNRVVFSGNCTNLSEAARARLVGLASAYQRQEKRVDMLHGALGFLLKQFHGLLFPRGMPPNSKSPNPQWFWTLLQRNQMP

SEQ ID NO: 19651 - protein, 85 aa, unidentified
  REGION 1..85: note = Description of Unknown:hvTR_P09246 target sequence
ADKLTHEEITTIAAVKRFTEEYAAINFINLPPTCIGELAQFYMANLILKYCDHSQYLINTLTSIITGARRPRDPSSVLHWIRKDV

SEQ ID NO: 19652 - protein, 85 aa, unidentified
  REGION 1..85: note = Description of Unknown:hvTR_P09246 target sequence
TSAADIETQAKALLEKTENLPELWTTAFTSTHLVRAAMNQRPMVVLGISISKYHGAAGNNRVFQAGNWSGLNGGKNVCPLFTFDR

SEQ ID NO: 19653 - protein, 85 aa, unidentified
  REGION 1..85: note = Description of Unknown:hvTR_P09246 target sequence
TRRFIIACPRGGFICPVTGPSSGNRETTLSDQVRGIIVSGGAMVQLAIYATVVRAVGARAQHMAFDDWLSLTDDEFLARDLEELH

SEQ ID NO: 19654 - protein, 85 aa, unidentified
  REGION 1..85: note = Description of Unknown:hvTR_P09246 target sequence
DQIIQTLETPWTVEGALEAVKILDEKTTAGDGETPTNLAFNFDSCEPSHDTTSNVLNISGSNISGSTVPGLKRPPEDDELFDLSG

SEQ ID NO: 19655 - protein, 84 aa, unidentified
  REGION 1..84: note = Description of Unknown:hvTR_P09246 target sequence
GALEAVKILDEKTTAGDGETPTNLAFNFDSCEPSHDTTSNVLNISGSNISGSTVPGLKRPPEDDELFDLSGIPIKHGNITMEMI

SEQ ID NO: 19656 - protein, 85 aa, unidentified
  REGION 1..85: note = Description of Unknown:hvTR_P09246 target sequence
EEISFLAARSTDSDLALLPLMRNLTVEKTFTSSLAVVSGARTTGLAGAGITLKLTTSHFYPSVFVFHGGKHVLPSSAAPNLTRAC

SEQ ID NO: 19657 - protein, 85 aa, unidentified
  REGION 1..85: note = Description of Unknown:hvTR_P09246 target sequence
NAARERFGFSRCQGPPVDGAVETTGAEICTRLGLEPENTILYLVVTALFKEAVFMCNVFLHYGGLDIVHINHGDVIRIPLFPVQL

SEQ ID NO: 19658 - protein, 85 aa, unidentified
  REGION 1..85: note = Description of Unknown:hvTR_P09246 target sequence
FMPDVNRLVPDPFNTHHRSIGEGFVYPTPFYNTGLCHLIHDCVIAPMAVALRVRNVTAVARGAAHLAFDENHEGAVLPPDITYTY

SEQ ID NO: 19659 - protein, 85 aa, unidentified
  REGION 1..85: note = Description of Unknown:hvTR_P09246 target sequence
FQSSSSGTTTARGARRNDVNSTSKPSPSGGFERRLASIMAADTALHAEVIFNTGIYEETPTDIKEWPMFIGMEGTLPRLNALGSY

SEQ ID NO: 19660 - protein, 85 aa, unidentified
  REGION 1..85: note = Description of Unknown:hvTR_P09246 target sequence
TARVAGVIGAMVFSPNSALYLTEVEDSGMTEAKDGGPGPSFNRFYQFAGPHLAANPQTDRDGHVLSSQSTGSSNTEFSVDYLALI

SEQ ID NO: 19661 - protein, 85 aa, unidentified
  REGION 1..85: note = Description of Unknown:hvTR_P09246 target sequence
CGFGAPLLARLLFYLERCDAGAFTGGHGDALKYVTGTFDSEIPCSLCEKHTRPVCAHTTVHRLRQRMPRFGQATRQPIGVFGTMN

SEQ ID NO: 19662 - protein, 85 aa, unidentified
  REGION 1..85: note = Description of Unknown:hvTR_P09246 target sequence
SQYSDCDPLGNYAPYLILRKPGDQTEAAKATMQDTYRATLERLFIDLEQERLLDRGAPCSSEGLSSVIVDHPTFRRILDTLRARI

SEQ ID NO: 19663 - protein, 85 aa, unidentified
  REGION 1..85: note = Description of Unknown:hvTR_P09246 target sequence
EQTTTQFMKVLVETRDYKIREGLSEATHSMALTFDPYSGAFCPITNFLVKRTHLAVVQDLALSQCHCVFYGQQVEGRNFRNQFQP

SEQ ID NO: 19664 - protein, 85 aa, unidentified
  REGION 1..85: note = Description of Unknown:hvTR_P09246 target sequence
VLRRRFVDLFNGGFISTRSITVTLSEGPVSAPNPTLGQDAPAGRTFDGDLARVSVEVIRDIRVKNRVVFSGNCTNLSEAARARLV

SEQ ID NO: 19665 - protein, 85 aa, unidentified
  REGION 1..85: note = Description of Unknown:hvTR_P09246 target sequence
GLASAYQRQEKRVDMLHGALGFLLKQFHGLLFPRGMPPNSKSPNPQWFWTLLQRNQMPADKLTHEEITTIAAVKRFTEEYAAINF

SEQ ID NO: 19666 - protein, 85 aa, unidentified
  REGION 1..85: note = Description of Unknown:hvTR_P09246 target sequence
INLPPTCIGELAQFYMANLILKYCDHSQYLINTLTSIITGARRPRDPSSVLHWIRKDVTSAADIETQAKALLEKTENLPELWTTA

SEQ ID NO: 19667 - protein, 85 aa, unidentified
  REGION 1..85: note = Description of Unknown:hvTR_P09246 target sequence
FTSTHLVRAAMNQRPMVVLGISISKYHGAAGNNRVFQAGNWSGLNGGKNVCPLFTFDRTRRFIIACPRGGFICPVTGPSSGNRET

SEQ ID NO: 19668 - protein, 85 aa, unidentified
  REGION 1..85: note = Description of Unknown:hvTR_P09246 target sequence
TLSDQVRGIIVSGGAMVQLAIYATVVRAVGARAQHMAFDDWLSLTDDEFLARDLEELHDQIIQTLETPWTVEGALEAVKILDEKT

SEQ ID NO: 19669 - protein, 85 aa, unidentified
  REGION 1..85: note = Description of Unknown:cds_NC_014396.1_cds_YP_003848705.1_2 target sequence
YVLLTILISVLVCEAVIRVSLSSTREETCFGDSTNPEMIEGAWDSLREEEMPEELSCSISGIREVKTSSQELYRALKAIIAADGL

SEQ ID NO: 19670 - protein, 85 aa, unidentified
  REGION 1..85: note = Description of Unknown:cds_NC_014396.1_cds_YP_003848705.1_2 target sequence
NNITCHGKDPEDKISLIKGPPHKKRVGIVRCERRRDAKQIGRETMAGIAMTVLPALAVFALAPVVFAEDPHLRNRPGKGHNYIDG

SEQ ID NO: 19671 - protein, 85 aa, unidentified
  REGION 1..85: note = Description of Unknown:cds_NC_014396.1_cds_YP_003848705.1_2 target sequence
MTQEDATCKPVTYAGACSSFDVLLEKGKFPLFQSYAHHRTLLEAVHDTIIAKADPPSCDLLSAHGNPCMKEKLVMKTHCPNDYQS

SEQ ID NO: 19672 - protein, 85 aa, unidentified
  REGION 1..85: note = Description of Unknown:cds_NC_014396.1_cds_YP_003848705.1_2 target sequence
AHYLNNDGKMASVKCPPKYELTEDCNFCRQMTGASLKKGSYPLQDLFCQSSEDDGSKLKTKMKGVCEVGVQALKKCDGQLSTAHE

SEQ ID NO: 19673 - protein, 85 aa, unidentified
  REGION 1..85: note = Description of Unknown:cds_NC_014396.1_cds_YP_003848705.1_2 target sequence
VVPFAVFKNSKKVYLDKLDLKTEENLLPDSFVCFEHKGQYKGTMDSGQTKRELKSFDISQCPKIGGHGSKKCTGDAAFCSAYECT

SEQ ID NO: 19674 - protein, 85 aa, unidentified
  REGION 1..85: note = Description of Unknown:cds_NC_014396.1_cds_YP_003848705.1_2 target sequence
AQYANAYCSHANGSGIVQIQVSGVWKKPLCVGYERVVVKRELSAKPIQRVEPCTTCITKCEPHGLVVRSTGFKISSAVACASGVC

SEQ ID NO: 19675 - protein, 85 aa, unidentified
  REGION 1..85: note = Description of Unknown:cds_NC_014396.1_cds_YP_003848705.1_2 target sequence
VTGSQSPSTEITLKYPGISQSSGGDIGVHMAHDDQSVSSKIVAHCPPQDPCLVHDCIVCAHGLINYQCHTALSAFVVVFVFSSIA

SEQ ID NO: 19676 - protein, 85 aa, unidentified
  REGION 1..85: note = Description of Unknown:cds_NC_014396.1_cds_YP_003848705.1_2 target sequence
IICLAILYRVLKCLKIAPRKVLNPLMWITAFIRWIYKKMVARVADNINQVNREIGWMEGGQLVLGNPAPIPRHAPIPRYSTYLML

SEQ ID NO: 19677 - protein, 85 aa, unidentified
  REGION 1..85: note = Description of Unknown:cds_NC_014396.1_cds_YP_003848705.1_2 target sequence
LLIVSYASACSELIQASSRITTCSTEGVNTKCRLSGTALIRAGSVGAEACLMLKGVKEDQTKFLKIKTVSSELSCREGQSYWTGS

SEQ ID NO: 19678 - protein, 85 aa, unidentified
  REGION 1..85: note = Description of Unknown:cds_NC_014396.1_cds_YP_003848705.1_2 target sequence
FSPKCLSSRRCHLVGECHVNRCLSWRDNETSAEFSFVGESTTMRENKCFEQCGGWGCGCFNVNPSCLFVHTYLQSVRKEALRVFN

SEQ ID NO: 19679 - protein, 85 aa, unidentified
  REGION 1..85: note = Description of Unknown:cds_NC_014396.1_cds_YP_003848705.1_2 target sequence
CIDWVHKLTLEITDFDGSVSTIDLGASSSRFTNWGSVSLSLDAEGISGSNSFSFIESPGKGYAIVDEPFSEIPRQGFLGEIRCNS

SEQ ID NO: 19680 - protein, 85 aa, unidentified
  REGION 1..85: note = Description of Unknown:cds_NC_014396.1_cds_YP_003848705.1_2 target sequence
ESSVLSAHESCLRAPNLISYKPMIDQLECTTNLIDPFVVFERGSLPQTRNDKTFAASKGNRGVQAFSKGSVQADLTLMFDNFEVD

SEQ ID NO: 19681 - protein, 85 aa, unidentified
  REGION 1..85: note = Description of Unknown:cds_NC_014396.1_cds_YP_003848705.1_2 target sequence
FVGAAVSCDAAFLNLTGCYSCNAGARVCLSITSTGTGSLSAHNKDGSLHIVLPSENGTKDQCQILHFTVPEVEEEFMYSCDGDER

SEQ ID NO: 19682 - protein, 85 aa, unidentified
  REGION 1..85: note = Description of Unknown:cds_NC_014396.1_cds_YP_003848705.1_2 target sequence
PLLVKGTLIAIDPFDDRREAGGESTVVNPKSGSWNFFDWFSGLMSWFGGPLKTILLICLYVALSIGLFFLLIYLGRTGLSKMWLA

SEQ ID NO: 19683 - protein, 84 aa, unidentified
  REGION 1..84: note = Description of Unknown:cds_NC_014396.1_cds_YP_003848705.1_2 target sequence
LIAIDPFDDRREAGGESTVVNPKSGSWNFFDWFSGLMSWFGGPLKTILLICLYVALSIGLFFLLIYLGRTGLSKMWLAATKKAS

SEQ ID NO: 19684 - protein, 85 aa, unidentified
  REGION 1..85: note = Description of Unknown:cds_NC_014396.1_cds_YP_003848705.1_2 target sequence
TCFGDSTNPEMIEGAWDSLREEEMPEELSCSISGIREVKTSSQELYRALKAIIAADGLNNITCHGKDPEDKISLIKGPPHKKRVG

SEQ ID NO: 19685 - protein, 85 aa, unidentified
  REGION 1..85: note = Description of Unknown:cds_NC_014396.1_cds_YP_003848705.1_2 target sequence
IVRCERRRDAKQIGRETMAGIAMTVLPALAVFALAPVVFAEDPHLRNRPGKGHNYIDGMTQEDATCKPVTYAGACSSFDVLLEKG

SEQ ID NO: 19686 - protein, 85 aa, unidentified
  REGION 1..85: note = Description of Unknown:cds_NC_014396.1_cds_YP_003848705.1_2 target sequence
KFPLFQSYAHHRTLLEAVHDTIIAKADPPSCDLLSAHGNPCMKEKLVMKTHCPNDYQSAHYLNNDGKMASVKCPPKYELTEDCNF

SEQ ID NO: 19687 - protein, 85 aa, unidentified
  REGION 1..85: note = Description of Unknown:cds_NC_014396.1_cds_YP_003848705.1_2 target sequence
CRQMTGASLKKGSYPLQDLFCQSSEDDGSKLKTKMKGVCEVGVQALKKCDGQLSTAHEVVPFAVFKNSKKVYLDKLDLKTEENLL

SEQ ID NO: 19688 - protein, 85 aa, unidentified
  REGION 1..85: note = Description of Unknown:cds_NC_014396.1_cds_YP_003848705.1_2 target sequence
PDSFVCFEHKGQYKGTMDSGQTKRELKSFDISQCPKIGGHGSKKCTGDAAFCSAYECTAQYANAYCSHANGSGIVQIQVSGVWKK

SEQ ID NO: 19689 - protein, 85 aa, unidentified
  REGION 1..85: note = Description of Unknown:cds_NC_014396.1_cds_YP_003848705.1_2 target sequence
PLCVGYERVVVKRELSAKPIQRVEPCTTCITKCEPHGLVVRSTGFKISSAVACASGVCVTGSQSPSTEITLKYPGISQSSGGDIG

SEQ ID NO: 19690 - protein, 85 aa, unidentified
  REGION 1..85: note = Description of Unknown:cds_NC_014396.1_cds_YP_003848705.1_2 target sequence
VHMAHDDQSVSSKIVAHCPPQDPCLVHDCIVCAHGLINYQCHTALSAFVVVFVFSSIAIICLAILYRVLKCLKIAPRKVLNPLMW

SEQ ID NO: 19691 - protein, 85 aa, unidentified
  REGION 1..85: note = Description of Unknown:cds_NC_014396.1_cds_YP_003848705.1_2 target sequence
ITAFIRWIYKKMVARVADNINQVNREIGWMEGGQLVLGNPAPIPRHAPIPRYSTYLMLLLIVSYASACSELIQASSRITTCSTEG

SEQ ID NO: 19692 - protein, 85 aa, unidentified
  REGION 1..85: note = Description of Unknown:cds_NC_014396.1_cds_YP_003848705.1_2 target sequence
VNTKCRLSGTALIRAGSVGAEACLMLKGVKEDQTKFLKIKTVSSELSCREGQSYWTGSFSPKCLSSRRCHLVGECHVNRCLSWRD

SEQ ID NO: 19693 - protein, 85 aa, unidentified
  REGION 1..85: note = Description of Unknown:cds_NC_014396.1_cds_YP_003848705.1_2 target sequence
NETSAEFSFVGESTTMRENKCFEQCGGWGCGCFNVNPSCLFVHTYLQSVRKEALRVFNCIDWVHKLTLEITDFDGSVSTIDLGAS

SEQ ID NO: 19694 - protein, 85 aa, unidentified
  REGION 1..85: note = Description of Unknown:cds_NC_014396.1_cds_YP_003848705.1_2 target sequence
SSRFTNWGSVSLSLDAEGISGSNSFSFIESPGKGYAIVDEPFSEIPRQGFLGEIRCNSESSVLSAHESCLRAPNLISYKPMIDQL

SEQ ID NO: 19695 - protein, 85 aa, unidentified
  REGION 1..85: note = Description of Unknown:cds_NC_014396.1_cds_YP_003848705.1_2 target sequence
ECTTNLIDPFVVFERGSLPQTRNDKTFAASKGNRGVQAFSKGSVQADLTLMFDNFEVDFVGAAVSCDAAFLNLTGCYSCNAGARV

SEQ ID NO: 19696 - protein, 85 aa, unidentified
  REGION 1..85: note = Description of Unknown:cds_NC_014396.1_cds_YP_003848705.1_2 target sequence
CLSITSTGTGSLSAHNKDGSLHIVLPSENGTKDQCQILHFTVPEVEEEFMYSCDGDERPLLVKGTLIAIDPFDDRREAGGESTVV

SEQ ID NO: 19697 - protein, 85 aa, unidentified
  REGION 1..85: note = Description of Unknown:hvTR_Q5Y0S3 target sequence
EPKPKTTTTIQVPPSPLGYVYARACPAEGLAELSMLSARSADADAAVAPLVVGLTVESGFEANVAVVVGSRTTGLGGTAVSLKLT

SEQ ID NO: 19698 - protein, 85 aa, unidentified
  REGION 1..85: note = Description of Unknown:hvTR_Q5Y0S3 target sequence
PSHFAPSVYVFHGGRHLEPSTRAPNLTRLCERARRQFGFSAHAPRPCELQNETTGEALCARLGLDPDRALLYLVVTEGFKEAVCI

SEQ ID NO: 19699 - protein, 85 aa, unidentified
  REGION 1..85: note = Description of Unknown:hvTR_Q5Y0S3 target sequence
SNTFLHLGGIDEVTVGGDAVRRIPLYPLQMFMPDYNRVVADPFNANHRSIGENFEYPLPFFNRALARLLFEAVVGPVAVALRARN

SEQ ID NO: 19700 - protein, 85 aa, unidentified
  REGION 1..85: note = Description of Unknown:hvTR_Q5Y0S3 target sequence
VDAVARAAAHLAFDENHEGAALPADITFTMLDGAPGKAPKGGRDGGAAKAAQGGFERRLASVMAGDAALALESLMSMAVFDEPPT

SEQ ID NO: 19701 - protein, 85 aa, unidentified
  REGION 1..85: note = Description of Unknown:hvTR_Q5Y0S3 target sequence
DVAAWPMLADQDTPLARATAIGAYLARAAGLVGAMVFGTNSALHMTEVDDAGPADPKDPSKPSFYRFFLVPGTHVAANPQVDRDG

SEQ ID NO: 19702 - protein, 85 aa, unidentified
  REGION 1..85: note = Description of Unknown:hvTR_Q5Y0S3 target sequence
HVVPGHEGRPAAPLVGGNQEFAGEHLAMLCGFSPALLAKMLFYLERCDGGVIVGRQELDVLRYVADSSQTDVPCDLCDLETRHAC

SEQ ID NO: 19703 - protein, 85 aa, unidentified
  REGION 1..85: note = Description of Unknown:hvTR_Q5Y0S3 target sequence
AHTTLMRLRGRHPRFASAARSPIGVFGTMNSAYSDCDVLGNYAAFSAIKRADVAETARAVMQETYRAATERVMAELENLQYVDPA

SEQ ID NO: 19704 - protein, 85 aa, unidentified
  REGION 1..85: note = Description of Unknown:hvTR_Q5Y0S3 target sequence
VPTSLAKLETIITHRDALQTVLTNVRQTVDREVEALMRNLVEGRNFKFRDGLTEANHAMSLALDPHAGGPCPLLQLLSRRSNLAV

SEQ ID NO: 19705 - protein, 85 aa, unidentified
  REGION 1..85: note = Description of Unknown:hvTR_Q5Y0S3 target sequence
YQDLALSQCHGVFASQSVEGRNFRNQFQPVLRRRVMDLFNNGFLPAKTLTIALSDGAAISAPSLTAGQAAPAETGFEGDVARVNL

SEQ ID NO: 19706 - protein, 85 aa, unidentified
  REGION 1..85: note = Description of Unknown:hvTR_Q5Y0S3 target sequence
GFPKEMRVKNRVVFAGAGANASEAAKSRIAGMQAAYQKSDKHVDILRGPAGFLLKQFHAALFPNGKPPGSSQPNPQWFWTALQRN

SEQ ID NO: 19707 - protein, 85 aa, unidentified
  REGION 1..85: note = Description of Unknown:hvTR_Q5Y0S3 target sequence
QLPAKLLSREDIETLGFIKRFSAEYAASNFVNLAPNNVSELAMYYMANQILRYCDHSTYYINTLTAILVGSRRPTSLQAAAAWSL

SEQ ID NO: 19708 - protein, 85 aa, unidentified
  REGION 1..85: note = Description of Unknown:hvTR_Q5Y0S3 target sequence
RGGAALEAGARALVDAVHEHPGAWTTMFASCNLLRPVMAARPMVVLGLSISKYYGMAGNDRVFQAGNWANVLGGKNACPLLIFDR

SEQ ID NO: 19709 - protein, 85 aa, unidentified
  REGION 1..85: note = Description of Unknown:hvTR_Q5Y0S3 target sequence
TRKFVLACPRAGFVCAALTPGGGAHESSLCEQLRAIVAEGGASVASAVFVAAVKSLGNRTPQLQIEDWLALLEDEYLGEEMMAFT

SEQ ID NO: 19710 - protein, 85 aa, unidentified
  REGION 1..85: note = Description of Unknown:hvTR_Q5Y0S3 target sequence
ARALERGGGEWTTEAALEVAHEAEALVTQTGGADVGEAFDFGAFGAEDDDAPTFGGFAAHAPGARKRAGATDDPFGDAPPDKREL

SEQ ID NO: 19711 - protein, 84 aa, unidentified
  REGION 1..84: note = Description of Unknown:hvTR_Q5Y0S3 target sequence
GGGEWTTEAALEVAHEAEALVTQTGGADVGEAFDFGAFGAEDDDAPTFGGFAAHAPGARKRAGATDDPFGDAPPDKRELTLDTL

SEQ ID NO: 19712 - protein, 85 aa, unidentified
  REGION 1..85: note = Description of Unknown:hvTR_Q5Y0S3 target sequence
EGLAELSMLSARSADADAAVAPLVVGLTVESGFEANVAVVVGSRTTGLGGTAVSLKLTPSHFAPSVYVFHGGRHLEPSTRAPNLT

SEQ ID NO: 19713 - protein, 85 aa, unidentified
  REGION 1..85: note = Description of Unknown:hvTR_Q5Y0S3 target sequence
RLCERARRQFGFSAHAPRPCELQNETTGEALCARLGLDPDRALLYLVVTEGFKEAVCISNTFLHLGGIDEVTVGGDAVRRIPLYP

SEQ ID NO: 19714 - protein, 85 aa, unidentified
  REGION 1..85: note = Description of Unknown:hvTR_Q5Y0S3 target sequence
LQMFMPDYNRVVADPFNANHRSIGENFEYPLPFFNRALARLLFEAVVGPVAVALRARNVDAVARAAAHLAFDENHEGAALPADIT

SEQ ID NO: 19715 - protein, 85 aa, unidentified
  REGION 1..85: note = Description of Unknown:hvTR_Q5Y0S3 target sequence
FTMLDGAPGKAPKGGRDGGAAKAAQGGFERRLASVMAGDAALALESLMSMAVFDEPPTDVAAWPMLADQDTPLARATAIGAYLAR

SEQ ID NO: 19716 - protein, 85 aa, unidentified
  REGION 1..85: note = Description of Unknown:hvTR_Q5Y0S3 target sequence
AAGLVGAMVFGTNSALHMTEVDDAGPADPKDPSKPSFYRFFLVPGTHVAANPQVDRDGHVVPGHEGRPAAPLVGGNQEFAGEHLA

SEQ ID NO: 19717 - protein, 85 aa, unidentified
  REGION 1..85: note = Description of Unknown:hvTR_Q5Y0S3 target sequence
MLCGFSPALLAKMLFYLERCDGGVIVGRQELDVLRYVADSSQTDVPCDLCDLETRHACAHTTLMRLRGRHPRFASAARSPIGVFG

SEQ ID NO: 19718 - protein, 85 aa, unidentified
  REGION 1..85: note = Description of Unknown:hvTR_Q5Y0S3 target sequence
TMNSAYSDCDVLGNYAAFSAIKRADVAETARAVMQETYRAATERVMAELENLQYVDPAVPTSLAKLETIITHRDALQTVLTNVRQ

SEQ ID NO: 19719 - protein, 85 aa, unidentified
  REGION 1..85: note = Description of Unknown:hvTR_Q5Y0S3 target sequence
TVDREVEALMRNLVEGRNFKFRDGLTEANHAMSLALDPHAGGPCPLLQLLSRRSNLAVYQDLALSQCHGVFASQSVEGRNFRNQF

SEQ ID NO: 19720 - protein, 85 aa, unidentified
  REGION 1..85: note = Description of Unknown:hvTR_Q5Y0S3 target sequence
QPVLRRRVMDLFNNGFLPAKTLTIALSDGAAISAPSLTAGQAAPAETGFEGDVARVNLGFPKEMRVKNRVVFAGAGANASEAAKS

SEQ ID NO: 19721 - protein, 85 aa, unidentified
  REGION 1..85: note = Description of Unknown:hvTR_Q5Y0S3 target sequence
RIAGMQAAYQKSDKHVDILRGPAGFLLKQFHAALFPNGKPPGSSQPNPQWFWTALQRNQLPAKLLSREDIETLGFIKRFSAEYAA

SEQ ID NO: 19722 - protein, 85 aa, unidentified
  REGION 1..85: note = Description of Unknown:hvTR_Q5Y0S3 target sequence
SNFVNLAPNNVSELAMYYMANQILRYCDHSTYYINTLTAILVGSRRPTSLQAAAAWSLRGGAALEAGARALVDAVHEHPGAWTTM

SEQ ID NO: 19723 - protein, 85 aa, unidentified
  REGION 1..85: note = Description of Unknown:hvTR_Q5Y0S3 target sequence
FASCNLLRPVMAARPMVVLGLSISKYYGMAGNDRVFQAGNWANVLGGKNACPLLIFDRTRKFVLACPRAGFVCAALTPGGGAHES

SEQ ID NO: 19724 - protein, 85 aa, unidentified
  REGION 1..85: note = Description of Unknown:hvTR_Q5Y0S3 target sequence
SLCEQLRAIVAEGGASVASAVFVAAVKSLGNRTPQLQIEDWLALLEDEYLGEEMMAFTARALERGGGEWTTEAALEVAHEAEALV

SEQ ID NO: 19725 - protein, 85 aa, unidentified
  REGION 1..85: note = Description of Unknown:hvTR_Q805Z9 target sequence
EPKAKTTTTIQVPPSPLGYVYARACPAGGLAELSMLSARSGDADVAVSPLVVGLTVESGFEANVAVVVGSRTTGLGGTAVSLKLT

SEQ ID NO: 19726 - protein, 85 aa, unidentified
  REGION 1..85: note = Description of Unknown:hvTR_Q805Z9 target sequence
PSHFSPSVYVFYGGRHLEPSTRAPNLTRLCERARRQFGFSAYAPKPCELQNETTGEALCERLGLDPERALLYLVVTEGFKEAVCI

SEQ ID NO: 19727 - protein, 85 aa, unidentified
  REGION 1..85: note = Description of Unknown:hvTR_Q805Z9 target sequence
SNTFLHLGGIDEVTVGGDAVRRIPIYPLQMFMPDYNRVIADPFNANHRSIGENFDYPRPFFNRALAGLLFGAVVGPVAVALRTRN

SEQ ID NO: 19728 - protein, 85 aa, unidentified
  REGION 1..85: note = Description of Unknown:hvTR_Q805Z9 target sequence
VDAVARAAAHLAFDENHEGAALPADITFTMLDGGQGKAPKGGRDGGAGKAAQGGFERRLASVMAGDAALALESLMSMAVFDEPPT

SEQ ID NO: 19729 - protein, 85 aa, unidentified
  REGION 1..85: note = Description of Unknown:hvTR_Q805Z9 target sequence
DIAAWPLLEGQDTPLARATAIGAYLARAAGLVGAMVFGTNSALHLTEVDDAGPADPKDLSKPSFYRFFLVPGTHVAANPQVDRDG

SEQ ID NO: 19730 - protein, 85 aa, unidentified
  REGION 1..85: note = Description of Unknown:hvTR_Q805Z9 target sequence
HAVPGHEGRAAAPLVGGNQEFTGEHLAMLCGFSPALLAKMLFYLERCDGGVIVGRQELDVLRYVADSSQTDVPCDLCDLETRHAC

SEQ ID NO: 19731 - protein, 85 aa, unidentified
  REGION 1..85: note = Description of Unknown:hvTR_Q805Z9 target sequence
AHTTLMRLRGRHPRFASAARAPIGVFGTMNSAYSDCEVLGNYAAFSAIKRADVAETARAVMQETYRAATERVMAELENLQYVDPA

SEQ ID NO: 19732 - protein, 85 aa, unidentified
  REGION 1..85: note = Description of Unknown:hvTR_Q805Z9 target sequence
VPTSLAKLESIITHRDALQTVLTNVRQTVDREVEQLMRNLVEGRNFKFRDGLTEANHAMSLALDPHAGGPCPLLQLLSRRSNLAV

SEQ ID NO: 19733 - protein, 85 aa, unidentified; identical to SEQ ID NO: 19705
  REGION 1..85: note = Description of Unknown:hvTR_Q805Z9 target sequence

SEQ ID NO: 19734 - protein, 85 aa, unidentified
  REGION 1..85: note = Description of Unknown:hvTR_Q805Z9 target sequence
GFPKEMRVKNRVVFAGAGANASEAAKNRVAGMQAAYQKSDKHVDILRGPAGFLLKQFHATLFPNGKPPGSSQPNPQWFWTALQRN

SEQ ID NO: 19735 - protein, 85 aa, unidentified
  REGION 1..85: note = Description of Unknown:hvTR_Q805Z9 target sequence
QFPAKLLSREDIEALGFIKRFSAEYAASNFVNLAPNNISELAMYYMANQILRYCDHSTYYINTLTAILAGSRRPPSLQAAAAWSP

SEQ ID NO: 19736 - protein, 85 aa, unidentified
  REGION 1..85: note = Description of Unknown:hvTR_Q805Z9 target sequence
RGGAALEAGTRALVDAIDEHPGAWTTMFASCNLLRPVMAARPMVVLGLSISKYYGMAGNDRVFQAGNWANILGGKNACPLLIFDR

SEQ ID NO: 19737 - protein, 85 aa, unidentified
  REGION 1..85: note = Description of Unknown:hvTR_Q805Z9 target sequence
TRKFVLACPRAGFVCAASAPGAGAHESSLCEQLRGIIAEGGASVASAVFVAAVKSLGNRTPQLQIEDWLALLEDEYLSEEMMAFT

SEQ ID NO: 19738 - protein, 85 aa, unidentified
  REGION 1..85: note = Description of Unknown:hvTR_Q805Z9 target sequence
ARALERGGGEWAAEAALEVAHEAEALVTQTGGADGGEVFDFGAFGVDDDEVPSFGGFAAHAAGARKRPGAADDLFGDGPPDKREL

SEQ ID NO: 19739 - protein, 84 aa, unidentified
  REGION 1..84: note = Description of Unknown:hvTR_Q805Z9 target sequence
GGGEWAAEAALEVAHEAEALVTQTGGADGGEVFDFGAFGVDDDEVPSFGGFAAHAAGARKRPGAADDLFGDGPPDKRELTLDTL

SEQ ID NO: 19740 - protein, 85 aa, unidentified
  REGION 1..85: note = Description of Unknown:hvTR_Q805Z9 target sequence
GGLAELSMLSARSGDADVAVSPLVVGLTVESGFEANVAVVVGSRTTGLGGTAVSLKLTPSHFSPSVYVFYGGRHLEPSTRAPNLT

SEQ ID NO: 19741 - protein, 85 aa, unidentified
  REGION 1..85: note = Description of Unknown:hvTR_Q805Z9 target sequence
RLCERARRQFGFSAYAPKPCELQNETTGEALCERLGLDPERALLYLVVTEGFKEAVCISNTFLHLGGIDEVTVGGDAVRRIPIYP

SEQ ID NO: 19742 - protein, 85 aa, unidentified
  REGION 1..85: note = Description of Unknown:hvTR_Q805Z9 target sequence
LQMFMPDYNRVIADPFNANHRSIGENFDYPRPFFNRALAGLLFGAVVGPVAVALRTRNVDAVARAAAHLAFDENHEGAALPADIT

SEQ ID NO: 19743 - protein, 85 aa, unidentified
  REGION 1..85: note = Description of Unknown:hvTR_Q805Z9 target sequence
FTMLDGGQGKAPKGGRDGGAGKAAQGGFERRLASVMAGDAALALESLMSMAVFDEPPTDIAAWPLLEGQDTPLARATAIGAYLAR

SEQ ID NO: 19744 - protein, 85 aa, unidentified
  REGION 1..85: note = Description of Unknown:hvTR_Q805Z9 target sequence
AAGLVGAMVFGTNSALHLTEVDDAGPADPKDLSKPSFYRFFLVPGTHVAANPQVDRDGHAVPGHEGRAAAPLVGGNQEFTGEHLA

SEQ ID NO: 19745 - protein, 85 aa, unidentified
  REGION 1..85: note = Description of Unknown:hvTR_Q805Z9 target sequence
MLCGFSPALLAKMLFYLERCDGGVIVGRQELDVLRYVADSSQTDVPCDLCDLETRHACAHTTLMRLRGRHPRFASAARAPIGVFG

SEQ ID NO: 19746 - protein, 85 aa, unidentified
  REGION 1..85: note = Description of Unknown:hvTR_Q805Z9 target sequence
TMNSAYSDCEVLGNYAAFSAIKRADVAETARAVMQETYRAATERVMAELENLQYVDPAVPTSLAKLESIITHRDALQTVLTNVRQ

SEQ ID NO: 19747 - protein, 85 aa, unidentified
  REGION 1..85: note = Description of Unknown:hvTR_Q805Z9 target sequence
TVDREVEQLMRNLVEGRNFKFRDGLTEANHAMSLALDPHAGGPCPLLQLLSRRSNLAVYQDLALSQCHGVFASQSVEGRNFRNQF

SEQ ID NO: 19748 - protein, 85 aa, unidentified
  REGION 1..85: note = Description of Unknown:hvTR_Q805Z9 target sequence
QPVLRRRVMDLFNNGFLPAKTLTIALSDGAAISAPSLTAGQAAPAETGFEGDVARVNLGFPKEMRVKNRVVFAGAGANASEAAKN

SEQ ID NO: 19749 - protein, 85 aa, unidentified
  REGION 1..85: note = Description of Unknown:hvTR_Q805Z9 target sequence
RVAGMQAAYQKSDKHVDILRGPAGFLLKQFHATLFPNGKPPGSSQPNPQWFWTALQRNQFPAKLLSREDIEALGFIKRFSAEYAA

SEQ ID NO: 19750 - protein, 85 aa, unidentified
  REGION 1..85: note = Description of Unknown:hvTR_Q805Z9 target sequence
SNFVNLAPNNISELAMYYMANQILRYCDHSTYYINTLTAILAGSRRPPSLQAAAAWSPRGGAALEAGTRALVDAIDEHPGAWTTM

SEQ ID NO: 19751 - protein, 85 aa, unidentified
  REGION 1..85: note = Description of Unknown:hvTR_Q805Z9 target sequence
FASCNLLRPVMAARPMVVLGLSISKYYGMAGNDRVFQAGNWANILGGKNACPLLIFDRTRKFVLACPRAGFVCAASAPGAGAHES

SEQ ID NO: 19752 - protein, 85 aa, unidentified
  REGION 1..85: note = Description of Unknown:hvTR_Q805Z9 target sequence
SLCEQLRGIIAEGGASVASAVFVAAVKSLGNRTPQLQIEDWLALLEDEYLSEEMMAFTARALERGGGEWAAEAALEVAHEAEALV

SEQ ID NO: 19753 - protein, 85 aa, unidentified
  REGION 1..85: note = Description of Unknown:hvTR_P04296 target sequence
ETKPKTATTIKVPPGPLGYVYARACPSEGIELLALLSARSGDSDVAVAPLVVGLTVESGFEANVAVVVGSRTTGLGGTAVSLKLT

SEQ ID NO: 19754 - protein, 85 aa, unidentified
  REGION 1..85: note = Description of Unknown:hvTR_P04296 target sequence
PSHYSSSVYVFHGGRHLDPSTQAPNLTRLCERARRHFGFSDYTPRPGDLKHETTGEALCERLGLDPDRALLYLVVTEGFKEAVCI

SEQ ID NO: 19755 - protein, 85 aa, unidentified
  REGION 1..85: note = Description of Unknown:hvTR_P04296 target sequence
NNTFLHLGGSDKVTIGGAEVHRIPVYPLQLFMPDFSRVIAEPFNANHRSIGEKFTYPLPFFNRPLNRLLFEAVVGPAAVALRCRN

SEQ ID NO: 19756 - protein, 85 aa, unidentified
  REGION 1..85: note = Description of Unknown:hvTR_P04296 target sequence
VDAVARAAAHLAFDENHEGAALPADITFTAFEASQGKTPRGGRDGGGKGAAGGFEQRLASVMAGDAALALESIVSMAVFDEPPTD

SEQ ID NO: 19757 - protein, 85 aa, unidentified
  REGION 1..85: note = Description of Unknown:hvTR_P04296 target sequence
ISAWPLFEGQDTAAARANAVGAYLARAAGLVGAMVFSTNSALHLTEVDDAGPADPKDHSKPSFYRFFLVPGTHVAANPQVDREGH

SEQ ID NO: 19758 - protein, 85 aa, unidentified
  REGION 1..85: note = Description of Unknown:hvTR_P04296 target sequence
VVPGFEGRPTAPLVGGTQEFAGEHLAMLCGFSPALLAKMLFYLERCDGAVIVGRQEMDVFRYVADSNQTDVPCNLCTFDTRHACV

SEQ ID NO: 19759 - protein, 85 aa, unidentified
  REGION 1..85: note = Description of Unknown:hvTR_P04296 target sequence
HTTLMRLRARHPKFASAARGAIGVFGTMNSMYSDCDVLGNYAAFSALKRADGSETARTIMQETYRAATERVMAELETLQYVDQAV

SEQ ID NO: 19760 - protein, 85 aa, unidentified
  REGION 1..85: note = Description of Unknown:hvTR_P04296 target sequence
PTAMGRLETIITNREALHTVVNNVRQVVDREVEQLMRNLVEGRNFKFRDGLGEANHAMSLTLDPYACGPCPLLQLLGRRSNLAVY

SEQ ID NO: 19761 - protein, 85 aa, unidentified
  REGION 1..85: note = Description of Unknown:hvTR_P04296 target sequence
QDLALSQCHGVFAGQSVEGRNFRNQFQPVLRRRVMDMFNNGFLSAKTLTVALSEGAAICAPSLTAGQTAPAESSFEGDVARVTLG

SEQ ID NO: 19762 - protein, 85 aa, unidentified
  REGION 1..85: note = Description of Unknown:hvTR_P04296 target sequence
FPKELRVKSRVLFAGASANASEAAKARVASLQSAYQKPDKRVDILLGPLGFLLKQFHAAIFPNGKPPGSNQPNPQWFWTALQRNQ

SEQ ID NO: 19763 - protein, 85 aa, unidentified
  REGION 1..85: note = Description of Unknown:hvTR_P04296 target sequence
LPARLLSREDIETIAFIKKFSLDYGAINFINLAPNNVSELAMYYMANQILRYCDHSTYFINTLTAIIAGSRRPPSVQAAAAWSAQ

SEQ ID NO: 19764 - protein, 85 aa, unidentified
  REGION 1..85: note = Description of Unknown:hvTR_P04296 target sequence
GGAGLEAGARALMDAVDAHPGAWTSMFASCNLLRPVMAARPMVVLGLSISKYYGMAGNDRVFQAGNWASLMGGKNACPLLIFDRT

SEQ ID NO: 19765 - protein, 85 aa, unidentified
  REGION 1..85: note = Description of Unknown:hvTR_P04296 target sequence
RKFVLACPRAGFVCAASSLGGGAHESSLCEQLRGIISEGGAAVASSVFVATVKSLGPRTQQLQIEDWLALLEDEYLSEEMMELTA

SEQ ID NO: 19766 - protein, 85 aa, unidentified
  REGION 1..85: note = Description of Unknown:hvTR_P04296 target sequence
RALERGNGEWSTDAALEVAHEAEALVSQLGNAGEVFNFGDFGCEDDNATPFGGPGAPGPAFAGRKRAFHGDDPFGEGPPDKKGDL

SEQ ID NO: 19767 - protein, 84 aa, unidentified
  REGION 1..84: note = Description of Unknown:hvTR_P04296 target sequence
NGEWSTDAALEVAHEAEALVSQLGNAGEVFNFGDFGCEDDNATPFGGPGAPGPAFAGRKRAFHGDDPFGEGPPDKKGDLTLDML

SEQ ID NO: 19768 - protein, 85 aa, unidentified
  REGION 1..85: note = Description of Unknown:hvTR_P04296 target sequence
EGIELLALLSARSGDSDVAVAPLVVGLTVESGFEANVAVVVGSRTTGLGGTAVSLKLTPSHYSSSVYVFHGGRHLDPSTQAPNLT

SEQ ID NO: 19769 - protein, 85 aa, unidentified
  REGION 1..85: note = Description of Unknown:hvTR_P04296 target sequence
RLCERARRHFGFSDYTPRPGDLKHETTGEALCERLGLDPDRALLYLVVTEGFKEAVCINNTFLHLGGSDKVTIGGAEVHRIPVYP

SEQ ID NO: 19770 - protein, 85 aa, unidentified
  REGION 1..85: note = Description of Unknown:hvTR_P04296 target sequence
LQLFMPDFSRVIAEPFNANHRSIGEKFTYPLPFFNRPLNRLLFEAVVGPAAVALRCRNVDAVARAAAHLAFDENHEGAALPADIT

SEQ ID NO: 19771 - protein, 85 aa, unidentified
  REGION 1..85: note = Description of Unknown:hvTR_P04296 target sequence
FTAFEASQGKTPRGGRDGGGKGAAGGFEQRLASVMAGDAALALESIVSMAVFDEPPTDISAWPLFEGQDTAAARANAVGAYLARA

SEQ ID NO: 19772 - protein, 85 aa, unidentified
  REGION 1..85: note = Description of Unknown:hvTR_P04296 target sequence
AGLVGAMVFSTNSALHLTEVDDAGPADPKDHSKPSFYRFFLVPGTHVAANPQVDREGHVVPGFEGRPTAPLVGGTQEFAGEHLAM

SEQ ID NO: 19773 - protein, 85 aa, unidentified
  REGION 1..85: note = Description of Unknown:hvTR_P04296 target sequence
LCGFSPALLAKMLFYLERCDGAVIVGRQEMDVFRYVADSNQTDVPCNLCTFDTRHACVHTTLMRLRARHPKFASAARGAIGVFGT

SEQ ID NO: 19774 - protein, 85 aa, unidentified
  REGION 1..85: note = Description of Unknown:hvTR_P04296 target sequence
MNSMYSDCDVLGNYAAFSALKRADGSETARTIMQETYRAATERVMAELETLQYVDQAVPTAMGRLETIITNREALHTVVNNVRQV

SEQ ID NO: 19775 - protein, 85 aa, unidentified
  REGION 1..85: note = Description of Unknown:hvTR_P04296 target sequence
VDREVEQLMRNLVEGRNFKFRDGLGEANHAMSLTLDPYACGPCPLLQLLGRRSNLAVYQDLALSQCHGVFAGQSVEGRNFRNQFQ

SEQ ID NO: 19776 - protein, 85 aa, unidentified
  REGION 1..85: note = Description of Unknown:hvTR_P04296 target sequence
PVLRRRVMDMFNNGFLSAKTLTVALSEGAAICAPSLTAGQTAPAESSFEGDVARVTLGFPKELRVKSRVLFAGASANASEAAKAR

SEQ ID NO: 19777 - protein, 85 aa, unidentified
  REGION 1..85: note = Description of Unknown:hvTR_P04296 target sequence
VASLQSAYQKPDKRVDILLGPLGFLLKQFHAAIFPNGKPPGSNQPNPQWFWTALQRNQLPARLLSREDIETIAFIKKFSLDYGAI

SEQ ID NO: 19778 - protein, 85 aa, unidentified
  REGION 1..85: note = Description of Unknown:hvTR_P04296 target sequence
NFINLAPNNVSELAMYYMANQILRYCDHSTYFINTLTAIIAGSRRPPSVQAAAAWSAQGGAGLEAGARALMDAVDAHPGAWTSMF

SEQ ID NO: 19779 - protein, 85 aa, unidentified
  REGION 1..85: note = Description of Unknown:hvTR_P04296 target sequence
ASCNLLRPVMAARPMVVLGLSISKYYGMAGNDRVFQAGNWASLMGGKNACPLLIFDRTRKFVLACPRAGFVCAASSLGGGAHESS

SEQ ID NO: 19780 - protein, 85 aa, unidentified
  REGION 1..85: note = Description of Unknown:hvTR_P04296 target sequence
LCEQLRGIISEGGAAVASSVFVATVKSLGPRTQQLQIEDWLALLEDEYLSEEMMELTARALERGNGEWSTDAALEVAHEAEALVS

SEQ ID NO: 19781 - protein, 85 aa, unidentified
  REGION 1..85: note = Description of Unknown:hvTR_Q7T401 target sequence
PRPRFYYDAASQDPADGPPRTPDPEEPDDDDDDGEDGGDAFPAAAAAAVSPRQLALLASMVEETARALSPPSSAGPATPPAPRRD

SEQ ID NO: 19782 - protein, 85 aa, unidentified
  REGION 1..85: note = Description of Unknown:hvTR_Q7T401 target sequence
SVWVIDAAAPPPTPGGAPADDALAELAEVAESAERGAAAADSARPDGREADAGSASESGSESESESESEDSGPDRGPTPPSPGGP

SEQ ID NO: 19783 - protein, 85 aa, unidentified
  REGION 1..85: note = Description of Unknown:hvTR_Q7T401 target sequence
DDDDDGEDDADADGDGGAGAGGAAPSRAPGPGSSASDSEDSEDPDPSPPASPPPAARRPPSSAASAGRSERRRARAAVAGRDATG

SEQ ID NO: 19784 - protein, 85 aa, unidentified
  REGION 1..85: note = Description of Unknown:hvTR_Q7T401 target sequence
RFTAAPPRAVPLDADEASGAFYARYRDGYASGEPWPGAEPPPPGRVLYGGLGDSRPGLWGAPEVDEARRRYEAAGAPAPVWAPEL

SEQ ID NO: 19785 - protein, 85 aa, unidentified
  REGION 1..85: note = Description of Unknown:hvTR_Q7T401 target sequence
GDAARQYALITRLLFAPDREAMGWLQNPRVTAGDVELDRACFEASGARRNSSSFITGTVARAVPHLGYAMAAGRFGWGLAHAAAA

SEQ ID NO: 19786 - protein, 85 aa, unidentified
  REGION 1..85: note = Description of Unknown:hvTR_Q7T401 target sequence
VAMSRRYDRAQKGFLITSLRRAYAPLLARENAAAAGAAAAAAAAPEPDAAAVPAVPAGYGAAGVIAAQRRLAAALSDEGPAGAGE

SEQ ID NO: 19787 - protein, 85 aa, unidentified
  REGION 1..85: note = Description of Unknown:hvTR_Q7T401 target sequence
DGPAGAAGEDEDDDDDDAAAAAAAECLTACRAVLEALAEGYGGDLAAVPGLAAARAVPPPRGPAAAPPRPRLWLRELRRTRDALV

SEQ ID NO: 19788 - protein, 85 aa, unidentified
  REGION 1..85: note = Description of Unknown:hvTR_Q7T401 target sequence
LMRLRGDLRVAGGAEAAVAAVRAVSLVAGAAAPLLARGPRQVRSAGAAAADLLFQNQSLRPLLADADAGGAARPPARKRKSSSPA

SEQ ID NO: 19789 - protein, 85 aa, unidentified
  REGION 1..85: note = Description of Unknown:hvTR_Q7T401 target sequence
RPPAAAAACPPARKKSRPGAAAPPPGPPAPGPRPRPAALTARPPAGPDPRGGWRRVPPGPSHTPAPSAAALEAYCAPRVVAELTD

SEQ ID NO: 19790 - protein, 85 aa, unidentified
  REGION 1..85: note = Description of Unknown:hvTR_Q7T401 target sequence
HPLFPEAWRAALAFDPRALASLAARCGPPEPGSGRAFGPPRASGPLRRAAAWMRQVADPEDVRVLVLYAPLPGEELGGASPAPPA

SEQ ID NO: 19791 - protein, 85 aa, unidentified
  REGION 1..85: note = Description of Unknown:hvTR_Q7T401 target sequence
WTDARGGLSFLLAALGNRLCGPDTAAWAGNWTGPPDVSALGAQGVLLLSTRDLAFAGAVEYLGLLAAAAGRRLVVVDAVPPEEWP

SEQ ID NO: 19792 - protein, 85 aa, unidentified
  REGION 1..85: note = Description of Unknown:hvTR_Q7T401 target sequence
ADGPAVARRHVYLPCAVLPAAQCDVRWPAARDLRRAVLASGRVFGPGVFARVEAACARLYPDAPPPRLGRGANVRYRARTRLGPD

SEQ ID NO: 19793 - protein, 85 aa, unidentified
  REGION 1..85: note = Description of Unknown:hvTR_Q7T401 target sequence
TPVPLPPREYRRAVLPALDGRAADSPAREAAAAGAPDFRRGEAHSHRACARWGLAAPLRPVYLALDRDAARAGPDALPPALRAFC

SEQ ID NO: 19794 - protein, 84 aa, unidentified
  REGION 1..84: note = Description of Unknown:hvTR_Q7T401 target sequence
RAFCARALLEPDPDAAPLVLRADADADPAAAPRVRWAAGRGDTLLADDDDAAAVEVAAAASPARGASPDWDWDWERGPGRPEDW

SEQ ID NO: 19795 - protein, 85 aa, unidentified
  REGION 1..85: note = Description of Unknown:hvTR_Q7T401 target sequence
DDDDDDGEDGGDAFPAAAAAAVSPRQLALLASMVEETARALSPPSSAGPATPPAPRRDSVWVIDAAAPPPTPGGAPADDALAELA

SEQ ID NO: 19796 - protein, 85 aa, unidentified
  REGION 1..85: note = Description of Unknown:hvTR_Q7T401 target sequence
EVAESAERGAAAADSARPDGREADAGSASESGSESESESESEDSGPDRGPTPPSPGGPDDDDDGEDDADADGDGGAGAGGAAPSR

SEQ ID NO: 19797 - protein, 85 aa, unidentified
  REGION 1..85: note = Description of Unknown:hvTR_Q7T401 target sequence
APGPGSSASDSEDSEDPDPSPPASPPPAARRPPSSAASAGRSERRRARAAVAGRDATGRFTAAPPRAVPLDADEASGAFYARYRD

SEQ ID NO: 19798 - protein, 85 aa, unidentified
  REGION 1..85: note = Description of Unknown:hvTR_Q7T401 target sequence
GYASGEPWPGAEPPPPGRVLYGGLGDSRPGLWGAPEVDEARRRYEAAGAPAPVWAPELGDAARQYALITRLLFAPDREAMGWLQN

SEQ ID NO: 19799 - protein, 85 aa, unidentified
  REGION 1..85: note = Description of Unknown:hvTR_Q7T401 target sequence
PRVTAGDVELDRACFEASGARRNSSSFITGTVARAVPHLGYAMAAGRFGWGLAHAAAAVAMSRRYDRAQKGFLITSLRRAYAPLL

SEQ ID NO: 19800 - protein, 85 aa, unidentified
  REGION 1..85: note = Description of Unknown:hvTR_Q7T401 target sequence
ARENAAAAGAAAAAAAAPEPDAAAVPAVPAGYGAAGVIAAQRRLAAALSDEGPAGAGEDGPAGAAGEDEDDDDDDAAAAAAAECL

SEQ ID NO: 19801 - protein, 85 aa, unidentified
  REGION 1..85: note = Description of Unknown:hvTR_Q7T401 target sequence
TACRAVLEALAEGYGGDLAAVPGLAAARAVPPPRGPAAAPPRPRLWLRELRRTRDALVLMRLRGDLRVAGGAEAAVAAVRAVSLV

SEQ ID NO: 19802 - protein, 85 aa, unidentified
  REGION 1..85: note = Description of Unknown:hvTR_Q7T401 target sequence
AGAAAPLLARGPRQVRSAGAAAADLLFQNQSLRPLLADADAGGAARPPARKRKSSSPARPPAAAAACPPARKKSRPGAAAPPPGP

SEQ ID NO: 19803 - protein, 85 aa, unidentified
  REGION 1..85: note = Description of Unknown:hvTR_Q7T401 target sequence
PAPGPRPRPAALTARPPAGPDPRGGWRRVPPGPSHTPAPSAAALEAYCAPRVVAELTDHPLFPEAWRAALAFDPRALASLAARCG

SEQ ID NO: 19804 - protein, 85 aa, unidentified
  REGION 1..85: note = Description of Unknown:hvTR_Q7T401 target sequence
PPEPGSGRAFGPPRASGPLRRAAAWMRQVADPEDVRVLVLYAPLPGEELGGASPAPPAWTDARGGLSFLLAALGNRLCGPDTAAW

SEQ ID NO: 19805 - protein, 85 aa, unidentified
  REGION 1..85: note = Description of Unknown:hvTR_Q7T401 target sequence
AGNWTGPPDVSALGAQGVLLLSTRDLAFAGAVEYLGLLAAAAGRRLVVVDAVPPEEWPADGPAVARRHVYLPCAVLPAAQCDVRW

SEQ ID NO: 19806 - protein, 85 aa, unidentified
  REGION 1..85: note = Description of Unknown:hvTR_Q7T401 target sequence
PAARDLRRAVLASGRVFGPGVFARVEAACARLYPDAPPPRLGRGANVRYRARTRLGPDTPVPLPPREYRRAVLPALDGRAADSPA

SEQ ID NO: 19807 - protein, 85 aa, unidentified
  REGION 1..85: note = Description of Unknown:hvTR_Q7T401 target sequence
REAAAAGAPDFRRGEAHSHRACARWGLAAPLRPVYLALDRDAARAGPDALPPALRAFCARALLEPDPDAAPLVLRADADADPAAA

SEQ ID NO: 19808 - protein, 85 aa, unidentified
  REGION 1..85: note = Description of Unknown:hvTR_P11870.1 target sequence
EAAAKTVTVRAAPLGYVYVTPIEALRRDLLALLVARSADDAAAVAPLVRGLTVEAGFAGHVAVVAGARTTGLGGGLTLKLTPNHF

SEQ ID NO: 19809 - protein, 85 aa, unidentified
  REGION 1..85: note = Description of Unknown:hvTR_P11870.1 target sequence
HPNVFFFHNGDCVPPSSAAPALSRACEAARARFGFSAYRTPVDNAEETTGAEVCARLGLAADAHAAYLVVADGFKEAVYLCNAFL

SEQ ID NO: 19810 - protein, 85 aa, unidentified
  REGION 1..85: note = Description of Unknown:hvTR_P11870.1 target sequence
HYGGAGTVSINGHEAWRVPLYPVHLFMPDVNRLVADPFNAKNRSISEEFVYPRPFFNGPLCRLLHGYVLGPAAVATRVRNLDAVA

SEQ ID NO: 19811 - protein, 85 aa, unidentified
  REGION 1..85: note = Description of Unknown:hvTR_P11870.1 target sequence
RGAAHLAFDENHESAVLPADVTFTLFEQRRRGGDAAAGGLERRMASVMSADAALSLEALVAAGVYDEEPPALDDWPVLSEAGAKD

SEQ ID NO: 19812 - protein, 85 aa, unidentified
  REGION 1..85: note = Description of Unknown:hvTR_P11870.1 target sequence
GGAAAASAGAPVSQAAALGAYVSRAAGLVGALVFSSNSVLYLTEVDDAGAADARKEGAGPSFNRFYQVAAPYLAGNPQTDKDGRV

SEQ ID NO: 19813 - protein, 85 aa, unidentified
  REGION 1..85: note = Description of Unknown:hvTR_P11870.1 target sequence
LLHTASQPATAPGNHDFAMDHLVMACGFCPQLLARVLFYLERCDAGTFVGRGDVDAVRYVAGSLDAEVPCSLCDRASRPACAHTT

SEQ ID NO: 19814 - protein, 85 aa, unidentified
  REGION 1..85: note = Description of Unknown:hvTR_P11870.1 target sequence
LHRLRHRSRASARRRSPMGVFGTMNSAYSDCDVLGNYASYGALKRPNDSEPPKAIMQDTYRAAVDRLLADVAGARIGETVTDHAG

SEQ ID NO: 19815 - protein, 85 aa, unidentified
  REGION 1..85: note = Description of Unknown:hvTR_P11870.1 target sequence
FRHALRALRDTVEQAADRFVRTLVETRDFKLRDALYDANHTMSLSLDPYSGALCPATSFLARRTLLAVLQDLALSQCHGVLHGQP

SEQ ID NO: 19816 - protein, 85 aa, unidentified
  REGION 1..85: note = Description of Unknown:hvTR_P11870.1 target sequence
VEGRNFRNQFQPVLRRRVVDMLNGGFVTAKTVTVTLADGIVAPDPTKGSAEPPARDHDGDLARVSFEVLRELRVKSRVMFSTGSG

SEQ ID NO: 19817 - protein, 85 aa, unidentified
  REGION 1..85: note = Description of Unknown:hvTR_P11870.1 target sequence
SLSDAARARVAGLAGAYQRPDTAVDVLNGPLGFLLKQHHATLFPRGKPPGGQSPNPQWFWTLLQRNQLPARLLTKDDIETIAAVK

SEQ ID NO: 19818 - protein, 85 aa, unidentified
  REGION 1..85: note = Description of Unknown:hvTR_P11870.1 target sequence
RFSVDYGAINYVNLTPGTVAELAQFYLANLILRYCDHKQFFINSLTGITMQSKRPRDPAAVMAWVRRPLADAADAERAAREVLDA

SEQ ID NO: 19819 - protein, 85 aa, unidentified
  REGION 1..85: note = Description of Unknown:hvTR_P11870.1 target sequence
PRDDTWVATYTSSHLLRSVMASRPLVVLGLGVSKYHGMAGNNRVFQAGNWSGLNGGKHVCPLMVFDRTRHFVLACPRVGFTCSQT

SEQ ID NO: 19820 - protein, 85 aa, unidentified
  REGION 1..85: note = Description of Unknown:hvTR_P11870.1 target sequence
GGGAGLHDHSLGEHVKTILADGGPLVQTAVYAAVLHALGARTQHLEPDDWRAIVDDEFLAAALAEINGRVADRDGRWSVEAAAEL

SEQ ID NO: 19821 - protein, 84 aa, unidentified
  REGION 1..84: note = Description of Unknown:hvTR_P11870.1 target sequence
ADRDGRWSVEAAAELVRDLEGQTGADGGEETAFDFGACGAGGDVAGLAPASLVPAELGGKRPPPEDDLFDMGAPPEKRLTFDML

SEQ ID NO: 19822 - protein, 85 aa, unidentified
  REGION 1..85: note = Description of Unknown:hvTR_P11870.1 target sequence
DLLALLVARSADDAAAVAPLVRGLTVEAGFAGHVAVVAGARTTGLGGGLTLKLTPNHFHPNVFFFHNGDCVPPSSAAPALSRACE

SEQ ID NO: 19823 - protein, 85 aa, unidentified
  REGION 1..85: note = Description of Unknown:hvTR_P11870.1 target sequence
AARARFGFSAYRTPVDNAEETTGAEVCARLGLAADAHAAYLVVADGFKEAVYLCNAFLHYGGAGTVSINGHEAWRVPLYPVHLFM

SEQ ID NO: 19824 - protein, 85 aa, unidentified
  REGION 1..85: note = Description of Unknown:hvTR_P11870.1 target sequence
PDVNRLVADPFNAKNRSISEEFVYPRPFFNGPLCRLLHGYVLGPAAVATRVRNLDAVARGAAHLAFDENHESAVLPADVTFTLFE

SEQ ID NO: 19825 - protein, 85 aa, unidentified
  REGION 1..85: note = Description of Unknown:hvTR_P11870.1 target sequence
QRRRGGDAAAGGLERRMASVMSADAALSLEALVAAGVYDEEPPALDDWPVLSEAGAKDGGAAAASAGAPVSQAAALGAYVSRAAG

SEQ ID NO: 19826 - protein, 85 aa, unidentified
  REGION 1..85: note = Description of Unknown:hvTR_P11870.1 target sequence
LVGALVFSSNSVLYLTEVDDAGAADARKEGAGPSFNRFYQVAAPYLAGNPQTDKDGRVLLHTASQPATAPGNHDFAMDHLVMACG

SEQ ID NO: 19827 - protein, 85 aa, unidentified
  REGION 1..85: note = Description of Unknown:hvTR_P11870.1 target sequence
FCPQLLARVLFYLERCDAGTFVGRGDVDAVRYVAGSLDAEVPCSLCDRASRPACAHTTLHRLRHRSRASARRRSPMGVFGTMNSA

SEQ ID NO: 19828 - protein, 85 aa, unidentified
  REGION 1..85: note = Description of Unknown:hvTR_P11870.1 target sequence
YSDCDVLGNYASYGALKRPNDSEPPKAIMQDTYRAAVDRLLADVAGARIGETVTDHAGFRHALRALRDTVEQAADRFVRTLVETR

SEQ ID NO: 19829 - protein, 85 aa, unidentified
  REGION 1..85: note = Description of Unknown:hvTR_P11870.1 target sequence
DFKLRDALYDANHTMSLSLDPYSGALCPATSFLARRTLLAVLQDLALSQCHGVLHGQPVEGRNFRNQFQPVLRRRVVDMLNGGFV

SEQ ID NO: 19830 - protein, 85 aa, unidentified
  REGION 1..85: note = Description of Unknown:hvTR_P11870.1 target sequence
TAKTVTVTLADGIVAPDPTKGSAEPPARDHDGDLARVSFEVLRELRVKSRVMFSTGSGSLSDAARARVAGLAGAYQRPDTAVDVL

SEQ ID NO: 19831 - protein, 85 aa, unidentified
  REGION 1..85: note = Description of Unknown:hvTR_P11870.1 target sequence
NGPLGFLLKQHHATLFPRGKPPGGQSPNPQWFWTLLQRNQLPARLLTKDDIETIAAVKRFSVDYGAINYVNLTPGTVAELAQFYL

SEQ ID NO: 19832 - protein, 85 aa, unidentified
  REGION 1..85: note = Description of Unknown:hvTR_P11870.1 target sequence
ANLILRYCDHKQFFINSLTGITMQSKRPRDPAAVMAWVRRPLADAADAERAAREVLDAPRDDTWVATYTSSHLLRSVMASRPLVV

SEQ ID NO: 19833 - protein, 85 aa, unidentified
  REGION 1..85: note = Description of Unknown:hvTR_P11870.1 target sequence
LGLGVSKYHGMAGNNRVFQAGNWSGLNGGKHVCPLMVFDRTRHFVLACPRVGFTCSQTGGGAGLHDHSLGEHVKTILADGGPLVQ

SEQ ID NO: 19834 - protein, 85 aa, unidentified
  REGION 1..85: note = Description of Unknown:hvTR_P11870.1 target sequence
TAVYAAVLHALGARTQHLEPDDWRAIVDDEFLAAALAEINGRVADRDGRWSVEAAAELVRDLEGQTGADGGEETAFDFGACGAGG

SEQ ID NO: 19835 - protein, 85 aa, unidentified
  REGION 1..85: note = Description of Unknown:cds_NC_002645.1_cds_NP_073551.1_3 target sequence
FVLLVAYALLHIAGCQTTNGLNTSYSVCNGCVGYSENVFAVESGGYIPSDFAFNNWFLLTNTSSVVDGVVRSFQPLLLNCLWSVS

SEQ ID NO: 19836 - protein, 85 aa, unidentified
  REGION 1..85: note = Description of Unknown:cds_NC_002645.1_cds_NP_073551.1_3 target sequence
GLRFTTGFVYFNGTGRGDCKGFSSDVLSDVIRYNLNFEENLRRGTILFKTSYGVVVFYCTNNTLVSGDAHIPFGTVLGNFYCFVN

SEQ ID NO: 19837 - protein, 85 aa, unidentified
  REGION 1..85: note = Description of Unknown:cds_NC_002645.1_cds_NP_073551.1_3 target sequence
TTIGNETTSAFVGALPKTVREFVISRTGHFYINGYRYFTLGNVEAVNFNVTTAETTDFCTVALASYADVLVNVSQTSIANIIYCN

SEQ ID NO: 19838 - protein, 85 aa, unidentified
  REGION 1..85: note = Description of Unknown:cds_NC_002645.1_cds_NP_073551.1_3 target sequence
SVINRLRCDQLSFDVPDGFYSTSPIQSVELPVSIVSLPVYHKHTFIVLYVDFKPQSGGGKCFNCYPAGVNITLANFNETKGPLCV

SEQ ID NO: 19839 - protein, 85 aa, unidentified
  REGION 1..85: note = Description of Unknown:cds_NC_002645.1_cds_NP_073551.1_3 target sequence
DTSHFTTKYVAVYANVGRWSASINTGNCPFSFGKVNNFVKFGSVCFSLKDIPGGCAMPIVANWAYSKYYTIGSLYVSWSDGDGIT

SEQ ID NO: 19840 - protein, 85 aa, unidentified
  REGION 1..85: note = Description of Unknown:cds_NC_002645.1_cds_NP_073551.1_3 target sequence
GVPQPVEGVSSFMNVTLDKCTKYNIYDVSGVGVIRVSNDTFLNGITYTSTSGNLLGFKDVTKGTIYSITPCNPPDQLVVYQQAVV

SEQ ID NO: 19841 - protein, 85 aa, unidentified
  REGION 1..85: note = Description of Unknown:cds_NC_002645.1_cds_NP_073551.1_3 target sequence
GAMLSENFTSYGFSNVVELPKFFYASNGTYNCTDAVLTYSSFGVCADGSIIAVQPRNVSYDSVSAIVTANLSIPSNWTTSVQVEY

SEQ ID NO: 19842 - protein, 85 aa, unidentified
  REGION 1..85: note = Description of Unknown:cds_NC_002645.1_cds_NP_073551.1_3 target sequence
LQITSTPIVVDCSTYVCNGNVRCVELLKQYTSACKTIEDALRNSARLESADVSEMLTFDKKAFTLANVSSFGDYNLSSVIPSLPT

SEQ ID NO: 19843 - protein, 85 aa, unidentified
  REGION 1..85: note = Description of Unknown:cds_NC_002645.1_cds_NP_073551.1_3 target sequence
SGSRVAGRSAIEDILFSKLVTSGLGTVDADYKKCTKGLSIADLACAQYYNGIMVLPGVADAERMAMYTGSLIGGIALGGLTSAVS

SEQ ID NO: 19844 - protein, 85 aa, unidentified
  REGION 1..85: note = Description of Unknown:cds_NC_002645.1_cds_NP_073551.1_3 target sequence
IPFSLAIQARLNYVALQTDVLQENQKILAASFNKAMTNIVDAFTGVNDAITQTSQALQTVATALNKIQDVVNQQGNSLNHLTSQL

SEQ ID NO: 19845 - protein, 85 aa, unidentified
  REGION 1..85: note = Description of Unknown:cds_NC_002645.1_cds_NP_073551.1_3 target sequence
RQNFQAISSSIQAIYDRLDTIQADQQVDRLITGRLAALNVFVSHTLTKYTEVRASRQLAQQKVNECVKSQSKRYGFCGNGTHIFS

SEQ ID NO: 19846 - protein, 85 aa, unidentified
  REGION 1..85: note = Description of Unknown:cds_NC_002645.1_cds_NP_073551.1_3 target sequence
IVNAAPEGLVFLHTVLLPTQYKDVEAWSGLCVDGTNGYVLRQPNLALYKEGNYYRITSRIMFEPRIPTMADFVQIENCNVTFVNI

SEQ ID NO: 19847 - protein, 85 aa, unidentified
  REGION 1..85: note = Description of Unknown:cds_NC_002645.1_cds_NP_073551.1_3 target sequence
SRSELQTIVPEYIDVNKTLQELSYKLPNYTVPDLVVEQYNQTILNLTSEISTLENKSAELNYTVQKLQTLIDNINSTLVDLKWLN

SEQ ID NO: 19848 - protein, 84 aa, unidentified
  REGION 1..84: note = Description of Unknown:cds_NC_002645.1_cds_NP_073551.1_3 target sequence
TLIDNINSTLVDLKWLNRVETYIKWPWWVWLCISVVLIFVVSMLLLCCCSTGCCGFFSCFASSIRGCCESTKLPYYDVEKIHIQ

SEQ ID NO: 19849 - protein, 85 aa, unidentified
  REGION 1..85: note = Description of Unknown:cds_NC_002645.1_cds_NP_073551.1_3 target sequence
CNGCVGYSENVFAVESGGYIPSDFAFNNWFLLTNTSSVVDGVVRSFQPLLLNCLWSVSGLRFTTGFVYFNGTGRGDCKGFSSDVL

SEQ ID NO: 19850 - protein, 85 aa, unidentified
  REGION 1..85: note = Description of Unknown:cds_NC_002645.1_cds_NP_073551.1_3 target sequence
SDVIRYNLNFEENLRRGTILFKTSYGVVVFYCTNNTLVSGDAHIPFGTVLGNFYCFVNTTIGNETTSAFVGALPKTVREFVISRT

SEQ ID NO: 19851 - protein, 85 aa, unidentified
  REGION 1..85: note = Description of Unknown:cds_NC_002645.1_cds_NP_073551.1_3 target sequence
GHFYINGYRYFTLGNVEAVNFNVTTAETTDFCTVALASYADVLVNVSQTSIANIIYCNSVINRLRCDQLSFDVPDGFYSTSPIQS

SEQ ID NO: 19852 - protein, 85 aa, unidentified
  REGION 1..85: note = Description of Unknown:cds_NC_002645.1_cds_NP_073551.1_3 target sequence
VELPVSIVSLPVYHKHTFIVLYVDFKPQSGGGKCFNCYPAGVNITLANFNETKGPLCVDTSHFTTKYVAVYANVGRWSASINTGN

SEQ ID NO: 19853 - protein, 85 aa, unidentified
  REGION 1..85: note = Description of Unknown:cds_NC_002645.1_cds_NP_073551.1_3 target sequence
CPFSFGKVNNFVKFGSVCFSLKDIPGGCAMPIVANWAYSKYYTIGSLYVSWSDGDGITGVPQPVEGVSSFMNVTLDKCTKYNIYD

SEQ ID NO: 19854 - protein, 85 aa, unidentified
  REGION 1..85: note = Description of Unknown:cds_NC_002645.1_cds_NP_073551.1_3 target sequence
VSGVGVIRVSNDTFLNGITYTSTSGNLLGFKDVTKGTIYSITPCNPPDQLVVYQQAVVGAMLSENFTSYGFSNVVELPKFFYASN

SEQ ID NO: 19855 - protein, 85 aa, unidentified
  REGION 1..85: note = Description of Unknown:cds_NC_002645.1_cds_NP_073551.1_3 target sequence
GTYNCTDAVLTYSSFGVCADGSIIAVQPRNVSYDSVSAIVTANLSIPSNWTTSVQVEYLQITSTPIVVDCSTYVCNGNVRCVELL

SEQ ID NO: 19856 - protein, 85 aa, unidentified
  REGION 1..85: note = Description of Unknown:cds_NC_002645.1_cds_NP_073551.1_3 target sequence
KQYTSACKTIEDALRNSARLESADVSEMLTFDKKAFTLANVSSFGDYNLSSVIPSLPTSGSRVAGRSAIEDILFSKLVTSGLGTV

SEQ ID NO: 19857 - protein, 85 aa, unidentified
  REGION 1..85: note = Description of Unknown:cds_NC_002645.1_cds_NP_073551.1_3 target sequence
DADYKKCTKGLSIADLACAQYYNGIMVLPGVADAERMAMYTGSLIGGIALGGLTSAVSIPFSLAIQARLNYVALQTDVLQENQKI

SEQ ID NO: 19858 - protein, 85 aa, unidentified
  REGION 1..85: note = Description of Unknown:cds_NC_002645.1_cds_NP_073551.1_3 target sequence
LAASFNKAMTNIVDAFTGVNDAITQTSQALQTVATALNKIQDVVNQQGNSLNHLTSQLRQNFQAISSSIQAIYDRLDTIQADQQV

SEQ ID NO: 19859 - protein, 85 aa, unidentified
  REGION 1..85: note = Description of Unknown:cds_NC_002645.1_cds_NP_073551.1_3 target sequence
DRLITGRLAALNVFVSHTLTKYTEVRASRQLAQQKVNECVKSQSKRYGFCGNGTHIFSIVNAAPEGLVFLHTVLLPTQYKDVEAW

SEQ ID NO: 19860 - protein, 85 aa, unidentified
  REGION 1..85: note = Description of Unknown:cds_NC_002645.1_cds_NP_073551.1_3 target sequence
SGLCVDGTNGYVLRQPNLALYKEGNYYRITSRIMFEPRIPTMADFVQIENCNVTFVNISRSELQTIVPEYIDVNKTLQELSYKLP

SEQ ID NO: 19861 - protein, 85 aa, unidentified
  REGION 1..85: note = Description of Unknown:cds_NC_002645.1_cds_NP_073551.1_3 target sequence
NYTVPDLVVEQYNQTILNLTSEISTLENKSAELNYTVQKLQTLIDNINSTLVDLKWLNRVETYIKWPWWVWLCISVVLIFVVSML

SEQ ID NO: 19862 - protein, 85 aa, unidentified
  REGION 1..85: note = Description of Unknown:cds_NC_030656.1_cds_YP_009268834.1_119 target sequence
KNDTSVKMDQRLGYKFLLPDPKADVFYRPLHFQYESYANFILYRLKEILTVKRKLLSFKNGTENIILEINNVCVKPPPYSPIIAS

SEQ ID NO: 19863 - protein, 85 aa, unidentified
  REGION 1..85: note = Description of Unknown:cds_NC_030656.1_cds_YP_009268834.1_119 target sequence
IKGKSYDALVTFTVNILKEVMTKDTVTTVKISSYEGTDSHLIKIPLLIGYGNKNVLDPAKFVVPNVIGGVFINKQSIEKVGINLI

SEQ ID NO: 19864 - protein, 85 aa, unidentified
  REGION 1..85: note = Description of Unknown:cds_NC_030656.1_cds_YP_009268834.1_119 target sequence
EKITTWPKFRSIKANTFSFSFSSVSAPNILPTKYRHYKIILDVSQLENCNISSAKTMITVNVILLVQYLANVSLEFIINNLTFDM

SEQ ID NO: 19865 - protein, 85 aa, unidentified
  REGION 1..85: note = Description of Unknown:cds_NC_030656.1_cds_YP_009268834.1_119 target sequence
PTEAGYLAHSLVESTKYITSKEDFNLTNYIYDLIEAERLKQKSQLKPEEFRYDMISNFLPHMVNSSNQLKGLYLLSLLRRFIYCI

SEQ ID NO: 19866 - protein, 85 aa, unidentified
  REGION 1..85: note = Description of Unknown:cds_NC_030656.1_cds_YP_009268834.1_119 target sequence
FFPSRYVDRDSMACHRVLTYGKYFETLANDELENYISNIKNDIMNNHKNRGTCSVNIHVLTTPGFNQAFASLLSGKFKKTDGSYR

SEQ ID NO: 19867 - protein, 85 aa, unidentified
  REGION 1..85: note = Description of Unknown:cds_NC_030656.1_cds_YP_009268834.1_119 target sequence
THQHYSWMQNVSIPRSVGYYPDQVKISKMFSVRKYHPSQNAFFCPSDVPERGTHVGLVSQLSVLSSISNIKTTDYVSLEKKICEY

SEQ ID NO: 19868 - protein, 85 aa, unidentified
  REGION 1..85: note = Description of Unknown:cds_NC_030656.1_cds_YP_009268834.1_119 target sequence
IRSYPTEEISYFETGIPITLENSLIASINIDLAEQFVIDFRRRKRIGYFNNLEIGITLVQDHMNEIRINIGGGRIIRPFLVVDDG

SEQ ID NO: 19869 - protein, 85 aa, unidentified
  REGION 1..85: note = Description of Unknown:cds_NC_030656.1_cds_YP_009268834.1_119 target sequence
KLIMDTVADELDSKINSMTFSDIQKEFPHVLEIIDIEQFIFSNVCESVEYFRKLSPEEKQKYHFCEFPAEFRDGYVAASLVGINH

SEQ ID NO: 19870 - protein, 85 aa, unidentified
  REGION 1..85: note = Description of Unknown:cds_NC_030656.1_cds_YP_009268834.1_119 target sequence
NSGPRAILGCAQTKQAISILSSDLRNKIDNGIHLIFPERPIVISKALETSKIAANCFGQHVVLALMSYKGINQEDGIIIKKQFIE

SEQ ID NO: 19871 - protein, 85 aa, unidentified
  REGION 1..85: note = Description of Unknown:cds_NC_030656.1_cds_YP_009268834.1_119 target sequence
RGGLDIVTAKKHQVEIPLENFNNRERVRSTAYSKLDSNGLVKLNAFLEMGDAIARNISSRTLEDEFVTDNQISFDIADKYTDIYN

SEQ ID NO: 19872 - protein, 85 aa, unidentified
  REGION 1..85: note = Description of Unknown:cds_NC_030656.1_cds_YP_009268834.1_119 target sequence
SRVERVQVDLTDKVKVRVLTIKERRPVLGDKFTSRTSQKGTVAYIADESELPYTEDGIRPDIIVNSTAIFSRKTVSMLIEIILTA

SEQ ID NO: 19873 - protein, 85 aa, unidentified
  REGION 1..85: note = Description of Unknown:cds_NC_030656.1_cds_YP_009268834.1_119 target sequence
AYASKPYNNDGKNRPICFPSSNETDIDTYLEFAKNCHTRAAEDLGLKFDIDEKVFCESTLYDPETDTPYKSKVFMGPIYYLRLRH

SEQ ID NO: 19874 - protein, 85 aa, unidentified
  REGION 1..85: note = Description of Unknown:cds_NC_030656.1_cds_YP_009268834.1_119 target sequence
LTKDKATVRCRGKKTKLIRQANEGRKRGGGIKFGEMERDCIIAHGAANTINEILKDSEEDSQDVYVCDNCGDIAAHIGTSYSCIR

SEQ ID NO: 19875 - protein, 84 aa, unidentified
  REGION 1..84: note = Description of Unknown:cds_NC_030656.1_cds_YP_009268834.1_119 target sequence
VCDNCGDIAAHIGTSYSCIRCSKLNLSTVLVKVDTTHVSKVFLTQMNARGIKIKMEFEKKEPVFYKPLDSVSLSPKTSLWGDSK

SEQ ID NO: 19876 - protein, 85 aa, unidentified
  REGION 1..85: note = Description of Unknown:cds_NC_030656.1_cds_YP_009268834.1_119 target sequence
RPLHFQYESYANFILYRLKEILTVKRKLLSFKNGTENIILEINNVCVKPPPYSPIIASIKGKSYDALVTFTVNILKEVMTKDTVT

SEQ ID NO: 19877 - protein, 85 aa, unidentified
  REGION 1..85: note = Description of Unknown:cds_NC_030656.1_cds_YP_009268834.1_119 target sequence
TVKISSYEGTDSHLIKIPLLIGYGNKNVLDPAKFVVPNVIGGVFINKQSIEKVGINLIEKITTWPKFRSIKANTFSFSFSSVSAP

SEQ ID NO: 19878 - protein, 85 aa, unidentified
  REGION 1..85: note = Description of Unknown:cds_NC_030656.1_cds_YP_009268834.1_119 target sequence
NILPTKYRHYKIILDVSQLENCNISSAKTMITVNVILLVQYLANVSLEFIINNLTFDMPTEAGYLAHSLVESTKYITSKEDFNLT

SEQ ID NO: 19879 - protein, 85 aa, unidentified
  REGION 1..85: note = Description of Unknown:cds_NC_030656.1_cds_YP_009268834.1_119 target sequence
NYIYDLIEAERLKQKSQLKPEEFRYDMISNFLPHMVNSSNQLKGLYLLSLLRRFIYCIFFPSRYVDRDSMACHRVLTYGKYFETL

SEQ ID NO: 19880 - protein, 85 aa, unidentified
  REGION 1..85: note = Description of Unknown:cds_NC_030656.1_cds_YP_009268834.1_119 target sequence
ANDELENYISNIKNDIMNNHKNRGTCSVNIHVLTTPGFNQAFASLLSGKFKKTDGSYRTHQHYSWMQNVSIPRSVGYYPDQVKIS

SEQ ID NO: 19881 - protein, 85 aa, unidentified
  REGION 1..85: note = Description of Unknown:cds_NC_030656.1_cds_YP_009268834.1_119 target sequence
KMFSVRKYHPSQNAFFCPSDVPERGTHVGLVSQLSVLSSISNIKTTDYVSLEKKICEYIRSYPTEEISYFETGIPITLENSLIAS

SEQ ID NO: 19882 - protein, 85 aa, unidentified
  REGION 1..85: note = Description of Unknown:cds_NC_030656.1_cds_YP_009268834.1_119 target sequence
INIDLAEQFVIDFRRRKRIGYFNNLEIGITLVQDHMNEIRINIGGGRIIRPFLVVDDGKLIMDTVADELDSKINSMTFSDIQKEF

SEQ ID NO: 19883 - protein, 85 aa, unidentified
  REGION 1..85: note = Description of Unknown:cds_NC_030656.1_cds_YP_009268834.1_119 target sequence
PHVLEIIDIEQFIFSNVCESVEYFRKLSPEEKQKYHFCEFPAEFRDGYVAASLVGINHNSGPRAILGCAQTKQAISILSSDLRNK

SEQ ID NO: 19884 - protein, 85 aa, unidentified
  REGION 1..85: note = Description of Unknown:cds_NC_030656.1_cds_YP_009268834.1_119 target sequence
IDNGIHLIFPERPIVISKALETSKIAANCFGQHVVLALMSYKGINQEDGIIIKKQFIERGGLDIVTAKKHQVEIPLENFNNRERV

SEQ ID NO: 19885 - protein, 85 aa, unidentified
  REGION 1..85: note = Description of Unknown:cds_NC_030656.1_cds_YP_009268834.1_119 target sequence
RSTAYSKLDSNGLVKLNAFLEMGDAIARNISSRTLEDEFVTDNQISFDIADKYTDIYNSRVERVQVDLTDKVKVRVLTIKERRPV

SEQ ID NO: 19886 - protein, 85 aa, unidentified
  REGION 1..85: note = Description of Unknown:cds_NC_030656.1_cds_YP_009268834.1_119 target sequence
LGDKFTSRTSQKGTVAYIADESELPYTEDGIRPDIIVNSTAIFSRKTVSMLIEIILTAAYASKPYNNDGKNRPICFPSSNETDID

SEQ ID NO: 19887 - protein, 85 aa, unidentified
  REGION 1..85: note = Description of Unknown:cds_NC_030656.1_cds_YP_009268834.1_119 target sequence
TYLEFAKNCHTRAAEDLGLKFDIDEKVFCESTLYDPETDTPYKSKVFMGPIYYLRLRHLTKDKATVRCRGKKTKLIRQANEGRKR

SEQ ID NO: 19888 - protein, 85 aa, unidentified
  REGION 1..85: note = Description of Unknown:cds_NC_030656.1_cds_YP_009268834.1_119 target sequence
GGGIKFGEMERDCIIAHGAANTINEILKDSEEDSQDVYVCDNCGDIAAHIGTSYSCIRCSKLNLSTVLVKVDTTHVSKVFLTQMN

SEQ ID NO: 19889 - protein, 85 aa, unidentified
  REGION 1..85: note = Description of Unknown:hvTR_Q5Y0M9 target sequence
PRAPLGGAGSPDPDDGPPRTPDPEGPPPSHAAADDDADADLAAAAASSRQLALLAAMVEETARALSPPSGPPSPRPAPAAPARAP

SEQ ID NO: 19890 - protein, 85 aa, unidentified
  REGION 1..85: note = Description of Unknown:hvTR_Q5Y0M9 target sequence
RRESVWVIDAAPPPTPGGAPHAGDELAELAELAELAAGEEDDGGDGHPAPGSDPGSEASDSDPGSEASDSSDSDPDPDPERDAAP

SEQ ID NO: 19891 - protein, 85 aa, unidentified
  REGION 1..85: note = Description of Unknown:hvTR_Q5Y0M9 target sequence
AGAAAAVDANLAAGAVDSDPDPDPGSDPDSDPDPDSDPDPAPPPPRAAAETGVAAGRSERRRARAAVAGRDATGRFTAARPRPVP

SEQ ID NO: 19892 - protein, 85 aa, unidentified
  REGION 1..85: note = Description of Unknown:hvTR_Q5Y0M9 target sequence
LDADEASGAFYARYRDGYASGEPWPGAEPPPPGRVLYGGLGDSRPGLWGAPEVAEARRRYEAAGAPAPVWAPELGDAARQYALIT

SEQ ID NO: 19893 - protein, 85 aa, unidentified
  REGION 1..85: note = Description of Unknown:hvTR_Q5Y0M9 target sequence
RLLYDPDREAMGWLQNPRVTAGDVELDRACFEASGARRNSSSFITGTVARAVPHLGYAMAAGRFGWGLAHAAAAVAMSRRYDRAQ

SEQ ID NO: 19894 - protein, 85 aa, unidentified
  REGION 1..85: note = Description of Unknown:hvTR_Q5Y0M9 target sequence
KGFLAASLRRAYAPLLARENAAAAGAAPPPRDAAAAPGLAGYGAAGVVAAQRRLAAALAADRGAAPAAEEGDADAADAADAAAEC

SEQ ID NO: 19895 - protein, 85 aa, unidentified
  REGION 1..85: note = Description of Unknown:hvTR_Q5Y0M9 target sequence
LAVCRAVMEALVEGFGGDLAAVPGLAAARAAVPPRGAAAPAPRPRAWLRELRLVRDALTLMRLRGDLRVPGGAEAAVAAVRAVGL

SEQ ID NO: 19896 - protein, 85 aa, unidentified
  REGION 1..85: note = Description of Unknown:hvTR_Q5Y0M9 target sequence
VAGAAAPLLARSPRQVRSVGAAAADLLFRNQSLRPLLDAADADADAARAARKRKSSSPPRAPAPAARPPARKKSRPAPARPPADA

SEQ ID NO: 19897 - protein, 85 aa, unidentified
  REGION 1..85: note = Description of Unknown:hvTR_Q5Y0M9 target sequence
DADADADAARPRPRPAALTARPPGGPDPRGGWRRAPPGPAHTPPPAAAALEAYCEPRVVAELSDHPLFPEPWRAALMFDPRALAS

SEQ ID NO: 19898 - protein, 85 aa, unidentified
  REGION 1..85: note = Description of Unknown:hvTR_Q5Y0M9 target sequence
LAARCGPPEPGSGRALGPLRASGPLRRAAAWMRQVPEPEDVRVLVLYAPLPGEELGGVSPAPPAWTAARGGLSFLLAALANRLCG

SEQ ID NO: 19899 - protein, 85 aa, unidentified
  REGION 1..85: note = Description of Unknown:hvTR_Q5Y0M9 target sequence
PDTAAWAGNWTGPPDVSALGAQGVLLLSTRDLAFAGAVEFLGLLAAAAGRRLVVVDAVPPEEWPADGPVVARRHVYLPCAVLPAA

SEQ ID NO: 19900 - protein, 85 aa, unidentified
  REGION 1..85: note = Description of Unknown:hvTR_Q5Y0M9 target sequence
QCDVRWPAARDLRRAVLASGRVFGPGLFARVEAACARLYPDAPPPRLGRGGNVRYRVRTRLGPDTAVPLPPREYRRAVLPALDGR

SEQ ID NO: 19901 - protein, 85 aa, unidentified
  REGION 1..85: note = Description of Unknown:hvTR_Q5Y0M9 target sequence
AADSPAREAAAAGAPDFRRGEAHSHRACARWGLGAPLRPVYLALDRAAARAGPEALPAALRAFCARALPEPDPDAAPLVLRADAG

SEQ ID NO: 19902 - protein, 84 aa, unidentified
  REGION 1..84: note = Description of Unknown:hvTR_Q5Y0M9 target sequence
FCARALPEPDPDAAPLVLRADAGPPDPAAAPRVRWAAGRADTLLADAEDAAALELAPAPSPAPALGGATPDWDPDGEPAAAEDW

SEQ ID NO: 19903 - protein, 85 aa, unidentified
  REGION 1..85: note = Description of Unknown:hvTR_Q5Y0M9 target sequence
PSHAAADDDADADLAAAAASSRQLALLAAMVEETARALSPPSGPPSPRPAPAAPARAPRRESVWVIDAAPPPTPGGAPHAGDELA

SEQ ID NO: 19904 - protein, 85 aa, unidentified
  REGION 1..85: note = Description of Unknown:hvTR_Q5Y0M9 target sequence
ELAELAELAAGEEDDGGDGHPAPGSDPGSEASDSDPGSEASDSSDSDPDPDPERDAAPAGAAAAVDANLAAGAVDSDPDPDPGSD

SEQ ID NO: 19905 - protein, 85 aa, unidentified
  REGION 1..85: note = Description of Unknown:hvTR_Q5Y0M9 target sequence
PDSDPDPDSDPDPAPPPPRAAAETGVAAGRSERRRARAAVAGRDATGRFTAARPRPVPLDADEASGAFYARYRDGYASGEPWPGA

SEQ ID NO: 19906 - protein, 85 aa, unidentified
  REGION 1..85: note = Description of Unknown:hvTR_Q5Y0M9 target sequence
EPPPPGRVLYGGLGDSRPGLWGAPEVAEARRRYEAAGAPAPVWAPELGDAARQYALITRLLYDPDREAMGWLQNPRVTAGDVELD

SEQ ID NO: 19907 - protein, 85 aa, unidentified
  REGION 1..85: note = Description of Unknown:hvTR_Q5Y0M9 target sequence
RACFEASGARRNSSSFITGTVARAVPHLGYAMAAGRFGWGLAHAAAAVAMSRRYDRAQKGFLAASLRRAYAPLLARENAAAAGAA

SEQ ID NO: 19908 - protein, 85 aa, unidentified
  REGION 1..85: note = Description of Unknown:hvTR_Q5Y0M9 target sequence
PPPRDAAAAPGLAGYGAAGVVAAQRRLAAALAADRGAAPAAEEGDADAADAADAAAECLAVCRAVMEALVEGFGGDLAAVPGLAA

SEQ ID NO: 19909 - protein, 85 aa, unidentified
  REGION 1..85: note = Description of Unknown:hvTR_Q5Y0M9 target sequence
ARAAVPPRGAAAPAPRPRAWLRELRLVRDALTLMRLRGDLRVPGGAEAAVAAVRAVGLVAGAAAPLLARSPRQVRSVGAAAADLL

SEQ ID NO: 19910 - protein, 85 aa, unidentified
  REGION 1..85: note = Description of Unknown:hvTR_Q5Y0M9 target sequence
FRNQSLRPLLDAADADADAARAARKRKSSSPPRAPAPAARPPARKKSRPAPARPPADADADADADAARPRPRPAALTARPPGGPD

SEQ ID NO: 19911 - protein, 85 aa, unidentified
  REGION 1..85: note = Description of Unknown:hvTR_Q5Y0M9 target sequence
PRGGWRRAPPGPAHTPPPAAAALEAYCEPRVVAELSDHPLFPEPWRAALMFDPRALASLAARCGPPEPGSGRALGPLRASGPLRR

SEQ ID NO: 19912 - protein, 85 aa, unidentified
  REGION 1..85: note = Description of Unknown:hvTR_Q5Y0M9 target sequence
AAAWMRQVPEPEDVRVLVLYAPLPGEELGGVSPAPPAWTAARGGLSFLLAALANRLCGPDTAAWAGNWTGPPDVSALGAQGVLLL

SEQ ID NO: 19913 - protein, 85 aa, unidentified
  REGION 1..85: note = Description of Unknown:hvTR_Q5Y0M9 target sequence
STRDLAFAGAVEFLGLLAAAAGRRLVVVDAVPPEEWPADGPVVARRHVYLPCAVLPAAQCDVRWPAARDLRRAVLASGRVFGPGL

SEQ ID NO: 19914 - protein, 85 aa, unidentified
  REGION 1..85: note = Description of Unknown:hvTR_Q5Y0M9 target sequence
FARVEAACARLYPDAPPPRLGRGGNVRYRVRTRLGPDTAVPLPPREYRRAVLPALDGRAADSPAREAAAAGAPDFRRGEAHSHRA

SEQ ID NO: 19915 - protein, 85 aa, unidentified
  REGION 1..85: note = Description of Unknown:hvTR_Q5Y0M9 target sequence
CARWGLGAPLRPVYLALDRAAARAGPEALPAALRAFCARALPEPDPDAAPLVLRADAGPPDPAAAPRVRWAAGRADTLLADAEDA

SEQ ID NO: 19916 - protein, 85 aa, unidentified
  REGION 1..85: note = Description of Unknown:cds_NC_035460.1_cds_YP_009408072.1_121 target sequence
KKNTIFKMDQLLGYKFLMPDPKLGVFYRPLHFQYESYANFILYRLQEILAVKRTLLSFKNDTEKIILEISNIKVTPPDYSPIIAS

SEQ ID NO: 19917 - protein, 85 aa, unidentified
  REGION 1..85: note = Description of Unknown:cds_NC_035460.1_cds_YP_009408072.1_121 target sequence
IKGKSYDALVTFTVDIYKEVMTKDGITVTKISSYEGNDSHLIKIPLLIAYGNKNPLDTAKYLVPNVIGGVFINKQSVEKVGINLV

SEQ ID NO: 19918 - protein, 85 aa, unidentified
  REGION 1..85: note = Description of Unknown:cds_NC_035460.1_cds_YP_009408072.1_121 target sequence
EKITTWPKFKIIKPNAFTFSFSSVSPAHILPTKYRHYKITLDISQLENCSISSTKTFITVNIIILIQYLSRVGIDFIQNSLSFDM

SEQ ID NO: 19919 - protein, 85 aa, unidentified
  REGION 1..85: note = Description of Unknown:cds_NC_035460.1_cds_YP_009408072.1_121 target sequence
PQEIIYLINALIESVKIITDNIQDFDVDNYINNLITVEHSKQKSSLPLEDFKYEMVFNFLPHMNDTPNQLKGFYMISLLRKFIYC

SEQ ID NO: 19920 - protein, 85 aa, unidentified
  REGION 1..85: note = Description of Unknown:cds_NC_035460.1_cds_YP_009408072.1_121 target sequence
IYYTSRYPDRDAMYCHRILTYGKYFEMLAHDELENYITNIKNDIINNHKNRGTYSVNIHVLTTPGFNHAFSGLLSGKFKRTDGSY

SEQ ID NO: 19921 - protein, 85 aa, unidentified
  REGION 1..85: note = Description of Unknown:cds_NC_035460.1_cds_YP_009408072.1_121 target sequence
RTHPHYSWVQNISIPRSVGFYPEQVKISKMFTIRKYHPSQYAYFCPSDVPERGPQVGLVSQLSVLTSITNIKTTEYLNLEKCICS

SEQ ID NO: 19922 - protein, 85 aa, unidentified
  REGION 1..85: note = Description of Unknown:cds_NC_035460.1_cds_YP_009408072.1_121 target sequence
YIRSYNIEDISYFETGYAVTMENALVASLNPKIVDDFVIDFRRKKRMGLFGNLEIGITQVNDHMNEVRINFGGGRLVRPFLVIDE

SEQ ID NO: 19923 - protein, 85 aa, unidentified
  REGION 1..85: note = Description of Unknown:cds_NC_035460.1_cds_YP_009408072.1_121 target sequence
GELVMDQYPDLQSKLDDMTFSDIQKEYPHVIEMVDIEQFSFSNVCESVQKFRALPKSEKVRYHLCDFSSEFRDGYVASSLVGINH

SEQ ID NO: 19924 - protein, 85 aa, unidentified
  REGION 1..85: note = Description of Unknown:cds_NC_035460.1_cds_YP_009408072.1_121 target sequence
NSGPRAILGCAQAKQAISCLSSDIRNKIDNGIHLIYPERPIVISKALETSKIAVNCFGQHVTIALMSYKGANQEDGIVIKKQFAE

SEQ ID NO: 19925 - protein, 85 aa, unidentified
  REGION 1..85: note = Description of Unknown:cds_NC_035460.1_cds_YP_009408072.1_121 target sequence
RGGLDIITAKKHQVEIPLENFNNKERVSSTAYSKLESNGLVRLNAFLESGDAIARNISSRTLEDDFVQDNQINFDISERYTDMYK

SEQ ID NO: 19926 - protein, 85 aa, unidentified
  REGION 1..85: note = Description of Unknown:cds_NC_035460.1_cds_YP_009408072.1_121 target sequence
SRVERVQVDLTDKVKVRVLTMKERRPILGDKFTSRTSQKGTVALIVDENELPYDENGIKPDVIINSTSIFSRKTLSMLVEVILTA

SEQ ID NO: 19927 - protein, 85 aa, unidentified
  REGION 1..85: note = Description of Unknown:cds_NC_035460.1_cds_YP_009408072.1_121 target sequence
AYGDKPYNNNGENRPVCFPSSNETSFDTYINFARQCYESTHPDMSKDKIEDKVYCERILYDPETDKPFKAKVFMGPIYYLRLRHL

SEQ ID NO: 19928 - protein, 85 aa, unidentified
  REGION 1..85: note = Description of Unknown:cds_NC_035460.1_cds_YP_009408072.1_121 target sequence
TQDKATVRCRGKKTKLIRQANEGRKRGGGIKFGEMERDCLIAHGAANTITEILKDSEEDYQDVYICENCGDIAAHIKGNKICIRC

SEQ ID NO: 19929 - protein, 84 aa, unidentified
  REGION 1..84: note = Description of Unknown:cds_NC_035460.1_cds_YP_009408072.1_121 target sequence
DVYICENCGDIAAHIKGNKICIRCSKQNLSTILTKVDTTHVSKVFITQMNARGVKVKLEFEKRNPTFYKNMETVNLEPSTNLWK

SEQ ID NO: 19930 - protein, 85 aa, unidentified
  REGION 1..85: note = Description of Unknown:cds_NC_035460.1_cds_YP_009408072.1_121 target sequence
RPLHFQYESYANFILYRLQEILAVKRTLLSFKNDTEKIILEISNIKVTPPDYSPIIASIKGKSYDALVTFTVDIYKEVMTKDGIT

SEQ ID NO: 19931 - protein, 85 aa, unidentified
  REGION 1..85: note = Description of Unknown:cds_NC_035460.1_cds_YP_009408072.1_121 target sequence
VTKISSYEGNDSHLIKIPLLIAYGNKNPLDTAKYLVPNVIGGVFINKQSVEKVGINLVEKITTWPKFKIIKPNAFTFSFSSVSPA

SEQ ID NO: 19932 - protein, 85 aa, unidentified
  REGION 1..85: note = Description of Unknown:cds_NC_035460.1_cds_YP_009408072.1_121 target sequence
HILPTKYRHYKITLDISQLENCSISSTKTFITVNIIILIQYLSRVGIDFIQNSLSFDMPQEIIYLINALIESVKIITDNIQDFDV

SEQ ID NO: 19933 - protein, 85 aa, unidentified
  REGION 1..85: note = Description of Unknown:cds_NC_035460.1_cds_YP_009408072.1_121 target sequence
DNYINNLITVEHSKQKSSLPLEDFKYEMVFNFLPHMNDTPNQLKGFYMISLLRKFIYCIYYTSRYPDRDAMYCHRILTYGKYFEM

SEQ ID NO: 19934 - protein, 85 aa, unidentified
  REGION 1..85: note = Description of Unknown:cds_NC_035460.1_cds_YP_009408072.1_121 target sequence
LAHDELENYITNIKNDIINNHKNRGTYSVNIHVLTTPGFNHAFSGLLSGKFKRTDGSYRTHPHYSWVQNISIPRSVGFYPEQVKI

SEQ ID NO: 19935 - protein, 85 aa, unidentified
  REGION 1..85: note = Description of Unknown:cds_NC_035460.1_cds_YP_009408072.1_121 target sequence
SKMFTIRKYHPSQYAYFCPSDVPERGPQVGLVSQLSVLTSITNIKTTEYLNLEKCICSYIRSYNIEDISYFETGYAVTMENALVA

SEQ ID NO: 19936 - protein, 85 aa, unidentified
  REGION 1..85: note = Description of Unknown:cds_NC_035460.1_cds_YP_009408072.1_121 target sequence
SLNPKIVDDFVIDFRRKKRMGLFGNLEIGITQVNDHMNEVRINFGGGRLVRPFLVIDEGELVMDQYPDLQSKLDDMTFSDIQKEY

SEQ ID NO: 19937 - protein, 85 aa, unidentified
  REGION 1..85: note = Description of Unknown:cds_NC_035460.1_cds_YP_009408072.1_121 target sequence
PHVIEMVDIEQFSFSNVCESVQKFRALPKSEKVRYHLCDFSSEFRDGYVASSLVGINHNSGPRAILGCAQAKQAISCLSSDIRNK

SEQ ID NO: 19938 - protein, 85 aa, unidentified
  REGION 1..85: note = Description of Unknown:cds_NC_035460.1_cds_YP_009408072.1_121 target sequence
IDNGIHLIYPERPIVISKALETSKIAVNCFGQHVTIALMSYKGANQEDGIVIKKQFAERGGLDIITAKKHQVEIPLENFNNKERV

SEQ ID NO: 19939 - protein, 85 aa, unidentified
  REGION 1..85: note = Description of Unknown:cds_NC_035460.1_cds_YP_009408072.1_121 target sequence
SSTAYSKLESNGLVRLNAFLESGDAIARNISSRTLEDDFVQDNQINFDISERYTDMYKSRVERVQVDLTDKVKVRVLTMKERRPI

SEQ ID NO: 19940 - protein, 85 aa, unidentified
  REGION 1..85: note = Description of Unknown:cds_NC_035460.1_cds_YP_009408072.1_121 target sequence
LGDKFTSRTSQKGTVALIVDENELPYDENGIKPDVIINSTSIFSRKTLSMLVEVILTAAYGDKPYNNNGENRPVCFPSSNETSFD

SEQ ID NO: 19941 - protein, 85 aa, unidentified
  REGION 1..85: note = Description of Unknown:cds_NC_035460.1_cds_YP_009408072.1_121 target sequence
TYINFARQCYESTHPDMSKDKIEDKVYCERILYDPETDKPFKAKVFMGPIYYLRLRHLTQDKATVRCRGKKTKLIRQANEGRKRG

SEQ ID NO: 19942 - protein, 85 aa, unidentified
  REGION 1..85: note = Description of Unknown:cds_NC_035460.1_cds_YP_009408072.1_121 target sequence
GGIKFGEMERDCLIAHGAANTITEILKDSEEDYQDVYICENCGDIAAHIKGNKICIRCSKQNLSTILTKVDTTHVSKVFITQMNA

SEQ ID NO: 19943 - protein, 85 aa, unidentified
  REGION 1..85: note = Description of Unknown:cds_NZ_WFIY01000004.1_cds_WP_155862440.1_187 target sequence
VTSVFLKACPNCGGPLEDYRALAGLPCSKCLPGDISPFKNLSIDEKIRLIYNILVHENKLKGYWNLYYYHQLSQEIIDYFKKITG

SEQ ID NO: 19944 - protein, 85 aa, unidentified
  REGION 1..85: note = Description of Unknown:cds_NZ_WFIY01000004.1_cds_WP_155862440.1_187 target sequence
KEPWSLQKLWLRRLIEGSSFSMSAPTGMGKTTTIIVYSTYLQNSNKNVLYIVPTKSLMQQICEKIEKIGSKTSCGKVGQGISIVT

SEQ ID NO: 19945 - protein, 85 aa, unidentified
  REGION 1..85: note = Description of Unknown:cds_NZ_WFIY01000004.1_cds_WP_155862440.1_187 target sequence
VNYINKNFEEIKEYRPDFVAVDDADAIVKSGKTVDRLVTLMGIPQEVYEDAIKLVKLKRLLAIEEKRDEIETKIAEIESRISKYY

SEQ ID NO: 19946 - protein, 85 aa, unidentified
  REGION 1..85: note = Description of Unknown:cds_NZ_WFIY01000004.1_cds_WP_155862440.1_187 target sequence
GTASQLVVASATLRPKGIKQKALKYITGFDVSTAQIYARNIIDAFTTSPLVDIVNKLGSGGLILVSKEYGKDKIKEVNESLEKLG

SEQ ID NO: 19947 - protein, 85 aa, unidentified
  REGION 1..85: note = Description of Unknown:cds_NZ_WFIY01000004.1_cds_WP_155862440.1_187 target sequence
FKTAIALSGRKFLEKFSNGEIDIIIGSASYYGVAVRGIDEPKRLKYVIFYGVPKSRIRLSQAIYNPYTLLKISKLFNVNIDDNLI

SEQ ID NO: 19948 - protein, 85 aa, unidentified
  REGION 1..85: note = Description of Unknown:cds_NZ_WFIY01000004.1_cds_WP_155862440.1_187 target sequence
LSLSPSEAQLIKLAFLKSQKLTGKLGEIQKILEGKIDEVKSVLKTVSNEVISDTFLIRKIGKEFYIEYPDAITYLQGSGRSSRLL

SEQ ID NO: 19949 - protein, 85 aa, unidentified
  REGION 1..85: note = Description of Unknown:cds_NZ_WFIY01000004.1_cds_WP_155862440.1_187 target sequence
NGGLTLGLAITIIDDVKLYEMLKRKLQYMIYNFNPTNFDSLDIAKVKNEIERSRNDKNEELHISTGLMIVESPTKARTIAKMFGA

SEQ ID NO: 19950 - protein, 85 aa, unidentified
  REGION 1..85: note = Description of Unknown:cds_NZ_WFIY01000004.1_cds_WP_155862440.1_187 target sequence
PAKRNIAGVPIYETVIVDANNVHILDIVATKGHVADLTTENIGYYGVEIRNEDKYPYYSPLYKCMNCKRVFSQEIDKCPYCGSTL

SEQ ID NO: 19951 - protein, 85 aa, unidentified
  REGION 1..85: note = Description of Unknown:cds_NZ_WFIY01000004.1_cds_WP_155862440.1_187 target sequence
ISSSMSTINAIRKIAMEVEKVYIATDPDVEGEKIAFDVAANISAYNPNIYRIKYHEVTKKGILEALANPTSIDLNLVKSQIVRRI

SEQ ID NO: 19952 - protein, 85 aa, unidentified
  REGION 1..85: note = Description of Unknown:cds_NZ_WFIY01000004.1_cds_WP_155862440.1_187 target sequence
EDRWVGFELSKLLQIKFSNRNFGAGRVQTPVLGWITKRTEEYKKNMCYVASIKLGNYTHKVFLDNKHVKIDKVIVKKIEDKDDII

SEQ ID NO: 19953 - protein, 85 aa, unidentified
  REGION 1..85: note = Description of Unknown:cds_NZ_WFIY01000004.1_cds_WP_155862440.1_187 target sequence
LPLPPYTTDSLLIDAYNLYKLPAERVMKIAQELFESGLITYHRTDSIHVSNKGIEIAKEYLDKKGLIKSFMPRSWGNEGTHEAIR

SEQ ID NO: 19954 - protein, 85 aa, unidentified
  REGION 1..85: note = Description of Unknown:cds_NZ_WFIY01000004.1_cds_WP_155862440.1_187 target sequence
PTRPIDAEELKKEIEDNPQAYFIKFTWAHFAIYDMIFKRFLASQMKEAIGKYTKYQIKVLDNVSEITVLTSIKGGFSDILKPRIY

SEQ ID NO: 19955 - protein, 85 aa, unidentified
  REGION 1..85: note = Description of Unknown:cds_NZ_WFIY01000004.1_cds_WP_155862440.1_187 target sequence
EIPEGEIQVNPIITKGSKVRLYTYAEVIKEMKDKNIGRPSTYAKIIQTLMRHGYIVESKKKYALIATKKGINVYHYLNSKFSSLV

SEQ ID NO: 19956 - protein, 84 aa, unidentified
  REGION 1..84: note = Description of Unknown:cds_NZ_WFIY01000004.1_cds_WP_155862440.1_187 target sequence
TLMRHGYIVESKKKYALIATKKGINVYHYLNSKFSSLVSENTTAELLEKMDMIAGGKLDADNVLTEILGQIKSLVTSLNSEQQI

SEQ ID NO: 19957 - protein, 85 aa, unidentified
  REGION 1..85: note = Description of Unknown:cds_NZ_WFIY01000004.1_cds_WP_155862440.1_187 target sequence
SKCLPGDISPFKNLSIDEKIRLIYNILVHENKLKGYWNLYYYHQLSQEIIDYFKKITGKEPWSLQKLWLRRLIEGSSFSMSAPTG

SEQ ID NO: 19958 - protein, 85 aa, unidentified
  REGION 1..85: note = Description of Unknown:cds_NZ_WFIY01000004.1_cds_WP_155862440.1_187 target sequence
MGKTTTIIVYSTYLQNSNKNVLYIVPTKSLMQQICEKIEKIGSKTSCGKVGQGISIVTVNYINKNFEEIKEYRPDFVAVDDADAI

SEQ ID NO: 19959 - protein, 85 aa, unidentified
  REGION 1..85: note = Description of Unknown:cds_NZ_WFIY01000004.1_cds_WP_155862440.1_187 target sequence
VKSGKTVDRLVTLMGIPQEVYEDAIKLVKLKRLLAIEEKRDEIETKIAEIESRISKYYGTASQLVVASATLRPKGIKQKALKYIT

SEQ ID NO: 19960 - protein, 85 aa, unidentified
  REGION 1..85: note = Description of Unknown:cds_NZ_WFIY01000004.1_cds_WP_155862440.1_187 target sequence
GFDVSTAQIYARNIIDAFTTSPLVDIVNKLGSGGLILVSKEYGKDKIKEVNESLEKLGFKTAIALSGRKFLEKFSNGEIDIIIGS

SEQ ID NO: 19961 - protein, 85 aa, unidentified
  REGION 1..85: note = Description of Unknown:cds_NZ_WFIY01000004.1_cds_WP_155862440.1_187 target sequence
ASYYGVAVRGIDEPKRLKYVIFYGVPKSRIRLSQAIYNPYTLLKISKLFNVNIDDNLILSLSPSEAQLIKLAFLKSQKLTGKLGE

SEQ ID NO: 19962 - protein, 85 aa, unidentified
  REGION 1..85: note = Description of Unknown:cds_NZ_WFIY01000004.1_cds_WP_155862440.1_187 target sequence
IQKILEGKIDEVKSVLKTVSNEVISDTFLIRKIGKEFYIEYPDAITYLQGSGRSSRLLNGGLTLGLAITIIDDVKLYEMLKRKLQ

SEQ ID NO: 19963 - protein, 85 aa, unidentified
  REGION 1..85: note = Description of Unknown:cds_NZ_WFIY01000004.1_cds_WP_155862440.1_187 target sequence
YMIYNFNPTNFDSLDIAKVKNEIERSRNDKNEELHISTGLMIVESPTKARTIAKMFGAPAKRNIAGVPIYETVIVDANNVHILDI

SEQ ID NO: 19964 - protein, 85 aa, unidentified
  REGION 1..85: note = Description of Unknown:cds_NZ_WFIY01000004.1_cds_WP_155862440.1_187 target sequence
VATKGHVADLTTENIGYYGVEIRNEDKYPYYSPLYKCMNCKRVFSQEIDKCPYCGSTLISSSMSTINAIRKIAMEVEKVYIATDP

SEQ ID NO: 19965 - protein, 85 aa, unidentified
  REGION 1..85: note = Description of Unknown:cds_NZ_WFIY01000004.1_cds_WP_155862440.1_187 target sequence
DVEGEKIAFDVAANISAYNPNIYRIKYHEVTKKGILEALANPTSIDLNLVKSQIVRRIEDRWVGFELSKLLQIKFSNRNFGAGRV

SEQ ID NO: 19966 - protein, 85 aa, unidentified
  REGION 1..85: note = Description of Unknown:cds_NZ_WFIY01000004.1_cds_WP_155862440.1_187 target sequence
QTPVLGWITKRTEEYKKNMCYVASIKLGNYTHKVFLDNKHVKIDKVIVKKIEDKDDIILPLPPYTTDSLLIDAYNLYKLPAERVM

SEQ ID NO: 19967 - protein, 85 aa, unidentified
  REGION 1..85: note = Description of Unknown:cds_NZ_WFIY01000004.1_cds_WP_155862440.1_187 target sequence
KIAQELFESGLITYHRTDSIHVSNKGIEIAKEYLDKKGLIKSFMPRSWGNEGTHEAIRPTRPIDAEELKKEIEDNPQAYFIKFTW

SEQ ID NO: 19968 - protein, 85 aa, unidentified
  REGION 1..85: note = Description of Unknown:cds_NZ_WFIY01000004.1_cds_WP_155862440.1_187 target sequence
AHFAIYDMIFKRFLASQMKEAIGKYTKYQIKVLDNVSEITVLTSIKGGFSDILKPRIYEIPEGEIQVNPIITKGSKVRLYTYAEV

SEQ ID NO: 19969 - protein, 85 aa, unidentified
  REGION 1..85: note = Description of Unknown:cds_NZ_WFIY01000004.1_cds_WP_155862440.1_187 target sequence
IKEMKDKNIGRPSTYAKIIQTLMRHGYIVESKKKYALIATKKGINVYHYLNSKFSSLVSENTTAELLEKMDMIAGGKLDADNVLT

SEQ ID NO: 19970 - protein, 85 aa, unidentified
  REGION 1..85: note = Description of Unknown:cds_NC_005223.1_cds_NP_941983.1_1 target sequence
GKSSPVCLYLILQGLLLFDTVNAKNLNELKMECPHTIGLGQGLVVGSVELPPVPIQQIESLKLESSCNFDLHTSTAGQQSFTKWT

SEQ ID NO: 19971 - protein, 85 aa, unidentified
  REGION 1..85: note = Description of Unknown:cds_NC_005223.1_cds_NP_941983.1_1 target sequence
WETKGDLAENTQASSTSFQTKSSEVNLRGLCLIPTLVVETAARMRKTIACYDLSCNQTVCQPTVYLMGPIQTCLTTKSCLLGLGD

SEQ ID NO: 19972 - protein, 85 aa, unidentified
  REGION 1..85: note = Description of Unknown:cds_NC_005223.1_cds_NP_941983.1_1 target sequence
QRIQVNYERTYCVSGQLVEGVCFNPIHTMALSQPSHTYDIVTIMVRCFLVIKKVTSGDSMKIEKNFETLVQKTGCTANGFQGYYI

SEQ ID NO: 19973 - protein, 85 aa, unidentified
  REGION 1..85: note = Description of Unknown:cds_NC_005223.1_cds_NP_941983.1_1 target sequence
CLIGSSSEPLYVPTLDDYRSAEVLSRMAFAPHGEDHDIEKNAVSALRIAGKVTGKAPSTESSDTVQGIAFSGSPLYTSTGVLTAK

SEQ ID NO: 19974 - protein, 85 aa, unidentified
  REGION 1..85: note = Description of Unknown:cds_NC_005223.1_cds_NP_941983.1_1 target sequence
DDPVYVWAPGIIMEGNHSVCEKKTLPLTWTGFIPLPGEIEKTTQCTVFCTLAGPGADCEAYSETGIFNISSPTCLINRVQRFRGA

SEQ ID NO: 19975 - protein, 85 aa, unidentified
  REGION 1..85: note = Description of Unknown:cds_NC_005223.1_cds_NP_941983.1_1 target sequence
EQQIKFVCQRVDMDITVYCNGVKKVILTKTLVIGQCIYTFTSIFSMIPGIAHSLAVELCVPGLHGWATVLLLLTFCFGWVLIPTI

SEQ ID NO: 19976 - protein, 85 aa, unidentified
  REGION 1..85: note = Description of Unknown:cds_NC_005223.1_cds_NP_941983.1_1 target sequence
TMILLKILIAFAYLCSKYNTDSKFRILVEKVKKEYQKTMGSMVCEVCQYECETAKELESHRKSCSIGSCPYCLNPSEATPSALQA

SEQ ID NO: 19977 - protein, 85 aa, unidentified
  REGION 1..85: note = Description of Unknown:cds_NC_005223.1_cds_NP_941983.1_1 target sequence
HFKVCKLTSRFQENLKKSLTMYEPMQGCYRTLSLFRYRSRFFVGLVWCMLLVLELIVWAASAETQNLNDGWTDTAHGSGIIPMKA

SEQ ID NO: 19978 - protein, 85 aa, unidentified
  REGION 1..85: note = Description of Unknown:cds_NC_005223.1_cds_NP_941983.1_1 target sequence
DLELDFSLPSSASYTYRRQLQNPANEQEKIPFHLQISKQVIHAEIQHLGHWMDATFNLKTAFHCYGSCEKYAYPWQTAGCFVEKD

SEQ ID NO: 19979 - protein, 85 aa, unidentified
  REGION 1..85: note = Description of Unknown:cds_NC_005223.1_cds_NP_941983.1_1 target sequence
YEYETGWGCNPPDCPGVGTGCTACGVYLDKLKSVGKVFKIVSLRYTRKVCIQLGTGQTCKTVDSNDCLITTSVKVCLIGTISKFQ

SEQ ID NO: 19980 - protein, 85 aa, unidentified
  REGION 1..85: note = Description of Unknown:cds_NC_005223.1_cds_NP_941983.1_1 target sequence
PSDTLLFLGPLQQGGLIFKQWCTTTCQFGDPGDIMSTPTGMKCPELNGSFRKKCAFATTPVCQFDGNTISGYKRMVATKDSFQSF

SEQ ID NO: 19981 - protein, 85 aa, unidentified
  REGION 1..85: note = Description of Unknown:cds_NC_005223.1_cds_NP_941983.1_1 target sequence
NVTEPHISTSALEWIDLDSSLRDHINVIVSRDLSFQDLSETPCQVDLTTSATDGAWGSGVGFNLVCTVSLTECSAFLTSIKACHA

SEQ ID NO: 19982 - protein, 85 aa, unidentified
  REGION 1..85: note = Description of Unknown:cds_NC_005223.1_cds_NP_941983.1_1 target sequence
AMCYGSTTTNLVRGQNTIHVVGKGGHSGSKFMCCHDTKCSSTGLVAAAPHLDRVTGFNQADSDKIFDDGAPECGMSCWFKKLGEW

SEQ ID NO: 19983 - protein, 84 aa, unidentified
  REGION 1..84: note = Description of Unknown:cds_NC_005223.1_cds_NP_941983.1_1 target sequence
LVAAAPHLDRVTGFNQADSDKIFDDGAPECGMSCWFKKLGEWVLGVLNGNWMVVAVLIALLILSIFLFALCCPRRPSYKKDHKP

SEQ ID NO: 19984 - protein, 85 aa, unidentified
  REGION 1..85: note = Description of Unknown:cds_NC_005223.1_cds_NP_941983.1_1 target sequence
ELKMECPHTIGLGQGLVVGSVELPPVPIQQIESLKLESSCNFDLHTSTAGQQSFTKWTWETKGDLAENTQASSTSFQTKSSEVNL

SEQ ID NO: 19985 - protein, 85 aa, unidentified
  REGION 1..85: note = Description of Unknown:cds_NC_005223.1_cds_NP_941983.1_1 target sequence
RGLCLIPTLVVETAARMRKTIACYDLSCNQTVCQPTVYLMGPIQTCLTTKSCLLGLGDQRIQVNYERTYCVSGQLVEGVCFNPIH

SEQ ID NO: 19986 - protein, 85 aa, unidentified
  REGION 1..85: note = Description of Unknown:cds_NC_005223.1_cds_NP_941983.1_1 target sequence
TMALSQPSHTYDIVTIMVRCFLVIKKVTSGDSMKIEKNFETLVQKTGCTANGFQGYYICLIGSSSEPLYVPTLDDYRSAEVLSRM

SEQ ID NO: 19987 - protein, 85 aa, unidentified
  REGION 1..85: note = Description of Unknown:cds_NC_005223.1_cds_NP_941983.1_1 target sequence
AFAPHGEDHDIEKNAVSALRIAGKVTGKAPSTESSDTVQGIAFSGSPLYTSTGVLTAKDDPVYVWAPGIIMEGNHSVCEKKTLPL

SEQ ID NO: 19988 - protein, 85 aa, unidentified
  REGION 1..85: note = Description of Unknown:cds_NC_005223.1_cds_NP_941983.1_1 target sequence
TWTGFIPLPGEIEKTTQCTVFCTLAGPGADCEAYSETGIFNISSPTCLINRVQRFRGAEQQIKFVCQRVDMDITVYCNGVKKVIL

SEQ ID NO: 19989 - protein, 85 aa, unidentified
  REGION 1..85: note = Description of Unknown:cds_NC_005223.1_cds_NP_941983.1_1 target sequence
TKTLVIGQCIYTFTSIFSMIPGIAHSLAVELCVPGLHGWATVLLLLTFCFGWVLIPTITMILLKILIAFAYLCSKYNTDSKFRIL

SEQ ID NO: 19990 - protein, 85 aa, unidentified
  REGION 1..85: note = Description of Unknown:cds_NC_005223.1_cds_NP_941983.1_1 target sequence
VEKVKKEYQKTMGSMVCEVCQYECETAKELESHRKSCSIGSCPYCLNPSEATPSALQAHFKVCKLTSRFQENLKKSLTMYEPMQG

SEQ ID NO: 19991 - protein, 85 aa, unidentified
  REGION 1..85: note = Description of Unknown:cds_NC_005223.1_cds_NP_941983.1_1 target sequence
CYRTLSLFRYRSRFFVGLVWCMLLVLELIVWAASAETQNLNDGWTDTAHGSGIIPMKADLELDFSLPSSASYTYRRQLQNPANEQ

SEQ ID NO: 19992 - protein, 85 aa, unidentified
  REGION 1..85: note = Description of Unknown:cds_NC_005223.1_cds_NP_941983.1_1 target sequence
EKIPFHLQISKQVIHAEIQHLGHWMDATFNLKTAFHCYGSCEKYAYPWQTAGCFVEKDYEYETGWGCNPPDCPGVGTGCTACGVY

SEQ ID NO: 19993 - protein, 85 aa, unidentified
  REGION 1..85: note = Description of Unknown:cds_NC_005223.1_cds_NP_941983.1_1 target sequence
LDKLKSVGKVFKIVSLRYTRKVCIQLGTGQTCKTVDSNDCLITTSVKVCLIGTISKFQPSDTLLFLGPLQQGGLIFKQWCTTTCQ

SEQ ID NO: 19994 - protein, 85 aa, unidentified
  REGION 1..85: note = Description of Unknown:cds_NC_005223.1_cds_NP_941983.1_1 target sequence
FGDPGDIMSTPTGMKCPELNGSFRKKCAFATTPVCQFDGNTISGYKRMVATKDSFQSFNVTEPHISTSALEWIDLDSSLRDHINV

SEQ ID NO: 19995 - protein, 85 aa, unidentified
  REGION 1..85: note = Description of Unknown:cds_NC_005223.1_cds_NP_941983.1_1 target sequence
IVSRDLSFQDLSETPCQVDLTTSATDGAWGSGVGFNLVCTVSLTECSAFLTSIKACHAAMCYGSTTTNLVRGQNTIHVVGKGGHS

SEQ ID NO: 19996 - protein, 85 aa, unidentified
  REGION 1..85: note = Description of Unknown:cds_NC_005223.1_cds_NP_941983.1_1 target sequence
GSKFMCCHDTKCSSTGLVAAAPHLDRVTGFNQADSDKIFDDGAPECGMSCWFKKLGEWVLGVLNGNWMVVAVLIALLILSIFLFA

SEQ ID NO: 19997 - protein, 85 aa, unidentified
  REGION 1..85: note = Description of Unknown:cds_NZ_WFIY01000004.1_cds_WP_155862627.1_407 target sequence
ISILILIISLALSSLVFFIKEKKSAFILSIIAIGINSFFLLRRGLFENFFVGTDIGYFGLTVNDLNYSFLVVILAVTIVTTVYSL

SEQ ID NO: 19998 - protein, 85 aa, unidentified
  REGION 1..85: note = Description of Unknown:cds_NZ_WFIY01000004.1_cds_WP_155862627.1_407 target sequence
RYMEEKIGEGSWGLYYGLYSLFAVSMLYISISTNLLEIYVFLEISLVTSFLLILLYGYGDRRRISLMYFIWTHIGTILLLASIII

SEQ ID NO: 19999 - protein, 85 aa, unidentified
  REGION 1..85: note = Description of Unknown:cds_NZ_WFIY01000004.1_cds_WP_155862627.1_407 target sequence
IGLEFHTMDIYSSYGVINVLSSIPFAELVLLLGVIGMLVKSAQAGFNIWLPYAHGEAPTPISVLLSPNLVGLGVYVIIIYFYLFP

SEQ ID NO: 20000 - protein, 85 aa, unidentified
  REGION 1..85: note = Description of Unknown:cds_NZ_WFIY01000004.1_cds_WP_155862627.1_407 target sequence
TFSYLAPIFIGWAVITMIYGGINALAQKDFKRFLAYSTVSQMGYMLLGSSTAYILGLGQNVNQLPIGILSAVLIYASHGFGKAIL

SEQ ID NO: 20001 - protein, 85 aa, unidentified
  REGION 1..85: note = Description of Unknown:cds_NZ_WFIY01000004.1_cds_WP_155862627.1_407 target sequence
FMSAGASITELNTRNIEELGGLYLSSPLHTTLSFIGLLNILGLPPTIGFLSEVLLLLAVGQLIHVSSPLLFILLVIGVTIGVGLS

SEQ ID NO: 20002 - protein, 85 aa, unidentified
  REGION 1..85: note = Description of Unknown:cds_NZ_WFIY01000004.1_cds_WP_155862627.1_407 target sequence
SGYSAYLFKKVYAGKKEIKDIDKIAEYSIPMLLLAVISGVFFFYPSLLSISFNNFIQTLPSSAHICLFLIVILPALGSLISLISG

SEQ ID NO: 20003 - protein, 85 aa, unidentified
  REGION 1..85: note = Description of Unknown:cds_NZ_WFIY01000004.1_cds_WP_155862627.1_407 target sequence
KLNQDVKGAIVSTLIGLSMILSIYNLIYTVITPHPNFFVPAYTFTAFEYFQFSSSLLQAILAVFVSTLSFFIAIYSIGYMKEDKV

SEQ ID NO: 20004 - protein, 85 aa, unidentified
  REGION 1..85: note = Description of Unknown:cds_NZ_WFIY01000004.1_cds_WP_155862627.1_407 target sequence
LRRYWGFFGFFISSMLSVVLGDNILVFLAGWEGTSLASYGLISYWLDDNERNVVGDFKRFVLGIEYLSRPTTSGIRALVFTRIAD

SEQ ID NO: 20005 - protein, 85 aa, unidentified
  REGION 1..85: note = Description of Unknown:cds_NZ_WFIY01000004.1_cds_WP_155862627.1_407 target sequence
IGMITVLGYLLFLTSQSTLSGITVIYPVLHSSIQGLFSELPSLLILPYSVIFLILLYLGGLSKSAQFPFTQWLVTAMTGPTPVSA

SEQ ID NO: 20006 - protein, 85 aa, unidentified
  REGION 1..85: note = Description of Unknown:cds_NZ_WFIY01000004.1_cds_WP_155862627.1_407 target sequence
LIHAATMVNLGAIFTFLTYPFLIQGYSTSLEIFLEIIVGINIFTAIFTSLNALVSKEQKVILANSTADQISLMIFSSSLGGLLAI

SEQ ID NO: 20007 - protein, 85 aa, unidentified
  REGION 1..85: note = Description of Unknown:cds_NZ_WFIY01000004.1_cds_WP_155862627.1_407 target sequence
QLHNFALVYAGISIGLIQMIAHGIYKATLFMNAGSVIHYIESRYIGEYPNLYKKLKLVFVLQLFAALNLANVPLFIGFWAHSFIS

SEQ ID NO: 20008 - protein, 85 aa, unidentified
  REGION 1..85: note = Description of Unknown:cds_NZ_WFIY01000004.1_cds_WP_155862627.1_407 target sequence
YLTSYNSYIDMIYIVLEFAGAIYIIRYIARLFMYGSGEKEAEGHISPIMYVSPAILVISSIILSIEIFPFVSFIGKGFSVPSNVF

SEQ ID NO: 20009 - protein, 85 aa, unidentified
  REGION 1..85: note = Description of Unknown:cds_NZ_WFIY01000004.1_cds_WP_155862627.1_407 target sequence
IYNNIDFIVSLVGIAIAFIIYTGGMFNNKFLSPIINFFYYGWYIYPIMDIAGILSLKVSSGIFNYVETKGIDNSLNYKLPNGIIN

SEQ ID NO: 20010 - protein, 84 aa, unidentified
  REGION 1..84: note = Description of Unknown:cds_NZ_WFIY01000004.1_cds_WP_155862627.1_407 target sequence
GWYIYPIMDIAGILSLKVSSGIFNYVETKGIDNSLNYKLPNGIINYGGRLFNILQKGLLRDYLGYYVGGIILLIVIVIILMLGD

SEQ ID NO: 20011 - protein, 85 aa, unidentified
  REGION 1..85: note = Description of Unknown:cds_NZ_WFIY01000004.1_cds_WP_155862627.1_407 target sequence
LSIIAIGINSFFLLRRGLFENFFVGTDIGYFGLTVNDLNYSFLVVILAVTIVTTVYSLRYMEEKIGEGSWGLYYGLYSLFAVSML

SEQ ID NO: 20012 - protein, 85 aa, unidentified
  REGION 1..85: note = Description of Unknown:cds_NZ_WFIY01000004.1_cds_WP_155862627.1_407 target sequence
YISISTNLLEIYVFLEISLVTSFLLILLYGYGDRRRISLMYFIWTHIGTILLLASIIIIGLEFHTMDIYSSYGVINVLSSIPFAE

SEQ ID NO: 20013 - protein, 85 aa, unidentified
  REGION 1..85: note = Description of Unknown:cds_NZ_WFIY01000004.1_cds_WP_155862627.1_407 target sequence
LVLLLGVIGMLVKSAQAGFNIWLPYAHGEAPTPISVLLSPNLVGLGVYVIIIYFYLFPTFSYLAPIFIGWAVITMIYGGINALAQ

SEQ ID NO: 20014 - protein, 85 aa, unidentified
  REGION 1..85: note = Description of Unknown:cds_NZ_WFIY01000004.1_cds_WP_155862627.1_407 target sequence
KDFKRFLAYSTVSQMGYMLLGSSTAYILGLGQNVNQLPIGILSAVLIYASHGFGKAILFMSAGASITELNTRNIEELGGLYLSSP

SEQ ID NO: 20015 - protein, 85 aa, unidentified
  REGION 1..85: note = Description of Unknown:cds_NZ_WFIY01000004.1_cds_WP_155862627.1_407 target sequence
LHTTLSFIGLLNILGLPPTIGFLSEVLLLLAVGQLIHVSSPLLFILLVIGVTIGVGLSSGYSAYLFKKVYAGKKEIKDIDKIAEY

SEQ ID NO: 20016 - protein, 85 aa, unidentified
  REGION 1..85: note = Description of Unknown:cds_NZ_WFIY01000004.1_cds_WP_155862627.1_407 target sequence
SIPMLLLAVISGVFFFYPSLLSISFNNFIQTLPSSAHICLFLIVILPALGSLISLISGKLNQDVKGAIVSTLIGLSMILSIYNLI

SEQ ID NO: 20017 - protein, 85 aa, unidentified
  REGION 1..85: note = Description of Unknown:cds_NZ_WFIY01000004.1_cds_WP_155862627.1_407 target sequence
YTVITPHPNFFVPAYTFTAFEYFQFSSSLLQAILAVFVSTLSFFIAIYSIGYMKEDKVLRRYWGFFGFFISSMLSVVLGDNILVF

SEQ ID NO: 20018 - protein, 85 aa, unidentified
  REGION 1..85: note = Description of Unknown:cds_NZ_WFIY01000004.1_cds_WP_155862627.1_407 target sequence
LAGWEGTSLASYGLISYWLDDNERNVVGDFKRFVLGIEYLSRPTTSGIRALVFTRIADIGMITVLGYLLFLTSQSTLSGITVIYP

SEQ ID NO: 20019 - protein, 85 aa, unidentified
  REGION 1..85: note = Description of Unknown:cds_NZ_WFIY01000004.1_cds_WP_155862627.1_407 target sequence
VLHSSIQGLFSELPSLLILPYSVIFLILLYLGGLSKSAQFPFTQWLVTAMTGPTPVSALIHAATMVNLGAIFTFLTYPFLIQGYS

SEQ ID NO: 20020 - protein, 85 aa, unidentified
  REGION 1..85: note = Description of Unknown:cds_NZ_WFIY01000004.1_cds_WP_155862627.1_407 target sequence
TSLEIFLEIIVGINIFTAIFTSLNALVSKEQKVILANSTADQISLMIFSSSLGGLLAIQLHNFALVYAGISIGLIQMIAHGIYKA

SEQ ID NO: 20021 - protein, 85 aa, unidentified
  REGION 1..85: note = Description of Unknown:cds_NZ_WFIY01000004.1_cds_WP_155862627.1_407 target sequence
TLFMNAGSVIHYIESRYIGEYPNLYKKLKLVFVLQLFAALNLANVPLFIGFWAHSFISYLTSYNSYIDMIYIVLEFAGAIYIIRY

SEQ ID NO: 20022 - protein, 85 aa, unidentified
  REGION 1..85: note = Description of Unknown:cds_NZ_WFIY01000004.1_cds_WP_155862627.1_407 target sequence
IARLFMYGSGEKEAEGHISPIMYVSPAILVISSIILSIEIFPFVSFIGKGFSVPSNVFIYNNIDFIVSLVGIAIAFIIYTGGMFN

SEQ ID NO: 20023 - protein, 85 aa, unidentified
  REGION 1..85: note = Description of Unknown:cds_NZ_WFIY01000004.1_cds_WP_155862627.1_407 target sequence
NKFLSPIINFFYYGWYIYPIMDIAGILSLKVSSGIFNYVETKGIDNSLNYKLPNGIINYGGRLFNILQKGLLRDYLGYYVGGIIL

SEQ ID NO: 20024 - protein, 85 aa, unidentified
  REGION 1..85: note = Description of Unknown:cds_NC_003467.2_cds_NP_604472.1_2 target sequence
EGWYLVVLGVCYTLTLAMPKTIYELKMECPHTVGLGQGYIIGSTELGLISIEAASDIKLESSCNFDLHTTSMAQKSFTQVEWRKK

SEQ ID NO: 20025 - protein, 85 aa, unidentified
  REGION 1..85: note = Description of Unknown:cds_NC_003467.2_cds_NP_604472.1_2 target sequence
SDTTDTTNAASTTFEAQTKTVNLRGTCILAPELYDTLKKVKKTVLCYDLTCNQTHCQPTVYLIAPVLTCMSIRSCMASVFTSRIQ

SEQ ID NO: 20026 - protein, 85 aa, unidentified
  REGION 1..85: note = Description of Unknown:cds_NC_003467.2_cds_NP_604472.1_2 target sequence
VIYEKTHCVTGQLIEGQCFNPAHTLTLSQPAHTYDTVTLPISCFFTPKKSEQLKVIKTFEGILTKTGCTENALQGYYVCFLGSHS

SEQ ID NO: 20027 - protein, 85 aa, unidentified
  REGION 1..85: note = Description of Unknown:cds_NC_003467.2_cds_NP_604472.1_2 target sequence
EPLIVPSLEDIRSAEVVSRMLVHPRGEDHDAIQNSQSHLRIVGPITAKVPSTSSTDTLKGTAFAGVPMYSSLSTLVRNADPEFVF

SEQ ID NO: 20028 - protein, 85 aa, unidentified
  REGION 1..85: note = Description of Unknown:cds_NC_003467.2_cds_NP_604472.1_2 target sequence
SPGIVPESNHSTCDKKTVPITWTGYLPISGEMEKVTGCTVFCTLAGPGASCEAYSENGIFNISSPTCLVNKVQRFRGSEQKINFI

SEQ ID NO: 20029 - protein, 85 aa, unidentified
  REGION 1..85: note = Description of Unknown:cds_NC_003467.2_cds_NP_604472.1_2 target sequence
CQRVDQDVVVYCNGQKKVILTKTLVIGQCIYTFTSLFSLMPDVAHSLAVELCVPGLHGWATVMLLSTFCFGWVLIPAVTLIILKC

SEQ ID NO: 20030 - protein, 85 aa, unidentified
  REGION 1..85: note = Description of Unknown:cds_NC_003467.2_cds_NP_604472.1_2 target sequence
LRVLTFSCSHYTNESKFKFILEKVKIEYQKTMGSMVCDVCHHECETAKELESHRQSCINGQCPYCMTITEATESALQAHYSICKL

SEQ ID NO: 20031 - protein, 85 aa, unidentified
  REGION 1..85: note = Description of Unknown:cds_NC_003467.2_cds_NP_604472.1_2 target sequence
TGRFQEALKKSLKKPEVKKGCYRTLGVFRYKSRCYVGLVWCLLLTCEIVIWAASAETPLMESGWSDTAHGVGEIPMKTDLELDFS

SEQ ID NO: 20032 - protein, 85 aa, unidentified
  REGION 1..85: note = Description of Unknown:cds_NC_003467.2_cds_NP_604472.1_2 target sequence
LPSSSSYSYRRKLTNPANKEESIPFHFQMEKQVIHAEIQPLGHWMDATFNIKTAFHCYGACQKYSYPWQTSKCFFEKDYQYETGW

SEQ ID NO: 20033 - protein, 85 aa, unidentified
  REGION 1..85: note = Description of Unknown:cds_NC_003467.2_cds_NP_604472.1_2 target sequence
GCNPGDCPGVGTGCTACGVYLDKLKSVGKAYKIISLKYTRKVCIQLGTEQTCKHIDANDCLVTPSVKVCIVGTVSKLQPSDTLLF

SEQ ID NO: 20034 - protein, 85 aa, unidentified
  REGION 1..85: note = Description of Unknown:cds_NC_003467.2_cds_NP_604472.1_2 target sequence
LGPLEQGGIILKQWCTTSCAFGDPGDIMSTPSGMRCPEHTGSFRKICGFATTPVCEYQGNTISGYKRMMATKDSFQSFNLTEPHI

SEQ ID NO: 20035 - protein, 85 aa, unidentified
  REGION 1..85: note = Description of Unknown:cds_NC_003467.2_cds_NP_604472.1_2 target sequence
TTNKLEWIDPDGNTRDHVNLVLNRDVSFQDLSDNPCKVDLHTQAIEGAWGSGVGFTLTCTVGLTECPSFMTSIKACDLAMCYGST

SEQ ID NO: 20036 - protein, 85 aa, unidentified
  REGION 1..85: note = Description of Unknown:cds_NC_003467.2_cds_NP_604472.1_2 target sequence
VTNLARGSNTVKVVGKGGHSGSSFKCCHDTDCSSEGLLASAPHLERVTGFNQIDSDKVYDDGAPPCTFKCWFTKSGEWLLGILNG

SEQ ID NO: 20037 - protein, 84 aa, unidentified
  REGION 1..84: note = Description of Unknown:cds_NC_003467.2_cds_NP_604472.1_2 target sequence
SEGLLASAPHLERVTGFNQIDSDKVYDDGAPPCTFKCWFTKSGEWLLGILNGNWIVVVVLVVILILSIIMFSVLCPRRGHKKTV

SEQ ID NO: 20038 - protein, 85 aa, unidentified
  REGION 1..85: note = Description of Unknown:cds_NC_003467.2_cds_NP_604472.1_2 target sequence
ECPHTVGLGQGYIIGSTELGLISIEAASDIKLESSCNFDLHTTSMAQKSFTQVEWRKKSDTTDTTNAASTTFEAQTKTVNLRGTC

SEQ ID NO: 20039 - protein, 85 aa, unidentified
  REGION 1..85: note = Description of Unknown:cds_NC_003467.2_cds_NP_604472.1_2 target sequence
ILAPELYDTLKKVKKTVLCYDLTCNQTHCQPTVYLIAPVLTCMSIRSCMASVFTSRIQVIYEKTHCVTGQLIEGQCFNPAHTLTL

SEQ ID NO: 20040 - protein, 85 aa, unidentified
  REGION 1..85: note = Description of Unknown:cds_NC_003467.2_cds_NP_604472.1_2 target sequence
SQPAHTYDTVTLPISCFFTPKKSEQLKVIKTFEGILTKTGCTENALQGYYVCFLGSHSEPLIVPSLEDIRSAEVVSRMLVHPRGE

SEQ ID NO: 20041 - protein, 85 aa, unidentified
  REGION 1..85: note = Description of Unknown:cds_NC_003467.2_cds_NP_604472.1_2 target sequence
DHDAIQNSQSHLRIVGPITAKVPSTSSTDTLKGTAFAGVPMYSSLSTLVRNADPEFVFSPGIVPESNHSTCDKKTVPITWTGYLP

SEQ ID NO: 20042 - protein, 85 aa, unidentified
  REGION 1..85: note = Description of Unknown:cds_NC_003467.2_cds_NP_604472.1_2 target sequence
ISGEMEKVTGCTVFCTLAGPGASCEAYSENGIFNISSPTCLVNKVQRFRGSEQKINFICQRVDQDVVVYCNGQKKVILTKTLVIG

SEQ ID NO: 20043 - protein, 85 aa, unidentified
  REGION 1..85: note = Description of Unknown:cds_NC_003467.2_cds_NP_604472.1_2 target sequence
QCIYTFTSLFSLMPDVAHSLAVELCVPGLHGWATVMLLSTFCFGWVLIPAVTLIILKCLRVLTFSCSHYTNESKFKFILEKVKIE

SEQ ID NO: 20044 - protein, 85 aa, unidentified
  REGION 1..85: note = Description of Unknown:cds_NC_003467.2_cds_NP_604472.1_2 target sequence
YQKTMGSMVCDVCHHECETAKELESHRQSCINGQCPYCMTITEATESALQAHYSICKLTGRFQEALKKSLKKPEVKKGCYRTLGV

SEQ ID NO: 20045 - protein, 85 aa, unidentified
  REGION 1..85: note = Description of Unknown:cds_NC_003467.2_cds_NP_604472.1_2 target sequence
FRYKSRCYVGLVWCLLLTCEIVIWAASAETPLMESGWSDTAHGVGEIPMKTDLELDFSLPSSSSYSYRRKLTNPANKEESIPFHF

SEQ ID NO: 20046 - protein, 85 aa, unidentified
  REGION 1..85: note = Description of Unknown:cds_NC_003467.2_cds_NP_604472.1_2 target sequence
QMEKQVIHAEIQPLGHWMDATFNIKTAFHCYGACQKYSYPWQTSKCFFEKDYQYETGWGCNPGDCPGVGTGCTACGVYLDKLKSV

SEQ ID NO: 20047 - protein, 85 aa, unidentified
  REGION 1..85: note = Description of Unknown:cds_NC_003467.2_cds_NP_604472.1_2 target sequence
GKAYKIISLKYTRKVCIQLGTEQTCKHIDANDCLVTPSVKVCIVGTVSKLQPSDTLLFLGPLEQGGIILKQWCTTSCAFGDPGDI

SEQ ID NO: 20048 - protein, 85 aa, unidentified
  REGION 1..85: note = Description of Unknown:cds_NC_003467.2_cds_NP_604472.1_2 target sequence
MSTPSGMRCPEHTGSFRKICGFATTPVCEYQGNTISGYKRMMATKDSFQSFNLTEPHITTNKLEWIDPDGNTRDHVNLVLNRDVS

SEQ ID NO: 20049 - protein, 85 aa, unidentified
  REGION 1..85: note = Description of Unknown:cds_NC_003467.2_cds_NP_604472.1_2 target sequence
FQDLSDNPCKVDLHTQAIEGAWGSGVGFTLTCTVGLTECPSFMTSIKACDLAMCYGSTVTNLARGSNTVKVVGKGGHSGSSFKCC

SEQ ID NO: 20050 - protein, 85 aa, unidentified
  REGION 1..85: note = Description of Unknown:cds_NC_003467.2_cds_NP_604472.1_2 target sequence
HDTDCSSEGLLASAPHLERVTGFNQIDSDKVYDDGAPPCTFKCWFTKSGEWLLGILNGNWIVVVVLVVILILSIIMFSVLCPRRG

SEQ ID NO: 20051 - protein, 85 aa, unidentified
  REGION 1..85: note = Description of Unknown:cds_NZ_WFIY01000004.1_cds_WP_155863683.1_1549 target sequence
NSRFSEFISKKWYIVLIIWIVVLAISAPFSSLFFKSVSYQINISTPGSTSAQAENIVSKYFHLQGASGANAILIIEGNVTPYSLF

SEQ ID NO: 20052 - protein, 85 aa, unidentified
  REGION 1..85: note = Description of Unknown:cds_NZ_WFIY01000004.1_cds_WP_155863683.1_1549 target sequence
LANLTSYGNITIISYYSLEKSLLNTTLSKLQNSTNSLYIKILEIKSGEIEAENNLSCKYIELNNTIVKLEELNCGTKKIEVAFIN

SEQ ID NO: 20053 - protein, 85 aa, unidentified
  REGION 1..85: note = Description of Unknown:cds_NZ_WFIY01000004.1_cds_WP_155863683.1_1549 target sequence
VSNEINETAIRLYQLHQGMLNNLSTFCKIKEGEIEINSTAYNVSLFLYGYTSLFLKEFLEIYNETHNFTYSSEKAFEEVSKLINN

SEQ ID NO: 20054 - protein, 85 aa, unidentified
  REGION 1..85: note = Description of Unknown:cds_NZ_WFIY01000004.1_cds_WP_155863683.1_1549 target sequence
ENESKFFYAFYKFWLENNYTNFVERAQISIKNASLLIPNNSFILSLENYINISNFEENLPYYEFTVNYINETIHVPLELAEELYY

SEQ ID NO: 20055 - protein, 85 aa, unidentified
  REGION 1..85: note = Description of Unknown:cds_NZ_WFIY01000004.1_cds_WP_155863683.1_1549 target sequence
NQPKDVLLTIYSEKTGLNETFLQKVLNQTNFKELAYDLILSKANVTERQFISAVYYNLSKSPYEFAVDYVSSQYNVSPTLVNEIS

SEQ ID NO: 20056 - protein, 85 aa, unidentified
  REGION 1..85: note = Description of Unknown:cds_NZ_WFIY01000004.1_cds_WP_155863683.1_1549 target sequence
NFTEYSQYVNFVSLQASNESKLPQWFFQQLLYYHNISNLTAYLILPKLSKLQPILNASNITPKEFLIYLQTATNDSIYNLTAKLI

SEQ ID NO: 20057 - protein, 85 aa, unidentified
  REGION 1..85: note = Description of Unknown:cds_NZ_WFIY01000004.1_cds_WP_155863683.1_1549 target sequence
SNYVNFTPIICVNRSLLQEVLSRNESVSSLVSELIRDNEFPVTPIPNITDALYYKNYYLIIMKGNFTINEAKDFQNYVKSIIPLT

SEQ ID NO: 20058 - protein, 85 aa, unidentified
  REGION 1..85: note = Description of Unknown:cds_NZ_WFIY01000004.1_cds_WP_155863683.1_1549 target sequence
SYLTGPKPIDQQLRGLANSAFAIAIPVGIALAIVITGIYFRSFVAAFVPLGIYLSAFLVSSVLIWLIVIKLLGITVDFLTPSQVL

SEQ ID NO: 20059 - protein, 85 aa, unidentified
  REGION 1..85: note = Description of Unknown:cds_NZ_WFIY01000004.1_cds_WP_155863683.1_1549 target sequence
LLALGLGTDYVVFISSRYIEERRKGLTKDDAVKEAVRWGGRAVTLTALVVMLSFLFLYVYNVPLVSDTSISEMLAVFVVWLSATT

SEQ ID NO: 20060 - protein, 85 aa, unidentified
  REGION 1..85: note = Description of Unknown:cds_NZ_WFIY01000004.1_cds_WP_155863683.1_1549 target sequence
LFTSILKAAGDKLFFPAKFNRNNNNKSYSVSRPVTKVGIFVALVVIFSIIALSMPLSTDILGLMPPSQASEGVNLLSQEFTTSNV

SEQ ID NO: 20061 - protein, 85 aa, unidentified
  REGION 1..85: note = Description of Unknown:cds_NZ_WFIY01000004.1_cds_WP_155863683.1_1549 target sequence
FPIYVVVPISTFNQTTYDYAVHIYKELSSIPGVTAVESPVSPYGGLIPYCKLSEYNYSEYISHGYMLFVVNQKYPPFSTQAFGVV

SEQ ID NO: 20062 - protein, 85 aa, unidentified
  REGION 1..85: note = Description of Unknown:cds_NZ_WFIY01000004.1_cds_WP_155863683.1_1549 target sequence
ENIESLHVGYVGGGPVDLYNILHFIETDFLEIFLLITITMYVLLVIMTRSFSVSGVVIFTIMSAVGITLGLERLIFVNILGYGIF

SEQ ID NO: 20063 - protein, 85 aa, unidentified
  REGION 1..85: note = Description of Unknown:cds_NZ_WFIY01000004.1_cds_WP_155863683.1_1549 target sequence
AVVPLFLVAIIIGIGMDYNIFLVARIHEEIEKGEDMETAVGKSVKAIGKTIIFLGLIFAGTMGSLMLVKAAILQEIGFALSVAAI

SEQ ID NO: 20064 - protein, 84 aa, unidentified
  REGION 1..84: note = Description of Unknown:cds_NZ_WFIY01000004.1_cds_WP_155863683.1_1549 target sequence
KGEDMETAVGKSVKAIGKTIIFLGLIFAGTMGSLMLVKAAILQEIGFALSVAAILETSLLWYYLGPSLLVLLYRKFKIRPKMLI

SEQ ID NO: 20065 - protein, 85 aa, unidentified
  REGION 1..85: note = Description of Unknown:cds_NZ_WFIY01000004.1_cds_WP_155863683.1_1549 target sequence
PFSSLFFKSVSYQINISTPGSTSAQAENIVSKYFHLQGASGANAILIIEGNVTPYSLFLANLTSYGNITIISYYSLEKSLLNTTL

SEQ ID NO: 20066 - protein, 85 aa, unidentified
  REGION 1..85: note = Description of Unknown:cds_NZ_WFIY01000004.1_cds_WP_155863683.1_1549 target sequence
SKLQNSTNSLYIKILEIKSGEIEAENNLSCKYIELNNTIVKLEELNCGTKKIEVAFINVSNEINETAIRLYQLHQGMLNNLSTFC

SEQ ID NO: 20067 - protein, 85 aa, unidentified
  REGION 1..85: note = Description of Unknown:cds_NZ_WFIY01000004.1_cds_WP_155863683.1_1549 target sequence
KIKEGEIEINSTAYNVSLFLYGYTSLFLKEFLEIYNETHNFTYSSEKAFEEVSKLINNENESKFFYAFYKFWLENNYTNFVERAQ

SEQ ID NO: 20068 - protein, 85 aa, unidentified
  REGION 1..85: note = Description of Unknown:cds_NZ_WFIY01000004.1_cds_WP_155863683.1_1549 target sequence
ISIKNASLLIPNNSFILSLENYINISNFEENLPYYEFTVNYINETIHVPLELAEELYYNQPKDVLLTIYSEKTGLNETFLQKVLN

SEQ ID NO: 20069 - protein, 85 aa, unidentified
  REGION 1..85: note = Description of Unknown:cds_NZ_WFIY01000004.1_cds_WP_155863683.1_1549 target sequence
QTNFKELAYDLILSKANVTERQFISAVYYNLSKSPYEFAVDYVSSQYNVSPTLVNEISNFTEYSQYVNFVSLQASNESKLPQWFF

SEQ ID NO: 20070 - protein, 85 aa, unidentified
  REGION 1..85: note = Description of Unknown:cds_NZ_WFIY01000004.1_cds_WP_155863683.1_1549 target sequence
QQLLYYHNISNLTAYLILPKLSKLQPILNASNITPKEFLIYLQTATNDSIYNLTAKLISNYVNFTPIICVNRSLLQEVLSRNESV

SEQ ID NO: 20071 - protein, 85 aa, unidentified
  REGION 1..85: note = Description of Unknown:cds_NZ_WFIY01000004.1_cds_WP_155863683.1_1549 target sequence
SSLVSELIRDNEFPVTPIPNITDALYYKNYYLIIMKGNFTINEAKDFQNYVKSIIPLTSYLTGPKPIDQQLRGLANSAFAIAIPV

SEQ ID NO: 20072 - protein, 85 aa, unidentified
  REGION 1..85: note = Description of Unknown:cds_NZ_WFIY01000004.1_cds_WP_155863683.1_1549 target sequence
GIALAIVITGIYFRSFVAAFVPLGIYLSAFLVSSVLIWLIVIKLLGITVDFLTPSQVLLLALGLGTDYVVFISSRYIEERRKGLT

SEQ ID NO: 20073 - protein, 85 aa, unidentified
  REGION 1..85: note = Description of Unknown:cds_NZ_WFIY01000004.1_cds_WP_155863683.1_1549 target sequence
KDDAVKEAVRWGGRAVTLTALVVMLSFLFLYVYNVPLVSDTSISEMLAVFVVWLSATTLFTSILKAAGDKLFFPAKFNRNNNNKS

SEQ ID NO: 20074 - protein, 85 aa, unidentified
  REGION 1..85: note = Description of Unknown:cds_NZ_WFIY01000004.1_cds_WP_155863683.1_1549 target sequence
YSVSRPVTKVGIFVALVVIFSIIALSMPLSTDILGLMPPSQASEGVNLLSQEFTTSNVFPIYVVVPISTFNQTTYDYAVHIYKEL

SEQ ID NO: 20075 - protein, 85 aa, unidentified
  REGION 1..85: note = Description of Unknown:cds_NZ_WFIY01000004.1_cds_WP_155863683.1_1549 target sequence
SSIPGVTAVESPVSPYGGLIPYCKLSEYNYSEYISHGYMLFVVNQKYPPFSTQAFGVVENIESLHVGYVGGGPVDLYNILHFIET

SEQ ID NO: 20076 - protein, 85 aa, unidentified
  REGION 1..85: note = Description of Unknown:cds_NZ_WFIY01000004.1_cds_WP_155863683.1_1549 target sequence
DFLEIFLLITITMYVLLVIMTRSFSVSGVVIFTIMSAVGITLGLERLIFVNILGYGIFAVVPLFLVAIIIGIGMDYNIFLVARIH

SEQ ID NO: 20077 - protein, 85 aa, unidentified
  REGION 1..85: note = Description of Unknown:cds_NZ_WFIY01000004.1_cds_WP_155863683.1_1549 target sequence
EEIEKGEDMETAVGKSVKAIGKTIIFLGLIFAGTMGSLMLVKAAILQEIGFALSVAAILETSLLWYYLGPSLLVLLYRKFKIRPK

SEQ ID NO: 20078 - protein, 85 aa, unidentified
  REGION 1..85: note = Description of Unknown:cds_NC_043127.1_cds_YP_009664870.1_2 target sequence
KSILLILLLEQVRSKATNEIKLECPHDQRVETGFSHGFTDLSPILYTKGLFTKHLENNCPFDISIINRLVRDVRISTWQAKSTNT

SEQ ID NO: 20079 - protein, 85 aa, unidentified
  REGION 1..85: note = Description of Unknown:cds_NC_043127.1_cds_YP_009664870.1_2 target sequence
DATVASATSFETKDTDDKLAGVCGFFDDITKPKQGQRKAIICYDLSCNQTHCLPTLHLIFPQQFCQSLKQCSINAYDHKILITIS

SEQ ID NO: 20080 - protein, 85 aa, unidentified
  REGION 1..85: note = Description of Unknown:cds_NC_043127.1_cds_YP_009664870.1_2 target sequence
LSFCPEGLIIGGNCIVPVLAQSQLLHNHMTYNIKVTCFFEYSMARESLDNKFLEEMNRLVLGRNCEKTEYLGGYVCFLAGYGTAI

SEQ ID NO: 20081 - protein, 85 aa, unidentified
  REGION 1..85: note = Description of Unknown:cds_NC_043127.1_cds_YP_009664870.1_2 target sequence
HVPYDNTYLSGAVVNSMKANLHGEDHDRLKLGDTSAVIAGNLKFVIDSTAPEKSYQGECFTGHMGYTSLYFYPVRSKGKYVTILT

SEQ ID NO: 20082 - protein, 85 aa, unidentified
  REGION 1..85: note = Description of Unknown:cds_NC_043127.1_cds_YP_009664870.1_2 target sequence
KGVIPVINKTTCMPKIVPLVWTGMVEMRGIEEKLEACTMHCIMVGNGATCEAFSATGIFDIKSTTCQIGKTHKYRRTEDQITFTC

SEQ ID NO: 20083 - protein, 85 aa, unidentified
  REGION 1..85: note = Description of Unknown:cds_NC_043127.1_cds_YP_009664870.1_2 target sequence
QDLNKDISVICNGENITVPVKSLIVGQCIYTITSIFSIFPATAHSIATEMCVQGIHGWLTIIIFFTFCFGWLLIPILTCLIINTI

SEQ ID NO: 20084 - protein, 85 aa, unidentified
  REGION 1..85: note = Description of Unknown:cds_NC_043127.1_cds_YP_009664870.1_2 target sequence
AYSLITLAYFKNGARLGNLIKRMKSEFQRTIGNTTCNICLRECESESEYKSHEELCKNGSCPYCMKDIGVSQVLLNEHYNACMLI

SEQ ID NO: 20085 - protein, 85 aa, unidentified
  REGION 1..85: note = Description of Unknown:cds_NC_043127.1_cds_YP_009664870.1_2 target sequence
DRYEKRLTHTLNQTPLYSRKVRKIQSFRYRNRCFILTVWIILLTVESLIWASSAEDIKPAPKWQNTAHGIGTIKLNSDYELDFSV

SEQ ID NO: 20086 - protein, 85 aa, unidentified
  REGION 1..85: note = Description of Unknown:cds_NC_043127.1_cds_YP_009664870.1_2 target sequence
VAGSEFTHKRMLQSPESGKKNIPFTVYLSEQLITSTVQILGNWMDAEINVKSVFHCYGTCKKYSYPWQSSPCHKEVDFEFQSSWG

SEQ ID NO: 20087 - protein, 85 aa, unidentified
  REGION 1..85: note = Description of Unknown:cds_NC_043127.1_cds_YP_009664870.1_2 target sequence
CNPISCPGINSGCTACGTYVDKLKTIAKAYRIITVKYSRKVCYQIGTKKACKTLESNDCLVSNGVKICAIGTISTLQTGMTLVFF

SEQ ID NO: 20088 - protein, 85 aa, unidentified
  REGION 1..85: note = Description of Unknown:cds_NC_043127.1_cds_YP_009664870.1_2 target sequence
GPLNGGALLIKDWCISSCKFGDPGDIMQISNNITCPSFDGTMQRVCRFGLEPMCSYSGNKISGVKRVLETKDSYLSVNLTKPKLV

SEQ ID NO: 20089 - protein, 85 aa, unidentified
  REGION 1..85: note = Description of Unknown:cds_NC_043127.1_cds_YP_009664870.1_2 target sequence
GSTLLWNSLDSSIKDHINIVVSNDIDFEDLAETPCKVTIKNLKIEGAWGSGIGIKLHCEVSLSECSEYLTTIKVCDNAICYGGNV

SEQ ID NO: 20090 - protein, 85 aa, unidentified
  REGION 1..85: note = Description of Unknown:cds_NC_043127.1_cds_YP_009664870.1_2 target sequence
AHLSRGLNTVIIKGAGGHSGSSFKCCHETSCSDIGFKAEAPHLARIVDDGITTSMSYSDGAPEAGIVSWIYKVAEWIKGMFNGNW

SEQ ID NO: 20091 - protein, 84 aa, unidentified
  REGION 1..84: note = Description of Unknown:cds_NC_043127.1_cds_YP_009664870.1_2 target sequence
TSCSDIGFKAEAPHLARIVDDGITTSMSYSDGAPEAGIVSWIYKVAEWIKGMFNGNWFVLIIMILFLIISIVLLIFLCPVKKYK

SEQ ID NO: 20092 - protein, 85 aa, unidentified
  REGION 1..85: note = Description of Unknown:cds_NC_043127.1_cds_YP_009664870.1_2 target sequence
QRVETGFSHGFTDLSPILYTKGLFTKHLENNCPFDISIINRLVRDVRISTWQAKSTNTDATVASATSFETKDTDDKLAGVCGFFD

SEQ ID NO: 20093 - protein, 85 aa, unidentified
  REGION 1..85: note = Description of Unknown:cds_NC_043127.1_cds_YP_009664870.1_2 target sequence
DITKPKQGQRKAIICYDLSCNQTHCLPTLHLIFPQQFCQSLKQCSINAYDHKILITISLSFCPEGLIIGGNCIVPVLAQSQLLHN

SEQ ID NO: 20094 - protein, 85 aa, unidentified
  REGION 1..85: note = Description of Unknown:cds_NC_043127.1_cds_YP_009664870.1_2 target sequence
HMTYNIKVTCFFEYSMARESLDNKFLEEMNRLVLGRNCEKTEYLGGYVCFLAGYGTAIHVPYDNTYLSGAVVNSMKANLHGEDHD

SEQ ID NO: 20095 - protein, 85 aa, unidentified
  REGION 1..85: note = Description of Unknown:cds_NC_043127.1_cds_YP_009664870.1_2 target sequence
RLKLGDTSAVIAGNLKFVIDSTAPEKSYQGECFTGHMGYTSLYFYPVRSKGKYVTILTKGVIPVINKTTCMPKIVPLVWTGMVEM

SEQ ID NO: 20096 - protein, 85 aa, unidentified
  REGION 1..85: note = Description of Unknown:cds_NC_043127.1_cds_YP_009664870.1_2 target sequence
RGIEEKLEACTMHCIMVGNGATCEAFSATGIFDIKSTTCQIGKTHKYRRTEDQITFTCQDLNKDISVICNGENITVPVKSLIVGQ

SEQ ID NO: 20097 - protein, 85 aa, unidentified
  REGION 1..85: note = Description of Unknown:cds_NC_043127.1_cds_YP_009664870.1_2 target sequence
CIYTITSIFSIFPATAHSIATEMCVQGIHGWLTIIIFFTFCFGWLLIPILTCLIINTIAYSLITLAYFKNGARLGNLIKRMKSEF

SEQ ID NO: 20098 - protein, 85 aa, unidentified
  REGION 1..85: note = Description of Unknown:cds_NC_043127.1_cds_YP_009664870.1_2 target sequence
QRTIGNTTCNICLRECESESEYKSHEELCKNGSCPYCMKDIGVSQVLLNEHYNACMLIDRYEKRLTHTLNQTPLYSRKVRKIQSF

SEQ ID NO: 20099 - protein, 85 aa, unidentified
  REGION 1..85: note = Description of Unknown:cds_NC_043127.1_cds_YP_009664870.1_2 target sequence
RYRNRCFILTVWIILLTVESLIWASSAEDIKPAPKWQNTAHGIGTIKLNSDYELDFSVVAGSEFTHKRMLQSPESGKKNIPFTVY

SEQ ID NO: 20100 - protein, 85 aa, unidentified
  REGION 1..85: note = Description of Unknown:cds_NC_043127.1_cds_YP_009664870.1_2 target sequence
LSEQLITSTVQILGNWMDAEINVKSVFHCYGTCKKYSYPWQSSPCHKEVDFEFQSSWGCNPISCPGINSGCTACGTYVDKLKTIA

SEQ ID NO: 20101 - protein, 85 aa, unidentified
  REGION 1..85: note = Description of Unknown:cds_NC_043127.1_cds_YP_009664870.1_2 target sequence
KAYRIITVKYSRKVCYQIGTKKACKTLESNDCLVSNGVKICAIGTISTLQTGMTLVFFGPLNGGALLIKDWCISSCKFGDPGDIM

SEQ ID NO: 20102 - protein, 85 aa, unidentified
  REGION 1..85: note = Description of Unknown:cds_NC_043127.1_cds_YP_009664870.1_2 target sequence
QISNNITCPSFDGTMQRVCRFGLEPMCSYSGNKISGVKRVLETKDSYLSVNLTKPKLVGSTLLWNSLDSSIKDHINIVVSNDIDF

SEQ ID NO: 20103 - protein, 85 aa, unidentified
  REGION 1..85: note = Description of Unknown:cds_NC_043127.1_cds_YP_009664870.1_2 target sequence
EDLAETPCKVTIKNLKIEGAWGSGIGIKLHCEVSLSECSEYLTTIKVCDNAICYGGNVAHLSRGLNTVIIKGAGGHSGSSFKCCH

SEQ ID NO: 20104 - protein, 85 aa, unidentified
  REGION 1..85: note = Description of Unknown:cds_NC_043127.1_cds_YP_009664870.1_2 target sequence
ETSCSDIGFKAEAPHLARIVDDGITTSMSYSDGAPEAGIVSWIYKVAEWIKGMFNGNWFVLIIMILFLIISIVLLIFLCPVKKYK

SEQ ID NO: 20105 - protein, 85 aa, unidentified
  REGION 1..85: note = Description of Unknown:cds_NC_034393.1_cds_YP_009361839.1_2 target sequence
RLILWMLILGFTDQKSLLEIKFTCPHDTRFETGFGYGAVDLPSITEASDLIVPVETSCPFEFNLVRKQVTSVKMKWWERKSSVAA

SEQ ID NO: 20106 - protein, 85 aa, unidentified
  REGION 1..85: note = Description of Unknown:cds_NC_034393.1_cds_YP_009361839.1_2 target sequence
GTNADQNTYEEKEKDAGAIGICNIQHNDITSISQNRRGLMCLEYSCNLTHCMPALHVIIPHQICMNIRTCLLTWKSTKIDLIFER

SEQ ID NO: 20107 - protein, 85 aa, unidentified
  REGION 1..85: note = Description of Unknown:cds_NC_034393.1_cds_YP_009361839.1_2 target sequence
IFCPHGILVAGNCFQPYYGVTSPPPESERAELSTTCFLITTKQSKAEKNLPQLVTAFQSEITGNTCSPVNMAGYYSCFIKGYSQM

SEQ ID NO: 20108 - protein, 85 aa, unidentified
  REGION 1..85: note = Description of Unknown:cds_NC_034393.1_cds_YP_009361839.1_2 target sequence
INVPGHKDAITGEIMSKIIKFSHGEDHDRYTDGHGILNVAGPLNFSLKSTDKFSGVCYSGDILYTSLYMNTKKSGDDFTVVLAKG

SEQ ID NO: 20109 - protein, 85 aa, unidentified
  REGION 1..85: note = Description of Unknown:cds_NC_034393.1_cds_YP_009361839.1_2 target sequence
IIPNTDHSSCDMKLLPLVWQGMINIPGYIEKMEPCKVFCTLSGPGASCEAFSSTGIFNISSDTCLIGKLHRYKHLEDQISFICQR

SEQ ID NO: 20110 - protein, 85 aa, unidentified
  REGION 1..85: note = Description of Unknown:cds_NC_034393.1_cds_YP_009361839.1_2 target sequence
VDQDLVIYCNGQKKVIKTNTLVIGQCIYTITSALSLLPTIAHPLAVELCVTGFHGWATLLLLITFCFGWLLIPLVSYLVIQVLRL

SEQ ID NO: 20111 - protein, 85 aa, unidentified
  REGION 1..85: note = Description of Unknown:cds_NC_034393.1_cds_YP_009361839.1_2 target sequence
ILILMNKHTGQSRFENILKKLKDEFQHTIGSTTCSYCKTDCCSKEELTSHEENCSKGKCPYCLKEIGSSSIIATEHFKICPLIDR

SEQ ID NO: 20112 - protein, 85 aa, unidentified
  REGION 1..85: note = Description of Unknown:cds_NC_034393.1_cds_YP_009361839.1_2 target sequence
FITKIRQNVASTPTHGTLLYRKLGTFRYKNRCFIFTIWTVLIIIESLVWAVSAQKMTVDPGWSDTAHGVGSVPMELDYELDFALV

SEQ ID NO: 20113 - protein, 85 aa, unidentified
  REGION 1..85: note = Description of Unknown:cds_NC_034393.1_cds_YP_009361839.1_2 target sequence
SGSTFIHKRLLQSPQAKEHTIPFTVTIDTQKITAVVQTLGHWMDAEVNLKSVFHCYGACKAYKYPWQEAYCSHEVDYEYQSSWSC

SEQ ID NO: 20114 - protein, 85 aa, unidentified
  REGION 1..85: note = Description of Unknown:cds_NC_034393.1_cds_YP_009361839.1_2 target sequence
NPPTCPGISTGCTACGMYLDKLTPKASVYKIINIKYSRYICYQLGTEKQCKEVEGNDCVTGKHFKACLVGTVSNIVASDTLVFLG

SEQ ID NO: 20115 - protein, 85 aa, unidentified
  REGION 1..85: note = Description of Unknown:cds_NC_034393.1_cds_YP_009361839.1_2 target sequence
PLDAGALIMKQWCVSNCKLGDPGDIMSVQDKINCPSYEGTINRVCRFATMPVCSYQGNQVPGFKKMMATKDSFLSVNMSNVKLSL

SEQ ID NO: 20116 - protein, 85 aa, unidentified
  REGION 1..85: note = Description of Unknown:cds_NC_034393.1_cds_YP_009361839.1_2 target sequence
STMSWEDPDSIYKDHINIVVTKDLDFEELSENPCSVESVISSIEGSWGSGVGFTITCSISLTECSDFLTTIKACDDAICYGGKAV

SEQ ID NO: 20117 - protein, 85 aa, unidentified
  REGION 1..85: note = Description of Unknown:cds_NC_034393.1_cds_YP_009361839.1_2 target sequence
RLLRGQNTVKVQGRGGHSGSKFRCCHENHCSTKGLRASSPHLERIGDERALESQVFSDGAPECGISCQFKKVWEWLTGIFSGNWF

SEQ ID NO: 20118 - protein, 84 aa, unidentified
  REGION 1..84: note = Description of Unknown:cds_NC_034393.1_cds_YP_009361839.1_2 target sequence
HCSTKGLRASSPHLERIGDERALESQVFSDGAPECGISCQFKKVWEWLTGIFSGNWFILIVLVIVMIISIIILSFFCPAKRKTS

SEQ ID NO: 20119 - protein, 85 aa, unidentified
  REGION 1..85: note = Description of Unknown:cds_NC_034393.1_cds_YP_009361839.1_2 target sequence
TRFETGFGYGAVDLPSITEASDLIVPVETSCPFEFNLVRKQVTSVKMKWWERKSSVAAGTNADQNTYEEKEKDAGAIGICNIQHN

SEQ ID NO: 20120 - protein, 85 aa, unidentified
  REGION 1..85: note = Description of Unknown:cds_NC_034393.1_cds_YP_009361839.1_2 target sequence
DITSISQNRRGLMCLEYSCNLTHCMPALHVIIPHQICMNIRTCLLTWKSTKIDLIFERIFCPHGILVAGNCFQPYYGVTSPPPES

SEQ ID NO: 20121 - protein, 85 aa, unidentified
  REGION 1..85: note = Description of Unknown:cds_NC_034393.1_cds_YP_009361839.1_2 target sequence
ERAELSTTCFLITTKQSKAEKNLPQLVTAFQSEITGNTCSPVNMAGYYSCFIKGYSQMINVPGHKDAITGEIMSKIIKFSHGEDH

SEQ ID NO: 20122 - protein, 85 aa, unidentified
  REGION 1..85: note = Description of Unknown:cds_NC_034393.1_cds_YP_009361839.1_2 target sequence
DRYTDGHGILNVAGPLNFSLKSTDKFSGVCYSGDILYTSLYMNTKKSGDDFTVVLAKGIIPNTDHSSCDMKLLPLVWQGMINIPG

SEQ ID NO: 20123 - protein, 85 aa, unidentified
  REGION 1..85: note = Description of Unknown:cds_NC_034393.1_cds_YP_009361839.1_2 target sequence
YIEKMEPCKVFCTLSGPGASCEAFSSTGIFNISSDTCLIGKLHRYKHLEDQISFICQRVDQDLVIYCNGQKKVIKTNTLVIGQCI

SEQ ID NO: 20124 - protein, 85 aa, unidentified
  REGION 1..85: note = Description of Unknown:cds_NC_034393.1_cds_YP_009361839.1_2 target sequence
YTITSALSLLPTIAHPLAVELCVTGFHGWATLLLLITFCFGWLLIPLVSYLVIQVLRLILILMNKHTGQSRFENILKKLKDEFQH

SEQ ID NO: 20125 - protein, 85 aa, unidentified
  REGION 1..85: note = Description of Unknown:cds_NC_034393.1_cds_YP_009361839.1_2 target sequence
TIGSTTCSYCKTDCCSKEELTSHEENCSKGKCPYCLKEIGSSSIIATEHFKICPLIDRFITKIRQNVASTPTHGTLLYRKLGTFR

SEQ ID NO: 20126 - protein, 85 aa, unidentified
  REGION 1..85: note = Description of Unknown:cds_NC_034393.1_cds_YP_009361839.1_2 target sequence
YKNRCFIFTIWTVLIIIESLVWAVSAQKMTVDPGWSDTAHGVGSVPMELDYELDFALVSGSTFIHKRLLQSPQAKEHTIPFTVTI

SEQ ID NO: 20127 - protein, 85 aa, unidentified
  REGION 1..85: note = Description of Unknown:cds_NC_034393.1_cds_YP_009361839.1_2 target sequence
DTQKITAVVQTLGHWMDAEVNLKSVFHCYGACKAYKYPWQEAYCSHEVDYEYQSSWSCNPPTCPGISTGCTACGMYLDKLTPKAS

SEQ ID NO: 20128 - protein, 85 aa, unidentified
  REGION 1..85: note = Description of Unknown:cds_NC_034393.1_cds_YP_009361839.1_2 target sequence
VYKIINIKYSRYICYQLGTEKQCKEVEGNDCVTGKHFKACLVGTVSNIVASDTLVFLGPLDAGALIMKQWCVSNCKLGDPGDIMS

SEQ ID NO: 20129 - protein, 85 aa, unidentified
  REGION 1..85: note = Description of Unknown:cds_NC_034393.1_cds_YP_009361839.1_2 target sequence
VQDKINCPSYEGTINRVCRFATMPVCSYQGNQVPGFKKMMATKDSFLSVNMSNVKLSLSTMSWEDPDSIYKDHINIVVTKDLDFE

SEQ ID NO: 20130 - protein, 85 aa, unidentified
  REGION 1..85: note = Description of Unknown:cds_NC_034393.1_cds_YP_009361839.1_2 target sequence
ELSENPCSVESVISSIEGSWGSGVGFTITCSISLTECSDFLTTIKACDDAICYGGKAVRLLRGQNTVKVQGRGGHSGSKFRCCHE

SEQ ID NO: 20131 - protein, 85 aa, unidentified
  REGION 1..85: note = Description of Unknown:cds_NC_034393.1_cds_YP_009361839.1_2 target sequence
NHCSTKGLRASSPHLERIGDERALESQVFSDGAPECGISCQFKKVWEWLTGIFSGNWFILIVLVIVMIISIIILSFFCPAKRKTS

SEQ ID NO: 20132 - protein, 85 aa, unidentified
  REGION 1..85: note = Description of Unknown:cds_NC_005237.1_cds_NP_942557.1_2 target sequence
WSLLLLAALVGQGFALKNVFDMRIQCPHSVKFGETSVSGYTELPPLSLQEAEQLVPESSCNMDNHQSLSTINKLTKVIWRKKANQ

SEQ ID NO: 20133 - protein, 85 aa, unidentified
  REGION 1..85: note = Description of Unknown:cds_NC_005237.1_cds_NP_942557.1_2 target sequence
ESANQNSFELMESEVSFKGLCMLKHRMVEESYRNRRSVICYDLACNSTFCKPTVYMIVPIHACNMMKSCLIGLGPYRVQVVYERT

SEQ ID NO: 20134 - protein, 85 aa, unidentified
  REGION 1..85: note = Description of Unknown:cds_NC_005237.1_cds_NP_942557.1_2 target sequence
YCTTGILTEGKCFVPDKAVVSALKRGMYAIASIETICFFIHQKGNTYKIVTAITSAMGSKCNNTDTKVQGYYICIIGGNSAPVYA

SEQ ID NO: 20135 - protein, 85 aa, unidentified
  REGION 1..85: note = Description of Unknown:cds_NC_005237.1_cds_NP_942557.1_2 target sequence
PAGEDFRAMEVFSGIITSPHGEDHDLPGEEIATYQISGQIEAKIPHTVSSKNLKLTAFAGIPSYSSTSILTASEDGRFIFSPGLF

SEQ ID NO: 20136 - protein, 85 aa, unidentified
  REGION 1..85: note = Description of Unknown:cds_NC_005237.1_cds_NP_942557.1_2 target sequence
PNLNQSVCDNNALPLIWRGLIDLTGYYEAVHPCNVFCVLSGPGASCEAFSEGGIFNITSPMCLVSKQNRFRAAEQQISFVCQRVD

SEQ ID NO: 20137 - protein, 85 aa, unidentified
  REGION 1..85: note = Description of Unknown:cds_NC_005237.1_cds_NP_942557.1_2 target sequence
MDIIVYCNGQKKTILTKTLVIGQCIYTITSLFSLLPGVAHSIAIELCVPGFHGWATAALLITFCFGWVLIPACTLAILLVLKFFA

SEQ ID NO: 20138 - protein, 85 aa, unidentified
  REGION 1..85: note = Description of Unknown:cds_NC_005237.1_cds_NP_942557.1_2 target sequence
NILHTSNQENRFKAILRKIKEEFEKTKGSMVCEICKYECETLKELKAHNLSCVQGECPYCFTHCEPTETAIQAHYKVCQATHRFR

SEQ ID NO: 20139 - protein, 85 aa, unidentified
  REGION 1..85: note = Description of Unknown:cds_NC_005237.1_cds_NP_942557.1_2 target sequence
EDLKKTVTPQNIGPGCYRTLNLFRYKSRCYILTMWTLLLIIESILWAASAAEIPLVPLWTDNAHGVGSVPMHTDLELDFSLPSSS

SEQ ID NO: 20140 - protein, 85 aa, unidentified
  REGION 1..85: note = Description of Unknown:cds_NC_005237.1_cds_NP_942557.1_2 target sequence
RYTYKRHLTNPVNDQQSVSLHIEIESQGIGADVHHLGHWYDARLNLKTSFHCYGACTKYQYPWHTAKCHFEKDYEYENSWACNPP

SEQ ID NO: 20141 - protein, 85 aa, unidentified
  REGION 1..85: note = Description of Unknown:cds_NC_005237.1_cds_NP_942557.1_2 target sequence
DCPGVGTGCTACGLYLDQLKPVGTAFKIISVRYSRKVCVQFGEEYLCKTIDMNDCFVTRHAKICIIGTVSKFSQGDTLLFLGPME

SEQ ID NO: 20142 - protein, 85 aa, unidentified
  REGION 1..85: note = Description of Unknown:cds_NC_005237.1_cds_NP_942557.1_2 target sequence
GGGIIFKHWCTSTCHFGDPGDVMGPKDKPFICPEFPGQFRKKCNFATTPVCEYDGNIISGYKKVLATIDSFQSFNTSNIHFTDER

SEQ ID NO: 20143 - protein, 85 aa, unidentified
  REGION 1..85: note = Description of Unknown:cds_NC_005237.1_cds_NP_942557.1_2 target sequence
IEWRDPDGMLRDHINIVISKDIDFENLAENPCKVGLQAANIEGAWGSGVGFTLTCQVSLTECPTFLTSIRACDMAICYGAESVTL

SEQ ID NO: 20144 - protein, 85 aa, unidentified
  REGION 1..85: note = Description of Unknown:cds_NC_005237.1_cds_NP_942557.1_2 target sequence
SRGQNTVKITGKGGHSGSSFKCCHGKECSLTGLQASAPHLDKVNGISELENEKVYDDGAPECGITCWFKKSGEWVMGIINGNWVV

SEQ ID NO: 20145 - protein, 84 aa, unidentified
  REGION 1..84: note = Description of Unknown:cds_NC_005237.1_cds_NP_942557.1_2 target sequence
SLTGLQASAPHLDKVNGISELENEKVYDDGAPECGITCWFKKSGEWVMGIINGNWVVLIVLCVLLLFSLILLSILCPVRKHKKS

SEQ ID NO: 20146 - protein, 85 aa, unidentified
  REGION 1..85: note = Description of Unknown:cds_NC_005237.1_cds_NP_942557.1_2 target sequence
HSVKFGETSVSGYTELPPLSLQEAEQLVPESSCNMDNHQSLSTINKLTKVIWRKKANQESANQNSFELMESEVSFKGLCMLKHRM

SEQ ID NO: 20147 - protein, 85 aa, unidentified
  REGION 1..85: note = Description of Unknown:cds_NC_005237.1_cds_NP_942557.1_2 target sequence
VEESYRNRRSVICYDLACNSTFCKPTVYMIVPIHACNMMKSCLIGLGPYRVQVVYERTYCTTGILTEGKCFVPDKAVVSALKRGM

SEQ ID NO: 20148 - protein, 85 aa, unidentified
  REGION 1..85: note = Description of Unknown:cds_NC_005237.1_cds_NP_942557.1_2 target sequence
YAIASIETICFFIHQKGNTYKIVTAITSAMGSKCNNTDTKVQGYYICIIGGNSAPVYAPAGEDFRAMEVFSGIITSPHGEDHDLP

SEQ ID NO: 20149 - protein, 85 aa, unidentified
  REGION 1..85: note = Description of Unknown:cds_NC_005237.1_cds_NP_942557.1_2 target sequence
GEEIATYQISGQIEAKIPHTVSSKNLKLTAFAGIPSYSSTSILTASEDGRFIFSPGLFPNLNQSVCDNNALPLIWRGLIDLTGYY

SEQ ID NO: 20150 - protein, 85 aa, unidentified
  REGION 1..85: note = Description of Unknown:cds_NC_005237.1_cds_NP_942557.1_2 target sequence
EAVHPCNVFCVLSGPGASCEAFSEGGIFNITSPMCLVSKQNRFRAAEQQISFVCQRVDMDIIVYCNGQKKTILTKTLVIGQCIYT

SEQ ID NO: 20151 - protein, 85 aa, unidentified
  REGION 1..85: note = Description of Unknown:cds_NC_005237.1_cds_NP_942557.1_2 target sequence
ITSLFSLLPGVAHSIAIELCVPGFHGWATAALLITFCFGWVLIPACTLAILLVLKFFANILHTSNQENRFKAILRKIKEEFEKTK

SEQ ID NO: 20152 - protein, 85 aa, unidentified
  REGION 1..85: note = Description of Unknown:cds_NC_005237.1_cds_NP_942557.1_2 target sequence
GSMVCEICKYECETLKELKAHNLSCVQGECPYCFTHCEPTETAIQAHYKVCQATHRFREDLKKTVTPQNIGPGCYRTLNLFRYKS

SEQ ID NO: 20153 - protein, 85 aa, unidentified
  REGION 1..85: note = Description of Unknown:cds_NC_005237.1_cds_NP_942557.1_2 target sequence
RCYILTMWTLLLIIESILWAASAAEIPLVPLWTDNAHGVGSVPMHTDLELDFSLPSSSRYTYKRHLTNPVNDQQSVSLHIEIESQ

SEQ ID NO: 20154 - protein, 85 aa, unidentified
  REGION 1..85: note = Description of Unknown:cds_NC_005237.1_cds_NP_942557.1_2 target sequence
GIGADVHHLGHWYDARLNLKTSFHCYGACTKYQYPWHTAKCHFEKDYEYENSWACNPPDCPGVGTGCTACGLYLDQLKPVGTAFK

SEQ ID NO: 20155 - protein, 85 aa, unidentified
  REGION 1..85: note = Description of Unknown:cds_NC_005237.1_cds_NP_942557.1_2 target sequence
IISVRYSRKVCVQFGEEYLCKTIDMNDCFVTRHAKICIIGTVSKFSQGDTLLFLGPMEGGGIIFKHWCTSTCHFGDPGDVMGPKD

SEQ ID NO: 20156 - protein, 85 aa, unidentified
  REGION 1..85: note = Description of Unknown:cds_NC_005237.1_cds_NP_942557.1_2 target sequence
KPFICPEFPGQFRKKCNFATTPVCEYDGNIISGYKKVLATIDSFQSFNTSNIHFTDERIEWRDPDGMLRDHINIVISKDIDFENL

SEQ ID NO: 20157 - protein, 85 aa, unidentified
  REGION 1..85: note = Description of Unknown:cds_NC_005237.1_cds_NP_942557.1_2 target sequence
AENPCKVGLQAANIEGAWGSGVGFTLTCQVSLTECPTFLTSIRACDMAICYGAESVTLSRGQNTVKITGKGGHSGSSFKCCHGKE

SEQ ID NO: 20158 - protein, 85 aa, unidentified
  REGION 1..85: note = Description of Unknown:cds_NC_005237.1_cds_NP_942557.1_2 target sequence
CSLTGLQASAPHLDKVNGISELENEKVYDDGAPECGITCWFKKSGEWVMGIINGNWVVLIVLCVLLLFSLILLSILCPVRKHKKS

SEQ ID NO: 20159 - protein, 85 aa, unidentified
  REGION 1..85: note = Description of Unknown:hvTR_P52338 target sequence
ADENETVVSAPVSTAAWIYVFPKDKELLDVLSVLSLMERNSPIVISPLLMNLTVENDFSTTVKTPITNFGGTILTKITSFMPVCF

SEQ ID NO: 20160 - protein, 85 aa, unidentified
  REGION 1..85: note = Description of Unknown:hvTR_P52338 target sequence
FFHGTEQLVGMAEDHGDLIRLCEQTRQKFHLQSFEVPTARKVIDIKALCSAVGKDADSVICHVACGNGFKELLFAGLLIPCVEEQ

SEQ ID NO: 20161 - protein, 85 aa, unidentified
  REGION 1..85: note = Description of Unknown:hvTR_P52338 target sequence
IQVQVGEYSCVKIPLYSATLFETEETISLSSCTEFIQERGFFLPALSETLFYYVFTSWGTTLRFSNTKELIDAGLKQFTQDGEQT

SEQ ID NO: 20162 - protein, 85 aa, unidentified
  REGION 1..85: note = Description of Unknown:hvTR_P52338 target sequence
VKLAPHKTYLGISGQKISAVEKDFLMLVDSVVTELSFSHVAEYLDSVYDPSQIMNFNDWPIIRNSETHAERMAQLTNLKLHLSSH

SEQ ID NO: 20163 - protein, 85 aa, unidentified
  REGION 1..85: note = Description of Unknown:hvTR_P52338 target sequence
LAVLIFAPNSILYCSKLAFIPNVKQAFNSVMTQELLLRSLSFCNALSSLSDDVYNDNRKIIKCDSTSGKDDKFSANHLAYACATS

SEQ ID NO: 20164 - protein, 85 aa, unidentified
  REGION 1..85: note = Description of Unknown:hvTR_P52338 target sequence
PQLLSFVVWNLNRMSVYNAGNAHTEIYNHLVNCSANLCEFCDGKCCQSCIGTAMVRVGTRLPAIPKNVKKEPLVMSMFSRYYAEV

SEQ ID NO: 20165 - protein, 85 aa, unidentified
  REGION 1..85: note = Description of Unknown:hvTR_P52338 target sequence
DILGSFGRKPVSELKEIGKDQQNTLSLDRGKFVSQIFDYCKKNSLIDPVTGEDTFNVRSKKDFVSIIHGLTQCIEECVSRCIVEM

SEQ ID NO: 20166 - protein, 85 aa, unidentified
  REGION 1..85: note = Description of Unknown:hvTR_P52338 target sequence
RRTQTPREQIENCLQSFNVDTTPYATAFSPFLTFSYYKVILTVLQNLALIVASGHVVDRPCTGNSISKWLVQQYQSLYGTFHSSY

SEQ ID NO: 20167 - protein, 85 aa, unidentified
  REGION 1..85: note = Description of Unknown:hvTR_P52338 target sequence
LKKGFLNTRTVKVASNVDMEQILDCDLYKSGKYVKTTIQAKLCRLSMQCLRDFRIKNRPFNKSSKTAHNNPYFKKNVKHKKNPLS

SEQ ID NO: 20168 - protein, 85 aa, unidentified
  REGION 1..85: note = Description of Unknown:hvTR_P52338 target sequence
GCISFLLFKYHDKLFPNVKISCLELWQRFLLNNVPKTLDIGNPEEVKTFIKFAFSITNTYDEIDIIDIQPECLSTFIDCYFHNKF

SEQ ID NO: 20169 - protein, 85 aa, unidentified
  REGION 1..85: note = Description of Unknown:hvTR_P52338 target sequence
LSALGFHDYLTSLHGLTSKLVTQNPVLFPVVLDKQPKFSSIQEYLVYVKKLVLDGVPNPVIASLSKEPNFGTIFTSRSLVTFGLT

SEQ ID NO: 20170 - protein, 85 aa, unidentified
  REGION 1..85: note = Description of Unknown:hvTR_P52338 target sequence
LEKFVSLANREYFQFGQLGWIGGSGVDRNLNPTSSALQDFRFMRQKTIIATKFSEVIVKKVRREAIMFDTEVVKGKVLSIVENLT

SEQ ID NO: 20171 - protein, 85 aa, unidentified
  REGION 1..85: note = Description of Unknown:hvTR_P52338 target sequence
NDIDPELLIIAEVMRDREDKPTMDDMLFFVDGREALAASIMLKLNHLVDMNVKDFSITNLQSVFETVSSNDAPVYDFSEILAEED

SEQ ID NO: 20172 - protein, 84 aa, unidentified
  REGION 1..84: note = Description of Unknown:hvTR_P52338 target sequence
FFVDGREALAASIMLKLNHLVDMNVKDFSITNLQSVFETVSSNDAPVYDFSEILAEEDDQGNGVLKCDETETETDEPMTKKNRL

SEQ ID NO: 20173 - protein, 85 aa, unidentified
  REGION 1..85: note = Description of Unknown:hvTR_P52338 target sequence
LDVLSVLSLMERNSPIVISPLLMNLTVENDFSTTVKTPITNFGGTILTKITSFMPVCFFFHGTEQLVGMAEDHGDLIRLCEQTRQ

SEQ ID NO: 20174 - protein, 85 aa, unidentified
  REGION 1..85: note = Description of Unknown:hvTR_P52338 target sequence
KFHLQSFEVPTARKVIDIKALCSAVGKDADSVICHVACGNGFKELLFAGLLIPCVEEQIQVQVGEYSCVKIPLYSATLFETEETI

SEQ ID NO: 20175 - protein, 85 aa, unidentified
  REGION 1..85: note = Description of Unknown:hvTR_P52338 target sequence
SLSSCTEFIQERGFFLPALSETLFYYVFTSWGTTLRFSNTKELIDAGLKQFTQDGEQTVKLAPHKTYLGISGQKISAVEKDFLML

SEQ ID NO: 20176 - protein, 85 aa, unidentified
  REGION 1..85: note = Description of Unknown:hvTR_P52338 target sequence
VDSVVTELSFSHVAEYLDSVYDPSQIMNFNDWPIIRNSETHAERMAQLTNLKLHLSSHLAVLIFAPNSILYCSKLAFIPNVKQAF

SEQ ID NO: 20177 - protein, 85 aa, unidentified
  REGION 1..85: note = Description of Unknown:hvTR_P52338 target sequence
NSVMTQELLLRSLSFCNALSSLSDDVYNDNRKIIKCDSTSGKDDKFSANHLAYACATSPQLLSFVVWNLNRMSVYNAGNAHTEIY

SEQ ID NO: 20178 - protein, 85 aa, unidentified
  REGION 1..85: note = Description of Unknown:hvTR_P52338 target sequence
NHLVNCSANLCEFCDGKCCQSCIGTAMVRVGTRLPAIPKNVKKEPLVMSMFSRYYAEVDILGSFGRKPVSELKEIGKDQQNTLSL

SEQ ID NO: 20179 - protein, 85 aa, unidentified
  REGION 1..85: note = Description of Unknown:hvTR_P52338 target sequence
DRGKFVSQIFDYCKKNSLIDPVTGEDTFNVRSKKDFVSIIHGLTQCIEECVSRCIVEMRRTQTPREQIENCLQSFNVDTTPYATA

SEQ ID NO: 20180 - protein, 85 aa, unidentified
  REGION 1..85: note = Description of Unknown:hvTR_P52338 target sequence
FSPFLTFSYYKVILTVLQNLALIVASGHVVDRPCTGNSISKWLVQQYQSLYGTFHSSYLKKGFLNTRTVKVASNVDMEQILDCDL

SEQ ID NO: 20181 - protein, 85 aa, unidentified
  REGION 1..85: note = Description of Unknown:hvTR_P52338 target sequence
YKSGKYVKTTIQAKLCRLSMQCLRDFRIKNRPFNKSSKTAHNNPYFKKNVKHKKNPLSGCISFLLFKYHDKLFPNVKISCLELWQ

SEQ ID NO: 20182 - protein, 85 aa, unidentified
  REGION 1..85: note = Description of Unknown:hvTR_P52338 target sequence
RFLLNNVPKTLDIGNPEEVKTFIKFAFSITNTYDEIDIIDIQPECLSTFIDCYFHNKFLSALGFHDYLTSLHGLTSKLVTQNPVL

SEQ ID NO: 20183 - protein, 85 aa, unidentified
  REGION 1..85: note = Description of Unknown:hvTR_P52338 target sequence
FPVVLDKQPKFSSIQEYLVYVKKLVLDGVPNPVIASLSKEPNFGTIFTSRSLVTFGLTLEKFVSLANREYFQFGQLGWIGGSGVD

SEQ ID NO: 20184 - protein, 85 aa, unidentified
  REGION 1..85: note = Description of Unknown:hvTR_P52338 target sequence
RNLNPTSSALQDFRFMRQKTIIATKFSEVIVKKVRREAIMFDTEVVKGKVLSIVENLTNDIDPELLIIAEVMRDREDKPTMDDML

SEQ ID NO: 20185 - protein, 85 aa, unidentified
  REGION 1..85: note = Description of Unknown:hvTR_Q785N4 target sequence
ADENETVVSAPVSTAAWIYVFPKEKELLDVLSVLSLMERNSPVVISPLLMNLTVENDFSTTVKTPITNFGGTILTKITSFMPVCF

SEQ ID NO: 20186 - protein, 85 aa, unidentified; identical to SEQ ID NO: 20160
  REGION 1..85: note = Description of Unknown:hvTR_Q785N4 target sequence

SEQ ID NO: 20187 - protein, 85 aa, unidentified; identical to SEQ ID NO: 20161
  REGION 1..85: note = Description of Unknown:hvTR_Q785N4 target sequence

SEQ ID NO: 20188 - protein, 85 aa, unidentified; identical to SEQ ID NO: 20162
  REGION 1..85: note = Description of Unknown:hvTR_Q785N4 target sequence

SEQ ID NO: 20189 - protein, 85 aa, unidentified
  REGION 1..85: note = Description of Unknown:hvTR_Q785N4 target sequence
LAVLIFAPNSILYCSKLAFIPNVKQAFNSVMTQELLLRSLSFCNALSSLTEDVYNDNRKIIKCDSTSGKDDKFSANHLAYACATC

SEQ ID NO: 20190 - protein, 85 aa, unidentified
  REGION 1..85: note = Description of Unknown:hvTR_Q785N4 target sequence
PQLLSYVVWNLNRMSVYNAGNAYTEIYNHLVNCSANLCEFCDGKCCQSCIGTAMVRVGTRLPAIPKNVKKEPLVMSMFSRYYAEV

SEQ ID NO: 20191 - protein, 85 aa, unidentified; identical to SEQ ID NO: 20165
  REGION 1..85: note = Description of Unknown:hvTR_Q785N4 target sequence

SEQ ID NO: 20192 - protein, 85 aa, unidentified
  REGION 1..85: note = Description of Unknown:hvTR_Q785N4 target sequence
RRTQTPREQIENCLQSFNVDTTPYATAFSPFLTFAYYKVILTVLQNLALIVASGHVVDRPCTGNSISKWLVQQYQSLYGTFHSSY

SEQ ID NO: 20193 - protein, 85 aa, unidentified; identical to SEQ ID NO: 20167
  REGION 1..85: note = Description of Unknown:hvTR_Q785N4 target sequence

SEQ ID NO: 20194 - protein, 85 aa, unidentified; identical to SEQ ID NO: 20168
  REGION 1..85: note = Description of Unknown:hvTR_Q785N4 target sequence

SEQ ID NO: 20195 - protein, 85 aa, unidentified; identical to SEQ ID NO: 20169
  REGION 1..85: note = Description of Unknown:hvTR_Q785N4 target sequence

SEQ ID NO: 20196 - protein, 85 aa, unidentified
  REGION 1..85: note = Description of Unknown:hvTR_Q785N4 target sequence
LEKFVSLANREYFQFGQLGWIGGSGVDRNLNPTSSALQDFRFMRQKTIIATKFSEVIVKKVRRETIMFDTEVVKGKVLSIVENLT

SEQ ID NO: 20197 - protein, 85 aa, unidentified
  REGION 1..85: note = Description of Unknown:hvTR_Q785N4 target sequence
NDIDPELLIIAEVMRDREDKPTMDDMLFFVDGREALAASIMLKLNHLVDMNVRDFSIANLQSVFEAVSSNDAPVYDFSEILAEED

SEQ ID NO: 20198 - protein, 84 aa, unidentified
  REGION 1..84: note = Description of Unknown:hvTR_Q785N4 target sequence
FFVDGREALAASIMLKLNHLVDMNVRDFSIANLQSVFEAVSSNDAPVYDFSEILAEEDDQASGVLKCDETETETDEPMTKKNRL

SEQ ID NO: 20199 - protein, 85 aa, unidentified
  REGION 1..85: note = Description of Unknown:hvTR_Q785N4 target sequence
LDVLSVLSLMERNSPVVISPLLMNLTVENDFSTTVKTPITNFGGTILTKITSFMPVCFFFHGTEQLVGMAEDHGDLIRLCEQTRQ

SEQ ID NO: 20200 - protein, 85 aa, unidentified; identical to SEQ ID NO: 20174
  REGION 1..85: note = Description of Unknown:hvTR_Q785N4 target sequence

SEQ ID NO: 20201 - protein, 85 aa, unidentified; identical to SEQ ID NO: 20175
  REGION 1..85: note = Description of Unknown:hvTR_Q785N4 target sequence

SEQ ID NO: 20202 - protein, 85 aa, unidentified; identical to SEQ ID NO: 20176
  REGION 1..85: note = Description of Unknown:hvTR_Q785N4 target sequence

SEQ ID NO: 20203 - protein, 85 aa, unidentified
  REGION 1..85: note = Description of Unknown:hvTR_Q785N4 target sequence
NSVMTQELLLRSLSFCNALSSLTEDVYNDNRKIIKCDSTSGKDDKFSANHLAYACATCPQLLSYVVWNLNRMSVYNAGNAYTEIY

SEQ ID NO: 20204 - protein, 85 aa, unidentified; identical to SEQ ID NO: 20178
  REGION 1..85: note = Description of Unknown:hvTR_Q785N4 target sequence

SEQ ID NO: 20205 - protein, 85 aa, unidentified; identical to SEQ ID NO: 20179
  REGION 1..85: note = Description of Unknown:hvTR_Q785N4 target sequence

SEQ ID NO: 20206 - protein, 85 aa, unidentified
  REGION 1..85: note = Description of Unknown:hvTR_Q785N4 target sequence
FSPFLTFAYYKVILTVLQNLALIVASGHVVDRPCTGNSISKWLVQQYQSLYGTFHSSYLKKGFLNTRTVKVASNVDMEQILDCDL

SEQ ID NO: 20207 - protein, 85 aa, unidentified; identical to SEQ ID NO: 20181
  REGION 1..85: note = Description of Unknown:hvTR_Q785N4 target sequence

SEQ ID NO: 20208 - protein, 85 aa, unidentified; identical to SEQ ID NO: 20182
  REGION 1..85: note = Description of Unknown:hvTR_Q785N4 target sequence

SEQ ID NO: 20209 - protein, 85 aa, unidentified; identical to SEQ ID NO: 20183
  REGION 1..85: note = Description of Unknown:hvTR_Q785N4 target sequence

SEQ ID NO: 20210 - protein, 85 aa, unidentified
  REGION 1..85: note = Description of Unknown:hvTR_Q785N4 target sequence
RNLNPTSSALQDFRFMRQKTIIATKFSEVIVKKVRRETIMFDTEVVKGKVLSIVENLTNDIDPELLIIAEVMRDREDKPTMDDML

SEQ ID NO: 20211 - protein, 85 aa, unidentified
  REGION 1..85: note = Description of Unknown:hvTR_O56282 target sequence
ADDNETVVSAPICTAAWLYILPKEQKLIEILTTLSLMEKRKSVVISPLLLNLTVENDFFPTVKTPIINYGGTVITKITSFMPVCF

SEQ ID NO: 20212 - protein, 85 aa, unidentified
  REGION 1..85: note = Description of Unknown:hvTR_O56282 target sequence
FFHGTDVFLKEAEDHGNLDKLCKQTREKFNLQEFVVNGNRKPVDIGKICESVGRNADDVLCHIVVGNGFKELLFAGLLIPCVEEQ

SEQ ID NO: 20213 - protein, 85 aa, unidentified
  REGION 1..85: note = Description of Unknown:hvTR_O56282 target sequence
IQVQVGECLAIKIPLYSATLFESEETLCIDTCTEFIQENGFYAPQISEVLFYLIFTSWGMTLRFNNTLELIKAGLKQFIQDTEQT

SEQ ID NO: 20214 - protein, 85 aa, unidentified
  REGION 1..85: note = Description of Unknown:hvTR_O56282 target sequence
VKLAPNKTYHGIPGQKLSPIEKDHLMLVDAVITELTFSYTAEYLDSIYENNQIMNFSEWPIIKSAETHEEKIVELKKLRLHLSSH

SEQ ID NO: 20215 - protein, 85 aa, unidentified
  REGION 1..85: note = Description of Unknown:hvTR_O56282 target sequence
VAALVFAANSILYSNKLAYISNTKQAFNSAITQETLLRSIQFCNSLSSLNEDFYNDARKLIKCNSSPCKEDKFSAFHLAYACATC

SEQ ID NO: 20216 - protein, 85 aa, unidentified
  REGION 1..85: note = Description of Unknown:hvTR_O56282 target sequence
PQILSHIIWNLNRMSIYNTNCGNSEIYNHIVNCSSNLCEFCEGKCCHSCIGTALIRINSRLPQISKTTKKEPIVMTMFSRFYADV

SEQ ID NO: 20217 - protein, 85 aa, unidentified
  REGION 1..85: note = Description of Unknown:hvTR_O56282 target sequence
DVLGSFGKKGVNESKDPMKEAQTTPSLDRFKFLGMIHDYCKKNNLIDAITGEDNLNFKSQNDFVNMINDLIQCIEEAVSKCISEM

SEQ ID NO: 20218 - protein, 85 aa, unidentified
  REGION 1..85: note = Description of Unknown:hvTR_O56282 target sequence
RKTQTSREQIENCLQSFNIDTTPLSLAFSPFFVFTYYKVILIVLQNLALIIGTGYVVDRPCTGNLISKWLMQQYQSLYGAFYNSH

SEQ ID NO: 20219 - protein, 85 aa, unidentified
  REGION 1..85: note = Description of Unknown:hvTR_O56282 target sequence
FKKGFLNMKTVKIASNVDMEQYIDFNLFKSGKYAKTSIQAKLCRLSMQCLKDFRVKNRPFNKPNKNTQNNPFFKKVKQKKNPLSG

SEQ ID NO: 20220 - protein, 85 aa, unidentified
  REGION 1..85: note = Description of Unknown:hvTR_O56282 target sequence
CLSFLLFKYHERLFPNLKISCLEFWQRILLNNMPKTIDIGNVEDMRSFIKFTFRVTNSYDEIDLLDIQPECLLSFIEYYFHNKLL

SEQ ID NO: 20221 - protein, 85 aa, unidentified
  REGION 1..85: note = Description of Unknown:hvTR_O56282 target sequence
SVLGYRDYLTSLHALTSKLVPQNPMLFPVFLKEHPTFSSVQEYVMHVKKLVGNGLKEPMTASLTKEPNFGSIFTGRSIITFGLMI

SEQ ID NO: 20222 - protein, 85 aa, unidentified
  REGION 1..85: note = Description of Unknown:hvTR_O56282 target sequence
EKFVSVASRDYFHFGQLGWIAGSGVDRNLNPPSSGLQDFRFMRQKFVIATKLCDIIVKKVKREAIVYDVEVIRGKVLNIIESLSN

SEQ ID NO: 20223 - protein, 85 aa, unidentified
  REGION 1..85: note = Description of Unknown:hvTR_O56282 target sequence
SVNPELLILAEVMKDRDSKPTMDDMLFYVDGREPLAKSVMNKIQHLTDLNVHDFSLSTLLSVFEEQVEDSAAIYDFSELLVEGNE

SEQ ID NO: 20224 - protein, 84 aa, unidentified
  REGION 1..84: note = Description of Unknown:hvTR_O56282 target sequence
FYVDGREPLAKSVMNKIQHLTDLNVHDFSLSTLLSVFEEQVEDSAAIYDFSELLVEGNEQGFGILKCEETEHENEEPSLKKARL

SEQ ID NO: 20225 - protein, 85 aa, unidentified
  REGION 1..85: note = Description of Unknown:hvTR_O56282 target sequence
IEILTTLSLMEKRKSVVISPLLLNLTVENDFFPTVKTPIINYGGTVITKITSFMPVCFFFHGTDVFLKEAEDHGNLDKLCKQTRE

SEQ ID NO: 20226 - protein, 85 aa, unidentified
  REGION 1..85: note = Description of Unknown:hvTR_O56282 target sequence
KFNLQEFVVNGNRKPVDIGKICESVGRNADDVLCHIVVGNGFKELLFAGLLIPCVEEQIQVQVGECLAIKIPLYSATLFESEETL

SEQ ID NO: 20227 - protein, 85 aa, unidentified
  REGION 1..85: note = Description of Unknown:hvTR_O56282 target sequence
CIDTCTEFIQENGFYAPQISEVLFYLIFTSWGMTLRFNNTLELIKAGLKQFIQDTEQTVKLAPNKTYHGIPGQKLSPIEKDHLML

SEQ ID NO: 20228 - protein, 85 aa, unidentified
  REGION 1..85: note = Description of Unknown:hvTR_O56282 target sequence
VDAVITELTFSYTAEYLDSIYENNQIMNFSEWPIIKSAETHEEKIVELKKLRLHLSSHVAALVFAANSILYSNKLAYISNTKQAF

SEQ ID NO: 20229 - protein, 85 aa, unidentified
  REGION 1..85: note = Description of Unknown:hvTR_O56282 target sequence
NSAITQETLLRSIQFCNSLSSLNEDFYNDARKLIKCNSSPCKEDKFSAFHLAYACATCPQILSHIIWNLNRMSIYNTNCGNSEIY

SEQ ID NO: 20230 - protein, 85 aa, unidentified
  REGION 1..85: note = Description of Unknown:hvTR_O56282 target sequence
NHIVNCSSNLCEFCEGKCCHSCIGTALIRINSRLPQISKTTKKEPIVMTMFSRFYADVDVLGSFGKKGVNESKDPMKEAQTTPSL

SEQ ID NO: 20231 - protein, 85 aa, unidentified
  REGION 1..85: note = Description of Unknown:hvTR_O56282 target sequence
DRFKFLGMIHDYCKKNNLIDAITGEDNLNFKSQNDFVNMINDLIQCIEEAVSKCISEMRKTQTSREQIENCLQSFNIDTTPLSLA

SEQ ID NO: 20232 - protein, 85 aa, unidentified
  REGION 1..85: note = Description of Unknown:hvTR_O56282 target sequence
FSPFFVFTYYKVILIVLQNLALIIGTGYVVDRPCTGNLISKWLMQQYQSLYGAFYNSHFKKGFLNMKTVKIASNVDMEQYIDFNL

SEQ ID NO: 20233 - protein, 85 aa, unidentified
  REGION 1..85: note = Description of Unknown:hvTR_O56282 target sequence
FKSGKYAKTSIQAKLCRLSMQCLKDFRVKNRPFNKPNKNTQNNPFFKKVKQKKNPLSGCLSFLLFKYHERLFPNLKISCLEFWQR

SEQ ID NO: 20234 - protein, 85 aa, unidentified
  REGION 1..85: note = Description of Unknown:hvTR_O56282 target sequence
ILLNNMPKTIDIGNVEDMRSFIKFTFRVTNSYDEIDLLDIQPECLLSFIEYYFHNKLLSVLGYRDYLTSLHALTSKLVPQNPMLF

SEQ ID NO: 20235 - protein, 85 aa, unidentified
  REGION 1..85: note = Description of Unknown:hvTR_O56282 target sequence
PVFLKEHPTFSSVQEYVMHVKKLVGNGLKEPMTASLTKEPNFGSIFTGRSIITFGLMIEKFVSVASRDYFHFGQLGWIAGSGVDR

SEQ ID NO: 20236 - protein, 85 aa, unidentified
  REGION 1..85: note = Description of Unknown:hvTR_O56282 target sequence
NLNPPSSGLQDFRFMRQKFVIATKLCDIIVKKVKREAIVYDVEVIRGKVLNIIESLSNSVNPELLILAEVMKDRDSKPTMDDMLF

SEQ ID NO: 20237 - protein, 85 aa, unidentified
  REGION 1..85: note = Description of Unknown:cds_NZ_WFIY01000004.1_cds_WP_155864138.1_2091 target sequence
SSSSTQYTGVPNSKVPLPPTSAERYFATCRFCNVGCGYDIFVFPVGQEGQPTAGQNGIQYNFIDYVFTVNGEPRKLKEYKADYTS

SEQ ID NO: 20238 - protein, 85 aa, unidentified
  REGION 1..85: note = Description of Unknown:cds_NZ_WFIY01000004.1_cds_WP_155864138.1_2091 target sequence
PLQPLSALTGTPWIGEGMVTRTMRYNPSKQTWEEVWIEEIPSPECPVNQGNYSTRGGRNAQRNWSPFSDVASGFAVYQSRIKTPL

SEQ ID NO: 20239 - protein, 85 aa, unidentified
  REGION 1..85: note = Description of Unknown:cds_NZ_WFIY01000004.1_cds_WP_155864138.1_2091 target sequence
IRWNGSLQPVGWSYAIKVAAKILKYYMDNETFEYPVGPGAVQVLAIRADHGGGQGGGVFSNLMPGLLLHMGLATPFVRFHYQVAF

SEQ ID NO: 20240 - protein, 85 aa, unidentified
  REGION 1..85: note = Description of Unknown:cds_NZ_WFIY01000004.1_cds_WP_155864138.1_2091 target sequence
SFTQDALMEATNGNGTDTASMLDITIADNLILWGINEYTTSTVNLIQHIFDNISGSTLDRKQAWFDTGEPALPANIIIVEARPSE

SEQ ID NO: 20241 - protein, 85 aa, unidentified
  REGION 1..85: note = Description of Unknown:cds_NZ_WFIY01000004.1_cds_WP_155864138.1_2091 target sequence
TVKAVTAKLGVSVQDAMQGYDITAGTVYNGQYNPNHQYVVFAQVNPGTDAELANAIAAYIYYTYPDVVNHFITMYQNASQYGFTF

SEQ ID NO: 20242 - protein, 85 aa, unidentified
  REGION 1..85: note = Description of Unknown:cds_NZ_WFIY01000004.1_cds_WP_155864138.1_2091 target sequence
NKQTYQYYIQYLQSKSLDEWLSEASQITGVPQSVIQLIGDIIAAPKTNSSGQSFYKRTLIEFEKGVIWSGNYTPIYAIANLGIIS

SEQ ID NO: 20243 - protein, 85 aa, unidentified
  REGION 1..85: note = Description of Unknown:cds_NZ_WFIY01000004.1_cds_WP_155864138.1_2091 target sequence
GALSGRPGCGVSTGFGHQRGAAFPAPPPPPWSSNLNAPRNYWIQMHEYVPQQLQAQGQTVTGTAIAEFIKNFYNQYTSTLVPQVY

SEQ ID NO: 20244 - protein, 85 aa, unidentified
  REGION 1..85: note = Description of Unknown:cds_NZ_WFIY01000004.1_cds_WP_155864138.1_2091 target sequence
QDNPVIDYLIYSGYGKVLWVFTANPYKLTMSGEKLSQVIDNRAHLLQECVENTINLGIPSSNTNSQILSGQYNTQNVGAPLPNFP

SEQ ID NO: 20245 - protein, 85 aa, unidentified
  REGION 1..85: note = Description of Unknown:cds_NZ_WFIY01000004.1_cds_WP_155864138.1_2091 target sequence
DPDTYANAVISCLSGSNAVPGALFVVGNDIILPQNGVLERAAHLILPSASNHGETYEIRWNGHDRRLRLDEVYHSPPGSAMPDVW

SEQ ID NO: 20246 - protein, 85 aa, unidentified
  REGION 1..85: note = Description of Unknown:cds_NZ_WFIY01000004.1_cds_WP_155864138.1_2091 target sequence
IYAMIAYEIYQLYQAEGKQNSPQAQRIYQAFNQIWNSLSTHMIQNSQPLSLISSYSEFYYDYDWFNIYNDIWKYYVANGPINFKS

SEQ ID NO: 20247 - protein, 85 aa, unidentified
  REGION 1..85: note = Description of Unknown:cds_NZ_WFIY01000004.1_cds_WP_155864138.1_2091 target sequence
WPYGYIVPHWAPGWAQIDLNDLKAARTIGVQLPILGKITNPDGSFSLYGLVNYAEPAINGEFRVEEVTIDPNQAITVGTTPSGQT

SEQ ID NO: 20248 - protein, 85 aa, unidentified
  REGION 1..85: note = Description of Unknown:cds_NZ_WFIY01000004.1_cds_WP_155864138.1_2091 target sequence
ITLPLITRKVTYISINDLQSMFGYSWNDLLPYVINGFNPFPTPYVGIFGYAAQLQSKYKYWLNNGRWNIIFQSGWIDYQIPEILQ

SEQ ID NO: 20249 - protein, 85 aa, unidentified
  REGION 1..85: note = Description of Unknown:cds_NZ_WFIY01000004.1_cds_WP_155864138.1_2091 target sequence
RVPYPIVMMSSTDAQNEGLQNGDIVELYNDYGSVDAIVWISDTVPPGQLFLAMAFEVKPGANNATTPTVDPVTDNQMVKWSWVNI

SEQ ID NO: 20250 - protein, 84 aa, unidentified
  REGION 1..84: note = Description of Unknown:cds_NZ_WFIY01000004.1_cds_WP_155864138.1_2091 target sequence
LYNDYGSVDAIVWISDTVPPGQLFLAMAFEVKPGANNATTPTVDPVTDNQMVKWSWVNIKKIGTLSEETKARLTFSPVSFHLPS

SEQ ID NO: 20251 - protein, 85 aa, unidentified
  REGION 1..85: note = Description of Unknown:cds_NZ_WFIY01000004.1_cds_WP_155864138.1_2091 target sequence
TCRFCNVGCGYDIFVFPVGQEGQPTAGQNGIQYNFIDYVFTVNGEPRKLKEYKADYTSPLQPLSALTGTPWIGEGMVTRTMRYNP

SEQ ID NO: 20252 - protein, 85 aa, unidentified
  REGION 1..85: note = Description of Unknown:cds_NZ_WFIY01000004.1_cds_WP_155864138.1_2091 target sequence
SKQTWEEVWIEEIPSPECPVNQGNYSTRGGRNAQRNWSPFSDVASGFAVYQSRIKTPLIRWNGSLQPVGWSYAIKVAAKILKYYM

SEQ ID NO: 20253 - protein, 85 aa, unidentified
  REGION 1..85: note = Description of Unknown:cds_NZ_WFIY01000004.1_cds_WP_155864138.1_2091 target sequence
DNETFEYPVGPGAVQVLAIRADHGGGQGGGVFSNLMPGLLLHMGLATPFVRFHYQVAFSFTQDALMEATNGNGTDTASMLDITIA

SEQ ID NO: 20254 - protein, 85 aa, unidentified
  REGION 1..85: note = Description of Unknown:cds_NZ_WFIY01000004.1_cds_WP_155864138.1_2091 target sequence
DNLILWGINEYTTSTVNLIQHIFDNISGSTLDRKQAWFDTGEPALPANIIIVEARPSETVKAVTAKLGVSVQDAMQGYDITAGTV

SEQ ID NO: 20255 - protein, 85 aa, unidentified
  REGION 1..85: note = Description of Unknown:cds_NZ_WFIY01000004.1_cds_WP_155864138.1_2091 target sequence
YNGQYNPNHQYVVFAQVNPGTDAELANAIAAYIYYTYPDVVNHFITMYQNASQYGFTFNKQTYQYYIQYLQSKSLDEWLSEASQI

SEQ ID NO: 20256 - protein, 85 aa, unidentified
  REGION 1..85: note = Description of Unknown:cds_NZ_WFIY01000004.1_cds_WP_155864138.1_2091 target sequence
TGVPQSVIQLIGDIIAAPKTNSSGQSFYKRTLIEFEKGVIWSGNYTPIYAIANLGIISGALSGRPGCGVSTGFGHQRGAAFPAPP

SEQ ID NO: 20257 - protein, 85 aa, unidentified
  REGION 1..85: note = Description of Unknown:cds_NZ_WFIY01000004.1_cds_WP_155864138.1_2091 target sequence
PPPWSSNLNAPRNYWIQMHEYVPQQLQAQGQTVTGTAIAEFIKNFYNQYTSTLVPQVYQDNPVIDYLIYSGYGKVLWVFTANPYK

SEQ ID NO: 20258 - protein, 85 aa, unidentified
  REGION 1..85: note = Description of Unknown:cds_NZ_WFIY01000004.1_cds_WP_155864138.1_2091 target sequence
LTMSGEKLSQVIDNRAHLLQECVENTINLGIPSSNTNSQILSGQYNTQNVGAPLPNFPDPDTYANAVISCLSGSNAVPGALFVVG

SEQ ID NO: 20259 - protein, 85 aa, unidentified
  REGION 1..85: note = Description of Unknown:cds_NZ_WFIY01000004.1_cds_WP_155864138.1_2091 target sequence
NDIILPQNGVLERAAHLILPSASNHGETYEIRWNGHDRRLRLDEVYHSPPGSAMPDVWIYAMIAYEIYQLYQAEGKQNSPQAQRI

SEQ ID NO: 20260 - protein, 85 aa, unidentified
  REGION 1..85: note = Description of Unknown:cds_NZ_WFIY01000004.1_cds_WP_155864138.1_2091 target sequence
YQAFNQIWNSLSTHMIQNSQPLSLISSYSEFYYDYDWFNIYNDIWKYYVANGPINFKSWPYGYIVPHWAPGWAQIDLNDLKAART

SEQ ID NO: 20261 - protein, 85 aa, unidentified
  REGION 1..85: note = Description of Unknown:cds_NZ_WFIY01000004.1_cds_WP_155864138.1_2091 target sequence
IGVQLPILGKITNPDGSFSLYGLVNYAEPAINGEFRVEEVTIDPNQAITVGTTPSGQTITLPLITRKVTYISINDLQSMFGYSWN

SEQ ID NO: 20262 - protein, 85 aa, unidentified
  REGION 1..85: note = Description of Unknown:cds_NZ_WFIY01000004.1_cds_WP_155864138.1_2091 target sequence
DLLPYVINGFNPFPTPYVGIFGYAAQLQSKYKYWLNNGRWNIIFQSGWIDYQIPEILQRVPYPIVMMSSTDAQNEGLQNGDIVEL

SEQ ID NO: 20263 - protein, 85 aa, unidentified
  REGION 1..85: note = Description of Unknown:hvTR_P03227 target sequence
QGAQTSEDNLGSQSQPGPCGYIYFYPLATYPLREVATLGTGYAGHRCLTVPLLCGITVEPGFSINVKALHRRPDPNCGLLRATSY

SEQ ID NO: 20264 - protein, 85 aa, unidentified
  REGION 1..85: note = Description of Unknown:hvTR_P03227 target sequence
HRDIYVFHNAHMVPPIFEGPGLEALCGETREVFGYDAYSALPRESSKPGDFFPEGLDPSAYLGAVAITEAFKERLYSGNLVAIPS

SEQ ID NO: 20265 - protein, 85 aa, unidentified
  REGION 1..85: note = Description of Unknown:hvTR_P03227 target sequence
LKQEVAVGQSASVRVPLYDKEVFPEGVPQLRQFYNSDLSRCMHEALYTGLAQALRVRRVGKLVELLEKQSLQDQAKVAKVAPLKE

SEQ ID NO: 20266 - protein, 85 aa, unidentified
  REGION 1..85: note = Description of Unknown:hvTR_P03227 target sequence
FPASTISHPDSGALMIVDSAACELAVSYAPAMLEASHETPASLNYDSWPLFADCEGPEARVAALHRYNASLAPHVSTQIFATNSV

SEQ ID NO: 20267 - protein, 85 aa, unidentified
  REGION 1..85: note = Description of Unknown:hvTR_P03227 target sequence
LYVSGVSKSTGQGKESLFNSFYMTHGLGTLQEGTWDPCRRPCFSGWGGPDVTGTNGPGNYAVEHLVYAASFSPNLLARYAYYLQF

SEQ ID NO: 20268 - protein, 85 aa, unidentified
  REGION 1..85: note = Description of Unknown:hvTR_P03227 target sequence
CQGQKSSLTPVPETGSYVAGAAASPMCSLCEGRAPAVCLNTLFFRLRDRFPPVMSTQRRDPYVISGASGSYNETDFLGNFLNFID

SEQ ID NO: 20269 - protein, 85 aa, unidentified
  REGION 1..85: note = Description of Unknown:hvTR_P03227 target sequence
KEDDGQRPDDEPRYTYWQLNQNLLERLSRLGIDAEGKLEKEPHGPRDFVKMFKDVDAAVDAEVVQFMNSMAKNNITYKDLVKSCY

SEQ ID NO: 20270 - protein, 85 aa, unidentified
  REGION 1..85: note = Description of Unknown:hvTR_P03227 target sequence
HVMQYSCNPFAQPACPIFTQLFYRSLLTILQDISLPICMCYENDNPGLGQSPPEWLKGHYQTLCTNFRSLAIDKGVLTAKEAKVV

SEQ ID NO: 20271 - protein, 85 aa, unidentified
  REGION 1..85: note = Description of Unknown:hvTR_P03227 target sequence
HGEPTCDLPDLDAALQGRVYGRRLPVRMSKVLMLCPRNIKIKNRVVFTGENAALQNSFIKSTTRRENYIINGPYMKFLNTYHKTL

SEQ ID NO: 20272 - protein, 85 aa, unidentified
  REGION 1..85: note = Description of Unknown:hvTR_P03227 target sequence
FPDTKLSSLYLWHNFSRRRSVPVPSGASAEEYSDLALFVDGGSRAHEESNVIDVVPGNLVTYAKQRLNNAILKACGQTQFYISLI

SEQ ID NO: 20273 - protein, 85 aa, unidentified
  REGION 1..85: note = Description of Unknown:hvTR_P03227 target sequence
QGLVPRTQSVPARDYPHVLGTRAVESAAAYAEATSSLTATTVVCAATDCLSQVCKARPVVTLPVTINKYTGVNGNNQIFQAGNLG

SEQ ID NO: 20274 - protein, 85 aa, unidentified
  REGION 1..85: note = Description of Unknown:hvTR_P03227 target sequence
YFMGRGVDRNLLQAPGAGLRKQAGGSSMRKKFVFATPTLGLTVKRRTQAATTYEIENIRAGLEAIISQKQEEDCVFDVVCNLVDA

SEQ ID NO: 20275 - protein, 85 aa, unidentified
  REGION 1..85: note = Description of Unknown:hvTR_P03227 target sequence
MGEACASLTRDDAEYLLGRFSVLADSVLETLATIASSGIEWTAEAARDFLEGVWGGPGAAQDNFISVAEPVSTASQASAGLLLGG

SEQ ID NO: 20276 - protein, 84 aa, unidentified
  REGION 1..84: note = Description of Unknown:hvTR_P03227 target sequence
ADSVLETLATIASSGIEWTAEAARDFLEGVWGGPGAAQDNFISVAEPVSTASQASAGLLLGGGGQGSGGRRKRRLATVLPGLEV

SEQ ID NO: 20277 - protein, 85 aa, unidentified
  REGION 1..85: note = Description of Unknown:hvTR_P03227 target sequence
ATYPLREVATLGTGYAGHRCLTVPLLCGITVEPGFSINVKALHRRPDPNCGLLRATSYHRDIYVFHNAHMVPPIFEGPGLEALCG

SEQ ID NO: 20278 - protein, 85 aa, unidentified
  REGION 1..85: note = Description of Unknown:hvTR_P03227 target sequence
ETREVFGYDAYSALPRESSKPGDFFPEGLDPSAYLGAVAITEAFKERLYSGNLVAIPSLKQEVAVGQSASVRVPLYDKEVFPEGV

SEQ ID NO: 20279 - protein, 85 aa, unidentified
  REGION 1..85: note = Description of Unknown:hvTR_P03227 target sequence
PQLRQFYNSDLSRCMHEALYTGLAQALRVRRVGKLVELLEKQSLQDQAKVAKVAPLKEFPASTISHPDSGALMIVDSAACELAVS

SEQ ID NO: 20280 - protein, 85 aa, unidentified
  REGION 1..85: note = Description of Unknown:hvTR_P03227 target sequence
YAPAMLEASHETPASLNYDSWPLFADCEGPEARVAALHRYNASLAPHVSTQIFATNSVLYVSGVSKSTGQGKESLFNSFYMTHGL

SEQ ID NO: 20281 - protein, 85 aa, unidentified
  REGION 1..85: note = Description of Unknown:hvTR_P03227 target sequence
GTLQEGTWDPCRRPCFSGWGGPDVTGTNGPGNYAVEHLVYAASFSPNLLARYAYYLQFCQGQKSSLTPVPETGSYVAGAAASPMC

SEQ ID NO: 20282 - protein, 85 aa, unidentified
  REGION 1..85: note = Description of Unknown:hvTR_P03227 target sequence
SLCEGRAPAVCLNTLFFRLRDRFPPVMSTQRRDPYVISGASGSYNETDFLGNFLNFIDKEDDGQRPDDEPRYTYWQLNQNLLERL

SEQ ID NO: 20283 - protein, 85 aa, unidentified
  REGION 1..85: note = Description of Unknown:hvTR_P03227 target sequence
SRLGIDAEGKLEKEPHGPRDFVKMFKDVDAAVDAEVVQFMNSMAKNNITYKDLVKSCYHVMQYSCNPFAQPACPIFTQLFYRSLL

SEQ ID NO: 20284 - protein, 85 aa, unidentified
  REGION 1..85: note = Description of Unknown:hvTR_P03227 target sequence
TILQDISLPICMCYENDNPGLGQSPPEWLKGHYQTLCTNFRSLAIDKGVLTAKEAKVVHGEPTCDLPDLDAALQGRVYGRRLPVR

SEQ ID NO: 20285 - protein, 85 aa, unidentified
  REGION 1..85: note = Description of Unknown:hvTR_P03227 target sequence
MSKVLMLCPRNIKIKNRVVFTGENAALQNSFIKSTTRRENYIINGPYMKFLNTYHKTLFPDTKLSSLYLWHNFSRRRSVPVPSGA

SEQ ID NO: 20286 - protein, 85 aa, unidentified
  REGION 1..85: note = Description of Unknown:hvTR_P03227 target sequence
SAEEYSDLALFVDGGSRAHEESNVIDVVPGNLVTYAKQRLNNAILKACGQTQFYISLIQGLVPRTQSVPARDYPHVLGTRAVESA

SEQ ID NO: 20287 - protein, 85 aa, unidentified
  REGION 1..85: note = Description of Unknown:hvTR_P03227 target sequence
AAYAEATSSLTATTVVCAATDCLSQVCKARPVVTLPVTINKYTGVNGNNQIFQAGNLGYFMGRGVDRNLLQAPGAGLRKQAGGSS

SEQ ID NO: 20288 - protein, 85 aa, unidentified
  REGION 1..85: note = Description of Unknown:hvTR_P03227 target sequence
MRKKFVFATPTLGLTVKRRTQAATTYEIENIRAGLEAIISQKQEEDCVFDVVCNLVDAMGEACASLTRDDAEYLLGRFSVLADSV

SEQ ID NO: 20289 - protein, 85 aa, unidentified
  REGION 1..85: note = Description of Unknown:cds_NZ_WFIY01000004.1_cds_WP_155864389.1_860 target sequence
LSVDDRWAIVESYFKSRGLVRQHLDSFNDFIKNKLQEIIDEQGEIETEIPGLKIKLGKIRVGKPRVREADRGDREITPMEARLRN

SEQ ID NO: 20290 - protein, 85 aa, unidentified
  REGION 1..85: note = Description of Unknown:cds_NZ_WFIY01000004.1_cds_WP_155864389.1_860 target sequence
LTYAAPIYLTMIPVENNIEGEPTEVYIGDLPIMLKSVADPTADLPAEKLVEIGEDPKDPGGYFIINGTEKVIVTQEDLATNRVLV

SEQ ID NO: 20291 - protein, 85 aa, unidentified
  REGION 1..85: note = Description of Unknown:cds_NZ_WFIY01000004.1_cds_WP_155864389.1_860 target sequence
DEGKSGSNVTHTAKIISSTAGYRVPITIERLRDSTIHVSFPAVPGRIPFAILMRALGLETDRDITFAVSFDEEIQNELLPSLEQA

SEQ ID NO: 20292 - protein, 85 aa, unidentified
  REGION 1..85: note = Description of Unknown:cds_NZ_WFIY01000004.1_cds_WP_155864389.1_860 target sequence
SSITTQEDALDFIGNRVAIGQKRENRIERAEQVLDKYFLPHLGLTPADRKKKAYYLGYAVSKLIELQLGRREPDDKDHYANKRLK

SEQ ID NO: 20293 - protein, 85 aa, unidentified
  REGION 1..85: note = Description of Unknown:cds_NZ_WFIY01000004.1_cds_WP_155864389.1_860 target sequence
LAGDLFSSLFRVAFKAFVKDLVYQLEKSKVRGRRLTLNALVRPDIITERIRHAMATGNWVGGRTGVSQLLDRTNWLSMLSHLRRV

SEQ ID NO: 20294 - protein, 85 aa, unidentified
  REGION 1..85: note = Description of Unknown:cds_NZ_WFIY01000004.1_cds_WP_155864389.1_860 target sequence
ISSLARGQPNFEARDLHGTQWGRMCPFETPEGPNSGLVKNLALLAQISVGINDKIVEKMLYDLGVIPLEELIRKIDEGEDPSSYT

SEQ ID NO: 20295 - protein, 85 aa, unidentified
  REGION 1..85: note = Description of Unknown:cds_NZ_WFIY01000004.1_cds_WP_155864389.1_860 target sequence
NWSKVILNGRLVGYYPNGEELANKIREKRRAGEISDEINVAHIVTDTYDEVYVNSDSGRVRRPLIVVKDGKPLVTEEDIQRLKKG

SEQ ID NO: 20296 - protein, 85 aa, unidentified
  REGION 1..85: note = Description of Unknown:cds_NZ_WFIY01000004.1_cds_WP_155864389.1_860 target sequence
EITFDTLVKEGKIEFLDAEEEENAYIALEPSKVTPEHTHLEIWTPAILGITASIIPYPEHNQSPRNTYQSAMAKQALGLYASNYQ

SEQ ID NO: 20297 - protein, 85 aa, unidentified
  REGION 1..85: note = Description of Unknown:cds_NZ_WFIY01000004.1_cds_WP_155864389.1_860 target sequence
LRTDSRAHFLHYPQKPLVQTRALDIIGYNNRPAGENAILAIMSFTGYNMEDAIIMNKSSVERGMFRSTFFRLYSAEEIKYPGGQE

SEQ ID NO: 20298 - protein, 85 aa, unidentified
  REGION 1..85: note = Description of Unknown:cds_NZ_WFIY01000004.1_cds_WP_155864389.1_860 target sequence
DKIQLPEPGVRGYKGSEYYKSLDENGIVPPEVEVKGGDVLIGKVSPPRFLQEFKELSPEQAKRDTSVITRHGEKGIVDLVLITET

SEQ ID NO: 20299 - protein, 85 aa, unidentified
  REGION 1..85: note = Description of Unknown:cds_NZ_WFIY01000004.1_cds_WP_155864389.1_860 target sequence
SEGNKLVKVRVRDLRIPELGDKFATRHGQKGVIGMLIPQADMPYTVKGIVPDIILNPHSLPSRMTLGQIMEALAGKYAALSGKTV

SEQ ID NO: 20300 - protein, 85 aa, unidentified
  REGION 1..85: note = Description of Unknown:cds_NZ_WFIY01000004.1_cds_WP_155864389.1_860 target sequence
DATPFYNTPIEELQKKLLDFGFLPDGTEVVYDGRTGQKVKGRILYGVVYYQKLHHMVADKMHGRARGPIQILTRQPTEGRAREGG

SEQ ID NO: 20301 - protein, 85 aa, unidentified
  REGION 1..85: note = Description of Unknown:cds_NZ_WFIY01000004.1_cds_WP_155864389.1_860 target sequence
LRFGEMERDCLIGYGAAMVIKDRLLDNSDKTTVYVCEQCGYIGWYDKNKNKYVCPIHGDKANLYPVTISYAFKLLLQELMSMVIS

SEQ ID NO: 20302 - protein, 84 aa, unidentified
  REGION 1..84: note = Description of Unknown:cds_NZ_WFIY01000004.1_cds_WP_155864389.1_860 target sequence
VIKDRLLDNSDKTTVYVCEQCGYIGWYDKNKNKYVCPIHGDKANLYPVTISYAFKLLLQELMSMVISPRLILGDKVSLKGDNNE

SEQ ID NO: 20303 - protein, 85 aa, unidentified
  REGION 1..85: note = Description of Unknown:cds_NZ_WFIY01000004.1_cds_WP_155864389.1_860 target sequence
NDFIKNKLQEIIDEQGEIETEIPGLKIKLGKIRVGKPRVREADRGDREITPMEARLRNLTYAAPIYLTMIPVENNIEGEPTEVYI

SEQ ID NO: 20304 - protein, 85 aa, unidentified
  REGION 1..85: note = Description of Unknown:cds_NZ_WFIY01000004.1_cds_WP_155864389.1_860 target sequence
GDLPIMLKSVADPTADLPAEKLVEIGEDPKDPGGYFIINGTEKVIVTQEDLATNRVLVDEGKSGSNVTHTAKIISSTAGYRVPIT

SEQ ID NO: 20305 - protein, 85 aa, unidentified
  REGION 1..85: note = Description of Unknown:cds_NZ_WFIY01000004.1_cds_WP_155864389.1_860 target sequence
IERLRDSTIHVSFPAVPGRIPFAILMRALGLETDRDITFAVSFDEEIQNELLPSLEQASSITTQEDALDFIGNRVAIGQKRENRI

SEQ ID NO: 20306 - protein, 85 aa, unidentified
  REGION 1..85: note = Description of Unknown:cds_NZ_WFIY01000004.1_cds_WP_155864389.1_860 target sequence
ERAEQVLDKYFLPHLGLTPADRKKKAYYLGYAVSKLIELQLGRREPDDKDHYANKRLKLAGDLFSSLFRVAFKAFVKDLVYQLEK

SEQ ID NO: 20307 - protein, 85 aa, unidentified
  REGION 1..85: note = Description of Unknown:cds_NZ_WFIY01000004.1_cds_WP_155864389.1_860 target sequence
SKVRGRRLTLNALVRPDIITERIRHAMATGNWVGGRTGVSQLLDRTNWLSMLSHLRRVISSLARGQPNFEARDLHGTQWGRMCPF

SEQ ID NO: 20308 - protein, 85 aa, unidentified
  REGION 1..85: note = Description of Unknown:cds_NZ_WFIY01000004.1_cds_WP_155864389.1_860 target sequence
ETPEGPNSGLVKNLALLAQISVGINDKIVEKMLYDLGVIPLEELIRKIDEGEDPSSYTNWSKVILNGRLVGYYPNGEELANKIRE

SEQ ID NO: 20309 - protein, 85 aa, unidentified
  REGION 1..85: note = Description of Unknown:cds_NZ_WFIY01000004.1_cds_WP_155864389.1_860 target sequence
KRRAGEISDEINVAHIVTDTYDEVYVNSDSGRVRRPLIVVKDGKPLVTEEDIQRLKKGEITFDTLVKEGKIEFLDAEEEENAYIA

SEQ ID NO: 20310 - protein, 85 aa, unidentified
  REGION 1..85: note = Description of Unknown:cds_NZ_WFIY01000004.1_cds_WP_155864389.1_860 target sequence
LEPSKVTPEHTHLEIWTPAILGITASIIPYPEHNQSPRNTYQSAMAKQALGLYASNYQLRTDSRAHFLHYPQKPLVQTRALDIIG

SEQ ID NO: 20311 - protein, 85 aa, unidentified
  REGION 1..85: note = Description of Unknown:cds_NZ_WFIY01000004.1_cds_WP_155864389.1_860 target sequence
YNNRPAGENAILAIMSFTGYNMEDAIIMNKSSVERGMFRSTFFRLYSAEEIKYPGGQEDKIQLPEPGVRGYKGSEYYKSLDENGI

SEQ ID NO: 20312 - protein, 85 aa, unidentified
  REGION 1..85: note = Description of Unknown:cds_NZ_WFIY01000004.1_cds_WP_155864389.1_860 target sequence
VPPEVEVKGGDVLIGKVSPPRFLQEFKELSPEQAKRDTSVITRHGEKGIVDLVLITETSEGNKLVKVRVRDLRIPELGDKFATRH

SEQ ID NO: 20313 - protein, 85 aa, unidentified
  REGION 1..85: note = Description of Unknown:cds_NZ_WFIY01000004.1_cds_WP_155864389.1_860 target sequence
GQKGVIGMLIPQADMPYTVKGIVPDIILNPHSLPSRMTLGQIMEALAGKYAALSGKTVDATPFYNTPIEELQKKLLDFGFLPDGT

SEQ ID NO: 20314 - protein, 85 aa, unidentified
  REGION 1..85: note = Description of Unknown:cds_NZ_WFIY01000004.1_cds_WP_155864389.1_860 target sequence
EVVYDGRTGQKVKGRILYGVVYYQKLHHMVADKMHGRARGPIQILTRQPTEGRAREGGLRFGEMERDCLIGYGAAMVIKDRLLDN

SEQ ID NO: 20315 - protein, 85 aa, unidentified
  REGION 1..85: note = Description of Unknown:hvTR_E5LC01 target sequence
APPGMRLRSGRSTGAPLTRGSCRKRNRSPERCDLGNDLHLQPRRKHVADSVDGRECGPHTLPIPGSPTVFTSGLPAFVSSPTLPV

SEQ ID NO: 20316 - protein, 85 aa, unidentified
  REGION 1..85: note = Description of Unknown:hvTR_E5LC01 target sequence
APIPSPAPATPLPPPALLSPVTTSSSPIPPSHPVSPGTTDTHSPSPALPPTQSPESSQRPPLSSPTGRPDSSTPMRPPPSQQTTP

SEQ ID NO: 20317 - protein, 85 aa, unidentified
  REGION 1..85: note = Description of Unknown:hvTR_E5LC01 target sequence
PHSPTTPPPEPPSKSSPDSLAPSTLRSLRKRRLSSPQGPSTLNPICQSPPVSPPRCDFANRSVYPPWATESPIYVGSSSDGDTPP

SEQ ID NO: 20318 - protein, 85 aa, unidentified
  REGION 1..85: note = Description of Unknown:hvTR_E5LC01 target sequence
RQPPTSPISIGSSSPSEGSWGDDTAMLVLLAEIAEEASKNEKECSENNQAGEDNGDNEISKESQVDKDDNDNKDDEEEQETDEDD

SEQ ID NO: 20319 - protein, 85 aa, unidentified
  REGION 1..85: note = Description of Unknown:hvTR_E5LC01 target sequence
EEDDEEDDEEDDEEDDEEDDEEDDEEDDEEDDEEDDEEDDEEDDEEEDEEEDEEEEEDEEDDDDEDNEDEEDDEEEDKKEDEEDG

SEQ ID NO: 20320 - protein, 85 aa, unidentified
  REGION 1..85: note = Description of Unknown:hvTR_E5LC01 target sequence
GDGNKTLSIQSSQQQQEPQQQEPQQQEPQQQEPLQEPQQQEPQQQEPQQQEPQQQEPQQQEPQQQEPQQQEPQQREPQQQEPQQR

SEQ ID NO: 20321 - protein, 85 aa, unidentified
  REGION 1..85: note = Description of Unknown:hvTR_E5LC01 target sequence
EPQQQEPQQREPQQREPQQREPQQREPQQREPQQREPQQQEPQQQEPQQQEPQQQEPQQQEPQQQEPQQQDEQQQDEQQQDEQQQ

SEQ ID NO: 20322 - protein, 85 aa, unidentified
  REGION 1..85: note = Description of Unknown:hvTR_E5LC01 target sequence
DEQQQDEQQQDEQQQDEQQQDEQEQQDEQQQQDEQQQQDEQQQQDEQQQEEQEQQEEQEQELEEQEQELEEQEQELEEQEQELEE

SEQ ID NO: 20323 - protein, 85 aa, unidentified
  REGION 1..85: note = Description of Unknown:hvTR_E5LC01 target sequence
QEQELEEQEQELEEQEQELEEQEQELEEQEQELEEQEQELEEQEQELEEQEQELEEQEQELEEQEQELEEQEQELEEQEQELEEQ

SEQ ID NO: 20324 - protein, 85 aa, unidentified
  REGION 1..85: note = Description of Unknown:hvTR_E5LC01 target sequence
EQELEEQEQELEEQEQELEEQEQELEEQEQELEEQEQELEEQEQEQELEEVEEQEQEQEEQELEEVEEQEQEQEEQEEQELEEVE

SEQ ID NO: 20325 - protein, 85 aa, unidentified
  REGION 1..85: note = Description of Unknown:hvTR_E5LC01 target sequence
EQEEQELEEVEEQEEQELEEVEEQEQQGVEQQEQETVEEPIILHGSSSEDEMEVDYPVVSTHEQIASSPPGDNTPDDDPQPGPSR

SEQ ID NO: 20326 - protein, 85 aa, unidentified
  REGION 1..85: note = Description of Unknown:hvTR_E5LC01 target sequence
EYRYVLRTSPPHRPGVRMRRVPVTHPKKPHPRYQQPPVPYRQIDDCPAKARPQHIFYRRFLGKDGRRDPKCQWKFAVIFWGNDPY

SEQ ID NO: 20327 - protein, 85 aa, unidentified
  REGION 1..85: note = Description of Unknown:hvTR_E5LC01 target sequence
GLKKLSQAFQFGGVKAGPVSCLPHLGPDQSPITYCVYVYCQNKDTSKKVQMARLAWEASHPLAGNLQSSIVKFKKPLPLTQPGEN

SEQ ID NO: 20328 - protein, 84 aa, unidentified
  REGION 1..84: note = Description of Unknown:hvTR_E5LC01 target sequence
GVKAGPVSCLPHLGPDQSPITYCVYVYCQNKDTSKKVQMARLAWEASHPLAGNLQSSIVKFKKPLPLTQPGENQGPGDSPQEMT

SEQ ID NO: 20329 - protein, 85 aa, unidentified
  REGION 1..85: note = Description of Unknown:hvTR_E5LC01 target sequence
SPERCDLGNDLHLQPRRKHVADSVDGRECGPHTLPIPGSPTVFTSGLPAFVSSPTLPVAPIPSPAPATPLPPPALLSPVTTSSSP

SEQ ID NO: 20330 - protein, 85 aa, unidentified
  REGION 1..85: note = Description of Unknown:hvTR_E5LC01 target sequence
IPPSHPVSPGTTDTHSPSPALPPTQSPESSQRPPLSSPTGRPDSSTPMRPPPSQQTTPPHSPTTPPPEPPSKSSPDSLAPSTLRS

SEQ ID NO: 20331 - protein, 85 aa, unidentified
  REGION 1..85: note = Description of Unknown:hvTR_E5LC01 target sequence
LRKRRLSSPQGPSTLNPICQSPPVSPPRCDFANRSVYPPWATESPIYVGSSSDGDTPPRQPPTSPISIGSSSPSEGSWGDDTAML

SEQ ID NO: 20332 - protein, 85 aa, unidentified
  REGION 1..85: note = Description of Unknown:hvTR_E5LC01 target sequence
VLLAEIAEEASKNEKECSENNQAGEDNGDNEISKESQVDKDDNDNKDDEEEQETDEDDEEDDEEDDEEDDEEDDEEDDEEDDEED

SEQ ID NO: 20333 - protein, 85 aa, unidentified
  REGION 1..85: note = Description of Unknown:hvTR_E5LC01 target sequence
DEEDDEEDDEEDDEEDDEEEDEEEDEEEEEDEEDDDDEDNEDEEDDEEEDKKEDEEDGGDGNKTLSIQSSQQQQEPQQQEPQQQE

SEQ ID NO: 20334 - protein, 85 aa, unidentified
  REGION 1..85: note = Description of Unknown:hvTR_E5LC01 target sequence
PQQQEPLQEPQQQEPQQQEPQQQEPQQQEPQQQEPQQQEPQQQEPQQREPQQQEPQQREPQQQEPQQREPQQREPQQREPQQREP

SEQ ID NO: 20335 - protein, 85 aa, unidentified
  REGION 1..85: note = Description of Unknown:hvTR_E5LC01 target sequence
QQREPQQREPQQQEPQQQEPQQQEPQQQEPQQQEPQQQEPQQQDEQQQDEQQQDEQQQDEQQQDEQQQDEQQQDEQQQDEQEQQD

SEQ ID NO: 20336 - protein, 85 aa, unidentified
  REGION 1..85: note = Description of Unknown:hvTR_E5LC01 target sequence
EQQQQDEQQQQDEQQQQDEQQQEEQEQQEEQEQELEEQEQELEEQEQELEEQEQELEEQEQELEEQEQELEEQEQELEEQEQELE

SEQ ID NO: 20337 - protein, 85 aa, unidentified
  REGION 1..85: note = Description of Unknown:hvTR_E5LC01 target sequence
EQEQELEEQEQELEEQEQELEEQEQELEEQEQELEEQEQELEEQEQELEEQEQELEEQEQELEEQEQELEEQEQELEEQEQELEE

SEQ ID NO: 20338 - protein, 85 aa, unidentified
  REGION 1..85: note = Description of Unknown:hvTR_E5LC01 target sequence
QEQELEEQEQELEEQEQEQELEEVEEQEQEQEEQELEEVEEQEQEQEEQEEQELEEVEEQEEQELEEVEEQEEQELEEVEEQEQQ

SEQ ID NO: 20339 - protein, 85 aa, unidentified
  REGION 1..85: note = Description of Unknown:hvTR_E5LC01 target sequence
GVEQQEQETVEEPIILHGSSSEDEMEVDYPVVSTHEQIASSPPGDNTPDDDPQPGPSREYRYVLRTSPPHRPGVRMRRVPVTHPK

SEQ ID NO: 20340 - protein, 85 aa, unidentified
  REGION 1..85: note = Description of Unknown:hvTR_E5LC01 target sequence
KPHPRYQQPPVPYRQIDDCPAKARPQHIFYRRFLGKDGRRDPKCQWKFAVIFWGNDPYGLKKLSQAFQFGGVKAGPVSCLPHLGP

SEQ ID NO: 20341 - protein, 85 aa, unidentified
  REGION 1..85: note = Description of Unknown:cds_NZ_WFIY01000004.1_cds_2164 target sequence
VSNLIYENKVKEDVFDSKLDDQVAPELSDVILKKAPKVYLDPREFLASTYLTGSMKSLVNEITYALNQGKGITLGLFSLFGGGKT

SEQ ID NO: 20342 - protein, 85 aa, unidentified
  REGION 1..85: note = Description of Unknown:cds_NZ_WFIY01000004.1_cds_2164 target sequence
HTVLLLYHAFTNPSLARQLGLEVPDNVKVIGIGGKDSRTAPSPIDVLMEDGIEIKTLWGYIAKKLGKYDIIRKYDEDQISPPKDK

SEQ ID NO: 20343 - protein, 85 aa, unidentified
  REGION 1..85: note = Description of Unknown:cds_NZ_WFIY01000004.1_cds_2164 target sequence
LEELFKGEKVLILIDEIVFYLSRVRGLKTGNNFYEQCLTFFEILASVSTNLPVAVIVTVPANLPEEKSKEGGLLNFIPEPGYEEV

SEQ ID NO: 20344 - protein, 85 aa, unidentified
  REGION 1..85: note = Description of Unknown:cds_NZ_WFIY01000004.1_cds_2164 target sequence
TEALVKRILRVGKVYRAPIETAVDLANVLIKRIFKEINNEVKRRVIEEYQKYVDEFKDYVIDKADLVDTYPFHPLYINLLKNLLE

SEQ ID NO: 20345 - protein, 85 aa, unidentified
  REGION 1..85: note = Description of Unknown:cds_NZ_WFIY01000004.1_cds_2164 target sequence
GNRHLQGTREAIKITRIVIRNIWENKPTRSLILPSDISIKDNQIRLLLLKDYKNYDIVADTIIQRSKGLDIVFLLANYIFVSTYY

SEQ ID NO: 20346 - protein, 85 aa, unidentified
  REGION 1..85: note = Description of Unknown:cds_NZ_WFIY01000004.1_cds_2164 target sequence
KQLGLDPGPLITALPDSKEVVTSVLDPEYLNSVGKTPADVKDILDSISSTSKDVEMVIPYLISDKGRYWVTFFADPKTICEKEAS

SEQ ID NO: 20347 - protein, 85 aa, unidentified
  REGION 1..85: note = Description of Unknown:cds_NZ_WFIY01000004.1_cds_2164 target sequence
KILPSDVEKELDEKILSLAEIPIDDIQKKKRYQGGRLLKLHRTVVRNLSAPVDIDEPSYYLIILGTPICRDCKDDEVKNKARDIA

SEQ ID NO: 20348 - protein, 85 aa, unidentified
  REGION 1..85: note = Description of Unknown:cds_NZ_WFIY01000004.1_cds_2164 target sequence
RRFIYYTSSGKAEKPRKYSNTIVLLFSSQGNNEDKIKDYVRRYISCSNMNVDPYYSDKATRDVAKKILDDYVRGLEGTIYNQIFQ

SEQ ID NO: 20349 - protein, 85 aa, unidentified
  REGION 1..85: note = Description of Unknown:cds_NZ_WFIY01000004.1_cds_2164 target sequence
YFDKVAYPYGNNDVNIVDLKSSGKTLLQQVEDTLVEESKIMMSDSFNFDTLKWLLQNINIDITNGTFKVENIKEMFYTNPSLPFV

SEQ ID NO: 20350 - protein, 85 aa, unidentified
  REGION 1..85: note = Description of Unknown:cds_NZ_WFIY01000004.1_cds_2164 target sequence
PESVLLNAIKEGVDRLEIGILNGSKIYYKKYGGLSEFTINDSSIIYPPQIAAEKEIEELSKEETVQLEDGVLKRYYVLELEGNRI

SEQ ID NO: 20351 - protein, 85 aa, unidentified
  REGION 1..85: note = Description of Unknown:cds_NZ_WFIY01000004.1_cds_2164 target sequence
PISQLRREQDWLEKFKAGEIKLVEEKIESGVEIYAEPDSIEGMKGETKEVKLIVRKIGNFNSKVYLSSTLGELSVKEGVPDFQAS

SEQ ID NO: 20352 - protein, 85 aa, unidentified
  REGION 1..85: note = Description of Unknown:cds_NZ_WFIY01000004.1_cds_2164 target sequence
LRITLDHDTDVVVTAKYENKEKQTKIHVRVLQTVCEKYVDEVSKDSVITEVDIVNTTDLKNILPKLNSSIIGKKSLTGELTIEEP

SEQ ID NO: 20353 - protein, 84 aa, unidentified
  REGION 1..84: note = Description of Unknown:cds_NZ_WFIY01000004.1_cds_2164 target sequence
SLTGELTIEEPDKKISLVIKPNGSQINDFITLLSPLLSYAGLRAKVSGNLKVKVEEFKGLSDEGVKNLNELLKGQVIKINVKVC

SEQ ID NO: 20354 - protein, 85 aa, unidentified
  REGION 1..85: note = Description of Unknown:cds_NZ_WFIY01000004.1_cds_2164 target sequence
SDVILKKAPKVYLDPREFLASTYLTGSMKSLVNEITYALNQGKGITLGLFSLFGGGKTHTVLLLYHAFTNPSLARQLGLEVPDNV

SEQ ID NO: 20355 - protein, 85 aa, unidentified
  REGION 1..85: note = Description of Unknown:cds_NZ_WFIY01000004.1_cds_2164 target sequence
KVIGIGGKDSRTAPSPIDVLMEDGIEIKTLWGYIAKKLGKYDIIRKYDEDQISPPKDKLEELFKGEKVLILIDEIVFYLSRVRGL

SEQ ID NO: 20356 - protein, 85 aa, unidentified
  REGION 1..85: note = Description of Unknown:cds_NZ_WFIY01000004.1_cds_2164 target sequence
KTGNNFYEQCLTFFEILASVSTNLPVAVIVTVPANLPEEKSKEGGLLNFIPEPGYEEVTEALVKRILRVGKVYRAPIETAVDLAN

SEQ ID NO: 20357 - protein, 85 aa, unidentified
  REGION 1..85: note = Description of Unknown:cds_NZ_WFIY01000004.1_cds_2164 target sequence
VLIKRIFKEINNEVKRRVIEEYQKYVDEFKDYVIDKADLVDTYPFHPLYINLLKNLLEGNRHLQGTREAIKITRIVIRNIWENKP

SEQ ID NO: 20358 - protein, 85 aa, unidentified
  REGION 1..85: note = Description of Unknown:cds_NZ_WFIY01000004.1_cds_2164 target sequence
TRSLILPSDISIKDNQIRLLLLKDYKNYDIVADTIIQRSKGLDIVFLLANYIFVSTYYKQLGLDPGPLITALPDSKEVVTSVLDP

SEQ ID NO: 20359 - protein, 85 aa, unidentified
  REGION 1..85: note = Description of Unknown:cds_NZ_WFIY01000004.1_cds_2164 target sequence
EYLNSVGKTPADVKDILDSISSTSKDVEMVIPYLISDKGRYWVTFFADPKTICEKEASKILPSDVEKELDEKILSLAEIPIDDIQ

SEQ ID NO: 20360 - protein, 85 aa, unidentified
  REGION 1..85: note = Description of Unknown:cds_NZ_WFIY01000004.1_cds_2164 target sequence
KKKRYQGGRLLKLHRTVVRNLSAPVDIDEPSYYLIILGTPICRDCKDDEVKNKARDIARRFIYYTSSGKAEKPRKYSNTIVLLFS

SEQ ID NO: 20361 - protein, 85 aa, unidentified
  REGION 1..85: note = Description of Unknown:cds_NZ_WFIY01000004.1_cds_2164 target sequence
SQGNNEDKIKDYVRRYISCSNMNVDPYYSDKATRDVAKKILDDYVRGLEGTIYNQIFQYFDKVAYPYGNNDVNIVDLKSSGKTLL

SEQ ID NO: 20362 - protein, 85 aa, unidentified
  REGION 1..85: note = Description of Unknown:cds_NZ_WFIY01000004.1_cds_2164 target sequence
QQVEDTLVEESKIMMSDSFNFDTLKWLLQNINIDITNGTFKVENIKEMFYTNPSLPFVPESVLLNAIKEGVDRLEIGILNGSKIY

SEQ ID NO: 20363 - protein, 85 aa, unidentified
  REGION 1..85: note = Description of Unknown:cds_NZ_WFIY01000004.1_cds_2164 target sequence
YKKYGGLSEFTINDSSIIYPPQIAAEKEIEELSKEETVQLEDGVLKRYYVLELEGNRIPISQLRREQDWLEKFKAGEIKLVEEKI

SEQ ID NO: 20364 - protein, 85 aa, unidentified
  REGION 1..85: note = Description of Unknown:cds_NZ_WFIY01000004.1_cds_2164 target sequence
ESGVEIYAEPDSIEGMKGETKEVKLIVRKIGNFNSKVYLSSTLGELSVKEGVPDFQASLRITLDHDTDVVVTAKYENKEKQTKIH

SEQ ID NO: 20365 - protein, 85 aa, unidentified
  REGION 1..85: note = Description of Unknown:cds_NZ_WFIY01000004.1_cds_2164 target sequence
VRVLQTVCEKYVDEVSKDSVITEVDIVNTTDLKNILPKLNSSIIGKKSLTGELTIEEPDKKISLVIKPNGSQINDFITLLSPLLS

SEQ ID NO: 20366 - protein, 85 aa, unidentified
  REGION 1..85: note = Description of Unknown:cds_NC_040414.1_cds_YP_009551540.1_1 target sequence
GKYNSLLSEYLAFVYNSQSAVQIPIYYSSNNELEARCVEFHAKCVEYSKKGASLNVVFNEYKDVIENATLLSILSYSYDKYNAVE

SEQ ID NO: 20367 - protein, 85 aa, unidentified
  REGION 1..85: note = Description of Unknown:cds_NC_040414.1_cds_YP_009551540.1_1 target sequence
RKLARYATGQALVADITVNELDYENNKLTSQLFPSQEEYTDSLMDPAILTSLSSNLNAVMFWLDKHENDTDEAKKVYKRRLDLFT

SEQ ID NO: 20368 - protein, 85 aa, unidentified
  REGION 1..85: note = Description of Unknown:cds_NC_040414.1_cds_YP_009551540.1_1 target sequence
IVASTVNKYGVPRHNSKYRYEYDVMKDKPYYLVTWANSAIEMLMSVFSHEDYLIAKELIILSYSNRSTLAKVVSSPMSILVALVD

SEQ ID NO: 20369 - protein, 85 aa, unidentified
  REGION 1..85: note = Description of Unknown:cds_NC_040414.1_cds_YP_009551540.1_1 target sequence
INGTFITNEELELEFSNKYVKAIVPDQTYDELLDMINSMKKAGLIDIPRMIEDWLCEKSIEKFNLMAKIYSWSFHVGFRKQKMID

SEQ ID NO: 20370 - protein, 85 aa, unidentified
  REGION 1..85: note = Description of Unknown:cds_NC_040414.1_cds_YP_009551540.1_1 target sequence
AALDQLKTEYVEDVDNEMYHEYSTLIRNEIVKMLEESVKHDDHLLQESELAGLLSMSSASNGESRQLKFGKKTIFSTKKNMHVMD

SEQ ID NO: 20371 - protein, 85 aa, unidentified
  REGION 1..85: note = Description of Unknown:cds_NC_040414.1_cds_YP_009551540.1_1 target sequence
DMKSGKYTPGVIPPVDVTKPIPLGRRDVPGRRTRIIFILPYEYFIAQHAIVERMLQYAKHTREYAEFYSQSNQLLSYGDVTRFLS

SEQ ID NO: 20372 - protein, 85 aa, unidentified
  REGION 1..85: note = Description of Unknown:cds_NC_040414.1_cds_YP_009551540.1_1 target sequence
NNAMVLYTDVSQWDSSQHNTQPFRKGIIMGLDMLSNMTNDSKILKTLNLYKQTQINLMNSYVQIPDGNVIKKIQYGAVASGEKQT

SEQ ID NO: 20373 - protein, 85 aa, unidentified
  REGION 1..85: note = Description of Unknown:cds_NC_040414.1_cds_YP_009551540.1_1 target sequence
KAANSIANLALIKTVLSRLANEYSFSTKIIRVDGDDNYAVLQFNTEVTQSMVRDVSNKVRDTYARMNAKVKALVSTVGIEIAKRY

SEQ ID NO: 20374 - protein, 85 aa, unidentified
  REGION 1..85: note = Description of Unknown:cds_NC_040414.1_cds_YP_009551540.1_1 target sequence
IAGGKIFFRAGINLLNNEKRGQNTQWDQAAVLYSNYIVNKLRGFNTDREFILVKIMQMTSVAITGSLRLFPSERVLTTNSTFKVF

SEQ ID NO: 20375 - protein, 85 aa, unidentified
  REGION 1..85: note = Description of Unknown:cds_NC_040414.1_cds_YP_009551540.1_1 target sequence
DSEDFIIEYGVTDDEVYIQRAFMSLSSQKSGIADEISASETFKNYVSRLSEQLLVTRNNIVSRGIAMTEKAKLNSYAPISLEKRR

SEQ ID NO: 20376 - protein, 85 aa, unidentified
  REGION 1..85: note = Description of Unknown:cds_NC_040414.1_cds_YP_009551540.1_1 target sequence
AQISALLSMLQKPVTYKSSKITINDILRDIKPYFVMTESHLPCQYPKFMPTLPDNVQYVIQRIGSRTYQIEDDGSKSAISKLISK

SEQ ID NO: 20377 - protein, 85 aa, unidentified
  REGION 1..85: note = Description of Unknown:cds_NC_040414.1_cds_YP_009551540.1_1 target sequence
YSVYRPSIEELYKVISLHEKDIQMYLISLGVPKIDADTYVGSKIYSQDKYKILQSYVYNLLSINYGCYQLFDFNSRELEGLIRIP

SEQ ID NO: 20378 - protein, 84 aa, unidentified
  REGION 1..84: note = Description of Unknown:cds_NC_040414.1_cds_YP_009551540.1_1 target sequence
QLFDFNSRELEGLIRIPFKGKVPSVTFILHLYAKLEIINYAIKNSAWISVFCNFPKSEMVKLWKKMWNITSLRSPYTNANFFQD

SEQ ID NO: 20379 - protein, 85 aa, unidentified
  REGION 1..85: note = Description of Unknown:cds_NC_040414.1_cds_YP_009551540.1_1 target sequence
SSNNELEARCVEFHAKCVEYSKKGASLNVVFNEYKDVIENATLLSILSYSYDKYNAVERKLARYATGQALVADITVNELDYENNK

SEQ ID NO: 20380 - protein, 85 aa, unidentified
  REGION 1..85: note = Description of Unknown:cds_NC_040414.1_cds_YP_009551540.1_1 target sequence
LTSQLFPSQEEYTDSLMDPAILTSLSSNLNAVMFWLDKHENDTDEAKKVYKRRLDLFTIVASTVNKYGVPRHNSKYRYEYDVMKD

SEQ ID NO: 20381 - protein, 85 aa, unidentified
  REGION 1..85: note = Description of Unknown:cds_NC_040414.1_cds_YP_009551540.1_1 target sequence
KPYYLVTWANSAIEMLMSVFSHEDYLIAKELIILSYSNRSTLAKVVSSPMSILVALVDINGTFITNEELELEFSNKYVKAIVPDQ

SEQ ID NO: 20382 - protein, 85 aa, unidentified
  REGION 1..85: note = Description of Unknown:cds_NC_040414.1_cds_YP_009551540.1_1 target sequence
TYDELLDMINSMKKAGLIDIPRMIEDWLCEKSIEKFNLMAKIYSWSFHVGFRKQKMIDAALDQLKTEYVEDVDNEMYHEYSTLIR

SEQ ID NO: 20383 - protein, 85 aa, unidentified
  REGION 1..85: note = Description of Unknown:cds_NC_040414.1_cds_YP_009551540.1_1 target sequence
NEIVKMLEESVKHDDHLLQESELAGLLSMSSASNGESRQLKFGKKTIFSTKKNMHVMDDMKSGKYTPGVIPPVDVTKPIPLGRRD

SEQ ID NO: 20384 - protein, 85 aa, unidentified
  REGION 1..85: note = Description of Unknown:cds_NC_040414.1_cds_YP_009551540.1_1 target sequence
VPGRRTRIIFILPYEYFIAQHAIVERMLQYAKHTREYAEFYSQSNQLLSYGDVTRFLSNNAMVLYTDVSQWDSSQHNTQPFRKGI

SEQ ID NO: 20385 - protein, 85 aa, unidentified
  REGION 1..85: note = Description of Unknown:cds_NC_040414.1_cds_YP_009551540.1_1 target sequence
IMGLDMLSNMTNDSKILKTLNLYKQTQINLMNSYVQIPDGNVIKKIQYGAVASGEKQTKAANSIANLALIKTVLSRLANEYSFST

SEQ ID NO: 20386 - protein, 85 aa, unidentified
  REGION 1..85: note = Description of Unknown:cds_NC_040414.1_cds_YP_009551540.1_1 target sequence
KIIRVDGDDNYAVLQFNTEVTQSMVRDVSNKVRDTYARMNAKVKALVSTVGIEIAKRYIAGGKIFFRAGINLLNNEKRGQNTQWD

SEQ ID NO: 20387 - protein, 85 aa, unidentified
  REGION 1..85: note = Description of Unknown:cds_NC_040414.1_cds_YP_009551540.1_1 target sequence
QAAVLYSNYIVNKLRGFNTDREFILVKIMQMTSVAITGSLRLFPSERVLTTNSTFKVFDSEDFIIEYGVTDDEVYIQRAFMSLSS

SEQ ID NO: 20388 - protein, 85 aa, unidentified
  REGION 1..85: note = Description of Unknown:cds_NC_040414.1_cds_YP_009551540.1_1 target sequence
QKSGIADEISASETFKNYVSRLSEQLLVTRNNIVSRGIAMTEKAKLNSYAPISLEKRRAQISALLSMLQKPVTYKSSKITINDIL

SEQ ID NO: 20389 - protein, 85 aa, unidentified
  REGION 1..85: note = Description of Unknown:cds_NC_040414.1_cds_YP_009551540.1_1 target sequence
RDIKPYFVMTESHLPCQYPKFMPTLPDNVQYVIQRIGSRTYQIEDDGSKSAISKLISKYSVYRPSIEELYKVISLHEKDIQMYLI

SEQ ID NO: 20390 - protein, 85 aa, unidentified
  REGION 1..85: note = Description of Unknown:cds_NC_040414.1_cds_YP_009551540.1_1 target sequence
SLGVPKIDADTYVGSKIYSQDKYKILQSYVYNLLSINYGCYQLFDFNSRELEGLIRIPFKGKVPSVTFILHLYAKLEIINYAIKN

SEQ ID NO: 20391 - protein, 85 aa, unidentified
  REGION 1..85: note = Description of Unknown:cds_NC_011507.2_cds_YP_002302227.1_1 target sequence
GKYNLILSEYLSFIYNSQSAVQIPIYYSSNSELENRCIEFHSKCLENSKNGLSLRKLFVEYNDVIENATLLSILSYSYDKYNAVE

SEQ ID NO: 20392 - protein, 85 aa, unidentified
  REGION 1..85: note = Description of Unknown:cds_NC_011507.2_cds_YP_002302227.1_1 target sequence
RKLVKYAKGKPLEADLTVNELDYENNKITSELFPTAEEYTDSLMDPAILTSLSSNLNAVMFWLEKHENDVAEKLKVYKRRLDLFT

SEQ ID NO: 20393 - protein, 85 aa, unidentified
  REGION 1..85: note = Description of Unknown:cds_NC_011507.2_cds_YP_002302227.1_1 target sequence
IVASTINKYGVPRHNAKYRYEYDVMKDKPYYLVTWANSSIEMLMSVFSHDDYLIAKELIVLSYSNRSTLAKLVSSPMSILVALVD

SEQ ID NO: 20394 - protein, 85 aa, unidentified
  REGION 1..85: note = Description of Unknown:cds_NC_011507.2_cds_YP_002302227.1_1 target sequence
INGTFITNEELELEFSNKYVRAIVPDQTFDELNQMLDNMRKAGLVDIPKMIQDWLVDRSIEKFPLMAKIYSWSFHVGFRKQKMLD

SEQ ID NO: 20395 - protein, 85 aa, unidentified
  REGION 1..85: note = Description of Unknown:cds_NC_011507.2_cds_YP_002302227.1_1 target sequence
AALDQLKTEYTENVDDEMYREYTMLIRDEVVKMLEEPVKHDDHLLRDSELAGLLSMSSASNGESRQLKFGRKTIFSTKKNMHVMD

SEQ ID NO: 20396 - protein, 85 aa, unidentified
  REGION 1..85: note = Description of Unknown:cds_NC_011507.2_cds_YP_002302227.1_1 target sequence
DMANERYTPGIIPPVNVDKPIPLGRRDVPGRRTRIIFILPYEYFIAQHAVVEKMLIYAKHTREYAEFYSQSNQLLSYGDVTRFLS

SEQ ID NO: 20397 - protein, 85 aa, unidentified
  REGION 1..85: note = Description of Unknown:cds_NC_011507.2_cds_YP_002302227.1_1 target sequence
NNTMVLYTDVSQWDSSQHNTQPFRKGIIMGLDILANMTNDAKVLQTLNLYKQTQINLMDSYVQIPDGNVIKKIQYGAVASGEKQT

SEQ ID NO: 20398 - protein, 85 aa, unidentified
  REGION 1..85: note = Description of Unknown:cds_NC_011507.2_cds_YP_002302227.1_1 target sequence
KAANSIANLALIKTVLSRISNKHSFATKIIRVDGDDNYAVLQFNTEVTKQMIQDVSNDVRETYARMNAKVKALVSTVGIEIAKRY

SEQ ID NO: 20399 - protein, 85 aa, unidentified
  REGION 1..85: note = Description of Unknown:cds_NC_011507.2_cds_YP_002302227.1_1 target sequence
IAGGKIFFRAGINLLNNEKRGQSTQWDQAAILYSNYIVNRLRGFETDREFILTKIMQMTSVAITGSLRLFPSERVLTTNSTFKVF

SEQ ID NO: 20400 - protein, 85 aa, unidentified
  REGION 1..85: note = Description of Unknown:cds_NC_011507.2_cds_YP_002302227.1_1 target sequence
DSEDFIIEYGTTDDEVYIQRAFMSLSSQKSGIADEIAASSTFKNYVTRLSEQLLFSKNNIVSRGIALTEKAKLNSYAPISLEKRR

SEQ ID NO: 20401 - protein, 85 aa, unidentified
  REGION 1..85: note = Description of Unknown:cds_NC_011507.2_cds_YP_002302227.1_1 target sequence
AQISALLTMLQKPVTFKSSKITINDILRDIKPFFTVSDAHLPIQYQKFMPTLPDNVQYIIQCIGSRTYQIEDDGSKSAISRLISK

SEQ ID NO: 20402 - protein, 85 aa, unidentified
  REGION 1..85: note = Description of Unknown:cds_NC_011507.2_cds_YP_002302227.1_1 target sequence
YSVYKPSIEELYKVISLHENEIQLYLISLGIPKIDADTYVGSKIYSQDKYRILESYVYNLLSINYGCYQLFDFNSPDLEKLIRIP

SEQ ID NO: 20403 - protein, 84 aa, unidentified
  REGION 1..84: note = Description of Unknown:cds_NC_011507.2_cds_YP_002302227.1_1 target sequence
QLFDFNSPDLEKLIRIPFKGKIPAVTFILHLYAKLEVINYAIKNGSWISLFCNYPKSEMIKLWKKMWNITSLRSPYTNANFFQD

SEQ ID NO: 20404 - protein, 85 aa, unidentified
  REGION 1..85: note = Description of Unknown:cds_NC_011507.2_cds_YP_002302227.1_1 target sequence
SSNSELENRCIEFHSKCLENSKNGLSLRKLFVEYNDVIENATLLSILSYSYDKYNAVERKLVKYAKGKPLEADLTVNELDYENNK

SEQ ID NO: 20405 - protein, 85 aa, unidentified
  REGION 1..85: note = Description of Unknown:cds_NC_011507.2_cds_YP_002302227.1_1 target sequence
ITSELFPTAEEYTDSLMDPAILTSLSSNLNAVMFWLEKHENDVAEKLKVYKRRLDLFTIVASTINKYGVPRHNAKYRYEYDVMKD

SEQ ID NO: 20406 - protein, 85 aa, unidentified
  REGION 1..85: note = Description of Unknown:cds_NC_011507.2_cds_YP_002302227.1_1 target sequence
KPYYLVTWANSSIEMLMSVFSHDDYLIAKELIVLSYSNRSTLAKLVSSPMSILVALVDINGTFITNEELELEFSNKYVRAIVPDQ

SEQ ID NO: 20407 - protein, 85 aa, unidentified
  REGION 1..85: note = Description of Unknown:cds_NC_011507.2_cds_YP_002302227.1_1 target sequence
TFDELNQMLDNMRKAGLVDIPKMIQDWLVDRSIEKFPLMAKIYSWSFHVGFRKQKMLDAALDQLKTEYTENVDDEMYREYTMLIR

SEQ ID NO: 20408 - protein, 85 aa, unidentified
  REGION 1..85: note = Description of Unknown:cds_NC_011507.2_cds_YP_002302227.1_1 target sequence
DEVVKMLEEPVKHDDHLLRDSELAGLLSMSSASNGESRQLKFGRKTIFSTKKNMHVMDDMANERYTPGIIPPVNVDKPIPLGRRD

SEQ ID NO: 20409 - protein, 85 aa, unidentified
  REGION 1..85: note = Description of Unknown:cds_NC_011507.2_cds_YP_002302227.1_1 target sequence
VPGRRTRIIFILPYEYFIAQHAVVEKMLIYAKHTREYAEFYSQSNQLLSYGDVTRFLSNNTMVLYTDVSQWDSSQHNTQPFRKGI

SEQ ID NO: 20410 - protein, 85 aa, unidentified
  REGION 1..85: note = Description of Unknown:cds_NC_011507.2_cds_YP_002302227.1_1 target sequence
IMGLDILANMTNDAKVLQTLNLYKQTQINLMDSYVQIPDGNVIKKIQYGAVASGEKQTKAANSIANLALIKTVLSRISNKHSFAT

SEQ ID NO: 20411 - protein, 85 aa, unidentified
  REGION 1..85: note = Description of Unknown:cds_NC_011507.2_cds_YP_002302227.1_1 target sequence
KIIRVDGDDNYAVLQFNTEVTKQMIQDVSNDVRETYARMNAKVKALVSTVGIEIAKRYIAGGKIFFRAGINLLNNEKRGQSTQWD

SEQ ID NO: 20412 - protein, 85 aa, unidentified
  REGION 1..85: note = Description of Unknown:cds_NC_011507.2_cds_YP_002302227.1_1 target sequence
QAAILYSNYIVNRLRGFETDREFILTKIMQMTSVAITGSLRLFPSERVLTTNSTFKVFDSEDFIIEYGTTDDEVYIQRAFMSLSS

SEQ ID NO: 20413 - protein, 85 aa, unidentified
  REGION 1..85: note = Description of Unknown:cds_NC_011507.2_cds_YP_002302227.1_1 target sequence
QKSGIADEIAASSTFKNYVTRLSEQLLFSKNNIVSRGIALTEKAKLNSYAPISLEKRRAQISALLTMLQKPVTFKSSKITINDIL

SEQ ID NO: 20414 - protein, 85 aa, unidentified
  REGION 1..85: note = Description of Unknown:cds_NC_011507.2_cds_YP_002302227.1_1 target sequence
RDIKPFFTVSDAHLPIQYQKFMPTLPDNVQYIIQCIGSRTYQIEDDGSKSAISRLISKYSVYKPSIEELYKVISLHENEIQLYLI

SEQ ID NO: 20415 - protein, 85 aa, unidentified
  REGION 1..85: note = Description of Unknown:cds_NC_011507.2_cds_YP_002302227.1_1 target sequence
SLGIPKIDADTYVGSKIYSQDKYRILESYVYNLLSINYGCYQLFDFNSPDLEKLIRIPFKGKIPAVTFILHLYAKLEVINYAIKN

SEQ ID NO: 20416 - protein, 85 aa, unidentified
  REGION 1..85: note = Description of Unknown:hvTR_Q6XA69 target sequence
ESAKDTTSNSMFILGKPSGNNMESNEERMQNYHPDPVVEESIKEILEESLKCDVSFESLLFPELEAFDLFIPESSNDIASKNVSY

SEQ ID NO: 20417 - protein, 85 aa, unidentified
  REGION 1..85: note = Description of Unknown:hvTR_Q6XA69 target sequence
SSNVEEGASEEFKALVAQSVGNCIQSIGASVKAAMKQEQSNMEDNLINSAGLLTLHRSMLERLVLEQLGQLININLLSSASSQFV

SEQ ID NO: 20418 - protein, 85 aa, unidentified
  REGION 1..85: note = Description of Unknown:hvTR_Q6XA69 target sequence
SCYAKMLSGKNLDFFNWCEPRFIVFACDKFDGLVKKIASESRDLLMDLKANMNNQFITALKNIFSKAYVTLDSEKLNMVATSLLL

SEQ ID NO: 20419 - protein, 85 aa, unidentified
  REGION 1..85: note = Description of Unknown:hvTR_Q6XA69 target sequence
MAHNKEMSNPEISNKEFCKQVNLLKQELLESRNEIIENHVKNMKMFQEFANKQMNQIFMDNCDKTFLKIHINCKNLITAAKNIGI

SEQ ID NO: 20420 - protein, 85 aa, unidentified
  REGION 1..85: note = Description of Unknown:hvTR_Q6XA69 target sequence
AVLQSIVLCSNEFSWQYLKPRRHQFKITMMNMITHACECIETIYDDTGLIKPLTSFDIMEGYIAINKNRESSICDLNIDPSESIL

SEQ ID NO: 20421 - protein, 85 aa, unidentified
  REGION 1..85: note = Description of Unknown:hvTR_Q6XA69 target sequence
LELDEFDEHGKYSEESSIESIHEDDDNVDYLKYMEVQSPTDNNIPTPSKNNESPTRQKLTNIHEKDVGKMYPDTPSPDVPGKSKE

SEQ ID NO: 20422 - protein, 85 aa, unidentified
  REGION 1..85: note = Description of Unknown:hvTR_Q6XA69 target sequence
AKTFIEYSRQIGKEQTSPNCVCTASVTDLGGPNNFKSITGLESGKHFLIKKLLETQPDSVVAETGSEEQDILAYSPDKRSQTKEW

SEQ ID NO: 20423 - protein, 85 aa, unidentified
  REGION 1..85: note = Description of Unknown:hvTR_Q6XA69 target sequence
IQEKGSNSKCTETLPGMTFTNSATPVKSHGAIQDTLNPESKLDKEMEAVESLVNLCDGFHDNPLISEMITFGYETDHSAPYESES

SEQ ID NO: 20424 - protein, 85 aa, unidentified
  REGION 1..85: note = Description of Unknown:hvTR_Q6XA69 target sequence
DNNDETDYIADCDSTVRTNNIHMNNTNENTPFSKSLYSPPEVTPSKEDHKTEKIVAVSQKCKSKKRTAKRKNVPIKPSKSKKIKL

SEQ ID NO: 20425 - protein, 85 aa, unidentified
  REGION 1..85: note = Description of Unknown:hvTR_Q6XA69 target sequence
DRLPETTNVIVISSESEDEEDGNNIIDKSMLEKTIKSEPNSESSSESDDCTSEDNYLHLSDYDKVINNGHCQSKGFPSPVFTIPI

SEQ ID NO: 20426 - protein, 85 aa, unidentified
  REGION 1..85: note = Description of Unknown:hvTR_Q6XA69 target sequence
RSMPGTHDIRNKFVPKKHWLWFMRKTHKVDNCVIHSSAKMNVKNDSDVTEANHCFINHFVPIKTDDEEYEKENVSYTYSKIQDSK

SEQ ID NO: 20427 - protein, 85 aa, unidentified
  REGION 1..85: note = Description of Unknown:hvTR_Q6XA69 target sequence
TDLEDITPTKKLITEMVMENFMDLTDIIKHGIAKHCQDLSSKYTVITHTACEKNLNMANSQNLVTAETQIFDPQGTGNNSPILNI

SEQ ID NO: 20428 - protein, 84 aa, unidentified
  REGION 1..84: note = Description of Unknown:hvTR_Q6XA69 target sequence
NSQNLVTAETQIFDPQGTGNNSPILNIINDTTCQNDENRCTEGTSNDNEKCTIRSDCNSDKMEVFKLDGYPSDYDPFEENAQIY

SEQ ID NO: 20429 - protein, 85 aa, unidentified
  REGION 1..85: note = Description of Unknown:hvTR_Q6XA69 target sequence
RMQNYHPDPVVEESIKEILEESLKCDVSFESLLFPELEAFDLFIPESSNDIASKNVSYSSNVEEGASEEFKALVAQSVGNCIQSI

SEQ ID NO: 20430 - protein, 85 aa, unidentified
  REGION 1..85: note = Description of Unknown:hvTR_Q6XA69 target sequence
GASVKAAMKQEQSNMEDNLINSAGLLTLHRSMLERLVLEQLGQLININLLSSASSQFVSCYAKMLSGKNLDFFNWCEPRFIVFAC

SEQ ID NO: 20431 - protein, 85 aa, unidentified
  REGION 1..85: note = Description of Unknown:hvTR_Q6XA69 target sequence
DKFDGLVKKIASESRDLLMDLKANMNNQFITALKNIFSKAYVTLDSEKLNMVATSLLLMAHNKEMSNPEISNKEFCKQVNLLKQE

SEQ ID NO: 20432 - protein, 85 aa, unidentified
  REGION 1..85: note = Description of Unknown:hvTR_Q6XA69 target sequence
LLESRNEIIENHVKNMKMFQEFANKQMNQIFMDNCDKTFLKIHINCKNLITAAKNIGIAVLQSIVLCSNEFSWQYLKPRRHQFKI

SEQ ID NO: 20433 - protein, 85 aa, unidentified
  REGION 1..85: note = Description of Unknown:hvTR_Q6XA69 target sequence
TMMNMITHACECIETIYDDTGLIKPLTSFDIMEGYIAINKNRESSICDLNIDPSESILLELDEFDEHGKYSEESSIESIHEDDDN

SEQ ID NO: 20434 - protein, 85 aa, unidentified
  REGION 1..85: note = Description of Unknown:hvTR_Q6XA69 target sequence
VDYLKYMEVQSPTDNNIPTPSKNNESPTRQKLTNIHEKDVGKMYPDTPSPDVPGKSKEAKTFIEYSRQIGKEQTSPNCVCTASVT

SEQ ID NO: 20435 - protein, 85 aa, unidentified
  REGION 1..85: note = Description of Unknown:hvTR_Q6XA69 target sequence
DLGGPNNFKSITGLESGKHFLIKKLLETQPDSVVAETGSEEQDILAYSPDKRSQTKEWIQEKGSNSKCTETLPGMTFTNSATPVK

SEQ ID NO: 20436 - protein, 85 aa, unidentified
  REGION 1..85: note = Description of Unknown:hvTR_Q6XA69 target sequence
SHGAIQDTLNPESKLDKEMEAVESLVNLCDGFHDNPLISEMITFGYETDHSAPYESESDNNDETDYIADCDSTVRTNNIHMNNTN

SEQ ID NO: 20437 - protein, 85 aa, unidentified
  REGION 1..85: note = Description of Unknown:hvTR_Q6XA69 target sequence
ENTPFSKSLYSPPEVTPSKEDHKTEKIVAVSQKCKSKKRTAKRKNVPIKPSKSKKIKLDRLPETTNVIVISSESEDEEDGNNIID

SEQ ID NO: 20438 - protein, 85 aa, unidentified
  REGION 1..85: note = Description of Unknown:hvTR_Q6XA69 target sequence
KSMLEKTIKSEPNSESSSESDDCTSEDNYLHLSDYDKVINNGHCQSKGFPSPVFTIPIRSMPGTHDIRNKFVPKKHWLWFMRKTH

SEQ ID NO: 20439 - protein, 85 aa, unidentified
  REGION 1..85: note = Description of Unknown:hvTR_Q6XA69 target sequence
KVDNCVIHSSAKMNVKNDSDVTEANHCFINHFVPIKTDDEEYEKENVSYTYSKIQDSKTDLEDITPTKKLITEMVMENFMDLTDI

SEQ ID NO: 20440 - protein, 85 aa, unidentified
  REGION 1..85: note = Description of Unknown:hvTR_Q6XA69 target sequence
IKHGIAKHCQDLSSKYTVITHTACEKNLNMANSQNLVTAETQIFDPQGTGNNSPILNIINDTTCQNDENRCTEGTSNDNEKCTIR

SEQ ID NO: 20441 - protein, 85 aa, unidentified
  REGION 1..85: note = Description of Unknown:cds_NZ_WFIY01000004.1_cds_WP_155864452.1_1655 target sequence
AILITQLIPFYSPSNVSNYHNLQELNPNCIVTVAIVEQPKNLAKLQLDIENHIILNETCVYKLFIPNNEIIKAVSYLTQFGIQTS

SEQ ID NO: 20442 - protein, 85 aa, unidentified
  REGION 1..85: note = Description of Unknown:cds_NZ_WFIY01000004.1_cds_WP_155864452.1_1655 target sequence
VYMNVILATGKVCSFEKALNGKFYVINFHDIKFYEFFGDPPLSIGNALVFSTNITSQILQKPNTLYNYSQAIAYNVIYPCILREA

SEQ ID NO: 20443 - protein, 85 aa, unidentified
  REGION 1..85: note = Description of Unknown:cds_NZ_WFIY01000004.1_cds_WP_155864452.1_1655 target sequence
YNVTPLYSQGIMGNGTNIGIIDFCGDPYIYQQLICFDKKFNIQNPPRFIICPIGPYNPNQGIESGWALEISLDVEYSHSIAPAAG

SEQ ID NO: 20444 - protein, 85 aa, unidentified
  REGION 1..85: note = Description of Unknown:cds_NZ_WFIY01000004.1_cds_WP_155864452.1_1655 target sequence
IILYVANPNVPLPAIIAFVDQQDKVSVVSQSFGIPEIYFDLGLIPLSYLQSLTYEYWLGEVEGITFVAASGDYGGNGYNFFLSPQ

SEQ ID NO: 20445 - protein, 85 aa, unidentified
  REGION 1..85: note = Description of Unknown:cds_NZ_WFIY01000004.1_cds_WP_155864452.1_1655 target sequence
GGLLIPASDPYVLAVGGSTLYYSCNKTIQEAWSGESIYGASTGGFSSIFPSPWYQGAKGFREVPDVIADANPYTGVPVIYYYGEE

SEQ ID NO: 20446 - protein, 85 aa, unidentified
  REGION 1..85: note = Description of Unknown:cds_NZ_WFIY01000004.1_cds_WP_155864452.1_1655 target sequence
YLIGGTSVASPIVAGIIDLATQVHGKFGFINPLIYSLKGTKALEQVTFGYNTPYYIKNSSYNPVSGLGYINAGYFVSLIRNESTI

SEQ ID NO: 20447 - protein, 85 aa, unidentified
  REGION 1..85: note = Description of Unknown:cds_NZ_WFIY01000004.1_cds_WP_155864452.1_1655 target sequence
SVAVSNITYNDGQLVKVIVKASPLVPVTGYVYNGSNILEKFPLVYNGTYWIGYFVAKGSGIQEVVVAQGNDKAGTYILVGLQAMF

SEQ ID NO: 20448 - protein, 85 aa, unidentified
  REGION 1..85: note = Description of Unknown:cds_NZ_WFIY01000004.1_cds_WP_155864452.1_1655 target sequence
LCPQVALYPSPIGIKVIAELLYANGSAAKANGIFTAFLCQYNITTCTFKMINKTVLSPEYLIQGYLYIIINNGSYIYGCFAPTTP

SEQ ID NO: 20449 - protein, 85 aa, unidentified
  REGION 1..85: note = Description of Unknown:cds_NZ_WFIY01000004.1_cds_WP_155864452.1_1655 target sequence
FGGIYIIRISCVFGFSEFVEGIYLIPYIIPGAFTEPVSIADGCNFTIGIALLSLVAPNVTVKLYNVANQLVYSFSINAISYANSI

SEQ ID NO: 20450 - protein, 85 aa, unidentified
  REGION 1..85: note = Description of Unknown:cds_NZ_WFIY01000004.1_cds_WP_155864452.1_1655 target sequence
FYVSEISLPHNISRGYYKIVAVANYNSTDHMVYGEGFTQVYISSCTLRVIVTTIPNGSIYENETLGIIASITYENGTNVNFGTFN

SEQ ID NO: 20451 - protein, 85 aa, unidentified
  REGION 1..85: note = Description of Unknown:cds_NZ_WFIY01000004.1_cds_WP_155864452.1_1655 target sequence
AVIIPSYMKDNFDSLDLDFSVPLYYTKGEWFGKFTTPCEKSNPLGLSAEGLSGEWCIYVYGTSYDGIPVSFPTTLSYSTLNIIPS

SEQ ID NO: 20452 - protein, 85 aa, unidentified
  REGION 1..85: note = Description of Unknown:cds_NZ_WFIY01000004.1_cds_WP_155864452.1_1655 target sequence
IPNDQFILLPYTFIKDFNGTLVEDAYICNAVIINHNLTLVNSIIKNLTIINGSVYLINSHICSYKTINGKVLNDNATTKTCNNGV

SEQ ID NO: 20453 - protein, 84 aa, unidentified
  REGION 1..84: note = Description of Unknown:cds_NZ_WFIY01000004.1_cds_WP_155864452.1_1655 target sequence
INHNLTLVNSIIKNLTIINGSVYLINSHICSYKTINGKVLNDNATTKTCNNGVDNSLSNLSETLLLLAVLLTIDVVIIKKFRRK

SEQ ID NO: 20454 - protein, 85 aa, unidentified
  REGION 1..85: note = Description of Unknown:cds_NZ_WFIY01000004.1_cds_WP_155864452.1_1655 target sequence
NCIVTVAIVEQPKNLAKLQLDIENHIILNETCVYKLFIPNNEIIKAVSYLTQFGIQTSVYMNVILATGKVCSFEKALNGKFYVIN

SEQ ID NO: 20455 - protein, 85 aa, unidentified
  REGION 1..85: note = Description of Unknown:cds_NZ_WFIY01000004.1_cds_WP_155864452.1_1655 target sequence
FHDIKFYEFFGDPPLSIGNALVFSTNITSQILQKPNTLYNYSQAIAYNVIYPCILREAYNVTPLYSQGIMGNGTNIGIIDFCGDP

SEQ ID NO: 20456 - protein, 85 aa, unidentified
  REGION 1..85: note = Description of Unknown:cds_NZ_WFIY01000004.1_cds_WP_155864452.1_1655 target sequence
YIYQQLICFDKKFNIQNPPRFIICPIGPYNPNQGIESGWALEISLDVEYSHSIAPAAGIILYVANPNVPLPAIIAFVDQQDKVSV

SEQ ID NO: 20457 - protein, 85 aa, unidentified
  REGION 1..85: note = Description of Unknown:cds_NZ_WFIY01000004.1_cds_WP_155864452.1_1655 target sequence
VSQSFGIPEIYFDLGLIPLSYLQSLTYEYWLGEVEGITFVAASGDYGGNGYNFFLSPQGGLLIPASDPYVLAVGGSTLYYSCNKT

SEQ ID NO: 20458 - protein, 85 aa, unidentified
  REGION 1..85: note = Description of Unknown:cds_NZ_WFIY01000004.1_cds_WP_155864452.1_1655 target sequence
IQEAWSGESIYGASTGGFSSIFPSPWYQGAKGFREVPDVIADANPYTGVPVIYYYGEEYLIGGTSVASPIVAGIIDLATQVHGKF

SEQ ID NO: 20459 - protein, 85 aa, unidentified
  REGION 1..85: note = Description of Unknown:cds_NZ_WFIY01000004.1_cds_WP_155864452.1_1655 target sequence
GFINPLIYSLKGTKALEQVTFGYNTPYYIKNSSYNPVSGLGYINAGYFVSLIRNESTISVAVSNITYNDGQLVKVIVKASPLVPV

SEQ ID NO: 20460 - protein, 85 aa, unidentified
  REGION 1..85: note = Description of Unknown:cds_NZ_WFIY01000004.1_cds_WP_155864452.1_1655 target sequence
TGYVYNGSNILEKFPLVYNGTYWIGYFVAKGSGIQEVVVAQGNDKAGTYILVGLQAMFLCPQVALYPSPIGIKVIAELLYANGSA

SEQ ID NO: 20461 - protein, 85 aa, unidentified
  REGION 1..85: note = Description of Unknown:cds_NZ_WFIY01000004.1_cds_WP_155864452.1_1655 target sequence
AKANGIFTAFLCQYNITTCTFKMINKTVLSPEYLIQGYLYIIINNGSYIYGCFAPTTPFGGIYIIRISCVFGFSEFVEGIYLIPY

SEQ ID NO: 20462 - protein, 85 aa, unidentified
  REGION 1..85: note = Description of Unknown:cds_NZ_WFIY01000004.1_cds_WP_155864452.1_1655 target sequence
IIPGAFTEPVSIADGCNFTIGIALLSLVAPNVTVKLYNVANQLVYSFSINAISYANSIFYVSEISLPHNISRGYYKIVAVANYNS

SEQ ID NO: 20463 - protein, 85 aa, unidentified
  REGION 1..85: note = Description of Unknown:cds_NZ_WFIY01000004.1_cds_WP_155864452.1_1655 target sequence
TDHMVYGEGFTQVYISSCTLRVIVTTIPNGSIYENETLGIIASITYENGTNVNFGTFNAVIIPSYMKDNFDSLDLDFSVPLYYTK

SEQ ID NO: 20464 - protein, 85 aa, unidentified
  REGION 1..85: note = Description of Unknown:cds_NZ_WFIY01000004.1_cds_WP_155864452.1_1655 target sequence
GEWFGKFTTPCEKSNPLGLSAEGLSGEWCIYVYGTSYDGIPVSFPTTLSYSTLNIIPSIPNDQFILLPYTFIKDFNGTLVEDAYI

SEQ ID NO: 20465 - protein, 85 aa, unidentified
  REGION 1..85: note = Description of Unknown:cds_NZ_WFIY01000004.1_cds_WP_155864452.1_1655 target sequence
CNAVIINHNLTLVNSIIKNLTIINGSVYLINSHICSYKTINGKVLNDNATTKTCNNGVDNSLSNLSETLLLLAVLLTIDVVIIKK

SEQ ID NO: 20466 - protein, 85 aa, unidentified
  REGION 1..85: note = Description of Unknown:cds_NC_030656.1_cds_YP_009268835.1_120 target sequence
VDNNQNEFKFSSISNLVKKIRDLNKVNLTADSFLDRETRKLVKFLFRNVEDPVYVRELYNELNSNTETSDMLDLLIETDVKGEYS

SEQ ID NO: 20467 - protein, 85 aa, unidentified
  REGION 1..85: note = Description of Unknown:cds_NC_030656.1_cds_YP_009268835.1_120 target sequence
ENINTVGLYTLFCILNMVDLLNSPNKFKYLTDYYNKLFSVHEKYKCVNLFVGVPGSAATKLTAQDVCSLTTFSNRQFVDMYKDFY

SEQ ID NO: 20468 - protein, 85 aa, unidentified
  REGION 1..85: note = Description of Unknown:cds_NC_030656.1_cds_YP_009268835.1_120 target sequence
MLLSKVILTKPNDRSVVTISYDSVHVSSSVSLPEMFMDAMGFTTYDSIFVGSDVEAFLFTHVVDSEKNIYEYTQLESRNYPTGVR

SEQ ID NO: 20469 - protein, 85 aa, unidentified
  REGION 1..85: note = Description of Unknown:cds_NC_030656.1_cds_YP_009268835.1_120 target sequence
HVTSTDTMNDNEAFALLVLNGSSAYDEFRNKAVLLMSDDVSNRVTLRNAVPDYSYVKDINVPILVEDPKDDGEDLDLGSEIDIDK

SEQ ID NO: 20470 - protein, 85 aa, unidentified
  REGION 1..85: note = Description of Unknown:cds_NC_030656.1_cds_YP_009268835.1_120 target sequence
IVKDPIWTKNTGYSIYGCPALTEVRYVATELAKLASNKGCPNNKVVDYFAKQIAKSERDIAILQAKLRHEKIDDSIPGDCSSVTK

SEQ ID NO: 20471 - protein, 85 aa, unidentified
  REGION 1..85: note = Description of Unknown:cds_NC_030656.1_cds_YP_009268835.1_120 target sequence
KLEEANDKIKNLEIELAKHKDNDTTDCSNKLKKANEELEKAKKEVTEYKDKLEKTKEELDKIKNGDTTENNKKIDELEKDVKEKE

SEQ ID NO: 20472 - protein, 85 aa, unidentified
  REGION 1..85: note = Description of Unknown:cds_NC_030656.1_cds_YP_009268835.1_120 target sequence
NKVSELKDELKKEKEKSSTCDKRVSELTEENKKLKRQIEENDNGNGGGSNSSTKRELEEAKDKIEKLEKQLQECRRNGGSRNVDL

SEQ ID NO: 20473 - protein, 85 aa, unidentified
  REGION 1..85: note = Description of Unknown:cds_NC_030656.1_cds_YP_009268835.1_120 target sequence
ENCSEELSRTKRKVKELQEEVDRLVKADTTEGGYYKQELGRQREKVKMLENELDKLYEELYEARKCCGKLDEASRKIKDLETETT

SEQ ID NO: 20474 - protein, 85 aa, unidentified
  REGION 1..85: note = Description of Unknown:cds_NC_030656.1_cds_YP_009268835.1_120 target sequence
TQRKRIRELESEHSKHESTIKELNKTIKEKEEKISELEKHRNEESSKDCKEIQKDLERTKEMLHKTEKDKKDLMDRVRRLEKELE

SEQ ID NO: 20475 - protein, 85 aa, unidentified
  REGION 1..85: note = Description of Unknown:cds_NC_030656.1_cds_YP_009268835.1_120 target sequence
DKDKDKDEDGDGGDNNSSGSCSRVKRELEEMKKLLNKLEEEKFECKERIKQLERELEDARRGRDDNGHNNNNGKYPNTSKIIKEL

SEQ ID NO: 20476 - protein, 85 aa, unidentified
  REGION 1..85: note = Description of Unknown:cds_NC_030656.1_cds_YP_009268835.1_120 target sequence
KEDLERARAKIKELEEDLDREHSRKIGGSDCELELVRVRNRIKILEKEVEAHKEFARIYKHELEYERNRFICCITAPTCNIKTNP

SEQ ID NO: 20477 - protein, 85 aa, unidentified
  REGION 1..85: note = Description of Unknown:cds_NC_030656.1_cds_YP_009268835.1_120 target sequence
HVITDIENERKPLPPTEDMMKPEEKPNQPPTEDKKPEKPERPSLPELPKPEKPSFPNLPNFEPPKPDVSKPELPKPEPDSDALES

SEQ ID NO: 20478 - protein, 84 aa, unidentified
  REGION 1..84: note = Description of Unknown:cds_NC_030656.1_cds_YP_009268835.1_120 target sequence
TEDKKPEKPERPSLPELPKPEKPSFPNLPNFEPPKPDVSKPELPKPEPDSDALESEKPKLPFPKVPNSVFSIKKGPVKEIKKFT

SEQ ID NO: 20479 - protein, 85 aa, unidentified
  REGION 1..85: note = Description of Unknown:cds_NC_030656.1_cds_YP_009268835.1_120 target sequence
LTADSFLDRETRKLVKFLFRNVEDPVYVRELYNELNSNTETSDMLDLLIETDVKGEYSENINTVGLYTLFCILNMVDLLNSPNKF

SEQ ID NO: 20480 - protein, 85 aa, unidentified
  REGION 1..85: note = Description of Unknown:cds_NC_030656.1_cds_YP_009268835.1_120 target sequence
KYLTDYYNKLFSVHEKYKCVNLFVGVPGSAATKLTAQDVCSLTTFSNRQFVDMYKDFYMLLSKVILTKPNDRSVVTISYDSVHVS

SEQ ID NO: 20481 - protein, 85 aa, unidentified
  REGION 1..85: note = Description of Unknown:cds_NC_030656.1_cds_YP_009268835.1_120 target sequence
SSVSLPEMFMDAMGFTTYDSIFVGSDVEAFLFTHVVDSEKNIYEYTQLESRNYPTGVRHVTSTDTMNDNEAFALLVLNGSSAYDE

SEQ ID NO: 20482 - protein, 85 aa, unidentified
  REGION 1..85: note = Description of Unknown:cds_NC_030656.1_cds_YP_009268835.1_120 target sequence
FRNKAVLLMSDDVSNRVTLRNAVPDYSYVKDINVPILVEDPKDDGEDLDLGSEIDIDKIVKDPIWTKNTGYSIYGCPALTEVRYV

SEQ ID NO: 20483 - protein, 85 aa, unidentified
  REGION 1..85: note = Description of Unknown:cds_NC_030656.1_cds_YP_009268835.1_120 target sequence
ATELAKLASNKGCPNNKVVDYFAKQIAKSERDIAILQAKLRHEKIDDSIPGDCSSVTKKLEEANDKIKNLEIELAKHKDNDTTDC

SEQ ID NO: 20484 - protein, 85 aa, unidentified
  REGION 1..85: note = Description of Unknown:cds_NC_030656.1_cds_YP_009268835.1_120 target sequence
SNKLKKANEELEKAKKEVTEYKDKLEKTKEELDKIKNGDTTENNKKIDELEKDVKEKENKVSELKDELKKEKEKSSTCDKRVSEL

SEQ ID NO: 20485 - protein, 85 aa, unidentified
  REGION 1..85: note = Description of Unknown:cds_NC_030656.1_cds_YP_009268835.1_120 target sequence
TEENKKLKRQIEENDNGNGGGSNSSTKRELEEAKDKIEKLEKQLQECRRNGGSRNVDLENCSEELSRTKRKVKELQEEVDRLVKA

SEQ ID NO: 20486 - protein, 85 aa, unidentified
  REGION 1..85: note = Description of Unknown:cds_NC_030656.1_cds_YP_009268835.1_120 target sequence
DTTEGGYYKQELGRQREKVKMLENELDKLYEELYEARKCCGKLDEASRKIKDLETETTTQRKRIRELESEHSKHESTIKELNKTI

SEQ ID NO: 20487 - protein, 85 aa, unidentified
  REGION 1..85: note = Description of Unknown:cds_NC_030656.1_cds_YP_009268835.1_120 target sequence
KEKEEKISELEKHRNEESSKDCKEIQKDLERTKEMLHKTEKDKKDLMDRVRRLEKELEDKDKDKDEDGDGGDNNSSGSCSRVKRE

SEQ ID NO: 20488 - protein, 85 aa, unidentified
  REGION 1..85: note = Description of Unknown:cds_NC_030656.1_cds_YP_009268835.1_120 target sequence
LEEMKKLLNKLEEEKFECKERIKQLERELEDARRGRDDNGHNNNNGKYPNTSKIIKELKEDLERARAKIKELEEDLDREHSRKIG

SEQ ID NO: 20489 - protein, 85 aa, unidentified
  REGION 1..85: note = Description of Unknown:cds_NC_030656.1_cds_YP_009268835.1_120 target sequence
GSDCELELVRVRNRIKILEKEVEAHKEFARIYKHELEYERNRFICCITAPTCNIKTNPHVITDIENERKPLPPTEDMMKPEEKPN

SEQ ID NO: 20490 - protein, 85 aa, unidentified
  REGION 1..85: note = Description of Unknown:cds_NC_030656.1_cds_YP_009268835.1_120 target sequence
QPPTEDKKPEKPERPSLPELPKPEKPSFPNLPNFEPPKPDVSKPELPKPEPDSDALESEKPKLPFPKVPNSVFSIKKGPVKEIKK

SEQ ID NO: 20491 - protein, 85 aa, unidentified
  REGION 1..85: note = Description of Unknown:cds_NZ_WFIY01000004.1_cds_WP_155862694.1_494 target sequence
LKVVDLKKVLVVGSGPIKVAEAAEFDYSGSQALKALKEEGIQTILVNSNVATVQTSYKMADKIYMLPVTWWAIEKVIEQERPDGI

SEQ ID NO: 20492 - protein, 85 aa, unidentified
  REGION 1..85: note = Description of Unknown:cds_NZ_WFIY01000004.1_cds_WP_155862694.1_494 target sequence
MIGFGGQTALNVGVDLYKRGILQKYGVKVLGTPIEGIEKALSREKFRETMINVNLPVPPSLSAKTEEEAIQKAREIGYPVMVRVS

SEQ ID NO: 20493 - protein, 85 aa, unidentified
  REGION 1..85: note = Description of Unknown:cds_NZ_WFIY01000004.1_cds_WP_155862694.1_494 target sequence
FNLGGRGSTVAWDEEMLRRDIGRAFSQSYTHEVLIEKYLYHWKEIEYEVMRDSKGNSAVIACIENLDPMGVHTGESTVVAPCQTL

SEQ ID NO: 20494 - protein, 85 aa, unidentified
  REGION 1..85: note = Description of Unknown:cds_NZ_WFIY01000004.1_cds_WP_155862694.1_494 target sequence
DNQEYQDMRTKAELVAKSIDLVGECNVQFALDPNSYTHYIIETNPRMSRSSALASKATGYPLAYVSAKLALGYSLYEVLNKVSGS

SEQ ID NO: 20495 - protein, 85 aa, unidentified
  REGION 1..85: note = Description of Unknown:cds_NZ_WFIY01000004.1_cds_WP_155862694.1_494 target sequence
TCACFEPSLDYIVIKIPRWDLQKFENAEMSLGTEMKSIGEVMSIGRSFEEALQKAVRMLDIGEPGVVGGKVYNSLLTKNELLKYL

SEQ ID NO: 20496 - protein, 85 aa, unidentified
  REGION 1..85: note = Description of Unknown:cds_NZ_WFIY01000004.1_cds_WP_155862694.1_494 target sequence
KERYPYWFLYAAKAFKEGATIDEVYEATGIDKFFLNKIKKLVEFYENLKEVSKDTLIEAKKLGFSDEQIAKKVNKSVEEIRKIRE

SEQ ID NO: 20497 - protein, 85 aa, unidentified
  REGION 1..85: note = Description of Unknown:cds_NZ_WFIY01000004.1_cds_WP_155862694.1_494 target sequence
IEGIKPVVKQIDTLAGEWPAVTNYLYLTYNGSEDDIEFSTNANKLLILGAGGFRIGVSVEFDWSVVSLLDAASKYFDEVAILNYN

SEQ ID NO: 20498 - protein, 85 aa, unidentified
  REGION 1..85: note = Description of Unknown:cds_NZ_WFIY01000004.1_cds_WP_155862694.1_494 target sequence
PETVSTDWDVAKKLYFDELTLERILDIVNKENFRYVATFTGGQIGNDLAKLLEDSGIRLLGTAGHSVDIAEDREKFSKLLDKLGI

SEQ ID NO: 20499 - protein, 85 aa, unidentified
  REGION 1..85: note = Description of Unknown:cds_NZ_WFIY01000004.1_cds_WP_155862694.1_494 target sequence
KQPPWISASSIEEVKKFVGEVGFPLLIRPSYVLSGSSMRIVYNEQELFNFINNLKISTKYPIVISKYLDNAIEAEIDAASDGRGV

SEQ ID NO: 20500 - protein, 85 aa, unidentified
  REGION 1..85: note = Description of Unknown:cds_NZ_WFIY01000004.1_cds_WP_155862694.1_494 target sequence
IGVVIEHVEEAGVHSGDATMSIPTRKLEEGVVKQMKEYALQIAREIEIKGPFNLQFVVKDNTPYIIELNLRASRSMPFSSKAKGV

SEQ ID NO: 20501 - protein, 85 aa, unidentified
  REGION 1..85: note = Description of Unknown:cds_NZ_WFIY01000004.1_cds_WP_155862694.1_494 target sequence
NIIEKALDAIINGLNLDEFYEPPSKAWAVKSPQFSWTQIRGGYPMLGPEMRSTGEAAAFGIDFYDALVKSWLSVTPNKLPEKGKY

SEQ ID NO: 20502 - protein, 85 aa, unidentified
  REGION 1..85: note = Description of Unknown:cds_NZ_WFIY01000004.1_cds_WP_155862694.1_494 target sequence
ALVYGIGNEEYLKEAANNLRKYGMEVITLKEVPLKDEEEVDSRTAVDLITTSKIGIIITNGYLKNIDYYVRREAVDYNVPLVLNG

SEQ ID NO: 20503 - protein, 84 aa, unidentified
  REGION 1..84: note = Description of Unknown:cds_NZ_WFIY01000004.1_cds_WP_155862694.1_494 target sequence
LKEVPLKDEEEVDSRTAVDLITTSKIGIIITNGYLKNIDYYVRREAVDYNVPLVLNGRLGKELTQGFLNSRLTYYEMRDYGGGI

SEQ ID NO: 20504 - protein, 85 aa, unidentified
  REGION 1..85: note = Description of Unknown:cds_NZ_WFIY01000004.1_cds_WP_155862694.1_494 target sequence
SGSQALKALKEEGIQTILVNSNVATVQTSYKMADKIYMLPVTWWAIEKVIEQERPDGIMIGFGGQTALNVGVDLYKRGILQKYGV

SEQ ID NO: 20505 - protein, 85 aa, unidentified
  REGION 1..85: note = Description of Unknown:cds_NZ_WFIY01000004.1_cds_WP_155862694.1_494 target sequence
KVLGTPIEGIEKALSREKFRETMINVNLPVPPSLSAKTEEEAIQKAREIGYPVMVRVSFNLGGRGSTVAWDEEMLRRDIGRAFSQ

SEQ ID NO: 20506 - protein, 85 aa, unidentified
  REGION 1..85: note = Description of Unknown:cds_NZ_WFIY01000004.1_cds_WP_155862694.1_494 target sequence
SYTHEVLIEKYLYHWKEIEYEVMRDSKGNSAVIACIENLDPMGVHTGESTVVAPCQTLDNQEYQDMRTKAELVAKSIDLVGECNV

SEQ ID NO: 20507 - protein, 85 aa, unidentified
  REGION 1..85: note = Description of Unknown:cds_NZ_WFIY01000004.1_cds_WP_155862694.1_494 target sequence
QFALDPNSYTHYIIETNPRMSRSSALASKATGYPLAYVSAKLALGYSLYEVLNKVSGSTCACFEPSLDYIVIKIPRWDLQKFENA

SEQ ID NO: 20508 - protein, 85 aa, unidentified
  REGION 1..85: note = Description of Unknown:cds_NZ_WFIY01000004.1_cds_WP_155862694.1_494 target sequence
EMSLGTEMKSIGEVMSIGRSFEEALQKAVRMLDIGEPGVVGGKVYNSLLTKNELLKYLKERYPYWFLYAAKAFKEGATIDEVYEA

SEQ ID NO: 20509 - protein, 85 aa, unidentified
  REGION 1..85: note = Description of Unknown:cds_NZ_WFIY01000004.1_cds_WP_155862694.1_494 target sequence
TGIDKFFLNKIKKLVEFYENLKEVSKDTLIEAKKLGFSDEQIAKKVNKSVEEIRKIREIEGIKPVVKQIDTLAGEWPAVTNYLYL

SEQ ID NO: 20510 - protein, 85 aa, unidentified
  REGION 1..85: note = Description of Unknown:cds_NZ_WFIY01000004.1_cds_WP_155862694.1_494 target sequence
TYNGSEDDIEFSTNANKLLILGAGGFRIGVSVEFDWSVVSLLDAASKYFDEVAILNYNPETVSTDWDVAKKLYFDELTLERILDI

SEQ ID NO: 20511 - protein, 85 aa, unidentified
  REGION 1..85: note = Description of Unknown:cds_NZ_WFIY01000004.1_cds_WP_155862694.1_494 target sequence
VNKENFRYVATFTGGQIGNDLAKLLEDSGIRLLGTAGHSVDIAEDREKFSKLLDKLGIKQPPWISASSIEEVKKFVGEVGFPLLI

SEQ ID NO: 20512 - protein, 85 aa, unidentified
  REGION 1..85: note = Description of Unknown:cds_NZ_WFIY01000004.1_cds_WP_155862694.1_494 target sequence
RPSYVLSGSSMRIVYNEQELFNFINNLKISTKYPIVISKYLDNAIEAEIDAASDGRGVIGVVIEHVEEAGVHSGDATMSIPTRKL

SEQ ID NO: 20513 - protein, 85 aa, unidentified
  REGION 1..85: note = Description of Unknown:cds_NZ_WFIY01000004.1_cds_WP_155862694.1_494 target sequence
EEGVVKQMKEYALQIAREIEIKGPFNLQFVVKDNTPYIIELNLRASRSMPFSSKAKGVNIIEKALDAIINGLNLDEFYEPPSKAW

SEQ ID NO: 20514 - protein, 85 aa, unidentified
  REGION 1..85: note = Description of Unknown:cds_NZ_WFIY01000004.1_cds_WP_155862694.1_494 target sequence
AVKSPQFSWTQIRGGYPMLGPEMRSTGEAAAFGIDFYDALVKSWLSVTPNKLPEKGKYALVYGIGNEEYLKEAANNLRKYGMEVI

SEQ ID NO: 20515 - protein, 85 aa, unidentified
  REGION 1..85: note = Description of Unknown:cds_NZ_WFIY01000004.1_cds_WP_155862694.1_494 target sequence
TLKEVPLKDEEEVDSRTAVDLITTSKIGIIITNGYLKNIDYYVRREAVDYNVPLVLNGRLGKELTQGFLNSRLTYYEMRDYGGGI

SEQ ID NO: 20516 - protein, 85 aa, unidentified
  REGION 1..85: note = Description of Unknown:cds_NZ_WFIY01000004.1_cds_WP_205737157.1_762 target sequence
LSTKFDSKSIENEVIQYWNSNMIYDKLKKINQETRTKKFLFIDGPPYPSAPVPHIGTIWNKVIKDCILRFKRIEGYKVYDQPGYD

SEQ ID NO: 20517 - protein, 85 aa, unidentified
  REGION 1..85: note = Description of Unknown:cds_NZ_WFIY01000004.1_cds_WP_205737157.1_762 target sequence
THGLPIEVAVEKKLGVVRKQDIIDKIGVDKFIQECRNFALTNAKSMTENFKNVGVFMDWNNPYYTLRNEYISNSWALIKKAYERG

SEQ ID NO: 20518 - protein, 85 aa, unidentified
  REGION 1..85: note = Description of Unknown:cds_NZ_WFIY01000004.1_cds_WP_205737157.1_762 target sequence
LLAKDVEVLHWCPRCETTLSDYEVSEYKDLEDPAIYVKFKVVGEDNKYLVIWTTTPWTIPANVFVMVNSQFDYAEVQVGNEIYII

SEQ ID NO: 20519 - protein, 85 aa, unidentified
  REGION 1..85: note = Description of Unknown:cds_NZ_WFIY01000004.1_cds_WP_205737157.1_762 target sequence
AKDRVESVMKEAGIKDYKILRTYKGSQLIGLKYIHPLKELIPAQKNLDEYHKVVDGGNEVTLEEGTGLVHAAPGHGDVDFEIGKK

SEQ ID NO: 20520 - protein, 85 aa, unidentified
  REGION 1..85: note = Description of Unknown:cds_NZ_WFIY01000004.1_cds_WP_205737157.1_762 target sequence
MNFPVVMLVNDKGEFLDIAGKYAGKYVRDANNEIIEDLKKVGALFHAGKIVHRYPICWRCKTPLILRAVEQWFIKVTKLKTELLN

SEQ ID NO: 20521 - protein, 85 aa, unidentified
  REGION 1..85: note = Description of Unknown:cds_NZ_WFIY01000004.1_cds_WP_205737157.1_762 target sequence
EIERVNWVPEWGKTRIGNMVKELRDWVISRQRFWGTPLPIWICKNGHITVVGSKEELQKLSINGVPDDLHRPWIDNVIIRCPKCG

SEQ ID NO: 20522 - protein, 85 aa, unidentified
  REGION 1..85: note = Description of Unknown:cds_NZ_WFIY01000004.1_cds_WP_205737157.1_762 target sequence
EEAHRIPDVADVWFDSGVAFFASLGENWDEKWKEIGPVDLVLEGHDQLRGWFFSLLRSGVILIDRAPYESVLVHGFMLDEQGREM

SEQ ID NO: 20523 - protein, 85 aa, unidentified
  REGION 1..85: note = Description of Unknown:cds_NZ_WFIY01000004.1_cds_WP_205737157.1_762 target sequence
HKSLGNYVEPSAVIEKYGRDILRLWLLRNTTWEDAKFSWKAMDLTMRDLQIVWNVYVFASTYMSLDNFEPEKYSFSDVEKYLRVE

SEQ ID NO: 20524 - protein, 85 aa, unidentified
  REGION 1..85: note = Description of Unknown:cds_NZ_WFIY01000004.1_cds_WP_205737157.1_762 target sequence
DKWILSRYYSMLRKIKESMKNYKVHEMANYLIDFIINDVSRFYLRLIRKRAWVEYNDPDKIAMYYVLYTILKGWIILASTVIPYT

SEQ ID NO: 20525 - protein, 85 aa, unidentified
  REGION 1..85: note = Description of Unknown:cds_NZ_WFIY01000004.1_cds_WP_205737157.1_762 target sequence
AEKIYRDFVVNPKDSVSMEDFPEIQDRFINDQLEKAVNLVRKIEDAGLNVRAKAGIKLRWPVNKTFVFLNNEDDIKLVNSVIDIL

SEQ ID NO: 20526 - protein, 85 aa, unidentified
  REGION 1..85: note = Description of Unknown:cds_NZ_WFIY01000004.1_cds_WP_205737157.1_762 target sequence
KSVLNTKEVELHNIVDYAKFSQIIVSPLPGKIGRDYKQLTPKIVQYINNNANVIGKDIIDKGYHEVVIDGVNVRLDKNYVNIEET

SEQ ID NO: 20527 - protein, 85 aa, unidentified
  REGION 1..85: note = Description of Unknown:cds_NZ_WFIY01000004.1_cds_WP_205737157.1_762 target sequence
SLEGYVSSKFDLGVIMISKTISEEEEEEGMIRDIIRRIQFMRKKLNLNVTDYINVSILPPSDRVQMIEKWKNYIASETRAKNIEI

SEQ ID NO: 20528 - protein, 84 aa, unidentified
  REGION 1..84: note = Description of Unknown:cds_NZ_WFIY01000004.1_cds_WP_205737157.1_762 target sequence
EGMIRDIIRRIQFMRKKLNLNVTDYINVSILPPSDRVQMIEKWKNYIASETRAKNIEISDKKQELIETWDIEGEQYIIGISKAD

SEQ ID NO: 20529 - protein, 85 aa, unidentified
  REGION 1..85: note = Description of Unknown:cds_NZ_WFIY01000004.1_cds_WP_205737157.1_762 target sequence
KKINQETRTKKFLFIDGPPYPSAPVPHIGTIWNKVIKDCILRFKRIEGYKVYDQPGYDTHGLPIEVAVEKKLGVVRKQDIIDKIG

SEQ ID NO: 20530 - protein, 85 aa, unidentified
  REGION 1..85: note = Description of Unknown:cds_NZ_WFIY01000004.1_cds_WP_205737157.1_762 target sequence
VDKFIQECRNFALTNAKSMTENFKNVGVFMDWNNPYYTLRNEYISNSWALIKKAYERGLLAKDVEVLHWCPRCETTLSDYEVSEY

SEQ ID NO: 20531 - protein, 85 aa, unidentified
  REGION 1..85: note = Description of Unknown:cds_NZ_WFIY01000004.1_cds_WP_205737157.1_762 target sequence
KDLEDPAIYVKFKVVGEDNKYLVIWTTTPWTIPANVFVMVNSQFDYAEVQVGNEIYIIAKDRVESVMKEAGIKDYKILRTYKGSQ

SEQ ID NO: 20532 - protein, 85 aa, unidentified
  REGION 1..85: note = Description of Unknown:cds_NZ_WFIY01000004.1_cds_WP_205737157.1_762 target sequence
LIGLKYIHPLKELIPAQKNLDEYHKVVDGGNEVTLEEGTGLVHAAPGHGDVDFEIGKKMNFPVVMLVNDKGEFLDIAGKYAGKYV

SEQ ID NO: 20533 - protein, 85 aa, unidentified
  REGION 1..85: note = Description of Unknown:cds_NZ_WFIY01000004.1_cds_WP_205737157.1_762 target sequence
RDANNEIIEDLKKVGALFHAGKIVHRYPICWRCKTPLILRAVEQWFIKVTKLKTELLNEIERVNWVPEWGKTRIGNMVKELRDWV

SEQ ID NO: 20534 - protein, 85 aa, unidentified
  REGION 1..85: note = Description of Unknown:cds_NZ_WFIY01000004.1_cds_WP_205737157.1_762 target sequence
ISRQRFWGTPLPIWICKNGHITVVGSKEELQKLSINGVPDDLHRPWIDNVIIRCPKCGEEAHRIPDVADVWFDSGVAFFASLGEN

SEQ ID NO: 20535 - protein, 85 aa, unidentified
  REGION 1..85: note = Description of Unknown:cds_NZ_WFIY01000004.1_cds_WP_205737157.1_762 target sequence
WDEKWKEIGPVDLVLEGHDQLRGWFFSLLRSGVILIDRAPYESVLVHGFMLDEQGREMHKSLGNYVEPSAVIEKYGRDILRLWLL

SEQ ID NO: 20536 - protein, 85 aa, unidentified
  REGION 1..85: note = Description of Unknown:cds_NZ_WFIY01000004.1_cds_WP_205737157.1_762 target sequence
RNTTWEDAKFSWKAMDLTMRDLQIVWNVYVFASTYMSLDNFEPEKYSFSDVEKYLRVEDKWILSRYYSMLRKIKESMKNYKVHEM

SEQ ID NO: 20537 - protein, 85 aa, unidentified
  REGION 1..85: note = Description of Unknown:cds_NZ_WFIY01000004.1_cds_WP_205737157.1_762 target sequence
ANYLIDFIINDVSRFYLRLIRKRAWVEYNDPDKIAMYYVLYTILKGWIILASTVIPYTAEKIYRDFVVNPKDSVSMEDFPEIQDR

SEQ ID NO: 20538 - protein, 85 aa, unidentified
  REGION 1..85: note = Description of Unknown:cds_NZ_WFIY01000004.1_cds_WP_205737157.1_762 target sequence
FINDQLEKAVNLVRKIEDAGLNVRAKAGIKLRWPVNKTFVFLNNEDDIKLVNSVIDILKSVLNTKEVELHNIVDYAKFSQIIVSP

SEQ ID NO: 20539 - protein, 85 aa, unidentified
  REGION 1..85: note = Description of Unknown:cds_NZ_WFIY01000004.1_cds_WP_205737157.1_762 target sequence
LPGKIGRDYKQLTPKIVQYINNNANVIGKDIIDKGYHEVVIDGVNVRLDKNYVNIEETSLEGYVSSKFDLGVIMISKTISEEEEE

SEQ ID NO: 20540 - protein, 85 aa, unidentified
  REGION 1..85: note = Description of Unknown:cds_NZ_WFIY01000004.1_cds_WP_155863381.1_1354 target sequence
ESEKSKNELRISRRDFLKVSAITAAAAAAGYAASKNFVFDIFSPPVDEEQLQPGYQYSYAPNMCGICSSVCDILVNVEQKGNYIR

SEQ ID NO: 20541 - protein, 85 aa, unidentified
  REGION 1..85: note = Description of Unknown:cds_NZ_WFIY01000004.1_cds_WP_155863381.1_1354 target sequence
AIEIDGNPLSTLNYGKLCARGRSGTLITYNKDRLKKPLIRTGPKGTWAFKEAEWDEAIQYILQKFQELNVQPWEMVLGGGAIPCA

SEQ ID NO: 20542 - protein, 85 aa, unidentified
  REGION 1..85: note = Description of Unknown:cds_NZ_WFIY01000004.1_cds_WP_155863381.1_1354 target sequence
NYRPEFIPFTFASQIPTIAGSPMQPCLFGEHLGMNLTIGTFDIHGDELADDFQHSSLIVIWGNNGNPAGIFVNKGSRLGKGLAND

SEQ ID NO: 20543 - protein, 85 aa, unidentified
  REGION 1..85: note = Description of Unknown:cds_NZ_WFIY01000004.1_cds_WP_155863381.1_1354 target sequence
AFVIVLDPRQSEAASKADLWIPVKPGSDLAIAMGLIKYLIDNNYYDDYFVRYHTNAPFLVYQENGVYVPYTANYEDGTVQAFYVY

SEQ ID NO: 20544 - protein, 85 aa, unidentified
  REGION 1..85: note = Description of Unknown:cds_NZ_WFIY01000004.1_cds_WP_155863381.1_1354 target sequence
DEISQSIVQVPPYTNTNMYSVDGKTIRPALRVQNLATPDGKQLITVFQALEQAVSQFTIDYVTQIADVDKSLIEEFYFRVGTMRP

SEQ ID NO: 20545 - protein, 85 aa, unidentified
  REGION 1..85: note = Description of Unknown:cds_NZ_WFIY01000004.1_cds_WP_155863381.1_1354 target sequence
IDIATGQKGQEGSYTTMWRKAIGIIMALTGNIDVRGGWIYSGDHREGAIQLFQTYNSMVNSGQVKPGILIQRPQVLMSVPVLNLP

SEQ ID NO: 20546 - protein, 85 aa, unidentified
  REGION 1..85: note = Description of Unknown:cds_NZ_WFIY01000004.1_cds_WP_155863381.1_1354 target sequence
GQMMQYVATALAYCNPSFWQHGHPAVWCAYNNTLTSQGLKPAAAFSLFPDTGVYEAMQGQVQWNGQPYNIKVIMTCCVNPAKNMQ

SEQ ID NO: 20547 - protein, 85 aa, unidentified
  REGION 1..85: note = Description of Unknown:cds_NZ_WFIY01000004.1_cds_WP_155863381.1_1354 target sequence
ESEWKQILQNAFVIMIDIFPTDTALYADVILPDATYIEREEPITSRGATPDSGYRRRWQAIPRVYPYTIPELDLFVLLSYKLGFF

SEQ ID NO: 20548 - protein, 85 aa, unidentified
  REGION 1..85: note = Description of Unknown:cds_NZ_WFIY01000004.1_cds_WP_155863381.1_1354 target sequence
EQYITWMANSVGLPADQLLQAMQKEMMPFVQYLEKYGTYPRWGEFVGKAFADVQSQIIAQQLNTTPDDVLSKLRTEGVITVKTFE

SEQ ID NO: 20549 - protein, 85 aa, unidentified
  REGION 1..85: note = Description of Unknown:cds_NZ_WFIY01000004.1_cds_WP_155863381.1_1354 target sequence
DYVQNNERIPWNIPAGLPTGRIEIYSTILYYYVIKNFGYDPTWDPILAYVPPNWNAGYAVTPGQFVQPQPPYNDPTFKPTPPEMF

SEQ ID NO: 20550 - protein, 85 aa, unidentified
  REGION 1..85: note = Description of Unknown:cds_NZ_WFIY01000004.1_cds_WP_155863381.1_1354 target sequence
YIEFKIPPIAYTFTTNVPTLEAITSNSYHTNIYQFAWINKETAQRLGINEGDWIAIISKLNGAKLIVRAHLTEWIRPDTIGVPEP

SEQ ID NO: 20551 - protein, 84 aa, unidentified
  REGION 1..84: note = Description of Unknown:cds_NZ_WFIY01000004.1_cds_WP_155863381.1_1354 target sequence
EPWGQNNPALTYSTRSLKNFGNRAVTSIWPQSYDPLTGHRMAQQFTVLVRKATPDEISEYTQLAQVQTPDTLPSQENIPGNYTT

SEQ ID NO: 20552 - protein, 85 aa, unidentified
  REGION 1..85: note = Description of Unknown:cds_NZ_WFIY01000004.1_cds_WP_155863381.1_1354 target sequence
AAGYAASKNFVFDIFSPPVDEEQLQPGYQYSYAPNMCGICSSVCDILVNVEQKGNYIRAIEIDGNPLSTLNYGKLCARGRSGTLI

SEQ ID NO: 20553 - protein, 85 aa, unidentified
  REGION 1..85: note = Description of Unknown:cds_NZ_WFIY01000004.1_cds_WP_155863381.1_1354 target sequence
TYNKDRLKKPLIRTGPKGTWAFKEAEWDEAIQYILQKFQELNVQPWEMVLGGGAIPCANYRPEFIPFTFASQIPTIAGSPMQPCL

SEQ ID NO: 20554 - protein, 85 aa, unidentified
  REGION 1..85: note = Description of Unknown:cds_NZ_WFIY01000004.1_cds_WP_155863381.1_1354 target sequence
FGEHLGMNLTIGTFDIHGDELADDFQHSSLIVIWGNNGNPAGIFVNKGSRLGKGLANDAFVIVLDPRQSEAASKADLWIPVKPGS

SEQ ID NO: 20555 - protein, 85 aa, unidentified
  REGION 1..85: note = Description of Unknown:cds_NZ_WFIY01000004.1_cds_WP_155863381.1_1354 target sequence
DLAIAMGLIKYLIDNNYYDDYFVRYHTNAPFLVYQENGVYVPYTANYEDGTVQAFYVYDEISQSIVQVPPYTNTNMYSVDGKTIR

SEQ ID NO: 20556 - protein, 85 aa, unidentified
  REGION 1..85: note = Description of Unknown:cds_NZ_WFIY01000004.1_cds_WP_155863381.1_1354 target sequence
PALRVQNLATPDGKQLITVFQALEQAVSQFTIDYVTQIADVDKSLIEEFYFRVGTMRPIDIATGQKGQEGSYTTMWRKAIGIIMA

SEQ ID NO: 20557 - protein, 85 aa, unidentified
  REGION 1..85: note = Description of Unknown:cds_NZ_WFIY01000004.1_cds_WP_155863381.1_1354 target sequence
LTGNIDVRGGWIYSGDHREGAIQLFQTYNSMVNSGQVKPGILIQRPQVLMSVPVLNLPGQMMQYVATALAYCNPSFWQHGHPAVW

SEQ ID NO: 20558 - protein, 85 aa, unidentified
  REGION 1..85: note = Description of Unknown:cds_NZ_WFIY01000004.1_cds_WP_155863381.1_1354 target sequence
CAYNNTLTSQGLKPAAAFSLFPDTGVYEAMQGQVQWNGQPYNIKVIMTCCVNPAKNMQESEWKQILQNAFVIMIDIFPTDTALYA

SEQ ID NO: 20559 - protein, 85 aa, unidentified
  REGION 1..85: note = Description of Unknown:cds_NZ_WFIY01000004.1_cds_WP_155863381.1_1354 target sequence
DVILPDATYIEREEPITSRGATPDSGYRRRWQAIPRVYPYTIPELDLFVLLSYKLGFFEQYITWMANSVGLPADQLLQAMQKEMM

SEQ ID NO: 20560 - protein, 85 aa, unidentified
  REGION 1..85: note = Description of Unknown:cds_NZ_WFIY01000004.1_cds_WP_155863381.1_1354 target sequence
PFVQYLEKYGTYPRWGEFVGKAFADVQSQIIAQQLNTTPDDVLSKLRTEGVITVKTFEDYVQNNERIPWNIPAGLPTGRIEIYST

SEQ ID NO: 20561 - protein, 85 aa, unidentified
  REGION 1..85: note = Description of Unknown:cds_NZ_WFIY01000004.1_cds_WP_155863381.1_1354 target sequence
ILYYYVIKNFGYDPTWDPILAYVPPNWNAGYAVTPGQFVQPQPPYNDPTFKPTPPEMFYIEFKIPPIAYTFTTNVPTLEAITSNS

SEQ ID NO: 20562 - protein, 85 aa, unidentified
  REGION 1..85: note = Description of Unknown:cds_NZ_WFIY01000004.1_cds_WP_155863381.1_1354 target sequence
YHTNIYQFAWINKETAQRLGINEGDWIAIISKLNGAKLIVRAHLTEWIRPDTIGVPEPWGQNNPALTYSTRSLKNFGNRAVTSIW

SEQ ID NO: 20563 - protein, 85 aa, unidentified
  REGION 1..85: note = Description of Unknown:cds_NZ_WFIY01000004.1_cds_WP_162309147.1_587 target sequence
DRTTKKLISAGLVFIYALSLAILIPTFLASNQGVITAVINPATGGNCLPGRFSGIVEANGVTLTAVNLTYVPPFNTTLPLKVYNQ

SEQ ID NO: 20564 - protein, 85 aa, unidentified
  REGION 1..85: note = Description of Unknown:cds_NZ_WFIY01000004.1_cds_WP_162309147.1_587 target sequence
SIIYKGKIYYYNSTGFNELLKEYGISMTPVNQIVNVTSKFFARTTEGVIPNTLPPYNSGNCYLFNTTPPTPFYYSYRTLAMVNSY

SEQ ID NO: 20565 - protein, 85 aa, unidentified
  REGION 1..85: note = Description of Unknown:cds_NZ_WFIY01000004.1_cds_WP_162309147.1_587 target sequence
FPNAQYINTSAELSDLYFNVSYLPYNTTLTLSINATPALPGIEGLIKFNFSVKLCANMTTYPYTEYTLHAYFYFNNLFICELENI

SEQ ID NO: 20566 - protein, 85 aa, unidentified
  REGION 1..85: note = Description of Unknown:cds_NZ_WFIY01000004.1_cds_WP_162309147.1_587 target sequence
KTSIPGVASAVSPTTIHFTSTAVNYILLVDLGLWSNVSTVYVTGVEGTTYPYDTVATTLNNGSFHPIIIPPAICIHYKTFYSNQI

SEQ ID NO: 20567 - protein, 85 aa, unidentified
  REGION 1..85: note = Description of Unknown:cds_NZ_WFIY01000004.1_cds_WP_162309147.1_587 target sequence
NPELPNTSGPDSVPYMIVNVTIRAADDMLNWTYAHKCPTFANQLWNPYCKINEAWYNNFGHGGNGLTATLMVGNNKVVSINFPYL

SEQ ID NO: 20568 - protein, 85 aa, unidentified
  REGION 1..85: note = Description of Unknown:cds_NZ_WFIY01000004.1_cds_WP_162309147.1_587 target sequence
ALCQVSTNNGFNNFVYKFSIQFLLSSVDNLTYIPTTVKPNTTGIGGDMLYVLIKPCQLKDAKLLLVYNDSDYAVQYYFGPVDREI

SEQ ID NO: 20569 - protein, 85 aa, unidentified
  REGION 1..85: note = Description of Unknown:cds_NZ_WFIY01000004.1_cds_WP_162309147.1_587 target sequence
AITCNNIKVYTPLLYMPKCVPLSSPYFCGQIIDYDYGYNYALAGYVNTYYYNATSHEYYKVGQYVYLQHLSGDSELILGVCPGYK

SEQ ID NO: 20570 - protein, 85 aa, unidentified
  REGION 1..85: note = Description of Unknown:cds_NZ_WFIY01000004.1_cds_WP_162309147.1_587 target sequence
CASLSIYYPNTPPYYPPSHEVKVGKIMGIYVKFANGTMERIYLSPSNITALLTSNVMKQMSPMPPFWNYSFEISIIGLENILHIT

SEQ ID NO: 20571 - protein, 85 aa, unidentified
  REGION 1..85: note = Description of Unknown:cds_NZ_WFIY01000004.1_cds_WP_162309147.1_587 target sequence
PNQALTVLNNSYVIVCYYDIASNSTVLNMTKLVSSGVTVAISPPSQAFYYAPATPFADIIHPGCQIFYFVNVNATYPITVTLSDK

SEQ ID NO: 20572 - protein, 85 aa, unidentified
  REGION 1..85: note = Description of Unknown:cds_NZ_WFIY01000004.1_cds_WP_162309147.1_587 target sequence
SLGELSPTTIVTTTVTCIYVILYNGTILHYNSTVFPITLTETAPSSGVFTATLYVEVTNSKGTPVTAYPLNYSYLAIYNPATKMQ

SEQ ID NO: 20573 - protein, 85 aa, unidentified
  REGION 1..85: note = Description of Unknown:cds_NZ_WFIY01000004.1_cds_WP_162309147.1_587 target sequence
IIVGKLSNIMPLEPSKYFKVGVVVDGLSANSTFTLTEIPNVVYNVSPVIYNYIDGELSVTVAANIPGYYYSGYLVLTIYNCTAKP

SEQ ID NO: 20574 - protein, 84 aa, unidentified
  REGION 1..84: note = Description of Unknown:cds_NZ_WFIY01000004.1_cds_WP_162309147.1_587 target sequence
YNCTAKPCHPIYTYEIYFNFSSTSPHFVAAYDLLFLEPILNGHTYYITITAIVVPLTYEPFTTIGFVGKVFSGEYYFSTSTGSQ

SEQ ID NO: 20575 - protein, 85 aa, unidentified
  REGION 1..85: note = Description of Unknown:cds_NZ_WFIY01000004.1_cds_WP_162309147.1_587 target sequence
LASNQGVITAVINPATGGNCLPGRFSGIVEANGVTLTAVNLTYVPPFNTTLPLKVYNQSIIYKGKIYYYNSTGFNELLKEYGISM

SEQ ID NO: 20576 - protein, 85 aa, unidentified
  REGION 1..85: note = Description of Unknown:cds_NZ_WFIY01000004.1_cds_WP_162309147.1_587 target sequence
TPVNQIVNVTSKFFARTTEGVIPNTLPPYNSGNCYLFNTTPPTPFYYSYRTLAMVNSYFPNAQYINTSAELSDLYFNVSYLPYNT

SEQ ID NO: 20577 - protein, 85 aa, unidentified
  REGION 1..85: note = Description of Unknown:cds_NZ_WFIY01000004.1_cds_WP_162309147.1_587 target sequence
TLTLSINATPALPGIEGLIKFNFSVKLCANMTTYPYTEYTLHAYFYFNNLFICELENIKTSIPGVASAVSPTTIHFTSTAVNYIL

SEQ ID NO: 20578 - protein, 85 aa, unidentified
  REGION 1..85: note = Description of Unknown:cds_NZ_WFIY01000004.1_cds_WP_162309147.1_587 target sequence
LVDLGLWSNVSTVYVTGVEGTTYPYDTVATTLNNGSFHPIIIPPAICIHYKTFYSNQINPELPNTSGPDSVPYMIVNVTIRAADD

SEQ ID NO: 20579 - protein, 85 aa, unidentified
  REGION 1..85: note = Description of Unknown:cds_NZ_WFIY01000004.1_cds_WP_162309147.1_587 target sequence
MLNWTYAHKCPTFANQLWNPYCKINEAWYNNFGHGGNGLTATLMVGNNKVVSINFPYLALCQVSTNNGFNNFVYKFSIQFLLSSV

SEQ ID NO: 20580 - protein, 85 aa, unidentified
  REGION 1..85: note = Description of Unknown:cds_NZ_WFIY01000004.1_cds_WP_162309147.1_587 target sequence
DNLTYIPTTVKPNTTGIGGDMLYVLIKPCQLKDAKLLLVYNDSDYAVQYYFGPVDREIAITCNNIKVYTPLLYMPKCVPLSSPYF

SEQ ID NO: 20581 - protein, 85 aa, unidentified
  REGION 1..85: note = Description of Unknown:cds_NZ_WFIY01000004.1_cds_WP_162309147.1_587 target sequence
CGQIIDYDYGYNYALAGYVNTYYYNATSHEYYKVGQYVYLQHLSGDSELILGVCPGYKCASLSIYYPNTPPYYPPSHEVKVGKIM

SEQ ID NO: 20582 - protein, 85 aa, unidentified
  REGION 1..85: note = Description of Unknown:cds_NZ_WFIY01000004.1_cds_WP_162309147.1_587 target sequence
GIYVKFANGTMERIYLSPSNITALLTSNVMKQMSPMPPFWNYSFEISIIGLENILHITPNQALTVLNNSYVIVCYYDIASNSTVL

SEQ ID NO: 20583 - protein, 85 aa, unidentified
  REGION 1..85: note = Description of Unknown:cds_NZ_WFIY01000004.1_cds_WP_162309147.1_587 target sequence
NMTKLVSSGVTVAISPPSQAFYYAPATPFADIIHPGCQIFYFVNVNATYPITVTLSDKSLGELSPTTIVTTTVTCIYVILYNGTI

SEQ ID NO: 20584 - protein, 85 aa, unidentified
  REGION 1..85: note = Description of Unknown:cds_NZ_WFIY01000004.1_cds_WP_162309147.1_587 target sequence
LHYNSTVFPITLTETAPSSGVFTATLYVEVTNSKGTPVTAYPLNYSYLAIYNPATKMQIIVGKLSNIMPLEPSKYFKVGVVVDGL

SEQ ID NO: 20585 - protein, 85 aa, unidentified
  REGION 1..85: note = Description of Unknown:cds_NZ_WFIY01000004.1_cds_WP_162309147.1_587 target sequence
SANSTFTLTEIPNVVYNVSPVIYNYIDGELSVTVAANIPGYYYSGYLVLTIYNCTAKPCHPIYTYEIYFNFSSTSPHFVAAYDLL

SEQ ID NO: 20586 - protein, 85 aa, unidentified
  REGION 1..85: note = Description of Unknown:cds_NZ_WFIY01000004.1_cds_WP_155863753.1_1626 target sequence
TCNYRISETAADSKSLYDLYLCISSKTRYIDRLKFFRQIGWEIKRLESPRESPEIIAVLADWGQGKTSFFNIIEEALKPRNVNIY

SEQ ID NO: 20587 - protein, 85 aa, unidentified
  REGION 1..85: note = Description of Unknown:cds_NZ_WFIY01000004.1_cds_WP_155863753.1_1626 target sequence
KDSFVNILKKEKGDITFIKNYPVVLIDEIESAVDFAVYRQYQDYIRDFWISLKELANSKGNNIVYLSTTPSAYSKVFGVGGQINS

SEQ ID NO: 20588 - protein, 85 aa, unidentified
  REGION 1..85: note = Description of Unknown:cds_NZ_WFIY01000004.1_cds_WP_155863753.1_1626 target sequence
LFPETYYSFIQRIKTIQIMPPSKLEFLAMIDCLLDYNGKDKEILQYLDLPYWIISQERRKYARFFNDILCKSFEFKDPIEQLFKE

SEQ ID NO: 20589 - protein, 85 aa, unidentified
  REGION 1..85: note = Description of Unknown:cds_NZ_WFIY01000004.1_cds_WP_155863753.1_1626 target sequence
ISIANDLNDEGETLRTLVTELENKMDKEEIKKFHKVLLSRIFTDKNLIIKELEGHIVKGFLVDFPSWVEITKEYKIPQDVEDFLI

SEQ ID NO: 20590 - protein, 85 aa, unidentified
  REGION 1..85: note = Description of Unknown:cds_NZ_WFIY01000004.1_cds_WP_155863753.1_1626 target sequence
FYSNSSEFDKSVSVFVSSDINKVIYEGINIDLSDVYKKLKVKSKGEAYALEWGYYESLVNTNVGGLIVDFRSREIKEKALKFVND

SEQ ID NO: 20591 - protein, 85 aa, unidentified
  REGION 1..85: note = Description of Unknown:cds_NZ_WFIY01000004.1_cds_WP_155863753.1_1626 target sequence
SLLDIEKEIDSFIVFLKEIGLKFNQKYIAKNIRIIECDLGNSGTINLIIYKPIGGEKAIKEILNEYDGIIHGIIFLGKSNEDLSK

SEQ ID NO: 20592 - protein, 85 aa, unidentified
  REGION 1..85: note = Description of Unknown:cds_NZ_WFIY01000004.1_cds_WP_155863753.1_1626 target sequence
YSVVQAEIELFTPIKRQLLYLLFSSLNPDLTRIRKDVLDIKLGELKREINDTMSKILQKVTIQQLPLTKGNKRPIQSLNWVLFSP

SEQ ID NO: 20593 - protein, 85 aa, unidentified
  REGION 1..85: note = Description of Unknown:cds_NZ_WFIY01000004.1_cds_WP_155863753.1_1626 target sequence
SIYPDNYQNVFMKVNQIVNEKFRIFGSKQFHLEDIETSSSLKDDIITYLTENEIINSKDGGEIIYYDDLAGQKIKDFSSTLVGYL

SEQ ID NO: 20594 - protein, 85 aa, unidentified
  REGION 1..85: note = Description of Unknown:cds_NZ_WFIY01000004.1_cds_WP_155863753.1_1626 target sequence
RQKGFNIENLIIEYIYYLSEIKNVKPKLIQIVGKIFGKSPTVEFLLYSSVTTGEIINYVDDKDRLIKDLLDQLDKSIEEIKSEDL

SEQ ID NO: 20595 - protein, 85 aa, unidentified
  REGION 1..85: note = Description of Unknown:cds_NZ_WFIY01000004.1_cds_WP_155863753.1_1626 target sequence
NEGYFITVKKRDAGIRSLKDMKDSIMEYYNQLNLAIKNGDYRNQLRLAFLILTLYSLFKEFVNQTINAQNEITKIKSYILAKLDV

SEQ ID NO: 20596 - protein, 85 aa, unidentified
  REGION 1..85: note = Description of Unknown:cds_NZ_WFIY01000004.1_cds_WP_155863753.1_1626 target sequence
INKAKRILGINEELEEEKEIKEILTYLESGKVLNEFYELIERTTKAKRNEDLMNFIDTIKKISHNEDNDNLYLIAWEIYKTSIDG

SEQ ID NO: 20597 - protein, 84 aa, unidentified
  REGION 1..84: note = Description of Unknown:cds_NZ_WFIY01000004.1_cds_WP_155863753.1_1626 target sequence
WEIYKTSIDGTPLPFFDELKNTAIYRYSERLREIGSNITRLQAEIESIEKINPEINKLKREINNQEKQIHELIKTIKGELNEFS

SEQ ID NO: 20598 - protein, 85 aa, unidentified
  REGION 1..85: note = Description of Unknown:cds_NZ_WFIY01000004.1_cds_WP_155863753.1_1626 target sequence
RYIDRLKFFRQIGWEIKRLESPRESPEIIAVLADWGQGKTSFFNIIEEALKPRNVNIYKDSFVNILKKEKGDITFIKNYPVVLID

SEQ ID NO: 20599 - protein, 85 aa, unidentified
  REGION 1..85: note = Description of Unknown:cds_NZ_WFIY01000004.1_cds_WP_155863753.1_1626 target sequence
EIESAVDFAVYRQYQDYIRDFWISLKELANSKGNNIVYLSTTPSAYSKVFGVGGQINSLFPETYYSFIQRIKTIQIMPPSKLEFL

SEQ ID NO: 20600 - protein, 85 aa, unidentified
  REGION 1..85: note = Description of Unknown:cds_NZ_WFIY01000004.1_cds_WP_155863753.1_1626 target sequence
AMIDCLLDYNGKDKEILQYLDLPYWIISQERRKYARFFNDILCKSFEFKDPIEQLFKEISIANDLNDEGETLRTLVTELENKMDK

SEQ ID NO: 20601 - protein, 85 aa, unidentified
  REGION 1..85: note = Description of Unknown:cds_NZ_WFIY01000004.1_cds_WP_155863753.1_1626 target sequence
EEIKKFHKVLLSRIFTDKNLIIKELEGHIVKGFLVDFPSWVEITKEYKIPQDVEDFLIFYSNSSEFDKSVSVFVSSDINKVIYEG

SEQ ID NO: 20602 - protein, 85 aa, unidentified
  REGION 1..85: note = Description of Unknown:cds_NZ_WFIY01000004.1_cds_WP_155863753.1_1626 target sequence
INIDLSDVYKKLKVKSKGEAYALEWGYYESLVNTNVGGLIVDFRSREIKEKALKFVNDSLLDIEKEIDSFIVFLKEIGLKFNQKY

SEQ ID NO: 20603 - protein, 85 aa, unidentified
  REGION 1..85: note = Description of Unknown:cds_NZ_WFIY01000004.1_cds_WP_155863753.1_1626 target sequence
IAKNIRIIECDLGNSGTINLIIYKPIGGEKAIKEILNEYDGIIHGIIFLGKSNEDLSKYSVVQAEIELFTPIKRQLLYLLFSSLN

SEQ ID NO: 20604 - protein, 85 aa, unidentified
  REGION 1..85: note = Description of Unknown:cds_NZ_WFIY01000004.1_cds_WP_155863753.1_1626 target sequence
PDLTRIRKDVLDIKLGELKREINDTMSKILQKVTIQQLPLTKGNKRPIQSLNWVLFSPSIYPDNYQNVFMKVNQIVNEKFRIFGS

SEQ ID NO: 20605 - protein, 85 aa, unidentified
  REGION 1..85: note = Description of Unknown:cds_NZ_WFIY01000004.1_cds_WP_155863753.1_1626 target sequence
KQFHLEDIETSSSLKDDIITYLTENEIINSKDGGEIIYYDDLAGQKIKDFSSTLVGYLRQKGFNIENLIIEYIYYLSEIKNVKPK

SEQ ID NO: 20606 - protein, 85 aa, unidentified
  REGION 1..85: note = Description of Unknown:cds_NZ_WFIY01000004.1_cds_WP_155863753.1_1626 target sequence
LIQIVGKIFGKSPTVEFLLYSSVTTGEIINYVDDKDRLIKDLLDQLDKSIEEIKSEDLNEGYFITVKKRDAGIRSLKDMKDSIME

SEQ ID NO: 20607 - protein, 85 aa, unidentified
  REGION 1..85: note = Description of Unknown:cds_NZ_WFIY01000004.1_cds_WP_155863753.1_1626 target sequence
YYNQLNLAIKNGDYRNQLRLAFLILTLYSLFKEFVNQTINAQNEITKIKSYILAKLDVINKAKRILGINEELEEEKEIKEILTYL

SEQ ID NO: 20608 - protein, 85 aa, unidentified
  REGION 1..85: note = Description of Unknown:cds_NZ_WFIY01000004.1_cds_WP_155863753.1_1626 target sequence
ESGKVLNEFYELIERTTKAKRNEDLMNFIDTIKKISHNEDNDNLYLIAWEIYKTSIDGTPLPFFDELKNTAIYRYSERLREIGSN

SEQ ID NO: 20609 - protein, 85 aa, unidentified
  REGION 1..85: note = Description of Unknown:cds_NC_035460.1_cds_YP_009407992.1_41 target sequence
DIRCINWFESRREQRFIFLKSRTKNGETIFIRFPHYFYYVVAENTYKLLTPPPYKAKEIGDMDIINIDEIVSYNVDIPQRKQKTK

SEQ ID NO: 20610 - protein, 85 aa, unidentified
  REGION 1..85: note = Description of Unknown:cds_NC_035460.1_cds_YP_009407992.1_41 target sequence
NMWLIQELKARSITKTFMNEFLNITWFFIANNLLPNGCYHLDENQLKKLTPNCYHCEEPLNCFTAIESFEVSRSYLFLDIECHFD

SEQ ID NO: 20611 - protein, 85 aa, unidentified
  REGION 1..85: note = Description of Unknown:cds_NC_035460.1_cds_YP_009407992.1_41 target sequence
KKFPSVFINPVSHISCNYIDLNGKEFKFTLINKNMLTENEINIAINKRNYKYILNITEMDYTVDYTLCSEVLMLQIIKKILEQTF

SEQ ID NO: 20612 - protein, 85 aa, unidentified
  REGION 1..85: note = Description of Unknown:cds_NC_035460.1_cds_YP_009407992.1_41 target sequence
DYIVTFNGHNFDFRYISNRLELLTGERICFKSPDKQETVYMCIYERNLSNHKGIGGMANITYHINNNNGTIYFDLYTFIQKSEKL

SEQ ID NO: 20613 - protein, 85 aa, unidentified
  REGION 1..85: note = Description of Unknown:cds_NC_035460.1_cds_YP_009407992.1_41 target sequence
DSYKLDSISKNVFNCMCKITKYDGVMCTFEGNNTTDIPGMATSFAKVLTTGNYVMIGDDVCKIINKTINENGFTITLKYKKPINE

SEQ ID NO: 20614 - protein, 85 aa, unidentified
  REGION 1..85: note = Description of Unknown:cds_NC_035460.1_cds_YP_009407992.1_41 target sequence
SELYNISFGKDDVDLSQMYKNYNLDIAIEMANYCIHDACLCKYLWNYYGVEQKTDAGAATYVLPQSMVFEYRASTVIKGPLLKLL

SEQ ID NO: 20615 - protein, 85 aa, unidentified
  REGION 1..85: note = Description of Unknown:cds_NC_035460.1_cds_YP_009407992.1_41 target sequence
LETKTILYRTEKKNKYPFEGGKVFAPKQKMFINNVLIFDYNSLYPNVCLFGNLSPETLVGVVVNTNKLESEINYQNLLLKYPAPR

SEQ ID NO: 20616 - protein, 85 aa, unidentified
  REGION 1..85: note = Description of Unknown:cds_NC_035460.1_cds_YP_009407992.1_41 target sequence
YILIHCEPRLPNLISEVAIFDRKKQGTIPKLLQKFLTERARYKKLMKNTKNSTEKAIYDSMQYTYKIVANSVYGLMGFRNSALYS

SEQ ID NO: 20617 - protein, 85 aa, unidentified
  REGION 1..85: note = Description of Unknown:cds_NC_035460.1_cds_YP_009407992.1_41 target sequence
YASAKSCTAIGRQMITYLESVLNGSKLVNGKYYLANNPTNPFFDDGRDQSTEFVLSVSLPNSFNFRSVYGDTDSVFVEINSQDVK

SEQ ID NO: 20618 - protein, 85 aa, unidentified
  REGION 1..85: note = Description of Unknown:cds_NC_035460.1_cds_YP_009407992.1_41 target sequence
VCMEIAKELERIINTKVLFETFKIEFEAIYKNLIMQSKKKYTTMKYPAGCDPNSIPERINKGTSETRRDVSRFHKEMIKTYKTRI

SEQ ID NO: 20619 - protein, 85 aa, unidentified
  REGION 1..85: note = Description of Unknown:cds_NC_035460.1_cds_YP_009407992.1_41 target sequence
SHALSEGVQTPLQVCVDVLTSLENDLRIEFDLRSAPLELFLLSRTHHCNYKSADNPNMFLVNEYNKNNSEVIEIGERYYFGYICD

SEQ ID NO: 20620 - protein, 84 aa, unidentified
  REGION 1..84: note = Description of Unknown:cds_NC_035460.1_cds_YP_009407992.1_41 target sequence
IEIGERYYFGYICDKDMPWQKKLVNIKTYERIIDRGFKMKTNERIFYEVYFKRLATEIVNLLDNKVLATSFFERLFGNKPVFYN

SEQ ID NO: 20621 - protein, 85 aa, unidentified
  REGION 1..85: note = Description of Unknown:cds_NC_035460.1_cds_YP_009407992.1_41 target sequence
TIFIRFPHYFYYVVAENTYKLLTPPPYKAKEIGDMDIINIDEIVSYNVDIPQRKQKTKNMWLIQELKARSITKTFMNEFLNITWF

SEQ ID NO: 20622 - protein, 85 aa, unidentified
  REGION 1..85: note = Description of Unknown:cds_NC_035460.1_cds_YP_009407992.1_41 target sequence
FIANNLLPNGCYHLDENQLKKLTPNCYHCEEPLNCFTAIESFEVSRSYLFLDIECHFDKKFPSVFINPVSHISCNYIDLNGKEFK

SEQ ID NO: 20623 - protein, 85 aa, unidentified
  REGION 1..85: note = Description of Unknown:cds_NC_035460.1_cds_YP_009407992.1_41 target sequence
FTLINKNMLTENEINIAINKRNYKYILNITEMDYTVDYTLCSEVLMLQIIKKILEQTFDYIVTFNGHNFDFRYISNRLELLTGER

SEQ ID NO: 20624 - protein, 85 aa, unidentified
  REGION 1..85: note = Description of Unknown:cds_NC_035460.1_cds_YP_009407992.1_41 target sequence
ICFKSPDKQETVYMCIYERNLSNHKGIGGMANITYHINNNNGTIYFDLYTFIQKSEKLDSYKLDSISKNVFNCMCKITKYDGVMC

SEQ ID NO: 20625 - protein, 85 aa, unidentified
  REGION 1..85: note = Description of Unknown:cds_NC_035460.1_cds_YP_009407992.1_41 target sequence
TFEGNNTTDIPGMATSFAKVLTTGNYVMIGDDVCKIINKTINENGFTITLKYKKPINESELYNISFGKDDVDLSQMYKNYNLDIA

SEQ ID NO: 20626 - protein, 85 aa, unidentified
  REGION 1..85: note = Description of Unknown:cds_NC_035460.1_cds_YP_009407992.1_41 target sequence
IEMANYCIHDACLCKYLWNYYGVEQKTDAGAATYVLPQSMVFEYRASTVIKGPLLKLLLETKTILYRTEKKNKYPFEGGKVFAPK

SEQ ID NO: 20627 - protein, 85 aa, unidentified
  REGION 1..85: note = Description of Unknown:cds_NC_035460.1_cds_YP_009407992.1_41 target sequence
QKMFINNVLIFDYNSLYPNVCLFGNLSPETLVGVVVNTNKLESEINYQNLLLKYPAPRYILIHCEPRLPNLISEVAIFDRKKQGT

SEQ ID NO: 20628 - protein, 85 aa, unidentified
  REGION 1..85: note = Description of Unknown:cds_NC_035460.1_cds_YP_009407992.1_41 target sequence
IPKLLQKFLTERARYKKLMKNTKNSTEKAIYDSMQYTYKIVANSVYGLMGFRNSALYSYASAKSCTAIGRQMITYLESVLNGSKL

SEQ ID NO: 20629 - protein, 85 aa, unidentified
  REGION 1..85: note = Description of Unknown:cds_NC_035460.1_cds_YP_009407992.1_41 target sequence
VNGKYYLANNPTNPFFDDGRDQSTEFVLSVSLPNSFNFRSVYGDTDSVFVEINSQDVKVCMEIAKELERIINTKVLFETFKIEFE

SEQ ID NO: 20630 - protein, 85 aa, unidentified
  REGION 1..85: note = Description of Unknown:cds_NC_035460.1_cds_YP_009407992.1_41 target sequence
AIYKNLIMQSKKKYTTMKYPAGCDPNSIPERINKGTSETRRDVSRFHKEMIKTYKTRISHALSEGVQTPLQVCVDVLTSLENDLR

SEQ ID NO: 20631 - protein, 85 aa, unidentified
  REGION 1..85: note = Description of Unknown:cds_NC_035460.1_cds_YP_009407992.1_41 target sequence
IEFDLRSAPLELFLLSRTHHCNYKSADNPNMFLVNEYNKNNSEVIEIGERYYFGYICDKDMPWQKKLVNIKTYERIIDRGFKMKT

SEQ ID NO: 20632 - protein, 85 aa, unidentified
  REGION 1..85: note = Description of Unknown:cds_NC_030656.1_cds_YP_009268757.1_42 target sequence
DIKCLNWFESKGENRALFLKARDRNNDSVFIKFEHNYYYVVRESTKNELTIVPKYSKCLGDMNIVNIDERVITNTAVKNYVPENS

SEQ ID NO: 20633 - protein, 85 aa, unidentified
  REGION 1..85: note = Description of Unknown:cds_NC_030656.1_cds_YP_009268757.1_42 target sequence
TLWLIAHPSKLVIKEELMAEFLNITWFFLINNIVPDGCFRLNTDYLTLIRKGCYFCNNPELCFKNPIPRFDVSKTYLYFDIECQF

SEQ ID NO: 20634 - protein, 85 aa, unidentified
  REGION 1..85: note = Description of Unknown:cds_NC_030656.1_cds_YP_009268757.1_42 target sequence
EKKFPSVFTNPVSHISCCYIDKFNKEYKFTIVNKELLSQEELDKAGDILQIDTVNEMDYDADIVLCSEITLLRIVKKLLELSFDY

SEQ ID NO: 20635 - protein, 85 aa, unidentified
  REGION 1..85: note = Description of Unknown:cds_NC_030656.1_cds_YP_009268757.1_42 target sequence
IVTFNGHNFDIKYLSTRLTILTNEYILFKTPDKAEAVRLCVYERNLASHKGAGGMANTTYHVNNNNGTLFFDLYAYIQKTEKLDS

SEQ ID NO: 20636 - protein, 85 aa, unidentified
  REGION 1..85: note = Description of Unknown:cds_NC_030656.1_cds_YP_009268757.1_42 target sequence
YKLDSIAKHAFYCKSVACPDKNGNYMFVGNNSTDAKGKAELFSAVLATGNYITINDHVCKVVRKEIYPSEFKVVLDMKNAFTPIT

SEQ ID NO: 20637 - protein, 85 aa, unidentified
  REGION 1..85: note = Description of Unknown:cds_NC_030656.1_cds_YP_009268757.1_42 target sequence
NETYELSFGKDNVSLSDMYKNFTLVTAIEMANYCLHDAVLCKHLWKHYGIETKIDAAAATYILPQCLAFEYRASTLIKGPLLQLL

SEQ ID NO: 20638 - protein, 85 aa, unidentified
  REGION 1..85: note = Description of Unknown:cds_NC_030656.1_cds_YP_009268757.1_42 target sequence
LETKTVLVKSGKQKKLPYEGGRVFAPKKKMFTNNVMIFDYNSLYPNVCIYGNLSPETLVSVVVSSNRLEYDINLKQLKKKFPQPN

SEQ ID NO: 20639 - protein, 85 aa, unidentified
  REGION 1..85: note = Description of Unknown:cds_NC_030656.1_cds_YP_009268757.1_42 target sequence
YILVECEPRSEDLISEVAIFDRQQRGIIPKLLLNFLDKRAKYKKMLKEAENSSDKEIYDSMQYMYKIIANSVYGLMGFRSSVLYS

SEQ ID NO: 20640 - protein, 85 aa, unidentified
  REGION 1..85: note = Description of Unknown:cds_NC_030656.1_cds_YP_009268757.1_42 target sequence
YASAKSCTSIGRSMITYLDSVLNGAKLVDGFLELASNPTNPFFGGFGKKEISTSIDPSITMNFNSVYGDTDSVFLEVDSKDVETT

SEQ ID NO: 20641 - protein, 85 aa, unidentified
  REGION 1..85: note = Description of Unknown:cds_NC_030656.1_cds_YP_009268757.1_42 target sequence
LVVAKELEKIINSIVLFDNFRIEFEAVYKNLIMQSKKKYSTLKIAAGSKNADSAVRINKGTSETRRDVSKFHKCMIKKYKTQLSD

SEQ ID NO: 20642 - protein, 85 aa, unidentified
  REGION 1..85: note = Description of Unknown:cds_NC_030656.1_cds_YP_009268757.1_42 target sequence
TLSAGILTDKQVCVDTLKSLELDLMLEFEMRQSPLEMFLLSRTHHCNYKLNDNPNMALVNKYNSENVEAIEIGERYYFAYVCPET

SEQ ID NO: 20643 - protein, 84 aa, unidentified
  REGION 1..84: note = Description of Unknown:cds_NC_030656.1_cds_YP_009268757.1_42 target sequence
AIEIGERYYFAYVCPETLPWQKKLTNIKTFERIVDKSFTLDGERIFYEIYFKRLATEIVNLLDNKVLSTQLFEKLFGTKPIFYS

SEQ ID NO: 20644 - protein, 85 aa, unidentified
  REGION 1..85: note = Description of Unknown:cds_NC_030656.1_cds_YP_009268757.1_42 target sequence
SVFIKFEHNYYYVVRESTKNELTIVPKYSKCLGDMNIVNIDERVITNTAVKNYVPENSTLWLIAHPSKLVIKEELMAEFLNITWF

SEQ ID NO: 20645 - protein, 85 aa, unidentified
  REGION 1..85: note = Description of Unknown:cds_NC_030656.1_cds_YP_009268757.1_42 target sequence
FLINNIVPDGCFRLNTDYLTLIRKGCYFCNNPELCFKNPIPRFDVSKTYLYFDIECQFEKKFPSVFTNPVSHISCCYIDKFNKEY

SEQ ID NO: 20646 - protein, 85 aa, unidentified
  REGION 1..85: note = Description of Unknown:cds_NC_030656.1_cds_YP_009268757.1_42 target sequence
KFTIVNKELLSQEELDKAGDILQIDTVNEMDYDADIVLCSEITLLRIVKKLLELSFDYIVTFNGHNFDIKYLSTRLTILTNEYIL

SEQ ID NO: 20647 - protein, 85 aa, unidentified
  REGION 1..85: note = Description of Unknown:cds_NC_030656.1_cds_YP_009268757.1_42 target sequence
FKTPDKAEAVRLCVYERNLASHKGAGGMANTTYHVNNNNGTLFFDLYAYIQKTEKLDSYKLDSIAKHAFYCKSVACPDKNGNYMF

SEQ ID NO: 20648 - protein, 85 aa, unidentified
  REGION 1..85: note = Description of Unknown:cds_NC_030656.1_cds_YP_009268757.1_42 target sequence
VGNNSTDAKGKAELFSAVLATGNYITINDHVCKVVRKEIYPSEFKVVLDMKNAFTPITNETYELSFGKDNVSLSDMYKNFTLVTA

SEQ ID NO: 20649 - protein, 85 aa, unidentified
  REGION 1..85: note = Description of Unknown:cds_NC_030656.1_cds_YP_009268757.1_42 target sequence
IEMANYCLHDAVLCKHLWKHYGIETKIDAAAATYILPQCLAFEYRASTLIKGPLLQLLLETKTVLVKSGKQKKLPYEGGRVFAPK

SEQ ID NO: 20650 - protein, 85 aa, unidentified
  REGION 1..85: note = Description of Unknown:cds_NC_030656.1_cds_YP_009268757.1_42 target sequence
KKMFTNNVMIFDYNSLYPNVCIYGNLSPETLVSVVVSSNRLEYDINLKQLKKKFPQPNYILVECEPRSEDLISEVAIFDRQQRGI

SEQ ID NO: 20651 - protein, 85 aa, unidentified
  REGION 1..85: note = Description of Unknown:cds_NC_030656.1_cds_YP_009268757.1_42 target sequence
IPKLLLNFLDKRAKYKKMLKEAENSSDKEIYDSMQYMYKIIANSVYGLMGFRSSVLYSYASAKSCTSIGRSMITYLDSVLNGAKL

SEQ ID NO: 20652 - protein, 85 aa, unidentified
  REGION 1..85: note = Description of Unknown:cds_NC_030656.1_cds_YP_009268757.1_42 target sequence
VDGFLELASNPTNPFFGGFGKKEISTSIDPSITMNFNSVYGDTDSVFLEVDSKDVETTLVVAKELEKIINSIVLFDNFRIEFEAV

SEQ ID NO: 20653 - protein, 85 aa, unidentified
  REGION 1..85: note = Description of Unknown:cds_NC_030656.1_cds_YP_009268757.1_42 target sequence
YKNLIMQSKKKYSTLKIAAGSKNADSAVRINKGTSETRRDVSKFHKCMIKKYKTQLSDTLSAGILTDKQVCVDTLKSLELDLMLE

SEQ ID NO: 20654 - protein, 85 aa, unidentified
  REGION 1..85: note = Description of Unknown:cds_NC_030656.1_cds_YP_009268757.1_42 target sequence
FEMRQSPLEMFLLSRTHHCNYKLNDNPNMALVNKYNSENVEAIEIGERYYFAYVCPETLPWQKKLTNIKTFERIVDKSFTLDGER

SEQ ID NO: 20655 - protein, 85 aa, unidentified
  REGION 1..85: note = Description of Unknown:cds_NC_035460.1_cds_YP_009408073.1_122 target sequence
EDLFSITCDLHMNAFIEEVEKLWSSSLNNTSSLSRKSKNVIRNLFREVTNSNISSSCYDILLKKQLHGDSINAVYRSLYGSGSDI

SEQ ID NO: 20656 - protein, 85 aa, unidentified
  REGION 1..85: note = Description of Unknown:cds_NC_035460.1_cds_YP_009408073.1_122 target sequence
DKRVDTVGKYILFVVVTYLAILIDDKDSKEIVSILTKFVNVISNIHSKYKCKYMFVGIPAIILFNKLDSTDVQKLYSLFSTKLNT

SEQ ID NO: 20657 - protein, 85 aa, unidentified
  REGION 1..85: note = Description of Unknown:cds_NC_035460.1_cds_YP_009408073.1_122 target sequence
NVELYEEYFNFIVSSDTYFNKKKFVKFSYGPVSFASSISVPDFVMEGLTFRSCDRIEKSEDIDDVYVFITVESDPKTYAFSKLTK

SEQ ID NO: 20658 - protein, 85 aa, unidentified
  REGION 1..85: note = Description of Unknown:cds_NC_035460.1_cds_YP_009408073.1_122 target sequence
PLYEGGLVVETDDLDDATALVIFDAITTFDKFRNKALLLTLESIVNKQVIDPTLNIDRYPTDENISDDTGENVITPIKVGSSIGI

SEQ ID NO: 20659 - protein, 85 aa, unidentified
  REGION 1..85: note = Description of Unknown:cds_NC_035460.1_cds_YP_009408073.1_122 target sequence
VDYRLVINKLTEWLNQCEEKCEGAVSPEVKELRERITDLEKQLDEATSGKTNCEYEKTKIKDLESRLDSERQRVTRLLDDLQKAR

SEQ ID NO: 20660 - protein, 85 aa, unidentified
  REGION 1..85: note = Description of Unknown:cds_NC_035460.1_cds_YP_009408073.1_122 target sequence
DGKCDSDSNDKAIIEELRKEIQNEQNRRMELMKELDKVRNGDGTSSCERELDLTRQWLHERDNELREMSKQAKHFERELERERIK

SEQ ID NO: 20661 - protein, 85 aa, unidentified
  REGION 1..85: note = Description of Unknown:cds_NC_035460.1_cds_YP_009408073.1_122 target sequence
NKQCDKYKKELDEAKSKIIRLETDLDKCLSQQNGSSDEVRKLTSQIESLERDLRECRASSGGDEKLLADIDLLKQQIGILAQQLE

SEQ ID NO: 20662 - protein, 85 aa, unidentified
  REGION 1..85: note = Description of Unknown:cds_NC_035460.1_cds_YP_009408073.1_122 target sequence
QCETRGDEKLLAEIEFLKEHINSLAQQLEQCEASGGSGGSDTSKLQERITYLENELDKYIKGEGNVNFTLLNEINRLRDKNAELQ

SEQ ID NO: 20663 - protein, 85 aa, unidentified
  REGION 1..85: note = Description of Unknown:cds_NC_035460.1_cds_YP_009408073.1_122 target sequence
NQLDQAQSQDKNNSYYKRALERERAKIIELENELQKCFDNNSGSEYIIKMEQMERKIKSLEAELRLCKDTDHDTEKIYKDKIAEL

SEQ ID NO: 20664 - protein, 85 aa, unidentified
  REGION 1..85: note = Description of Unknown:cds_NC_035460.1_cds_YP_009408073.1_122 target sequence
QRELDKCKQSGGSSNSHTEIKVFYDVECRTESARLQQRINELNDELNRLRKEDKTDSYYKREVDRQRKKVIELEHELEKYFNDDK

SEQ ID NO: 20665 - protein, 85 aa, unidentified
  REGION 1..85: note = Description of Unknown:cds_NC_035460.1_cds_YP_009408073.1_122 target sequence
IITYKKEMDAMQVVISEMRQELEKCKRDASCSSSSDCSFEQKRIELLELELRKTKEMVKQLEKFIEFSSAQKEYADKLEREKIAR

SEQ ID NO: 20666 - protein, 84 aa, unidentified
  REGION 1..84: note = Description of Unknown:cds_NC_035460.1_cds_YP_009408073.1_122 target sequence
SSAQKEYADKLEREKIARLDAEHALERERARKDCGGNMCEQELELERNKNKKLELYLETEKDKANFYKRELEKERFIKSSSQEE

SEQ ID NO: 20667 - protein, 85 aa, unidentified
  REGION 1..85: note = Description of Unknown:cds_NC_035460.1_cds_YP_009408073.1_122 target sequence
NNTSSLSRKSKNVIRNLFREVTNSNISSSCYDILLKKQLHGDSINAVYRSLYGSGSDIDKRVDTVGKYILFVVVTYLAILIDDKD

SEQ ID NO: 20668 - protein, 85 aa, unidentified
  REGION 1..85: note = Description of Unknown:cds_NC_035460.1_cds_YP_009408073.1_122 target sequence
SKEIVSILTKFVNVISNIHSKYKCKYMFVGIPAIILFNKLDSTDVQKLYSLFSTKLNTNVELYEEYFNFIVSSDTYFNKKKFVKF

SEQ ID NO: 20669 - protein, 85 aa, unidentified
  REGION 1..85: note = Description of Unknown:cds_NC_035460.1_cds_YP_009408073.1_122 target sequence
SYGPVSFASSISVPDFVMEGLTFRSCDRIEKSEDIDDVYVFITVESDPKTYAFSKLTKPLYEGGLVVETDDLDDATALVIFDAIT

SEQ ID NO: 20670 - protein, 85 aa, unidentified
  REGION 1..85: note = Description of Unknown:cds_NC_035460.1_cds_YP_009408073.1_122 target sequence
TFDKFRNKALLLTLESIVNKQVIDPTLNIDRYPTDENISDDTGENVITPIKVGSSIGIVDYRLVINKLTEWLNQCEEKCEGAVSP

SEQ ID NO: 20671 - protein, 85 aa, unidentified
  REGION 1..85: note = Description of Unknown:cds_NC_035460.1_cds_YP_009408073.1_122 target sequence
EVKELRERITDLEKQLDEATSGKTNCEYEKTKIKDLESRLDSERQRVTRLLDDLQKARDGKCDSDSNDKAIIEELRKEIQNEQNR

SEQ ID NO: 20672 - protein, 85 aa, unidentified
  REGION 1..85: note = Description of Unknown:cds_NC_035460.1_cds_YP_009408073.1_122 target sequence
RMELMKELDKVRNGDGTSSCERELDLTRQWLHERDNELREMSKQAKHFERELERERIKNKQCDKYKKELDEAKSKIIRLETDLDK

SEQ ID NO: 20673 - protein, 85 aa, unidentified
  REGION 1..85: note = Description of Unknown:cds_NC_035460.1_cds_YP_009408073.1_122 target sequence
CLSQQNGSSDEVRKLTSQIESLERDLRECRASSGGDEKLLADIDLLKQQIGILAQQLEQCETRGDEKLLAEIEFLKEHINSLAQQ

SEQ ID NO: 20674 - protein, 85 aa, unidentified
  REGION 1..85: note = Description of Unknown:cds_NC_035460.1_cds_YP_009408073.1_122 target sequence
LEQCEASGGSGGSDTSKLQERITYLENELDKYIKGEGNVNFTLLNEINRLRDKNAELQNQLDQAQSQDKNNSYYKRALERERAKI

SEQ ID NO: 20675 - protein, 85 aa, unidentified
  REGION 1..85: note = Description of Unknown:cds_NC_035460.1_cds_YP_009408073.1_122 target sequence
IELENELQKCFDNNSGSEYIIKMEQMERKIKSLEAELRLCKDTDHDTEKIYKDKIAELQRELDKCKQSGGSSNSHTEIKVFYDVE

SEQ ID NO: 20676 - protein, 85 aa, unidentified
  REGION 1..85: note = Description of Unknown:cds_NC_035460.1_cds_YP_009408073.1_122 target sequence
CRTESARLQQRINELNDELNRLRKEDKTDSYYKREVDRQRKKVIELEHELEKYFNDDKIITYKKEMDAMQVVISEMRQELEKCKR

SEQ ID NO: 20677 - protein, 85 aa, unidentified
  REGION 1..85: note = Description of Unknown:cds_NC_035460.1_cds_YP_009408073.1_122 target sequence
DASCSSSSDCSFEQKRIELLELELRKTKEMVKQLEKFIEFSSAQKEYADKLEREKIARLDAEHALERERARKDCGGNMCEQELEL

SEQ ID NO: 20678 - protein, 85 aa, unidentified
  REGION 1..85: note = Description of Unknown:hvTR_P03204 target sequence
ESFEGQGDSRQSPDNERGDNVQTTGEHDQDPGPGPPSSGASERLVPEESYSRDQQPWGQSRGDENRGWMQRIRRRRRRRAALSGH

SEQ ID NO: 20679 - protein, 85 aa, unidentified
  REGION 1..85: note = Description of Unknown:hvTR_P03204 target sequence
LLDTEDNVPPWLPPHDITPYTARNIRDAACRAVKQSHLQALSNLILDSGLDTQHILCFVMAARQRLQDIRRGPLVAEGGVGWRHW

SEQ ID NO: 20680 - protein, 85 aa, unidentified
  REGION 1..85: note = Description of Unknown:hvTR_P03204 target sequence
LLTSPSQSWPMGYRTATLRTLTPVPNRVGADSIMLTATFGCQNAARTLNTFSATVWTPPHAGPREQERYAREAEVRFLRGKWQRR

SEQ ID NO: 20681 - protein, 85 aa, unidentified
  REGION 1..85: note = Description of Unknown:hvTR_P03204 target sequence
YRRIYDLIELCGSLHHIWQNLLQTEENLLDFVRFMGVMSSCNNPAVNYWFHKTIGNFKPYYPWNAPPNENPYHARRGIKEHVIQN

SEQ ID NO: 20682 - protein, 85 aa, unidentified
  REGION 1..85: note = Description of Unknown:hvTR_P03204 target sequence
AFRKAQIQGLSMLATGGEPRGDATSETSSDEDTGRQGSDVELESSDDELPYIDPNMEPVQQRPVMFVSRVPAKKPRKLPWPTPKT

SEQ ID NO: 20683 - protein, 85 aa, unidentified
  REGION 1..85: note = Description of Unknown:hvTR_P03204 target sequence
HPVKRTNVKTSDRSDKAEAQSTPERPGPSEQSSVTVEPAHPTPVEMPMVILHQPPPVPKPVPVKPTPPPSRRRRGACVVYDDDVI

SEQ ID NO: 20684 - protein, 85 aa, unidentified
  REGION 1..85: note = Description of Unknown:hvTR_P03204 target sequence
EVIDVETTEDSSSVSQPNKPHRKHQDGFQRSGRRQKRAAPPTVSPSDTGPPAVGPPAAGPPAAGPPAAGPPAAGPPAAGPPAAGP

SEQ ID NO: 20685 - protein, 85 aa, unidentified
  REGION 1..85: note = Description of Unknown:hvTR_P03204 target sequence
RILAPLSAGPPAAGPHIVTPPSARPRIMAPPVVRMFMRERQLPQSTGRKPQCFWEMRAGREITQMQQEPSSHLQSATQPTTPRPS

SEQ ID NO: 20686 - protein, 85 aa, unidentified
  REGION 1..85: note = Description of Unknown:hvTR_P03204 target sequence
WAPSVCALSVMDAGKAQPIESSHLSSMSPTQPISHEEQPRYEDPDAPLDLSLHPDVAAQPAPQAPYQGYQEPPAPQAPYQGYQEP

SEQ ID NO: 20687 - protein, 85 aa, unidentified
  REGION 1..85: note = Description of Unknown:hvTR_P03204 target sequence
PPPQAPYQGYQEPPAHGLQSSSYPGYAGPWTPRSQHPCYRHPWAPWSQDPVHGHTQGPWDPRAPHLPPQWDGSAGHGQDQVSQFP

SEQ ID NO: 20688 - protein, 85 aa, unidentified
  REGION 1..85: note = Description of Unknown:hvTR_P03204 target sequence
HLQSETGPPRLQLSLVPLVSSSAPSWSSPQPRAPIRPIPTRFPPPPMPLQDSMAVGCDSSGTACPSMPFASDYSQGAFTPLDINA

SEQ ID NO: 20689 - protein, 84 aa, unidentified
  REGION 1..84: note = Description of Unknown:hvTR_P03204 target sequence
DSSGTACPSMPFASDYSQGAFTPLDINATTPKRPRVEESSHGPARCSQATAEAQEILSDNSEISVFPKDAKQTDYDASTESELD

SEQ ID NO: 20690 - protein, 85 aa, unidentified
  REGION 1..85: note = Description of Unknown:hvTR_P03204 target sequence
DQDPGPGPPSSGASERLVPEESYSRDQQPWGQSRGDENRGWMQRIRRRRRRRAALSGHLLDTEDNVPPWLPPHDITPYTARNIRD

SEQ ID NO: 20691 - protein, 85 aa, unidentified
  REGION 1..85: note = Description of Unknown:hvTR_P03204 target sequence
AACRAVKQSHLQALSNLILDSGLDTQHILCFVMAARQRLQDIRRGPLVAEGGVGWRHWLLTSPSQSWPMGYRTATLRTLTPVPNR

SEQ ID NO: 20692 - protein, 85 aa, unidentified
  REGION 1..85: note = Description of Unknown:hvTR_P03204 target sequence
VGADSIMLTATFGCQNAARTLNTFSATVWTPPHAGPREQERYAREAEVRFLRGKWQRRYRRIYDLIELCGSLHHIWQNLLQTEEN

SEQ ID NO: 20693 - protein, 85 aa, unidentified
  REGION 1..85: note = Description of Unknown:hvTR_P03204 target sequence
LLDFVRFMGVMSSCNNPAVNYWFHKTIGNFKPYYPWNAPPNENPYHARRGIKEHVIQNAFRKAQIQGLSMLATGGEPRGDATSET

SEQ ID NO: 20694 - protein, 85 aa, unidentified
  REGION 1..85: note = Description of Unknown:hvTR_P03204 target sequence
SSDEDTGRQGSDVELESSDDELPYIDPNMEPVQQRPVMFVSRVPAKKPRKLPWPTPKTHPVKRTNVKTSDRSDKAEAQSTPERPG

SEQ ID NO: 20695 - protein, 85 aa, unidentified
  REGION 1..85: note = Description of Unknown:hvTR_P03204 target sequence
PSEQSSVTVEPAHPTPVEMPMVILHQPPPVPKPVPVKPTPPPSRRRRGACVVYDDDVIEVIDVETTEDSSSVSQPNKPHRKHQDG

SEQ ID NO: 20696 - protein, 85 aa, unidentified
  REGION 1..85: note = Description of Unknown:hvTR_P03204 target sequence
FQRSGRRQKRAAPPTVSPSDTGPPAVGPPAAGPPAAGPPAAGPPAAGPPAAGPPAAGPRILAPLSAGPPAAGPHIVTPPSARPRI

SEQ ID NO: 20697 - protein, 85 aa, unidentified
  REGION 1..85: note = Description of Unknown:hvTR_P03204 target sequence
MAPPVVRMFMRERQLPQSTGRKPQCFWEMRAGREITQMQQEPSSHLQSATQPTTPRPSWAPSVCALSVMDAGKAQPIESSHLSSM

SEQ ID NO: 20698 - protein, 85 aa, unidentified
  REGION 1..85: note = Description of Unknown:hvTR_P03204 target sequence
SPTQPISHEEQPRYEDPDAPLDLSLHPDVAAQPAPQAPYQGYQEPPAPQAPYQGYQEPPPPQAPYQGYQEPPAHGLQSSSYPGYA

SEQ ID NO: 20699 - protein, 85 aa, unidentified
  REGION 1..85: note = Description of Unknown:hvTR_P03204 target sequence
GPWTPRSQHPCYRHPWAPWSQDPVHGHTQGPWDPRAPHLPPQWDGSAGHGQDQVSQFPHLQSETGPPRLQLSLVPLVSSSAPSWS

SEQ ID NO: 20700 - protein, 85 aa, unidentified
  REGION 1..85: note = Description of Unknown:hvTR_P03204 target sequence
SPQPRAPIRPIPTRFPPPPMPLQDSMAVGCDSSGTACPSMPFASDYSQGAFTPLDINATTPKRPRVEESSHGPARCSQATAEAQE

SEQ ID NO: 20701 - protein, 85 aa, unidentified
  REGION 1..85: note = Description of Unknown:cds_NZ_WFIY01000004.1_cds_WP_155863791.1_1673 target sequence
LGIREELESRFGDNFSDSLVERLSHTVDMGFVPELVWSGIKINIIPDYVVYPKSTEDVIDLVKIALKYDVPITPYGRGTNRYGNA

SEQ ID NO: 20702 - protein, 85 aa, unidentified
  REGION 1..85: note = Description of Unknown:cds_NZ_WFIY01000004.1_cds_WP_155863791.1_1673 target sequence
IPADGGILVDFSKMDKVEIDEANKIAIVEPGATWKLIDIAAQQKGLQLRTFPSSYDSTAGGGIAGDALGIGSYEYGFICDNISFI

SEQ ID NO: 20703 - protein, 85 aa, unidentified
  REGION 1..85: note = Description of Unknown:cds_NZ_WFIY01000004.1_cds_WP_155863791.1_1673 target sequence
DMVNPKGELVHLEGKDLAIACGAEGTTGIIVKAGIKLRQFSNTEAMVISFDDFDKTYNAIGEFYREVIPAWHIQVRGPAISSYIA

SEQ ID NO: 20704 - protein, 85 aa, unidentified
  REGION 1..85: note = Description of Unknown:cds_NZ_WFIY01000004.1_cds_WP_155863791.1_1673 target sequence
EKFKASLDPGKWNMVILYPSSRSSIVEPKLYRIAQTYGGRMFEGEWTGWWSFNHGVNAALRTKGLLIHQHGLIHYTKIKELIEGL

SEQ ID NO: 20705 - protein, 85 aa, unidentified
  REGION 1..85: note = Description of Unknown:cds_NZ_WFIY01000004.1_cds_WP_155863791.1_1673 target sequence
EKNIGKLGTLTIDNGFDLDIDLERREVLLVNAFTQASLSPVDKKIIYDLAKNTLMMDEYIKVGGSMLSIGIFVHKYAKNRLSAMG

SEQ ID NO: 20706 - protein, 85 aa, unidentified
  REGION 1..85: note = Description of Unknown:cds_NZ_WFIY01000004.1_cds_WP_155863791.1_1673 target sequence
RTFQELGVDRYEEIKKYKEEMDPNEIFNPGKVFDPKRRAKAVLEIVGKQQEALRFRFGIGLAKALTPGGEIEGYKVAKRYLDIFV

SEQ ID NO: 20707 - protein, 85 aa, unidentified
  REGION 1..85: note = Description of Unknown:cds_NZ_WFIY01000004.1_cds_WP_155863791.1_1673 target sequence
DYALTCIDCAMCVTVCPQFKLVPQWPYAPKGMFDFTRGVISYYELHNSVDIPDSAIAEISGCHKCGLCDGVCPAKIPISTLLIKL

SEQ ID NO: 20708 - protein, 85 aa, unidentified
  REGION 1..85: note = Description of Unknown:cds_NZ_WFIY01000004.1_cds_WP_155863791.1_1673 target sequence
NSLVAKKIPEEKVPDTPIPAKYNDIIDENSEIGLWLGKYVIENPTVLFSSLELLKKLGIRIKLFNTSNDSGFLQYISGNGKDLTE

SEQ ID NO: 20709 - protein, 85 aa, unidentified
  REGION 1..85: note = Description of Unknown:cds_NZ_WFIY01000004.1_cds_WP_155863791.1_1673 target sequence
IMKNNLEKMKNVSELITLTPEDYKAFSEAYREYAKFAGVNIEAEVTPLELRLLKSIQFEGNEEINLHVACFSSTYADDIIKRLRD

SEQ ID NO: 20710 - protein, 85 aa, unidentified
  REGION 1..85: note = Description of Unknown:cds_NZ_WFIY01000004.1_cds_WP_155863791.1_1673 target sequence
RGFKVRKVEGCSGAILEKNIGKRADMMAKALGEKYQNLITLCPLAAVKFRSVGINAKTLIEFIAEKAGVNIAVEATEYKIPQSIK

SEQ ID NO: 20711 - protein, 85 aa, unidentified
  REGION 1..85: note = Description of Unknown:cds_NZ_WFIY01000004.1_cds_WP_155863791.1_1673 target sequence
DKISEIINNEIVNSLNKRIQILVDTVSFVSSGEVEYKKIIEPVITEAIDEASNNILKKIREIIDNETSGKSEAEKIVIRSAFIKE

SEQ ID NO: 20712 - protein, 84 aa, unidentified
  REGION 1..84: note = Description of Unknown:cds_NZ_WFIY01000004.1_cds_WP_155863791.1_1673 target sequence
KIREIIDNETSGKSEAEKIVIRSAFIKELSAIIMSLTLQPIVELIIKQVKSNTSEDFDQRIMANAILELLREKEDSLNKSIVNL

SEQ ID NO: 20713 - protein, 85 aa, unidentified
  REGION 1..85: note = Description of Unknown:cds_NZ_WFIY01000004.1_cds_WP_155863791.1_1673 target sequence
DMGFVPELVWSGIKINIIPDYVVYPKSTEDVIDLVKIALKYDVPITPYGRGTNRYGNAIPADGGILVDFSKMDKVEIDEANKIAI

SEQ ID NO: 20714 - protein, 85 aa, unidentified
  REGION 1..85: note = Description of Unknown:cds_NZ_WFIY01000004.1_cds_WP_155863791.1_1673 target sequence
VEPGATWKLIDIAAQQKGLQLRTFPSSYDSTAGGGIAGDALGIGSYEYGFICDNISFIDMVNPKGELVHLEGKDLAIACGAEGTT

SEQ ID NO: 20715 - protein, 85 aa, unidentified
  REGION 1..85: note = Description of Unknown:cds_NZ_WFIY01000004.1_cds_WP_155863791.1_1673 target sequence
GIIVKAGIKLRQFSNTEAMVISFDDFDKTYNAIGEFYREVIPAWHIQVRGPAISSYIAEKFKASLDPGKWNMVILYPSSRSSIVE

SEQ ID NO: 20716 - protein, 85 aa, unidentified
  REGION 1..85: note = Description of Unknown:cds_NZ_WFIY01000004.1_cds_WP_155863791.1_1673 target sequence
PKLYRIAQTYGGRMFEGEWTGWWSFNHGVNAALRTKGLLIHQHGLIHYTKIKELIEGLEKNIGKLGTLTIDNGFDLDIDLERREV

SEQ ID NO: 20717 - protein, 85 aa, unidentified
  REGION 1..85: note = Description of Unknown:cds_NZ_WFIY01000004.1_cds_WP_155863791.1_1673 target sequence
LLVNAFTQASLSPVDKKIIYDLAKNTLMMDEYIKVGGSMLSIGIFVHKYAKNRLSAMGRTFQELGVDRYEEIKKYKEEMDPNEIF

SEQ ID NO: 20718 - protein, 85 aa, unidentified
  REGION 1..85: note = Description of Unknown:cds_NZ_WFIY01000004.1_cds_WP_155863791.1_1673 target sequence
NPGKVFDPKRRAKAVLEIVGKQQEALRFRFGIGLAKALTPGGEIEGYKVAKRYLDIFVDYALTCIDCAMCVTVCPQFKLVPQWPY

SEQ ID NO: 20719 - protein, 85 aa, unidentified
  REGION 1..85: note = Description of Unknown:cds_NZ_WFIY01000004.1_cds_WP_155863791.1_1673 target sequence
APKGMFDFTRGVISYYELHNSVDIPDSAIAEISGCHKCGLCDGVCPAKIPISTLLIKLNSLVAKKIPEEKVPDTPIPAKYNDIID

SEQ ID NO: 20720 - protein, 85 aa, unidentified
  REGION 1..85: note = Description of Unknown:cds_NZ_WFIY01000004.1_cds_WP_155863791.1_1673 target sequence
ENSEIGLWLGKYVIENPTVLFSSLELLKKLGIRIKLFNTSNDSGFLQYISGNGKDLTEIMKNNLEKMKNVSELITLTPEDYKAFS

SEQ ID NO: 20721 - protein, 85 aa, unidentified
  REGION 1..85: note = Description of Unknown:cds_NZ_WFIY01000004.1_cds_WP_155863791.1_1673 target sequence
EAYREYAKFAGVNIEAEVTPLELRLLKSIQFEGNEEINLHVACFSSTYADDIIKRLRDRGFKVRKVEGCSGAILEKNIGKRADMM

SEQ ID NO: 20722 - protein, 85 aa, unidentified
  REGION 1..85: note = Description of Unknown:cds_NZ_WFIY01000004.1_cds_WP_155863791.1_1673 target sequence
AKALGEKYQNLITLCPLAAVKFRSVGINAKTLIEFIAEKAGVNIAVEATEYKIPQSIKDKISEIINNEIVNSLNKRIQILVDTVS

SEQ ID NO: 20723 - protein, 85 aa, unidentified
  REGION 1..85: note = Description of Unknown:cds_NZ_WFIY01000004.1_cds_WP_155863791.1_1673 target sequence
FVSSGEVEYKKIIEPVITEAIDEASNNILKKIREIIDNETSGKSEAEKIVIRSAFIKELSAIIMSLTLQPIVELIIKQVKSNTSE

SEQ ID NO: 20724 - protein, 85 aa, unidentified
  REGION 1..85: note = Description of Unknown:cds_NC_010495.1_cds_YP_001742070.1_33 target sequence
AEEVGGIVYEVGMDVSGLKAGTSSAESELSKFDSAVSGSIKNLNKLDGQADSTGKAFSSLVSVVKSIDATLSKMAASSDGATSAV

SEQ ID NO: 20725 - protein, 85 aa, unidentified
  REGION 1..85: note = Description of Unknown:cds_NC_010495.1_cds_YP_001742070.1_33 target sequence
KSTSQSAESANQVIDALNQQLAMMQQQQQQAAVSTGRLETSINAVTTAIRELGTSTGGAGASISGTERLIESLGNQVAILEEQME

SEQ ID NO: 20726 - protein, 85 aa, unidentified
  REGION 1..85: note = Description of Unknown:cds_NC_010495.1_cds_YP_001742070.1_33 target sequence
NGARSAAILAAQLRAGDGATDAQKAKIAELTGRLYDMKNGTESAGKSTNGFRNALQQGGYQVQDFIVQVQGGQSALVAFSQQGSQ

SEQ ID NO: 20727 - protein, 85 aa, unidentified
  REGION 1..85: note = Description of Unknown:cds_NC_010495.1_cds_YP_001742070.1_33 target sequence
LASVFSPVAGAVLTIATVIAGSLMASLSNGKNAIDAMKDAISAMDQVISVSSNGVAAYSDKFAALAKANTTVATLMRQQAQLELS

SEQ ID NO: 20728 - protein, 85 aa, unidentified
  REGION 1..85: note = Description of Unknown:cds_NC_010495.1_cds_YP_001742070.1_33 target sequence
AALSKVSKEISKASGEFVTFGDRLFASFSGANVSIKSFNDYLSTLNITTNDFGEAMKQAASAGLAGQSTMNSMIATVGALASRFD

SEQ ID NO: 20729 - protein, 85 aa, unidentified
  REGION 1..85: note = Description of Unknown:cds_NC_010495.1_cds_YP_001742070.1_33 target sequence
MTDQQAFEFAKQLSEIAKNPSNEKLNELIVTLQKVGEGQSSGAQKAREYAARLLEIATTTTDATMRLKALKGMTDSLMSSQDKAL

SEQ ID NO: 20730 - protein, 85 aa, unidentified
  REGION 1..85: note = Description of Unknown:cds_NC_010495.1_cds_YP_001742070.1_33 target sequence
KAARQALFIEKQTGDEKLKAMAWRDAEAQGLKENTAAFRKYYNVRLETYRQQEKNAQAARDERNANKKLKTELNQQENIQQKLNK

SEQ ID NO: 20731 - protein, 85 aa, unidentified
  REGION 1..85: note = Description of Unknown:cds_NC_010495.1_cds_YP_001742070.1_33 target sequence
LRQEALLAGQAESTKELSREQAILNAQQSLGKAATQEQIKLAGEYAAKIWDQKNALKEQASAEKERQRVEKSYHGLRAIASPTTG

SEQ ID NO: 20732 - protein, 85 aa, unidentified
  REGION 1..85: note = Description of Unknown:cds_NC_010495.1_cds_YP_001742070.1_33 target sequence
IDSEYQQRMADLDAYAAAYPQKITEIEQTRAAIEAQYRQQRMDAMWAEWQQQSLGAQLFGTALDSAMSTASNSITGLLTGTMSVQ

SEQ ID NO: 20733 - protein, 85 aa, unidentified
  REGION 1..85: note = Description of Unknown:cds_NC_010495.1_cds_YP_001742070.1_33 target sequence
DAMRSLGSTVLNSLVNSFVEMGVQWVKSAVMGQTAQVAATATTTAAQTAGLATTTAASTAAAATTTAAWTPAAIVASIGSFGGAA

SEQ ID NO: 20734 - protein, 85 aa, unidentified
  REGION 1..85: note = Description of Unknown:cds_NC_010495.1_cds_YP_001742070.1_33 target sequence
AIGVGAVLGALAMGITGKRKNGGPVSAGSMYEVGENGLPEIFQASNGRQYMIPGNDGSVISNKDISGGGGGVVVYNNVINNSSAQ

SEQ ID NO: 20735 - protein, 84 aa, unidentified
  REGION 1..84: note = Description of Unknown:cds_NC_010495.1_cds_YP_001742070.1_33 target sequence
NGRQYMIPGNDGSVISNKDISGGGGGVVVYNNVINNSSAQVSSSARDNGDGSVTIETIVSDIENNGPIGQSIGRNYNANRRATE

SEQ ID NO: 20736 - protein, 85 aa, unidentified
  REGION 1..85: note = Description of Unknown:cds_NC_010495.1_cds_YP_001742070.1_33 target sequence
ELSKFDSAVSGSIKNLNKLDGQADSTGKAFSSLVSVVKSIDATLSKMAASSDGATSAVKSTSQSAESANQVIDALNQQLAMMQQQ

SEQ ID NO: 20737 - protein, 85 aa, unidentified
  REGION 1..85: note = Description of Unknown:cds_NC_010495.1_cds_YP_001742070.1_33 target sequence
QQQAAVSTGRLETSINAVTTAIRELGTSTGGAGASISGTERLIESLGNQVAILEEQMENGARSAAILAAQLRAGDGATDAQKAKI

SEQ ID NO: 20738 - protein, 85 aa, unidentified
  REGION 1..85: note = Description of Unknown:cds_NC_010495.1_cds_YP_001742070.1_33 target sequence
AELTGRLYDMKNGTESAGKSTNGFRNALQQGGYQVQDFIVQVQGGQSALVAFSQQGSQLASVFSPVAGAVLTIATVIAGSLMASL

SEQ ID NO: 20739 - protein, 85 aa, unidentified
  REGION 1..85: note = Description of Unknown:cds_NC_010495.1_cds_YP_001742070.1_33 target sequence
SNGKNAIDAMKDAISAMDQVISVSSNGVAAYSDKFAALAKANTTVATLMRQQAQLELSAALSKVSKEISKASGEFVTFGDRLFAS

SEQ ID NO: 20740 - protein, 85 aa, unidentified
  REGION 1..85: note = Description of Unknown:cds_NC_010495.1_cds_YP_001742070.1_33 target sequence
FSGANVSIKSFNDYLSTLNITTNDFGEAMKQAASAGLAGQSTMNSMIATVGALASRFDMTDQQAFEFAKQLSEIAKNPSNEKLNE

SEQ ID NO: 20741 - protein, 85 aa, unidentified
  REGION 1..85: note = Description of Unknown:cds_NC_010495.1_cds_YP_001742070.1_33 target sequence
LIVTLQKVGEGQSSGAQKAREYAARLLEIATTTTDATMRLKALKGMTDSLMSSQDKALKAARQALFIEKQTGDEKLKAMAWRDAE

SEQ ID NO: 20742 - protein, 85 aa, unidentified
  REGION 1..85: note = Description of Unknown:cds_NC_010495.1_cds_YP_001742070.1_33 target sequence
AQGLKENTAAFRKYYNVRLETYRQQEKNAQAARDERNANKKLKTELNQQENIQQKLNKLRQEALLAGQAESTKELSREQAILNAQ

SEQ ID NO: 20743 - protein, 85 aa, unidentified
  REGION 1..85: note = Description of Unknown:cds_NC_010495.1_cds_YP_001742070.1_33 target sequence
QSLGKAATQEQIKLAGEYAAKIWDQKNALKEQASAEKERQRVEKSYHGLRAIASPTTGIDSEYQQRMADLDAYAAAYPQKITEIE

SEQ ID NO: 20744 - protein, 85 aa, unidentified
  REGION 1..85: note = Description of Unknown:cds_NC_010495.1_cds_YP_001742070.1_33 target sequence
QTRAAIEAQYRQQRMDAMWAEWQQQSLGAQLFGTALDSAMSTASNSITGLLTGTMSVQDAMRSLGSTVLNSLVNSFVEMGVQWVK

SEQ ID NO: 20745 - protein, 85 aa, unidentified
  REGION 1..85: note = Description of Unknown:cds_NC_010495.1_cds_YP_001742070.1_33 target sequence
SAVMGQTAQVAATATTTAAQTAGLATTTAASTAAAATTTAAWTPAAIVASIGSFGGAAAIGVGAVLGALAMGITGKRKNGGPVSA

SEQ ID NO: 20746 - protein, 85 aa, unidentified
  REGION 1..85: note = Description of Unknown:cds_NC_010495.1_cds_YP_001742070.1_33 target sequence
GSMYEVGENGLPEIFQASNGRQYMIPGNDGSVISNKDISGGGGGVVVYNNVINNSSAQVSSSARDNGDGSVTIETIVSDIENNGP

SEQ ID NO: 20747 - protein, 85 aa, unidentified
  REGION 1..85: note = Description of Unknown:cds_NZ_WFIY01000004.1_cds_2212 target sequence
VTVKISIDNRETTANEWETILSVLKRNGVYLPHICYNEGLTPIESCDSCLVEVNGRLVRACSTKVSDGMNVLVNSPRAVNARKTA

SEQ ID NO: 20748 - protein, 85 aa, unidentified
  REGION 1..85: note = Description of Unknown:cds_NZ_WFIY01000004.1_cds_2212 target sequence
ISRILKYHKLYCSICENNNGDCVLHEAVIKLGINSQKYVEKPYSVDDTGPFYIYDPSQCILCGRCVEACQDFAVNEVIWINWDLN

SEQ ID NO: 20749 - protein, 85 aa, unidentified
  REGION 1..85: note = Description of Unknown:cds_NZ_WFIY01000004.1_cds_2212 target sequence
PPRVIWDNGNLIGNSSCVNCGTCVTVCPVNALMEKSMLGEAGYLTWINKDLKKKAIEAIGRAEDSFSLLMTFSEIEAKARESQIK

SEQ ID NO: 20750 - protein, 85 aa, unidentified
  REGION 1..85: note = Description of Unknown:cds_NZ_WFIY01000004.1_cds_2212 target sequence
KTKTVCVYCGVGCSFEIWTKGRKILKVEPKPESPANGILTCVKGKFGWDFVNSPDRITKPLIREGDRFREASWDEAIEYIARKLK

SEQ ID NO: 20751 - protein, 85 aa, unidentified
  REGION 1..85: note = Description of Unknown:cds_NZ_WFIY01000004.1_cds_2212 target sequence
EVKEKYGPDSIGFIASDKMSNEEAYLLQKLARAVIGTNNVDNSARYCQSPATVGLWRTVGIGADSGTIKDIAEYSDLIIIVGHNT

SEQ ID NO: 20752 - protein, 85 aa, unidentified
  REGION 1..85: note = Description of Unknown:cds_NZ_WFIY01000004.1_cds_2212 target sequence
TESHPVVGSKIKRAQKIRGAKVVVIDVRKHEMAERANLFIRPKPGTDAAILAAVAKYIIDKGWENREFIEKRVKGFEEFKESIKG

SEQ ID NO: 20753 - protein, 85 aa, unidentified
  REGION 1..85: note = Description of Unknown:cds_NZ_WFIY01000004.1_cds_2212 target sequence
FTLDYVESISGVPKEQIIKLAEMIHEAKNVVILWGMGVTQHLGGADTSTIISDLLLITGNYGRPGTGAYPMRGHNNVQGVSDFGC

SEQ ID NO: 20754 - protein, 85 aa, unidentified
  REGION 1..85: note = Description of Unknown:cds_NZ_WFIY01000004.1_cds_2212 target sequence
LPNYLPGYQKLDDENVIRKFEDSWGVKLNRKPGLQITQMIEGVLEGKIHALYIVGEDTVMVDCGTPLTKQALEKVDFLIVQDMFM

SEQ ID NO: 20755 - protein, 85 aa, unidentified
  REGION 1..85: note = Description of Unknown:cds_NZ_WFIY01000004.1_cds_2212 target sequence
TETAKLADVILPAAASLEKDGTFVNTERRIQRFYKAMEALGDSKPDWEIIQMIANALGANWNYKHPSEIMDEIAKLCPIFAGVSY

SEQ ID NO: 20756 - protein, 85 aa, unidentified
  REGION 1..85: note = Description of Unknown:cds_NZ_WFIY01000004.1_cds_2212 target sequence
SRLEGFNSLLWPVNEDGTDTPLLYVNAFATEDGKAILYPLSWKPPELRDEVHRVIVNTGRVLEHFHVGNMTRRVEELRRKVPETF

SEQ ID NO: 20757 - protein, 85 aa, unidentified
  REGION 1..85: note = Description of Unknown:cds_NZ_WFIY01000004.1_cds_2212 target sequence
VEVSKELAVKYSIKNGDLVLVKSKFGGEIKARAIVSDRVKGEEIFIPLFASDPSKGVNNLTGLEIDKASGTPGYKDTPVVIEKIE

SEQ ID NO: 20758 - protein, 84 aa, unidentified
  REGION 1..84: note = Description of Unknown:cds_NZ_WFIY01000004.1_cds_2212 target sequence
IFIPLFASDPSKGVNNLTGLEIDKASGTPGYKDTPVVIEKIEEGKGESPLPLDNWRFHINERRRQLGIEVQKKWMREEFRPLTD

SEQ ID NO: 20759 - protein, 85 aa, unidentified
  REGION 1..85: note = Description of Unknown:cds_NZ_WFIY01000004.1_cds_2212 target sequence
GVYLPHICYNEGLTPIESCDSCLVEVNGRLVRACSTKVSDGMNVLVNSPRAVNARKTAISRILKYHKLYCSICENNNGDCVLHEA

SEQ ID NO: 20760 - protein, 85 aa, unidentified
  REGION 1..85: note = Description of Unknown:cds_NZ_WFIY01000004.1_cds_2212 target sequence
VIKLGINSQKYVEKPYSVDDTGPFYIYDPSQCILCGRCVEACQDFAVNEVIWINWDLNPPRVIWDNGNLIGNSSCVNCGTCVTVC

SEQ ID NO: 20761 - protein, 85 aa, unidentified
  REGION 1..85: note = Description of Unknown:cds_NZ_WFIY01000004.1_cds_2212 target sequence
PVNALMEKSMLGEAGYLTWINKDLKKKAIEAIGRAEDSFSLLMTFSEIEAKARESQIKKTKTVCVYCGVGCSFEIWTKGRKILKV

SEQ ID NO: 20762 - protein, 85 aa, unidentified
  REGION 1..85: note = Description of Unknown:cds_NZ_WFIY01000004.1_cds_2212 target sequence
EPKPESPANGILTCVKGKFGWDFVNSPDRITKPLIREGDRFREASWDEAIEYIARKLKEVKEKYGPDSIGFIASDKMSNEEAYLL

SEQ ID NO: 20763 - protein, 85 aa, unidentified
  REGION 1..85: note = Description of Unknown:cds_NZ_WFIY01000004.1_cds_2212 target sequence
QKLARAVIGTNNVDNSARYCQSPATVGLWRTVGIGADSGTIKDIAEYSDLIIIVGHNTTESHPVVGSKIKRAQKIRGAKVVVIDV

SEQ ID NO: 20764 - protein, 85 aa, unidentified
  REGION 1..85: note = Description of Unknown:cds_NZ_WFIY01000004.1_cds_2212 target sequence
RKHEMAERANLFIRPKPGTDAAILAAVAKYIIDKGWENREFIEKRVKGFEEFKESIKGFTLDYVESISGVPKEQIIKLAEMIHEA

SEQ ID NO: 20765 - protein, 85 aa, unidentified
  REGION 1..85: note = Description of Unknown:cds_NZ_WFIY01000004.1_cds_2212 target sequence
KNVVILWGMGVTQHLGGADTSTIISDLLLITGNYGRPGTGAYPMRGHNNVQGVSDFGCLPNYLPGYQKLDDENVIRKFEDSWGVK

SEQ ID NO: 20766 - protein, 85 aa, unidentified
  REGION 1..85: note = Description of Unknown:cds_NZ_WFIY01000004.1_cds_2212 target sequence
LNRKPGLQITQMIEGVLEGKIHALYIVGEDTVMVDCGTPLTKQALEKVDFLIVQDMFMTETAKLADVILPAAASLEKDGTFVNTE

SEQ ID NO: 20767 - protein, 85 aa, unidentified
  REGION 1..85: note = Description of Unknown:cds_NZ_WFIY01000004.1_cds_2212 target sequence
RRIQRFYKAMEALGDSKPDWEIIQMIANALGANWNYKHPSEIMDEIAKLCPIFAGVSYSRLEGFNSLLWPVNEDGTDTPLLYVNA

SEQ ID NO: 20768 - protein, 85 aa, unidentified
  REGION 1..85: note = Description of Unknown:cds_NZ_WFIY01000004.1_cds_2212 target sequence
FATEDGKAILYPLSWKPPELRDEVHRVIVNTGRVLEHFHVGNMTRRVEELRRKVPETFVEVSKELAVKYSIKNGDLVLVKSKFGG

SEQ ID NO: 20769 - protein, 85 aa, unidentified
  REGION 1..85: note = Description of Unknown:cds_NZ_WFIY01000004.1_cds_2212 target sequence
EIKARAIVSDRVKGEEIFIPLFASDPSKGVNNLTGLEIDKASGTPGYKDTPVVIEKIEEGKGESPLPLDNWRFHINERRRQLGIE

SEQ ID NO: 20770 - protein, 85 aa, unidentified
  REGION 1..85: note = Description of Unknown:cds_NZ_WFIY01000004.1_cds_WP_155864195.1_2158 target sequence
AYQINDEEIEIYQDLLRLEVNKFTSSQSKDFKSALLDKSEISQIIGKYSNGTTIFNNLLKKGMIIEYCGKYRTAHMDLLAKAAFI

SEQ ID NO: 20771 - protein, 85 aa, unidentified
  REGION 1..85: note = Description of Unknown:cds_NZ_WFIY01000004.1_cds_WP_155864195.1_2158 target sequence
RPFINIEPYSLEFDIMLNEEVYPDFGSVSVNQLLQIINSKLSKDNLSPTQINIIDEIITRLLKGVNINGLSSFQGYMIDKILNTD

SEQ ID NO: 20772 - protein, 85 aa, unidentified
  REGION 1..85: note = Description of Unknown:cds_NZ_WFIY01000004.1_cds_WP_155864195.1_2158 target sequence
YTYIPLVAPTATGKTIIFVIPSIIYLLESIFKEEKPINVIFVYPRKALAKDQVEKLIKYFDIINDELSKRQINKKITIALDDGDT

SEQ ID NO: 20773 - protein, 85 aa, unidentified
  REGION 1..85: note = Description of Unknown:cds_NZ_WFIY01000004.1_cds_WP_155864195.1_2158 target sequence
PKNKKEIKQNESYRGLKCPRCQKGDLIYKNDHIECSNCGEKYDFIIPTKDEIKSSPPNVIVTNIWTLYRRLLNMNTVHNFKNVKY

SEQ ID NO: 20774 - protein, 85 aa, unidentified
  REGION 1..85: note = Description of Unknown:cds_NZ_WFIY01000004.1_cds_WP_155864195.1_2158 target sequence
IVFDEVHAYDGVLYHHLRFILRLLFSLKQNATKIEKIIFSSATIPHYKEFISKLVCCGNTNCIANIETYDDYYKNNKNNVSKKRL

SEQ ID NO: 20775 - protein, 85 aa, unidentified
  REGION 1..85: note = Description of Unknown:cds_NZ_WFIY01000004.1_cds_WP_155864195.1_2158 target sequence
ILYEFLLPNVERGIETLTEDVTEVVLAWLKEHNFKGILFADSISSVTNFYKYFKNTILGERKAREIRDHICYNNPNDLCNNNEYY

SEQ ID NO: 20776 - protein, 85 aa, unidentified
  REGION 1..85: note = Description of Unknown:cds_NZ_WFIY01000004.1_cds_WP_155864195.1_2158 target sequence
WPYLSNYLNSCYNDKNLDKLASDLSKGIEQHYSILSLQKRSRIEEEFKNSRDKLLLFSTSTLELGIDIGDVAAIVQHKLPLSKES

SEQ ID NO: 20777 - protein, 85 aa, unidentified
  REGION 1..85: note = Description of Unknown:cds_NZ_WFIY01000004.1_cds_WP_155864195.1_2158 target sequence
FIQRIGRAGRSNETYRIATGIIILQPTPFASLYMFNRNLRDSLINANYTSLLKSIDATNIQIIFQYILSYLLLKRAINHQPTCID

SEQ ID NO: 20778 - protein, 85 aa, unidentified
  REGION 1..85: note = Description of Unknown:cds_NZ_WFIY01000004.1_cds_WP_155864195.1_2158 target sequence
DTRNNNCEELLRDLINEAYNYLNNLNNNIQELQNALCIDLGHVKDDLLNLINRLLKMENGSGNEDYCKDIVNKLNKDISNLLSAA

SEQ ID NO: 20779 - protein, 85 aa, unidentified
  REGION 1..85: note = Description of Unknown:cds_NZ_WFIY01000004.1_cds_WP_155864195.1_2158 target sequence
SAAIDKLLESSNIAEYKRLQRIINDIYDKTEQLDDILNNSSGNLSEVLNEIQNKGEKLKSYINNLEDQKSNLERSSEDMRKKMEN

SEQ ID NO: 20780 - protein, 85 aa, unidentified
  REGION 1..85: note = Description of Unknown:cds_NZ_WFIY01000004.1_cds_WP_155864195.1_2158 target sequence
RKDIPQKDIMKLWENDELISQIDDIIKLLNDIVDKINTLIKRSFDIIDYAKECLDTFSYFNNTSSSNDKDQYNNDIFTLMRKKYN

SEQ ID NO: 20781 - protein, 84 aa, unidentified
  REGION 1..84: note = Description of Unknown:cds_NZ_WFIY01000004.1_cds_WP_155864195.1_2158 target sequence
NDIVDKINTLIKRSFDIIDYAKECLDTFSYFNNTSSSNDKDQYNNDIFTLMRKKYNKHIYVDLLMTPPSPTIELIGIEEADDYE

SEQ ID NO: 20782 - protein, 85 aa, unidentified
  REGION 1..85: note = Description of Unknown:cds_NZ_WFIY01000004.1_cds_WP_155864195.1_2158 target sequence
SKDFKSALLDKSEISQIIGKYSNGTTIFNNLLKKGMIIEYCGKYRTAHMDLLAKAAFIRPFINIEPYSLEFDIMLNEEVYPDFGS

SEQ ID NO: 20783 - protein, 85 aa, unidentified
  REGION 1..85: note = Description of Unknown:cds_NZ_WFIY01000004.1_cds_WP_155864195.1_2158 target sequence
VSVNQLLQIINSKLSKDNLSPTQINIIDEIITRLLKGVNINGLSSFQGYMIDKILNTDYTYIPLVAPTATGKTIIFVIPSIIYLL

SEQ ID NO: 20784 - protein, 85 aa, unidentified
  REGION 1..85: note = Description of Unknown:cds_NZ_WFIY01000004.1_cds_WP_155864195.1_2158 target sequence
ESIFKEEKPINVIFVYPRKALAKDQVEKLIKYFDIINDELSKRQINKKITIALDDGDTPKNKKEIKQNESYRGLKCPRCQKGDLI

SEQ ID NO: 20785 - protein, 85 aa, unidentified
  REGION 1..85: note = Description of Unknown:cds_NZ_WFIY01000004.1_cds_WP_155864195.1_2158 target sequence
YKNDHIECSNCGEKYDFIIPTKDEIKSSPPNVIVTNIWTLYRRLLNMNTVHNFKNVKYIVFDEVHAYDGVLYHHLRFILRLLFSL

SEQ ID NO: 20786 - protein, 85 aa, unidentified
  REGION 1..85: note = Description of Unknown:cds_NZ_WFIY01000004.1_cds_WP_155864195.1_2158 target sequence
KQNATKIEKIIFSSATIPHYKEFISKLVCCGNTNCIANIETYDDYYKNNKNNVSKKRLILYEFLLPNVERGIETLTEDVTEVVLA

SEQ ID NO: 20787 - protein, 85 aa, unidentified
  REGION 1..85: note = Description of Unknown:cds_NZ_WFIY01000004.1_cds_WP_155864195.1_2158 target sequence
WLKEHNFKGILFADSISSVTNFYKYFKNTILGERKAREIRDHICYNNPNDLCNNNEYYWPYLSNYLNSCYNDKNLDKLASDLSKG

SEQ ID NO: 20788 - protein, 85 aa, unidentified
  REGION 1..85: note = Description of Unknown:cds_NZ_WFIY01000004.1_cds_WP_155864195.1_2158 target sequence
IEQHYSILSLQKRSRIEEEFKNSRDKLLLFSTSTLELGIDIGDVAAIVQHKLPLSKESFIQRIGRAGRSNETYRIATGIIILQPT

SEQ ID NO: 20789 - protein, 85 aa, unidentified
  REGION 1..85: note = Description of Unknown:cds_NZ_WFIY01000004.1_cds_WP_155864195.1_2158 target sequence
PFASLYMFNRNLRDSLINANYTSLLKSIDATNIQIIFQYILSYLLLKRAINHQPTCIDDTRNNNCEELLRDLINEAYNYLNNLNN

SEQ ID NO: 20790 - protein, 85 aa, unidentified
  REGION 1..85: note = Description of Unknown:cds_NZ_WFIY01000004.1_cds_WP_155864195.1_2158 target sequence
NIQELQNALCIDLGHVKDDLLNLINRLLKMENGSGNEDYCKDIVNKLNKDISNLLSAASAAIDKLLESSNIAEYKRLQRIINDIY

SEQ ID NO: 20791 - protein, 85 aa, unidentified
  REGION 1..85: note = Description of Unknown:cds_NZ_WFIY01000004.1_cds_WP_155864195.1_2158 target sequence
DKTEQLDDILNNSSGNLSEVLNEIQNKGEKLKSYINNLEDQKSNLERSSEDMRKKMENRKDIPQKDIMKLWENDELISQIDDIIK

SEQ ID NO: 20792 - protein, 85 aa, unidentified
  REGION 1..85: note = Description of Unknown:cds_NZ_WFIY01000004.1_cds_WP_155864195.1_2158 target sequence
LLNDIVDKINTLIKRSFDIIDYAKECLDTFSYFNNTSSSNDKDQYNNDIFTLMRKKYNKHIYVDLLMTPPSPTIELIGIEEADDY

SEQ ID NO: 20793 - protein, 85 aa, unidentified
  REGION 1..85: note = Description of Unknown:hvTR_P16730 target sequence
AGAAPRRLGCDALIVVGGSAMPRRVLHVPVHVRACNLTQELSTGEDARFCRPRPVNVERVRAVFAALYRACPIHVRTEPERVKLV

SEQ ID NO: 20794 - protein, 85 aa, unidentified
  REGION 1..85: note = Description of Unknown:hvTR_P16730 target sequence
LGRLLLGPVAVPCFCDGEVEGHGEHLVPTTQFCRGPLLYVHRRCCCGSVTAGRALSYHVLENHVATHVLRGLLSLTEWNRELPSL

SEQ ID NO: 20795 - protein, 85 aa, unidentified
  REGION 1..85: note = Description of Unknown:hvTR_P16730 target sequence
FCDCPGGGGASGTEERYAMACLPRDLSLHLDDYPYLMVEIGRVLSVSEVDDYVTAVSGYLGEAAAPRIQVHYKLLFGLNVRPQAP

SEQ ID NO: 20796 - protein, 85 aa, unidentified
  REGION 1..85: note = Description of Unknown:hvTR_P16730 target sequence
CALDATRDFFLLELQKLWLGVEYHHEVTSEFFGRVLAQLHRDRARVMMALRLPEQTVCHLSTFVLSRFKRQVLYFKLQVSYGKCR

SEQ ID NO: 20797 - protein, 85 aa, unidentified
  REGION 1..85: note = Description of Unknown:hvTR_P16730 target sequence
TGHADRSGGGGNGGNQGHHNLLCYRRLSVTFADTDTVWRNLFYVYYELARDLGSHGTEDRPVSRGYGVSCASRTSRLSPSESTVV

SEQ ID NO: 20798 - protein, 85 aa, unidentified
  REGION 1..85: note = Description of Unknown:hvTR_P16730 target sequence
SANGHALSSTALPTTSAGHKLSLPRDPAADRVRRYVCIISRLMYARYGERWRKHCQRRSETGEEEEEETLESGETDATPPFDFTG

SEQ ID NO: 20799 - protein, 85 aa, unidentified
  REGION 1..85: note = Description of Unknown:hvTR_P16730 target sequence
QQLRRAYQEHRRRKHLAVQRYAPCRRKLIGGMEFAEVTGVSLDRIAVNAFNTNRVINMKAALSSIAASGLGVRAPRLPKNMTHSF

SEQ ID NO: 20800 - protein, 85 aa, unidentified
  REGION 1..85: note = Description of Unknown:hvTR_P16730 target sequence
VMYKHTFKEPACTVSTFVSNDAVYINSLNVNIRGSYPEFLYSLGVYRLHVNIDHFFLPAVVCNSNSSLDVHGLEDQAVIRSERSK

SEQ ID NO: 20801 - protein, 85 aa, unidentified
  REGION 1..85: note = Description of Unknown:hvTR_P16730 target sequence
VYWTTNFPCMISHTNNVNVGWFKAATAIVPRVSGADLEAILLKELSCIKNMRDVCIDYGLHRVFTQLELRNSYQIPFLAKQLVLF

SEQ ID NO: 20802 - protein, 85 aa, unidentified
  REGION 1..85: note = Description of Unknown:hvTR_P16730 target sequence
LRACLLKLHGREKRLQLDRLVFEAAQRGLFDYSKNLTAHTKIKHTCALIGSRLANNVPKILARNKKVKLDHLGRNANVLTVCRHV

SEQ ID NO: 20803 - protein, 85 aa, unidentified
  REGION 1..85: note = Description of Unknown:hvTR_P16730 target sequence
EAHKIPRTRLKVLVEVLGALQSISGTPHTREVIHQTLFRLCSAAAATSGLCSSPPPLCVSSSSSVPSVPTSVSVDGSSEPTSPRA

SEQ ID NO: 20804 - protein, 84 aa, unidentified
  REGION 1..84: note = Description of Unknown:hvTR_P16730 target sequence
RTRLKVLVEVLGALQSISGTPHTREVIHQTLFRLCSAAAATSGLCSSPPPLCVSSSSSVPSVPTSVSVDGSSEPTSPRARFASR

SEQ ID NO: 20805 - protein, 85 aa, unidentified
  REGION 1..85: note = Description of Unknown:hvTR_P16730 target sequence
VPVHVRACNLTQELSTGEDARFCRPRPVNVERVRAVFAALYRACPIHVRTEPERVKLVLGRLLLGPVAVPCFCDGEVEGHGEHLV

SEQ ID NO: 20806 - protein, 85 aa, unidentified
  REGION 1..85: note = Description of Unknown:hvTR_P16730 target sequence
PTTQFCRGPLLYVHRRCCCGSVTAGRALSYHVLENHVATHVLRGLLSLTEWNRELPSLFCDCPGGGGASGTEERYAMACLPRDLS

SEQ ID NO: 20807 - protein, 85 aa, unidentified
  REGION 1..85: note = Description of Unknown:hvTR_P16730 target sequence
LHLDDYPYLMVEIGRVLSVSEVDDYVTAVSGYLGEAAAPRIQVHYKLLFGLNVRPQAPCALDATRDFFLLELQKLWLGVEYHHEV

SEQ ID NO: 20808 - protein, 85 aa, unidentified
  REGION 1..85: note = Description of Unknown:hvTR_P16730 target sequence
TSEFFGRVLAQLHRDRARVMMALRLPEQTVCHLSTFVLSRFKRQVLYFKLQVSYGKCRTGHADRSGGGGNGGNQGHHNLLCYRRL

SEQ ID NO: 20809 - protein, 85 aa, unidentified
  REGION 1..85: note = Description of Unknown:hvTR_P16730 target sequence
SVTFADTDTVWRNLFYVYYELARDLGSHGTEDRPVSRGYGVSCASRTSRLSPSESTVVSANGHALSSTALPTTSAGHKLSLPRDP

SEQ ID NO: 20810 - protein, 85 aa, unidentified
  REGION 1..85: note = Description of Unknown:hvTR_P16730 target sequence
AADRVRRYVCIISRLMYARYGERWRKHCQRRSETGEEEEEETLESGETDATPPFDFTGQQLRRAYQEHRRRKHLAVQRYAPCRRK

SEQ ID NO: 20811 - protein, 85 aa, unidentified
  REGION 1..85: note = Description of Unknown:hvTR_P16730 target sequence
LIGGMEFAEVTGVSLDRIAVNAFNTNRVINMKAALSSIAASGLGVRAPRLPKNMTHSFVMYKHTFKEPACTVSTFVSNDAVYINS

SEQ ID NO: 20812 - protein, 85 aa, unidentified
  REGION 1..85: note = Description of Unknown:hvTR_P16730 target sequence
LNVNIRGSYPEFLYSLGVYRLHVNIDHFFLPAVVCNSNSSLDVHGLEDQAVIRSERSKVYWTTNFPCMISHTNNVNVGWFKAATA

SEQ ID NO: 20813 - protein, 85 aa, unidentified
  REGION 1..85: note = Description of Unknown:hvTR_P16730 target sequence
IVPRVSGADLEAILLKELSCIKNMRDVCIDYGLHRVFTQLELRNSYQIPFLAKQLVLFLRACLLKLHGREKRLQLDRLVFEAAQR

SEQ ID NO: 20814 - protein, 85 aa, unidentified
  REGION 1..85: note = Description of Unknown:hvTR_P16730 target sequence
GLFDYSKNLTAHTKIKHTCALIGSRLANNVPKILARNKKVKLDHLGRNANVLTVCRHVEAHKIPRTRLKVLVEVLGALQSISGTP

SEQ ID NO: 20815 - protein, 85 aa, unidentified
  REGION 1..85: note = Description of Unknown:hvTR_Q69567.4 target sequence
EPAKPSGNNMGSNDERMQDYRPDPMMEESIKEILEESLMCDTSFDDLIIPGLESFGLIIPESSNNIESNNVEEGSDGELKTLAAQ

SEQ ID NO: 20816 - protein, 85 aa, unidentified
  REGION 1..85: note = Description of Unknown:hvTR_Q69567.4 target sequence
SAGNCIQSIGASVKAAMKQEQSDMEDKLIKCAGLLTQQQSMFIGLGLEQLSQLININLLSSASTKYVESYSKMLHGKELDFFNWC

SEQ ID NO: 20817 - protein, 85 aa, unidentified
  REGION 1..85: note = Description of Unknown:hvTR_Q69567.4 target sequence
EPRFIVFACDKFDGLVKKVASESRNLLLDLRANMNNDIIKAVKDIFSKATVTLDCQKLNQGATMLMMMAHNKEMSNPDISSKDFC

SEQ ID NO: 20818 - protein, 85 aa, unidentified
  REGION 1..85: note = Description of Unknown:hvTR_Q69567.4 target sequence
EKINTLKQTLLEGKNEIVETNAKNMQILQTFAIKQMNQIFMDGCDKAFLKLNVNCKNLITAAKNLANTILQSIVICSNEFSWQHL

SEQ ID NO: 20819 - protein, 85 aa, unidentified
  REGION 1..85: note = Description of Unknown:hvTR_Q69567.4 target sequence
KLLRRGFKVTMLNMITQACECLESDYDDTGLIKPLTPLQIMDGYINMNKNRQSSICDGNTDPSDSMILDLADFDDHGRYSEESSI

SEQ ID NO: 20820 - protein, 85 aa, unidentified
  REGION 1..85: note = Description of Unknown:hvTR_Q69567.4 target sequence
ESIHEDDDNKMYPCTPSPEVPGKSKYVGTFTENSRQSGDEQTNPNCVGTASVTDLGGPDNLNSISGLQSCKNMLLERLLDTQCDS

SEQ ID NO: 20821 - protein, 85 aa, unidentified
  REGION 1..85: note = Description of Unknown:hvTR_Q69567.4 target sequence
VVEGTEQDGSYGNTLISEMMMFGYETDHSAPYESESDNNDEIDYIANSDSAARTNNIHMNSTDENTPFSNSICSPPEVTPSKKNV

SEQ ID NO: 20822 - protein, 85 aa, unidentified
  REGION 1..85: note = Description of Unknown:hvTR_Q69567.4 target sequence
KPKSMTPGSKPKKRVAKRKHVSSKSPKNKKIKTDQLPKAADVIVISSESEDEEDGDNIIGNSILIKAIKSESDSESSSESNDCTS

SEQ ID NO: 20823 - protein, 85 aa, unidentified
  REGION 1..85: note = Description of Unknown:hvTR_Q69567.4 target sequence
EHKQLHLSDYDEVTNNGHCPSYGFPTPVFTIPIRSMQGTGGIKSKFIPKKNWIWYMKKTHQVDNCPIHNSENVDAKDDSDGTEAK

SEQ ID NO: 20824 - protein, 85 aa, unidentified
  REGION 1..85: note = Description of Unknown:hvTR_Q69567.4 target sequence
HCFMNHFVPIKTDDEDYDKNNVSYIYNKIQNSKIDSGDIIPTKKLIIDMVMDNFMDLNDIIKQGITKHCQDLCNKYNVVTPTTCE

SEQ ID NO: 20825 - protein, 85 aa, unidentified
  REGION 1..85: note = Description of Unknown:hvTR_Q69567.4 target sequence
DDLNMTNSQTFATTATQVFDPPVTGNNSSILNIINDTTSQNDENRCTEGTSNSNEKCTNISDCNSDGTEAFKLDGYPSDYDPFVE

SEQ ID NO: 20826 - protein, 84 aa, unidentified
  REGION 1..84: note = Description of Unknown:hvTR_Q69567.4 target sequence
NSQTFATTATQVFDPPVTGNNSSILNIINDTTSQNDENRCTEGTSNSNEKCTNISDCNSDGTEAFKLDGYPSDYDPFVENAQIY

SEQ ID NO: 20827 - protein, 85 aa, unidentified
  REGION 1..85: note = Description of Unknown:hvTR_Q69567.4 target sequence
ESIKEILEESLMCDTSFDDLIIPGLESFGLIIPESSNNIESNNVEEGSDGELKTLAAQSAGNCIQSIGASVKAAMKQEQSDMEDK

SEQ ID NO: 20828 - protein, 85 aa, unidentified
  REGION 1..85: note = Description of Unknown:hvTR_Q69567.4 target sequence
LIKCAGLLTQQQSMFIGLGLEQLSQLININLLSSASTKYVESYSKMLHGKELDFFNWCEPRFIVFACDKFDGLVKKVASESRNLL

SEQ ID NO: 20829 - protein, 85 aa, unidentified
  REGION 1..85: note = Description of Unknown:hvTR_Q69567.4 target sequence
LDLRANMNNDIIKAVKDIFSKATVTLDCQKLNQGATMLMMMAHNKEMSNPDISSKDFCEKINTLKQTLLEGKNEIVETNAKNMQI

SEQ ID NO: 20830 - protein, 85 aa, unidentified
  REGION 1..85: note = Description of Unknown:hvTR_Q69567.4 target sequence
LQTFAIKQMNQIFMDGCDKAFLKLNVNCKNLITAAKNLANTILQSIVICSNEFSWQHLKLLRRGFKVTMLNMITQACECLESDYD

SEQ ID NO: 20831 - protein, 85 aa, unidentified
  REGION 1..85: note = Description of Unknown:hvTR_Q69567.4 target sequence
DTGLIKPLTPLQIMDGYINMNKNRQSSICDGNTDPSDSMILDLADFDDHGRYSEESSIESIHEDDDNKMYPCTPSPEVPGKSKYV

SEQ ID NO: 20832 - protein, 85 aa, unidentified
  REGION 1..85: note = Description of Unknown:hvTR_Q69567.4 target sequence
GTFTENSRQSGDEQTNPNCVGTASVTDLGGPDNLNSISGLQSCKNMLLERLLDTQCDSVVEGTEQDGSYGNTLISEMMMFGYETD

SEQ ID NO: 20833 - protein, 85 aa, unidentified
  REGION 1..85: note = Description of Unknown:hvTR_Q69567.4 target sequence
HSAPYESESDNNDEIDYIANSDSAARTNNIHMNSTDENTPFSNSICSPPEVTPSKKNVKPKSMTPGSKPKKRVAKRKHVSSKSPK

SEQ ID NO: 20834 - protein, 85 aa, unidentified
  REGION 1..85: note = Description of Unknown:hvTR_Q69567.4 target sequence
NKKIKTDQLPKAADVIVISSESEDEEDGDNIIGNSILIKAIKSESDSESSSESNDCTSEHKQLHLSDYDEVTNNGHCPSYGFPTP

SEQ ID NO: 20835 - protein, 85 aa, unidentified
  REGION 1..85: note = Description of Unknown:hvTR_Q69567.4 target sequence
VFTIPIRSMQGTGGIKSKFIPKKNWIWYMKKTHQVDNCPIHNSENVDAKDDSDGTEAKHCFMNHFVPIKTDDEDYDKNNVSYIYN

SEQ ID NO: 20836 - protein, 85 aa, unidentified
  REGION 1..85: note = Description of Unknown:hvTR_Q69567.4 target sequence
KIQNSKIDSGDIIPTKKLIIDMVMDNFMDLNDIIKQGITKHCQDLCNKYNVVTPTTCEDDLNMTNSQTFATTATQVFDPPVTGNN

SEQ ID NO: 20837 - protein, 85 aa, unidentified
  REGION 1..85: note = Description of Unknown:cds_NZ_WFIY01000004.1_cds_WP_155862653.1_445 target sequence
LVNISQKWQKKWEESKIFESNPDSRKKFFTTVAFPYPNSPFHLGHGRTYTTADIYARYMRMKGYNVLFPMGFHYTGTPIITMADD

SEQ ID NO: 20838 - protein, 85 aa, unidentified
  REGION 1..85: note = Description of Unknown:cds_NZ_WFIY01000004.1_cds_WP_155862653.1_445 target sequence
VAKGEKEVIDIFKNIYEIPPDDIPKLSDPLFMANYFKEDIKKAMKELGLSIDWRREFTTIDPEFSSFIVWQFNKLQQQGYIVKDT

SEQ ID NO: 20839 - protein, 85 aa, unidentified
  REGION 1..85: note = Description of Unknown:cds_NZ_WFIY01000004.1_cds_WP_155862653.1_445 target sequence
HPVGWCPVHHLPVGMHDTKGDVEPDIGEYVLIYFESEKGILPVATLRPETIFGVVAVWVNPKVTYAITEIDGKRMIVTERAAFKL

SEQ ID NO: 20840 - protein, 85 aa, unidentified
  REGION 1..85: note = Description of Unknown:cds_NZ_WFIY01000004.1_cds_WP_155862653.1_445 target sequence
SFQIDNVKVLDKISGSDLIKLTAINPITGQSVPVLPGEFVDPDMATGVVMSVPAHAPFDYYYLKKVSPNTQIIPVIKVEGYGESP

SEQ ID NO: 20841 - protein, 85 aa, unidentified
  REGION 1..85: note = Description of Unknown:cds_NZ_WFIY01000004.1_cds_WP_155862653.1_445 target sequence
AAEVVEKEKPKNDADLKKLTELVYRAEYNKGKMRDDVLLRAKPEYRGELKDIVGLSVPEARKIITNFIINHGLGRKILEIMNRPV

SEQ ID NO: 20842 - protein, 85 aa, unidentified
  REGION 1..85: note = Description of Unknown:cds_NZ_WFIY01000004.1_cds_WP_155862653.1_445 target sequence
YCRCGNEVVVKILKDQWFLDYGNPEWKAKAKKLLSMMRIVPEEARKDFEYALDWLQKRACARTRGLGTPLPWDKKWIIESLSDST

SEQ ID NO: 20843 - protein, 85 aa, unidentified
  REGION 1..85: note = Description of Unknown:cds_NZ_WFIY01000004.1_cds_WP_155862653.1_445 target sequence
IYMAYYTIAHKIRKYNLHASQLTFEFWDYVMLGKGNVEEVSKVTNIPVEVLQDLRNEFTYWYPLDMRHSGSDLIPNHLSFFIFNH

SEQ ID NO: 20844 - protein, 85 aa, unidentified
  REGION 1..85: note = Description of Unknown:cds_NZ_WFIY01000004.1_cds_WP_155862653.1_445 target sequence
AAIFPENLWPKGIAVNGLVLYEGKKMSKSLRNIIPLRKAIRIYSPDVIRITLAATADMGSETNFTETVAKSVIDNLKKFYDMLTT

SEQ ID NO: 20845 - protein, 85 aa, unidentified
  REGION 1..85: note = Description of Unknown:cds_NZ_WFIY01000004.1_cds_WP_155862653.1_445 target sequence
IKGLESKEFGIPEKWMLSRLYSTIKEVTPMMDEMRFREALNEILFGLSSDINDYVEMAKAEGRNPNAEVLKEVLETWSKLISPFA

SEQ ID NO: 20846 - protein, 85 aa, unidentified
  REGION 1..85: note = Description of Unknown:cds_NZ_WFIY01000004.1_cds_WP_155862653.1_445 target sequence
PHIAEEVWNSLGHNTFVSLEEWPKFDESKVDIKTEVAHEYHKLIIDDVKAILNVYKGTPKLVKIYVADRSKMQLLIDALNVISSG

SEQ ID NO: 20847 - protein, 85 aa, unidentified
  REGION 1..85: note = Description of Unknown:cds_NZ_WFIY01000004.1_cds_WP_155862653.1_445 target sequence
GNMKTFMTSHKPKNSEEAKELQKIFQYAQGLGDEMKKIASYGFDEEELVKEGISYIKYKLGLEVKAERFTDEIKKKYNKDALPLR

SEQ ID NO: 20848 - protein, 84 aa, unidentified
  REGION 1..84: note = Description of Unknown:cds_NZ_WFIY01000004.1_cds_WP_155862653.1_445 target sequence
TSHKPKNSEEAKELQKIFQYAQGLGDEMKKIASYGFDEEELVKEGISYIKYKLGLEVKAERFTDEIKKKYNKDALPLRPAIIIE

SEQ ID NO: 20849 - protein, 85 aa, unidentified
  REGION 1..85: note = Description of Unknown:cds_NZ_WFIY01000004.1_cds_WP_155862653.1_445 target sequence
FFTTVAFPYPNSPFHLGHGRTYTTADIYARYMRMKGYNVLFPMGFHYTGTPIITMADDVAKGEKEVIDIFKNIYEIPPDDIPKLS

SEQ ID NO: 20850 - protein, 85 aa, unidentified
  REGION 1..85: note = Description of Unknown:cds_NZ_WFIY01000004.1_cds_WP_155862653.1_445 target sequence
DPLFMANYFKEDIKKAMKELGLSIDWRREFTTIDPEFSSFIVWQFNKLQQQGYIVKDTHPVGWCPVHHLPVGMHDTKGDVEPDIG

SEQ ID NO: 20851 - protein, 85 aa, unidentified
  REGION 1..85: note = Description of Unknown:cds_NZ_WFIY01000004.1_cds_WP_155862653.1_445 target sequence
EYVLIYFESEKGILPVATLRPETIFGVVAVWVNPKVTYAITEIDGKRMIVTERAAFKLSFQIDNVKVLDKISGSDLIKLTAINPI

SEQ ID NO: 20852 - protein, 85 aa, unidentified
  REGION 1..85: note = Description of Unknown:cds_NZ_WFIY01000004.1_cds_WP_155862653.1_445 target sequence
TGQSVPVLPGEFVDPDMATGVVMSVPAHAPFDYYYLKKVSPNTQIIPVIKVEGYGESPAAEVVEKEKPKNDADLKKLTELVYRAE

SEQ ID NO: 20853 - protein, 85 aa, unidentified
  REGION 1..85: note = Description of Unknown:cds_NZ_WFIY01000004.1_cds_WP_155862653.1_445 target sequence
YNKGKMRDDVLLRAKPEYRGELKDIVGLSVPEARKIITNFIINHGLGRKILEIMNRPVYCRCGNEVVVKILKDQWFLDYGNPEWK

SEQ ID NO: 20854 - protein, 85 aa, unidentified
  REGION 1..85: note = Description of Unknown:cds_NZ_WFIY01000004.1_cds_WP_155862653.1_445 target sequence
AKAKKLLSMMRIVPEEARKDFEYALDWLQKRACARTRGLGTPLPWDKKWIIESLSDSTIYMAYYTIAHKIRKYNLHASQLTFEFW

SEQ ID NO: 20855 - protein, 85 aa, unidentified
  REGION 1..85: note = Description of Unknown:cds_NZ_WFIY01000004.1_cds_WP_155862653.1_445 target sequence
DYVMLGKGNVEEVSKVTNIPVEVLQDLRNEFTYWYPLDMRHSGSDLIPNHLSFFIFNHAAIFPENLWPKGIAVNGLVLYEGKKMS

SEQ ID NO: 20856 - protein, 85 aa, unidentified
  REGION 1..85: note = Description of Unknown:cds_NZ_WFIY01000004.1_cds_WP_155862653.1_445 target sequence
KSLRNIIPLRKAIRIYSPDVIRITLAATADMGSETNFTETVAKSVIDNLKKFYDMLTTIKGLESKEFGIPEKWMLSRLYSTIKEV

SEQ ID NO: 20857 - protein, 85 aa, unidentified
  REGION 1..85: note = Description of Unknown:cds_NZ_WFIY01000004.1_cds_WP_155862653.1_445 target sequence
TPMMDEMRFREALNEILFGLSSDINDYVEMAKAEGRNPNAEVLKEVLETWSKLISPFAPHIAEEVWNSLGHNTFVSLEEWPKFDE

SEQ ID NO: 20858 - protein, 85 aa, unidentified
  REGION 1..85: note = Description of Unknown:cds_NZ_WFIY01000004.1_cds_WP_155862653.1_445 target sequence
SKVDIKTEVAHEYHKLIIDDVKAILNVYKGTPKLVKIYVADRSKMQLLIDALNVISSGGNMKTFMTSHKPKNSEEAKELQKIFQY

SEQ ID NO: 20859 - protein, 85 aa, unidentified
  REGION 1..85: note = Description of Unknown:hvTR_P03203 target sequence
KKAWLSRAQQADAGGASGSEDPPDYGDQGNVTQVGSEPISPEIGPFELSAASEDDPQSGPVEENLDAAAREEEEPHEQEHNGGDD

SEQ ID NO: 20860 - protein, 85 aa, unidentified
  REGION 1..85: note = Description of Unknown:hvTR_P03203 target sequence
PLDVHTRQPRFVDVNPTQAPVIQLVHAVYDSMLQSDLRPLGSLFLEQNLNIEEFIWMCMTVRHRCQAIRKKPLPIVKQRRWKLLS

SEQ ID NO: 20861 - protein, 85 aa, unidentified
  REGION 1..85: note = Description of Unknown:hvTR_P03203 target sequence
SCRSWRMGYRTHNLKVNSFESGGDNVHPVLVTATLGCDEGTRHATTYSAGIVQIPRISDQNQKIETAFLMARRARSLSAERYTLF

SEQ ID NO: 20862 - protein, 85 aa, unidentified
  REGION 1..85: note = Description of Unknown:hvTR_P03203 target sequence
FDLVSSGNTLYAIWIGLGTKNRVSFIEFVGWLCKKDHTHIREWFRQCTGRPKAAKPWLRAHPVAIPYDDPLTNEEIDLAYARGQA

SEQ ID NO: 20863 - protein, 85 aa, unidentified
  REGION 1..85: note = Description of Unknown:hvTR_P03203 target sequence
MNIEAPRLPDDPIIVEDDDESEEIEAESDEEEDKSGMESLKNIPQTLPYNPTVYGRPAVFDRKSDAKSTKKCRAIVTDFSVIKAI

SEQ ID NO: 20864 - protein, 85 aa, unidentified
  REGION 1..85: note = Description of Unknown:hvTR_P03203 target sequence
EEEHRKKKAARTEQPRATPESQAPTVVLQRPPTQQEPGPVGPLSVQARLEPWQPLPGPQVTAVLLHEESMQGVQVHGSMLDLLEK

SEQ ID NO: 20865 - protein, 85 aa, unidentified
  REGION 1..85: note = Description of Unknown:hvTR_P03203 target sequence
DDEVMEQRVMATLLPPVPQQPRAGRRGPCVFTGDLGIESDEPASTEPVHDQLLPAPGPDPLEIQPLTSPTTSQLSSSAPSCAQTP

SEQ ID NO: 20866 - protein, 85 aa, unidentified
  REGION 1..85: note = Description of Unknown:hvTR_P03203 target sequence
WPVVQPSQTPDDPTKQSRPPETAAPRQWPMPLRPIPMRPLRMQPIPFNHPVGPTPHQTPQVEITPYKPTWAQIGHIPYQPTPTGP

SEQ ID NO: 20867 - protein, 85 aa, unidentified
  REGION 1..85: note = Description of Unknown:hvTR_P03203 target sequence
ATMLLRQWAPATMQTPPRAPTPMSPPEVPPVPRQRPRGAPTPTPPPQVPPVPRQRPRGAPTPTPPPQVLPTPMQLALRAPAGQQG

SEQ ID NO: 20868 - protein, 85 aa, unidentified
  REGION 1..85: note = Description of Unknown:hvTR_P03203 target sequence
PTKQILRQLLTGGVKKGRPSLKLQAALERQAAAGWQPSPGSGTSDKIVQAPIFYPPVLQPIQVMGQGGSPTAMAASAVTQAPTEY

SEQ ID NO: 20869 - protein, 85 aa, unidentified
  REGION 1..85: note = Description of Unknown:hvTR_P03203 target sequence
TRERRGVGPMPPTDIPPSKRAKIEAYTEPEMPHGGASHSPVVILENVGQGQQQTLECGGTAKQERDMLGLGDIAVSSPSSSETSN

SEQ ID NO: 20870 - protein, 84 aa, unidentified
  REGION 1..84: note = Description of Unknown:hvTR_P03203 target sequence
RRGVGPMPPTDIPPSKRAKIEAYTEPEMPHGGASHSPVVILENVGQGQQQTLECGGTAKQERDMLGLGDIAVSSPSSSETSNDE

SEQ ID NO: 20871 - protein, 85 aa, unidentified
  REGION 1..85: note = Description of Unknown:hvTR_P03203 target sequence
QGNVTQVGSEPISPEIGPFELSAASEDDPQSGPVEENLDAAAREEEEPHEQEHNGGDDPLDVHTRQPRFVDVNPTQAPVIQLVHA

SEQ ID NO: 20872 - protein, 85 aa, unidentified
  REGION 1..85: note = Description of Unknown:hvTR_P03203 target sequence
VYDSMLQSDLRPLGSLFLEQNLNIEEFIWMCMTVRHRCQAIRKKPLPIVKQRRWKLLSSCRSWRMGYRTHNLKVNSFESGGDNVH

SEQ ID NO: 20873 - protein, 85 aa, unidentified
  REGION 1..85: note = Description of Unknown:hvTR_P03203 target sequence
PVLVTATLGCDEGTRHATTYSAGIVQIPRISDQNQKIETAFLMARRARSLSAERYTLFFDLVSSGNTLYAIWIGLGTKNRVSFIE

SEQ ID NO: 20874 - protein, 85 aa, unidentified
  REGION 1..85: note = Description of Unknown:hvTR_P03203 target sequence
FVGWLCKKDHTHIREWFRQCTGRPKAAKPWLRAHPVAIPYDDPLTNEEIDLAYARGQAMNIEAPRLPDDPIIVEDDDESEEIEAE

SEQ ID NO: 20875 - protein, 85 aa, unidentified
  REGION 1..85: note = Description of Unknown:hvTR_P03203 target sequence
SDEEEDKSGMESLKNIPQTLPYNPTVYGRPAVFDRKSDAKSTKKCRAIVTDFSVIKAIEEEHRKKKAARTEQPRATPESQAPTVV

SEQ ID NO: 20876 - protein, 85 aa, unidentified
  REGION 1..85: note = Description of Unknown:hvTR_P03203 target sequence
LQRPPTQQEPGPVGPLSVQARLEPWQPLPGPQVTAVLLHEESMQGVQVHGSMLDLLEKDDEVMEQRVMATLLPPVPQQPRAGRRG

SEQ ID NO: 20877 - protein, 85 aa, unidentified
  REGION 1..85: note = Description of Unknown:hvTR_P03203 target sequence
PCVFTGDLGIESDEPASTEPVHDQLLPAPGPDPLEIQPLTSPTTSQLSSSAPSCAQTPWPVVQPSQTPDDPTKQSRPPETAAPRQ

SEQ ID NO: 20878 - protein, 85 aa, unidentified
  REGION 1..85: note = Description of Unknown:hvTR_P03203 target sequence
WPMPLRPIPMRPLRMQPIPFNHPVGPTPHQTPQVEITPYKPTWAQIGHIPYQPTPTGPATMLLRQWAPATMQTPPRAPTPMSPPE

SEQ ID NO: 20879 - protein, 85 aa, unidentified
  REGION 1..85: note = Description of Unknown:hvTR_P03203 target sequence
VPPVPRQRPRGAPTPTPPPQVPPVPRQRPRGAPTPTPPPQVLPTPMQLALRAPAGQQGPTKQILRQLLTGGVKKGRPSLKLQAAL

SEQ ID NO: 20880 - protein, 85 aa, unidentified
  REGION 1..85: note = Description of Unknown:hvTR_P03203 target sequence
ERQAAAGWQPSPGSGTSDKIVQAPIFYPPVLQPIQVMGQGGSPTAMAASAVTQAPTEYTRERRGVGPMPPTDIPPSKRAKIEAYT

SEQ ID NO: 20881 - protein, 85 aa, unidentified
  REGION 1..85: note = Description of Unknown:cds_NZ_WFIY01000004.1_cds_WP_155863280.1_1236 target sequence
LNEIEIRLRLGFLLANSYRNIKITEINGKAIHVLSGNYIVFLDNNEAIQVLINNQPYFEVDSAHKEVPIPSGINELTLDSEYKGK

SEQ ID NO: 20882 - protein, 85 aa, unidentified
  REGION 1..85: note = Description of Unknown:cds_NZ_WFIY01000004.1_cds_WP_155863280.1_1236 target sequence
IAFVNKLYNAYKLWTYCVTVLEASKYIYRDKLLEILSNTLSLVPFTSVSRSQLLVASAVWKDFPRHFLYFSNDMKYEEGGFNDSK

SEQ ID NO: 20883 - protein, 85 aa, unidentified
  REGION 1..85: note = Description of Unknown:cds_NZ_WFIY01000004.1_cds_WP_155863280.1_1236 target sequence
YLYALEYLRNELSNLGLGKFGKIYGIAHAHIDAAWLWTFDETKRKILRSFSTVLTLMSKYDFQFIQSSALYYSWIKDNFPELFNY

SEQ ID NO: 20884 - protein, 85 aa, unidentified
  REGION 1..85: note = Description of Unknown:cds_NZ_WFIY01000004.1_cds_WP_155863280.1_1236 target sequence
IKRKVAEGKWILGAGWVEFDTNLPSGESLVRQLLYSQRFFFENFGRFAEVLWLPDSFGFSAQLPQIMRLSGIKYFATHKVFWNDT

SEQ ID NO: 20885 - protein, 85 aa, unidentified
  REGION 1..85: note = Description of Unknown:cds_NZ_WFIY01000004.1_cds_WP_155863280.1_1236 target sequence
NKFPYSVFNWVGIDGSSVTAIAFGNGKGGYNSDFSIDSIYEQWNNWKDKDQPMLYSYGYGDGGGGPTEEMLIRAEAINYLPILPK

SEQ ID NO: 20886 - protein, 85 aa, unidentified
  REGION 1..85: note = Description of Unknown:cds_NZ_WFIY01000004.1_cds_WP_155863280.1_1236 target sequence
VNLKEIPKYEPKEIWKGEIYLEAHRGVYTSHSKMKYLHRKAEIYLREAELWSTIAGEKVDLKPLWLNLLKSEFHDILPGSAIKEV

SEQ ID NO: 20887 - protein, 85 aa, unidentified
  REGION 1..85: note = Description of Unknown:cds_NZ_WFIY01000004.1_cds_WP_155863280.1_1236 target sequence
YNEVYKELENIIQKCEEIILNSLRKISGGGDKIIAFNSLSWDREDYVISPFELPNSQKTDEGYLARIKIPSIGYSECNPERVDDK

SEQ ID NO: 20888 - protein, 85 aa, unidentified
  REGION 1..85: note = Description of Unknown:cds_NZ_WFIY01000004.1_cds_WP_155863280.1_1236 target sequence
VRINDLTLENSILKVSLNNDGDIISIYDKEVERELLSKPSEITAYENIPVWDAWDIEPSFKNTSFKIKANSHEIVEDGPLRACIK

SEQ ID NO: 20889 - protein, 85 aa, unidentified
  REGION 1..85: note = Description of Unknown:cds_NZ_WFIY01000004.1_cds_WP_155863280.1_1236 target sequence
FNYKFRNTDFSKRVCLYAKDRRIELRYNMKAYDRELLIKEWFYFNLNTDNATFEIPYGVINRSTLRNTSLDKAKFEVPFNKWLDL

SEQ ID NO: 20890 - protein, 85 aa, unidentified
  REGION 1..85: note = Description of Unknown:cds_NZ_WFIY01000004.1_cds_WP_155863280.1_1236 target sequence
SEDNYGVTIISDTKQGSTVEFSSVGISLIKTPLYPDYESDLEENSFKIYIYPHLGDWKKAQTFKRAYELTYPIWVTKGKGGSMSF

SEQ ID NO: 20891 - protein, 84 aa, unidentified
  REGION 1..84: note = Description of Unknown:cds_NZ_WFIY01000004.1_cds_WP_155863280.1_1236 target sequence
MSFLASDLIVEAIKPAEDRDGIIIRLYNIYNEKGKAKIRLWYEPKYVISTDLLESDKIKRKIKISRNEIEIEYNNYEIITLKTS

SEQ ID NO: 20892 - protein, 85 aa, unidentified
  REGION 1..85: note = Description of Unknown:cds_NZ_WFIY01000004.1_cds_WP_155863280.1_1236 target sequence
GKAIHVLSGNYIVFLDNNEAIQVLINNQPYFEVDSAHKEVPIPSGINELTLDSEYKGKIAFVNKLYNAYKLWTYCVTVLEASKYI

SEQ ID NO: 20893 - protein, 85 aa, unidentified
  REGION 1..85: note = Description of Unknown:cds_NZ_WFIY01000004.1_cds_WP_155863280.1_1236 target sequence
YRDKLLEILSNTLSLVPFTSVSRSQLLVASAVWKDFPRHFLYFSNDMKYEEGGFNDSKYLYALEYLRNELSNLGLGKFGKIYGIA

SEQ ID NO: 20894 - protein, 85 aa, unidentified
  REGION 1..85: note = Description of Unknown:cds_NZ_WFIY01000004.1_cds_WP_155863280.1_1236 target sequence
HAHIDAAWLWTFDETKRKILRSFSTVLTLMSKYDFQFIQSSALYYSWIKDNFPELFNYIKRKVAEGKWILGAGWVEFDTNLPSGE

SEQ ID NO: 20895 - protein, 85 aa, unidentified
  REGION 1..85: note = Description of Unknown:cds_NZ_WFIY01000004.1_cds_WP_155863280.1_1236 target sequence
SLVRQLLYSQRFFFENFGRFAEVLWLPDSFGFSAQLPQIMRLSGIKYFATHKVFWNDTNKFPYSVFNWVGIDGSSVTAIAFGNGK

SEQ ID NO: 20896 - protein, 85 aa, unidentified
  REGION 1..85: note = Description of Unknown:cds_NZ_WFIY01000004.1_cds_WP_155863280.1_1236 target sequence
GGYNSDFSIDSIYEQWNNWKDKDQPMLYSYGYGDGGGGPTEEMLIRAEAINYLPILPKVNLKEIPKYEPKEIWKGEIYLEAHRGV

SEQ ID NO: 20897 - protein, 85 aa, unidentified
  REGION 1..85: note = Description of Unknown:cds_NZ_WFIY01000004.1_cds_WP_155863280.1_1236 target sequence
YTSHSKMKYLHRKAEIYLREAELWSTIAGEKVDLKPLWLNLLKSEFHDILPGSAIKEVYNEVYKELENIIQKCEEIILNSLRKIS

SEQ ID NO: 20898 - protein, 85 aa, unidentified
  REGION 1..85: note = Description of Unknown:cds_NZ_WFIY01000004.1_cds_WP_155863280.1_1236 target sequence
GGGDKIIAFNSLSWDREDYVISPFELPNSQKTDEGYLARIKIPSIGYSECNPERVDDKVRINDLTLENSILKVSLNNDGDIISIY

SEQ ID NO: 20899 - protein, 85 aa, unidentified
  REGION 1..85: note = Description of Unknown:cds_NZ_WFIY01000004.1_cds_WP_155863280.1_1236 target sequence
DKEVERELLSKPSEITAYENIPVWDAWDIEPSFKNTSFKIKANSHEIVEDGPLRACIKFNYKFRNTDFSKRVCLYAKDRRIELRY

SEQ ID NO: 20900 - protein, 85 aa, unidentified
  REGION 1..85: note = Description of Unknown:cds_NZ_WFIY01000004.1_cds_WP_155863280.1_1236 target sequence
NMKAYDRELLIKEWFYFNLNTDNATFEIPYGVINRSTLRNTSLDKAKFEVPFNKWLDLSEDNYGVTIISDTKQGSTVEFSSVGIS

SEQ ID NO: 20901 - protein, 85 aa, unidentified
  REGION 1..85: note = Description of Unknown:cds_NZ_WFIY01000004.1_cds_WP_155863280.1_1236 target sequence
LIKTPLYPDYESDLEENSFKIYIYPHLGDWKKAQTFKRAYELTYPIWVTKGKGGSMSFLASDLIVEAIKPAEDRDGIIIRLYNIY

SEQ ID NO: 20902 - protein, 85 aa, unidentified
  REGION 1..85: note = Description of Unknown:cds_NZ_WFIY01000004.1_cds_WP_155863530.1_1472 target sequence
DFNAIAEKWQKVWEERRIFEAKVDEKKQKYFITVPFPYTNSPMHIGHGRTYVTADIYARYMRMKGYNVLFPFAFQFTGTPILSVA

SEQ ID NO: 20903 - protein, 85 aa, unidentified
  REGION 1..85: note = Description of Unknown:cds_NZ_WFIY01000004.1_cds_WP_155863530.1_1472 target sequence
DAIKRGDQDIIDFFKNVYEIDEEKIKDLSDPYKLAEYFRQEMEKTAKAVGLSVDWRRSFTTVDDRFANFIQWQFKKLKDKGKLVK

SEQ ID NO: 20904 - protein, 85 aa, unidentified
  REGION 1..85: note = Description of Unknown:cds_NZ_WFIY01000004.1_cds_WP_155863530.1_1472 target sequence
ETDAVGYCPRDQFPVGMHDTKGDVEPEIEKLDVIFFEGDYFYPVATSRPETVFAGVGVAISPLTTYVIAEYSGKKILLSKEAFEK

SEQ ID NO: 20905 - protein, 85 aa, unidentified
  REGION 1..85: note = Description of Unknown:cds_NZ_WFIY01000004.1_cds_WP_155863530.1_1472 target sequence
LSYQKELKKVGEVKPEELKVKEAVNPVTRKKVKVVLSKLVDPSIGTGLIMLTPAHDPIHKIIAEDNGIEDYYSVISSPDLPEIPT

SEQ ID NO: 20906 - protein, 85 aa, unidentified
  REGION 1..85: note = Description of Unknown:cds_NZ_WFIY01000004.1_cds_WP_155863530.1_1472 target sequence
EEIDIRDMAELKDFADQIYRIEYYKGVMKDVSTYVPDYMKQYVKEMISGKPVKDARISTVELLNSIGRHDTIYEIMNGPIYCRCG

SEQ ID NO: 20907 - protein, 85 aa, unidentified
  REGION 1..85: note = Description of Unknown:cds_NZ_WFIY01000004.1_cds_WP_155863530.1_1472 target sequence
AQIVVKVIKDQWFIAYDDPEWKMAVLNSLDNINFVPSEVRKDIEKAIFNLRKRAVGRSRGLGVKLPWDESEIIDSLSDSTIYTAF

SEQ ID NO: 20908 - protein, 85 aa, unidentified
  REGION 1..85: note = Description of Unknown:cds_NZ_WFIY01000004.1_cds_WP_155863530.1_1472 target sequence
YTISHLLKKANDKLFDYVFLGLGNPEEISKELGISKEEVEELRKEYNYWYPVDSRHSGRDLIQNHIPYYIYNHLEILGKLPRQIV

SEQ ID NO: 20909 - protein, 85 aa, unidentified
  REGION 1..85: note = Description of Unknown:cds_NZ_WFIY01000004.1_cds_WP_155863530.1_1472 target sequence
INGFVRVGGKKMSKSFRNVYPLSKAIKEYGVDPVRIALATPKLSEDVEFNSSVVTSIADQLKRIYSLIVELLETKGGNNFGTAEK

SEQ ID NO: 20910 - protein, 85 aa, unidentified
  REGION 1..85: note = Description of Unknown:cds_NZ_WFIY01000004.1_cds_WP_155863530.1_1472 target sequence
WLSSIISEKIKTVDKKMRNLDFFEAYNIILYGIYNDFKDYLDFTTGINEDLIKKSISAWLRMIYPAAPHIAEELWSKAFLGLVAE

SEQ ID NO: 20911 - protein, 85 aa, unidentified
  REGION 1..85: note = Description of Unknown:cds_NZ_WFIY01000004.1_cds_WP_155863530.1_1472 target sequence
QEYPKPEEFTIYPDAVVEKGYIDYVISEIKELERIVGEGEKAVIYVNNDLSLAKDVAKAIEEGQSLFEFARGNEKLEKVYSSMKA

SEQ ID NO: 20912 - protein, 84 aa, unidentified
  REGION 1..84: note = Description of Unknown:cds_NZ_WFIY01000004.1_cds_WP_155863530.1_1472 target sequence
RGNEKLEKVYSSMKAYDGIFRKSLLTLQEFDEIRTLANYANYIMRKTNLGQLSVYDSNDPNVPDFKGKKSQALPLSPSIVIFSS

SEQ ID NO: 20913 - protein, 85 aa, unidentified
  REGION 1..85: note = Description of Unknown:cds_NZ_WFIY01000004.1_cds_WP_155863530.1_1472 target sequence
QKYFITVPFPYTNSPMHIGHGRTYVTADIYARYMRMKGYNVLFPFAFQFTGTPILSVADAIKRGDQDIIDFFKNVYEIDEEKIKD

SEQ ID NO: 20914 - protein, 85 aa, unidentified
  REGION 1..85: note = Description of Unknown:cds_NZ_WFIY01000004.1_cds_WP_155863530.1_1472 target sequence
LSDPYKLAEYFRQEMEKTAKAVGLSVDWRRSFTTVDDRFANFIQWQFKKLKDKGKLVKETDAVGYCPRDQFPVGMHDTKGDVEPE

SEQ ID NO: 20915 - protein, 85 aa, unidentified
  REGION 1..85: note = Description of Unknown:cds_NZ_WFIY01000004.1_cds_WP_155863530.1_1472 target sequence
IEKLDVIFFEGDYFYPVATSRPETVFAGVGVAISPLTTYVIAEYSGKKILLSKEAFEKLSYQKELKKVGEVKPEELKVKEAVNPV

SEQ ID NO: 20916 - protein, 85 aa, unidentified
  REGION 1..85: note = Description of Unknown:cds_NZ_WFIY01000004.1_cds_WP_155863530.1_1472 target sequence
TRKKVKVVLSKLVDPSIGTGLIMLTPAHDPIHKIIAEDNGIEDYYSVISSPDLPEIPTEEIDIRDMAELKDFADQIYRIEYYKGV

SEQ ID NO: 20917 - protein, 85 aa, unidentified
  REGION 1..85: note = Description of Unknown:cds_NZ_WFIY01000004.1_cds_WP_155863530.1_1472 target sequence
MKDVSTYVPDYMKQYVKEMISGKPVKDARISTVELLNSIGRHDTIYEIMNGPIYCRCGAQIVVKVIKDQWFIAYDDPEWKMAVLN

SEQ ID NO: 20918 - protein, 85 aa, unidentified
  REGION 1..85: note = Description of Unknown:cds_NZ_WFIY01000004.1_cds_WP_155863530.1_1472 target sequence
SLDNINFVPSEVRKDIEKAIFNLRKRAVGRSRGLGVKLPWDESEIIDSLSDSTIYTAFYTISHLLKKANDKLFDYVFLGLGNPEE

SEQ ID NO: 20919 - protein, 85 aa, unidentified
  REGION 1..85: note = Description of Unknown:cds_NZ_WFIY01000004.1_cds_WP_155863530.1_1472 target sequence
ISKELGISKEEVEELRKEYNYWYPVDSRHSGRDLIQNHIPYYIYNHLEILGKLPRQIVINGFVRVGGKKMSKSFRNVYPLSKAIK

SEQ ID NO: 20920 - protein, 85 aa, unidentified
  REGION 1..85: note = Description of Unknown:cds_NZ_WFIY01000004.1_cds_WP_155863530.1_1472 target sequence
EYGVDPVRIALATPKLSEDVEFNSSVVTSIADQLKRIYSLIVELLETKGGNNFGTAEKWLSSIISEKIKTVDKKMRNLDFFEAYN

SEQ ID NO: 20921 - protein, 85 aa, unidentified
  REGION 1..85: note = Description of Unknown:cds_NZ_WFIY01000004.1_cds_WP_155863530.1_1472 target sequence
IILYGIYNDFKDYLDFTTGINEDLIKKSISAWLRMIYPAAPHIAEELWSKAFLGLVAEQEYPKPEEFTIYPDAVVEKGYIDYVIS

SEQ ID NO: 20922 - protein, 85 aa, unidentified
  REGION 1..85: note = Description of Unknown:cds_NZ_WFIY01000004.1_cds_WP_155863530.1_1472 target sequence
EIKELERIVGEGEKAVIYVNNDLSLAKDVAKAIEEGQSLFEFARGNEKLEKVYSSMKAYDGIFRKSLLTLQEFDEIRTLANYANY

SEQ ID NO: 20923 - protein, 85 aa, unidentified
  REGION 1..85: note = Description of Unknown:cds_NC_030656.1_cds_YP_009268819.1_104 target sequence
TALNNIITLDQLEGVEYMYKIFSTVLPSLCLDFTIESKYKTTYVHPFDALFSADLEALVDPLEYDLSVQKLGINYLLDKTSSQSL

SEQ ID NO: 20924 - protein, 85 aa, unidentified
  REGION 1..85: note = Description of Unknown:cds_NC_030656.1_cds_YP_009268819.1_104 target sequence
FNAVVKPGTIVKNCQEPSISDRSNPIQDTHSYNELPLFTKDLVKTRVTGCEGHARIIGGYVEALASPSILNPIPMPNLSFSNTYL

SEQ ID NO: 20925 - protein, 85 aa, unidentified
  REGION 1..85: note = Description of Unknown:cds_NC_030656.1_cds_YP_009268819.1_104 target sequence
LNLLYSDVIGTDTGFRARLVNGIMMAKDLINLLNVRALLTTPSREIFDKDYNVESAAASHNIVIAQNPTIDTDLTTMPYKHLVMY

SEQ ID NO: 20926 - protein, 85 aa, unidentified
  REGION 1..85: note = Description of Unknown:cds_NC_030656.1_cds_YP_009268819.1_104 target sequence
FQHFNSRYDLRDLTYNGDEVLLSDYELLNFIASLHFQRQFPTFKQMAPGVPVKSYFEMKVRNASTRIITSANITIPGVEFVDISS

SEQ ID NO: 20927 - protein, 85 aa, unidentified
  REGION 1..85: note = Description of Unknown:cds_NC_030656.1_cds_YP_009268819.1_104 target sequence
LPVYYITLFSMISRSEKTAVHKLMATDTSLFWDGIPYSEYKSMPLTKTMFLNSTCYVFGLYDHNGITYCSRLANVISSGKTPSRV

SEQ ID NO: 20928 - protein, 85 aa, unidentified
  REGION 1..85: note = Description of Unknown:cds_NC_030656.1_cds_YP_009268819.1_104 target sequence
CFLVRSIAGKTVPQLLAETLNSINSITHKDFPRKSSHVVNHIGLSEVGFMKFFQYLRLMANKTPETALKEVLMMYAGLKLEDVGP

SEQ ID NO: 20929 - protein, 85 aa, unidentified
  REGION 1..85: note = Description of Unknown:cds_NC_030656.1_cds_YP_009268819.1_104 target sequence
PHVIKKDCYKEFLALLFSAMGYKVSFKQNMVSSHNHVAVTVSPKVSKSSIQSVLEKNSCSKDEASKIMSSAHDLLQFMVSIGDIR

SEQ ID NO: 20930 - protein, 85 aa, unidentified
  REGION 1..85: note = Description of Unknown:cds_NC_030656.1_cds_YP_009268819.1_104 target sequence
DIFSYNINRLSYQSCPSRKSCPKFFSIFSAGNANTTTEAAPSVDVQNEVTTIDMFEPLSILERINVRGIMAATTTDEIIDTEFFM

SEQ ID NO: 20931 - protein, 85 aa, unidentified
  REGION 1..85: note = Description of Unknown:cds_NC_030656.1_cds_YP_009268819.1_104 target sequence
PENVAFKNNLANLINDGQLTGDAVVRTMPISMVDRYIQVGGGNGRAVSLSEIIDSVNENEDEGTPSNEIVRIINAVLKDNYMRDN

SEQ ID NO: 20932 - protein, 85 aa, unidentified
  REGION 1..85: note = Description of Unknown:cds_NC_030656.1_cds_YP_009268819.1_104 target sequence
SAAATQALMSVTALATRQFDVLRQNTCNIAAVFKQLAKSIYNTESLFKTPISDDVKEGILQKFKLYTELSKELYLELIALETIRG

SEQ ID NO: 20933 - protein, 84 aa, unidentified
  REGION 1..84: note = Description of Unknown:cds_NC_030656.1_cds_YP_009268819.1_104 target sequence
SKELYLELIALETIRGIMYLLRRNGKSITDSEISADDLRKAYELVKPKVAKLANYYSDISKMYYMQMKKNLNMANPESACFDTE

SEQ ID NO: 20934 - protein, 85 aa, unidentified
  REGION 1..85: note = Description of Unknown:cds_NC_030656.1_cds_YP_009268819.1_104 target sequence
SLCLDFTIESKYKTTYVHPFDALFSADLEALVDPLEYDLSVQKLGINYLLDKTSSQSLFNAVVKPGTIVKNCQEPSISDRSNPIQ

SEQ ID NO: 20935 - protein, 85 aa, unidentified
  REGION 1..85: note = Description of Unknown:cds_NC_030656.1_cds_YP_009268819.1_104 target sequence
DTHSYNELPLFTKDLVKTRVTGCEGHARIIGGYVEALASPSILNPIPMPNLSFSNTYLLNLLYSDVIGTDTGFRARLVNGIMMAK

SEQ ID NO: 20936 - protein, 85 aa, unidentified
  REGION 1..85: note = Description of Unknown:cds_NC_030656.1_cds_YP_009268819.1_104 target sequence
DLINLLNVRALLTTPSREIFDKDYNVESAAASHNIVIAQNPTIDTDLTTMPYKHLVMYFQHFNSRYDLRDLTYNGDEVLLSDYEL

SEQ ID NO: 20937 - protein, 85 aa, unidentified
  REGION 1..85: note = Description of Unknown:cds_NC_030656.1_cds_YP_009268819.1_104 target sequence
LNFIASLHFQRQFPTFKQMAPGVPVKSYFEMKVRNASTRIITSANITIPGVEFVDISSLPVYYITLFSMISRSEKTAVHKLMATD

SEQ ID NO: 20938 - protein, 85 aa, unidentified
  REGION 1..85: note = Description of Unknown:cds_NC_030656.1_cds_YP_009268819.1_104 target sequence
TSLFWDGIPYSEYKSMPLTKTMFLNSTCYVFGLYDHNGITYCSRLANVISSGKTPSRVCFLVRSIAGKTVPQLLAETLNSINSIT

SEQ ID NO: 20939 - protein, 85 aa, unidentified
  REGION 1..85: note = Description of Unknown:cds_NC_030656.1_cds_YP_009268819.1_104 target sequence
HKDFPRKSSHVVNHIGLSEVGFMKFFQYLRLMANKTPETALKEVLMMYAGLKLEDVGPPHVIKKDCYKEFLALLFSAMGYKVSFK

SEQ ID NO: 20940 - protein, 85 aa, unidentified
  REGION 1..85: note = Description of Unknown:cds_NC_030656.1_cds_YP_009268819.1_104 target sequence
QNMVSSHNHVAVTVSPKVSKSSIQSVLEKNSCSKDEASKIMSSAHDLLQFMVSIGDIRDIFSYNINRLSYQSCPSRKSCPKFFSI

SEQ ID NO: 20941 - protein, 85 aa, unidentified
  REGION 1..85: note = Description of Unknown:cds_NC_030656.1_cds_YP_009268819.1_104 target sequence
FSAGNANTTTEAAPSVDVQNEVTTIDMFEPLSILERINVRGIMAATTTDEIIDTEFFMPENVAFKNNLANLINDGQLTGDAVVRT

SEQ ID NO: 20942 - protein, 85 aa, unidentified
  REGION 1..85: note = Description of Unknown:cds_NC_030656.1_cds_YP_009268819.1_104 target sequence
MPISMVDRYIQVGGGNGRAVSLSEIIDSVNENEDEGTPSNEIVRIINAVLKDNYMRDNSAAATQALMSVTALATRQFDVLRQNTC

SEQ ID NO: 20943 - protein, 85 aa, unidentified
  REGION 1..85: note = Description of Unknown:cds_NC_030656.1_cds_YP_009268819.1_104 target sequence
NIAAVFKQLAKSIYNTESLFKTPISDDVKEGILQKFKLYTELSKELYLELIALETIRGIMYLLRRNGKSITDSEISADDLRKAYE

SEQ ID NO: 20944 - protein, 85 aa, unidentified
  REGION 1..85: note = Description of Unknown:cds_NZ_WFIY01000004.1_cds_WP_155864201.1_2165 target sequence
SIRLLLVTQRKLIESENFTEIIPQIDKEAAREKGPGRPPYWEMIFWWTRKPLISARAFTAAALLPEDVPMTEFKRMVRLTDNTRP

SEQ ID NO: 20945 - protein, 85 aa, unidentified
  REGION 1..85: note = Description of Unknown:cds_NZ_WFIY01000004.1_cds_WP_155864201.1_2165 target sequence
PHNLLPITNGRFKEFTVLDPFAGFGSIPLEAKRLGVGKVIASDLLPTAYIFLKAVLEYPKYGKKLVEDVKKYGEEMLKSIEEDVK

SEQ ID NO: 20946 - protein, 85 aa, unidentified
  REGION 1..85: note = Description of Unknown:cds_NZ_WFIY01000004.1_cds_WP_155864201.1_2165 target sequence
ELYGDTTGYVGTWEVKCPHCGNYTPLVNQWWLLKLDKGGGKGYERLVYMKPEKQGNSIRIRVVDLNKELNKKTIKAEVNESDGTK

SEQ ID NO: 20947 - protein, 85 aa, unidentified
  REGION 1..85: note = Description of Unknown:cds_NZ_WFIY01000004.1_cds_WP_155864201.1_2165 target sequence
YEVPEGNIEAKNSYARCLICNNVFPGKGDKWYVKEALREWNENYERFLNGEITLGELRSSKARPKLLVKFKGRSKDLDFEEITDD

SEQ ID NO: 20948 - protein, 85 aa, unidentified
  REGION 1..85: note = Description of Unknown:cds_NZ_WFIY01000004.1_cds_WP_155864201.1_2165 target sequence
DEKMFWDSFEKLKEVDINKIPIENLAPYGTIRISTWGTDKFFKMFNARQLIIFSKVVDYLNKLYDENDEYKKAVLTYLAIAFLNH

SEQ ID NO: 20949 - protein, 85 aa, unidentified
  REGION 1..85: note = Description of Unknown:cds_NZ_WFIY01000004.1_cds_WP_155864201.1_2165 target sequence
IRHNCFFTSIDPSRKFIAHTLAFRRLGFTWNWVEINPLADVIGSLRRSLDHVIEGLEYLIQTNSDSKIEVLNVDINELNLPEKVD

SEQ ID NO: 20950 - protein, 85 aa, unidentified
  REGION 1..85: note = Description of Unknown:cds_NZ_WFIY01000004.1_cds_WP_155864201.1_2165 target sequence
VIITDPPFADDVPYPEVSDLYYVWLKRVIPMPYRTQWEELIPKDIGVEEGRAKVFGNNTGTYDDFREKLAKAFGKLSNFLKDDGL

SEQ ID NO: 20951 - protein, 85 aa, unidentified
  REGION 1..85: note = Description of Unknown:cds_NZ_WFIY01000004.1_cds_WP_155864201.1_2165 target sequence
LVTFYNHTSTEAWVSLLYAGWYYSKFKITAVHAVTTEDETRITAQNTTISLDKSMVIVWRKKAEGQKLLQEVRKEAISTVSDYVS

SEQ ID NO: 20952 - protein, 85 aa, unidentified
  REGION 1..85: note = Description of Unknown:cds_NZ_WFIY01000004.1_cds_WP_155864201.1_2165 target sequence
TMVQKGKLKLSTDTYIEVLGKVLSVFTKYEKLAGLKGEREKAVEELITNHVYPATVQSIIEGLSKGVGVTISDPYAAYYILVKLL

SEQ ID NO: 20953 - protein, 85 aa, unidentified
  REGION 1..85: note = Description of Unknown:cds_NZ_WFIY01000004.1_cds_WP_155864201.1_2165 target sequence
IPRPEKGVRKIDKTSLTFFSLTGNLDFKDLQDNGIVKADKDSISLAEPNQAAKETLEVISELEKLLDKKALLGDYNFSNPVQVFH

SEQ ID NO: 20954 - protein, 84 aa, unidentified
  REGION 1..84: note = Description of Unknown:cds_NZ_WFIY01000004.1_cds_WP_155864201.1_2165 target sequence
KALLGDYNFSNPVQVFHYLEYIALKSKDKLKEEIEKLREKTRFVDEALAIAKIFAKVLDEKDVEKEPSKRISGEEKTGILRWTK

SEQ ID NO: 20955 - protein, 85 aa, unidentified
  REGION 1..85: note = Description of Unknown:cds_NZ_WFIY01000004.1_cds_WP_155864201.1_2165 target sequence
EAAREKGPGRPPYWEMIFWWTRKPLISARAFTAAALLPEDVPMTEFKRMVRLTDNTRPPHNLLPITNGRFKEFTVLDPFAGFGSI

SEQ ID NO: 20956 - protein, 85 aa, unidentified
  REGION 1..85: note = Description of Unknown:cds_NZ_WFIY01000004.1_cds_WP_155864201.1_2165 target sequence
PLEAKRLGVGKVIASDLLPTAYIFLKAVLEYPKYGKKLVEDVKKYGEEMLKSIEEDVKELYGDTTGYVGTWEVKCPHCGNYTPLV

SEQ ID NO: 20957 - protein, 85 aa, unidentified
  REGION 1..85: note = Description of Unknown:cds_NZ_WFIY01000004.1_cds_WP_155864201.1_2165 target sequence
NQWWLLKLDKGGGKGYERLVYMKPEKQGNSIRIRVVDLNKELNKKTIKAEVNESDGTKYEVPEGNIEAKNSYARCLICNNVFPGK

SEQ ID NO: 20958 - protein, 85 aa, unidentified
  REGION 1..85: note = Description of Unknown:cds_NZ_WFIY01000004.1_cds_WP_155864201.1_2165 target sequence
GDKWYVKEALREWNENYERFLNGEITLGELRSSKARPKLLVKFKGRSKDLDFEEITDDDEKMFWDSFEKLKEVDINKIPIENLAP

SEQ ID NO: 20959 - protein, 85 aa, unidentified
  REGION 1..85: note = Description of Unknown:cds_NZ_WFIY01000004.1_cds_WP_155864201.1_2165 target sequence
YGTIRISTWGTDKFFKMFNARQLIIFSKVVDYLNKLYDENDEYKKAVLTYLAIAFLNHIRHNCFFTSIDPSRKFIAHTLAFRRLG

SEQ ID NO: 20960 - protein, 85 aa, unidentified
  REGION 1..85: note = Description of Unknown:cds_NZ_WFIY01000004.1_cds_WP_155864201.1_2165 target sequence
FTWNWVEINPLADVIGSLRRSLDHVIEGLEYLIQTNSDSKIEVLNVDINELNLPEKVDVIITDPPFADDVPYPEVSDLYYVWLKR

SEQ ID NO: 20961 - protein, 85 aa, unidentified
  REGION 1..85: note = Description of Unknown:cds_NZ_WFIY01000004.1_cds_WP_155864201.1_2165 target sequence
VIPMPYRTQWEELIPKDIGVEEGRAKVFGNNTGTYDDFREKLAKAFGKLSNFLKDDGLLVTFYNHTSTEAWVSLLYAGWYYSKFK

SEQ ID NO: 20962 - protein, 85 aa, unidentified
  REGION 1..85: note = Description of Unknown:cds_NZ_WFIY01000004.1_cds_WP_155864201.1_2165 target sequence
ITAVHAVTTEDETRITAQNTTISLDKSMVIVWRKKAEGQKLLQEVRKEAISTVSDYVSTMVQKGKLKLSTDTYIEVLGKVLSVFT

SEQ ID NO: 20963 - protein, 85 aa, unidentified
  REGION 1..85: note = Description of Unknown:cds_NZ_WFIY01000004.1_cds_WP_155864201.1_2165 target sequence
KYEKLAGLKGEREKAVEELITNHVYPATVQSIIEGLSKGVGVTISDPYAAYYILVKLLIPRPEKGVRKIDKTSLTFFSLTGNLDF

SEQ ID NO: 20964 - protein, 85 aa, unidentified
  REGION 1..85: note = Description of Unknown:cds_NZ_WFIY01000004.1_cds_WP_155864201.1_2165 target sequence
KDLQDNGIVKADKDSISLAEPNQAAKETLEVISELEKLLDKKALLGDYNFSNPVQVFHYLEYIALKSKDKLKEEIEKLREKTRFV

SEQ ID NO: 20965 - protein, 85 aa, unidentified
  REGION 1..85: note = Description of Unknown:cds_NZ_WFIY01000004.1_cds_WP_155862438.1_185 target sequence
RKLDDRLLELMKERNWKNMTEIQQKSLEPILSGKNTLIIAPTGYGKTEAALIPILDMMLRTNVKPVSLIYITPLKALINDLTLRI

SEQ ID NO: 20966 - protein, 85 aa, unidentified
  REGION 1..85: note = Description of Unknown:cds_NZ_WFIY01000004.1_cds_WP_155862438.1_185 target sequence
EWWASRLGFYVNRKHGEVPQKEKNLRLKITPHILVTTPEGLEIDLDWATRFREKYKNVKWVIVDEIHELIGSKRGVQLSVLLERL

SEQ ID NO: 20967 - protein, 85 aa, unidentified
  REGION 1..85: note = Description of Unknown:cds_NZ_WFIY01000004.1_cds_WP_155862438.1_185 target sequence
KDYIGYDFQRIGLSATINDEDLVASFLFGSSSRQSEIVKVNDKKEFELSIVKLNSAGDIWKNVAKHIISSVEKPSLIFTNSRFLT

SEQ ID NO: 20968 - protein, 85 aa, unidentified
  REGION 1..85: note = Description of Unknown:cds_NZ_WFIY01000004.1_cds_WP_155862438.1_185 target sequence
ERLHEELEEYDKDFYVHHSSISRESKSNVEEYLRTGKAKGVICTKTLELGIDIGDIKKIIMFRPPPSVASFLQRLGRSGHKIYGK

SEQ ID NO: 20969 - protein, 85 aa, unidentified
  REGION 1..85: note = Description of Unknown:cds_NZ_WFIY01000004.1_cds_WP_155862438.1_185 target sequence
PRGEIICIYDHDLLEAYAISELAKLGKVERQNICKPLDVAAREILGMILQYDEVEKEKAYKILTSSYVFRNLSEKTFNELIEYLA

SEQ ID NO: 20970 - protein, 85 aa, unidentified
  REGION 1..85: note = Description of Unknown:cds_NZ_WFIY01000004.1_cds_WP_155862438.1_185 target sequence
KNNLITIKGDKLSIGKFFFKLWNFNRNNGYSWSRGFSEFFSMINSTDTFTLKWEDKNIGEIDAIYVYKHIRSGDIIRIGGKLWKI

SEQ ID NO: 20971 - protein, 85 aa, unidentified
  REGION 1..85: note = Description of Unknown:cds_NZ_WFIY01000004.1_cds_WP_155862438.1_185 target sequence
VRINTSRMVVDVLPADKGDGEIPVWRGDGISKSYLLPKEIYVLFKEKRKEISDIIGKYVSRNLPLPSPNVIIEEKRDKEIVYSTL

SEQ ID NO: 20972 - protein, 85 aa, unidentified
  REGION 1..85: note = Description of Unknown:cds_NZ_WFIY01000004.1_cds_WP_155862438.1_185 target sequence
INEKIASTLAHILLYLATSKDSLNNYARYSIYGFSINYTEKDLLEELLKYNEKELKRIIIRSILRSPLFISTLKEIQISYGKLGK

SEQ ID NO: 20973 - protein, 85 aa, unidentified
  REGION 1..85: note = Description of Unknown:cds_NZ_WFIY01000004.1_cds_WP_155862438.1_185 target sequence
IDAKEDKLIIKDALRQTISKYFSIKNTIKFINKIKRGKIKIIKYDGSTPLGDAVLLQAPIKPWITGISTIIYDTLKGGAYTLAEL

SEQ ID NO: 20974 - protein, 85 aa, unidentified
  REGION 1..85: note = Description of Unknown:cds_NZ_WFIY01000004.1_cds_WP_155862438.1_185 target sequence
SESLGISQKSLEAKLKQMRKPESKYRIVSFIDVDSRETRWCLMEDLENIVKSCDFYTSFNPINGDETFIASLRAINSNTTTDLIF

SEQ ID NO: 20975 - protein, 84 aa, unidentified
  REGION 1..84: note = Description of Unknown:cds_NZ_WFIY01000004.1_cds_WP_155862438.1_185 target sequence
FIASLRAINSNTTTDLIFKPKEIIDNPEEIIRRIPFEEIGEMRINDPVDPLVYNISPRFYYVNKRVAPYLLLNAVAYIQNMKYS

SEQ ID NO: 20976 - protein, 85 aa, unidentified
  REGION 1..85: note = Description of Unknown:cds_NZ_WFIY01000004.1_cds_WP_155862438.1_185 target sequence
EPILSGKNTLIIAPTGYGKTEAALIPILDMMLRTNVKPVSLIYITPLKALINDLTLRIEWWASRLGFYVNRKHGEVPQKEKNLRL

SEQ ID NO: 20977 - protein, 85 aa, unidentified
  REGION 1..85: note = Description of Unknown:cds_NZ_WFIY01000004.1_cds_WP_155862438.1_185 target sequence
KITPHILVTTPEGLEIDLDWATRFREKYKNVKWVIVDEIHELIGSKRGVQLSVLLERLKDYIGYDFQRIGLSATINDEDLVASFL

SEQ ID NO: 20978 - protein, 85 aa, unidentified
  REGION 1..85: note = Description of Unknown:cds_NZ_WFIY01000004.1_cds_WP_155862438.1_185 target sequence
FGSSSRQSEIVKVNDKKEFELSIVKLNSAGDIWKNVAKHIISSVEKPSLIFTNSRFLTERLHEELEEYDKDFYVHHSSISRESKS

SEQ ID NO: 20979 - protein, 85 aa, unidentified
  REGION 1..85: note = Description of Unknown:cds_NZ_WFIY01000004.1_cds_WP_155862438.1_185 target sequence
NVEEYLRTGKAKGVICTKTLELGIDIGDIKKIIMFRPPPSVASFLQRLGRSGHKIYGKPRGEIICIYDHDLLEAYAISELAKLGK

SEQ ID NO: 20980 - protein, 85 aa, unidentified
  REGION 1..85: note = Description of Unknown:cds_NZ_WFIY01000004.1_cds_WP_155862438.1_185 target sequence
VERQNICKPLDVAAREILGMILQYDEVEKEKAYKILTSSYVFRNLSEKTFNELIEYLAKNNLITIKGDKLSIGKFFFKLWNFNRN

SEQ ID NO: 20981 - protein, 85 aa, unidentified
  REGION 1..85: note = Description of Unknown:cds_NZ_WFIY01000004.1_cds_WP_155862438.1_185 target sequence
NGYSWSRGFSEFFSMINSTDTFTLKWEDKNIGEIDAIYVYKHIRSGDIIRIGGKLWKIVRINTSRMVVDVLPADKGDGEIPVWRG

SEQ ID NO: 20982 - protein, 85 aa, unidentified
  REGION 1..85: note = Description of Unknown:cds_NZ_WFIY01000004.1_cds_WP_155862438.1_185 target sequence
DGISKSYLLPKEIYVLFKEKRKEISDIIGKYVSRNLPLPSPNVIIEEKRDKEIVYSTLINEKIASTLAHILLYLATSKDSLNNYA

SEQ ID NO: 20983 - protein, 85 aa, unidentified
  REGION 1..85: note = Description of Unknown:cds_NZ_WFIY01000004.1_cds_WP_155862438.1_185 target sequence
RYSIYGFSINYTEKDLLEELLKYNEKELKRIIIRSILRSPLFISTLKEIQISYGKLGKIDAKEDKLIIKDALRQTISKYFSIKNT

SEQ ID NO: 20984 - protein, 85 aa, unidentified
  REGION 1..85: note = Description of Unknown:cds_NZ_WFIY01000004.1_cds_WP_155862438.1_185 target sequence
IKFINKIKRGKIKIIKYDGSTPLGDAVLLQAPIKPWITGISTIIYDTLKGGAYTLAELSESLGISQKSLEAKLKQMRKPESKYRI

SEQ ID NO: 20985 - protein, 85 aa, unidentified
  REGION 1..85: note = Description of Unknown:cds_NZ_WFIY01000004.1_cds_WP_155862438.1_185 target sequence
VSFIDVDSRETRWCLMEDLENIVKSCDFYTSFNPINGDETFIASLRAINSNTTTDLIFKPKEIIDNPEEIIRRIPFEEIGEMRIN

SEQ ID NO: 20986 - protein, 85 aa, unidentified
  REGION 1..85: note = Description of Unknown:hvTR_Q2HR73 target sequence
PKAGGSEWATLWIIDALENNKFPYFSWFDRNNLLFAAPAPLPAGSDIPPGWYSVYHAFDEECDRVYGPSPVVGQTVYGRFGRLLR

SEQ ID NO: 20987 - protein, 85 aa, unidentified
  REGION 1..85: note = Description of Unknown:hvTR_Q2HR73 target sequence
GTRRAVVRNDLRYSDTFGGSYVVWQLVRTPFKNCTYCYGAAYGPEKLQRFIQCLLSPPMQTTATRRSDTREQSYEEAGAAAPAPP

SEQ ID NO: 20988 - protein, 85 aa, unidentified
  REGION 1..85: note = Description of Unknown:hvTR_Q2HR73 target sequence
KAPSGLRGRPRKSNRYYNVGDITTEQKAACSVWIPVNEGASTSGMGSSGTRQVTQASSFTWRVPGDPPAPSTLTGPSDPHSSGAG

SEQ ID NO: 20989 - protein, 85 aa, unidentified
  REGION 1..85: note = Description of Unknown:hvTR_Q2HR73 target sequence
LPGTAPPKPQHETRLAGTVSGVSGVAQTPGDTGQLAPPMRDGSRLPSTSPWIPACFPWGDLPVTGWWPQGASGLPEKVHPPTTGQ

SEQ ID NO: 20990 - protein, 85 aa, unidentified
  REGION 1..85: note = Description of Unknown:hvTR_Q2HR73 target sequence
FDPLSPRWTYTGIPSSQLNPAAPSWIPPHAQAGTFVGEFSQGAPLAPQGLLPQSGQCASAWLPRRETGAEGACGASTEGRAPQGA

SEQ ID NO: 20991 - protein, 85 aa, unidentified
  REGION 1..85: note = Description of Unknown:hvTR_Q2HR73 target sequence
ASERVYPFEPQPPSAPAPGYAKPSCYNWSPLAEPPATRPIRAPVWHPPVGHAVVPEVRTPLWIPWSSGGAPNQGLSHTQGGASAT

SEQ ID NO: 20992 - protein, 85 aa, unidentified
  REGION 1..85: note = Description of Unknown:hvTR_Q2HR73 target sequence
PSAGAPPTPEVAERQEPSSSGIPYVCQGDNMATGYRRVTTSSGALEVEIIDLTGDSDTPSTTVASTPLPVSGPRVFQPTVLYSAP

SEQ ID NO: 20993 - protein, 85 aa, unidentified
  REGION 1..85: note = Description of Unknown:hvTR_Q2HR73 target sequence
EPAVNPEVSHLPTELERRECVCPGSGERPRVPLVSTYAGDRYAVGGYGPEQSLVPPPLGLPLTLSNLQGEDICTWEEGLGNILSE

SEQ ID NO: 20994 - protein, 85 aa, unidentified
  REGION 1..85: note = Description of Unknown:hvTR_Q2HR73 target sequence
LQEEPSSSTRQATDRRRPRSRSPHGRRTPVSHSGPEKPPSKMFFDPPDSQRVSFVVEIFVYGNLRGTLRREGDAGEAMLCSWPVG

SEQ ID NO: 20995 - protein, 85 aa, unidentified
  REGION 1..85: note = Description of Unknown:hvTR_Q2HR73 target sequence
DTLGHLCQSFVPELLRIPRLTVPSPEQMEILNRVFEGLGHGFPIFCSMSGIYSRNATQVEGWWFGNPNSRYERILRSFSPRVPQQ

SEQ ID NO: 20996 - protein, 84 aa, unidentified
  REGION 1..84: note = Description of Unknown:hvTR_Q2HR73 target sequence
WWFGNPNSRYERILRSFSPRVPQQLFNTARYLATTAAIPQTPLSVNPVTCGTVFFGASPASTENFQNVPLTVKIFIGSIWDSLH

SEQ ID NO: 20997 - protein, 85 aa, unidentified
  REGION 1..85: note = Description of Unknown:hvTR_Q2HR73 target sequence
FDRNNLLFAAPAPLPAGSDIPPGWYSVYHAFDEECDRVYGPSPVVGQTVYGRFGRLLRGTRRAVVRNDLRYSDTFGGSYVVWQLV

SEQ ID NO: 20998 - protein, 85 aa, unidentified
  REGION 1..85: note = Description of Unknown:hvTR_Q2HR73 target sequence
RTPFKNCTYCYGAAYGPEKLQRFIQCLLSPPMQTTATRRSDTREQSYEEAGAAAPAPPKAPSGLRGRPRKSNRYYNVGDITTEQK

SEQ ID NO: 20999 - protein, 85 aa, unidentified
  REGION 1..85: note = Description of Unknown:hvTR_Q2HR73 target sequence
AACSVWIPVNEGASTSGMGSSGTRQVTQASSFTWRVPGDPPAPSTLTGPSDPHSSGAGLPGTAPPKPQHETRLAGTVSGVSGVAQ

SEQ ID NO: 21000 - protein, 85 aa, unidentified
  REGION 1..85: note = Description of Unknown:hvTR_Q2HR73 target sequence
TPGDTGQLAPPMRDGSRLPSTSPWIPACFPWGDLPVTGWWPQGASGLPEKVHPPTTGQFDPLSPRWTYTGIPSSQLNPAAPSWIP

SEQ ID NO: 21001 - protein, 85 aa, unidentified
  REGION 1..85: note = Description of Unknown:hvTR_Q2HR73 target sequence
PHAQAGTFVGEFSQGAPLAPQGLLPQSGQCASAWLPRRETGAEGACGASTEGRAPQGAASERVYPFEPQPPSAPAPGYAKPSCYN

SEQ ID NO: 21002 - protein, 85 aa, unidentified
  REGION 1..85: note = Description of Unknown:hvTR_Q2HR73 target sequence
WSPLAEPPATRPIRAPVWHPPVGHAVVPEVRTPLWIPWSSGGAPNQGLSHTQGGASATPSAGAPPTPEVAERQEPSSSGIPYVCQ

SEQ ID NO: 21003 - protein, 85 aa, unidentified
  REGION 1..85: note = Description of Unknown:hvTR_Q2HR73 target sequence
GDNMATGYRRVTTSSGALEVEIIDLTGDSDTPSTTVASTPLPVSGPRVFQPTVLYSAPEPAVNPEVSHLPTELERRECVCPGSGE

SEQ ID NO: 21004 - protein, 85 aa, unidentified
  REGION 1..85: note = Description of Unknown:hvTR_Q2HR73 target sequence
RPRVPLVSTYAGDRYAVGGYGPEQSLVPPPLGLPLTLSNLQGEDICTWEEGLGNILSELQEEPSSSTRQATDRRRPRSRSPHGRR

SEQ ID NO: 21005 - protein, 85 aa, unidentified
  REGION 1..85: note = Description of Unknown:hvTR_Q2HR73 target sequence
TPVSHSGPEKPPSKMFFDPPDSQRVSFVVEIFVYGNLRGTLRREGDAGEAMLCSWPVGDTLGHLCQSFVPELLRIPRLTVPSPEQ

SEQ ID NO: 21006 - protein, 85 aa, unidentified
  REGION 1..85: note = Description of Unknown:hvTR_Q2HR73 target sequence
MEILNRVFEGLGHGFPIFCSMSGIYSRNATQVEGWWFGNPNSRYERILRSFSPRVPQQLFNTARYLATTAAIPQTPLSVNPVTCG

SEQ ID NO: 21007 - protein, 85 aa, unidentified
  REGION 1..85: note = Description of Unknown:cds_NC_035460.1_cds_YP_009408057.1_106 target sequence
MPFNSLVTLDQLEDVEYLFRVISNILPSLCLDYKICPKLKTTYVHPFDILLHSDCGKPADIEQVQSSIEKIGINYLLDLFSNPKL

SEQ ID NO: 21008 - protein, 85 aa, unidentified
  REGION 1..85: note = Description of Unknown:cds_NC_035460.1_cds_YP_009408057.1_106 target sequence
FNYVVHPGFVDIIQYYSKIKTSHNTIHNTRSFNDLPPFTKELMFTRLTEPEYVARFIGGYVKSDDDSLDLFPEKHPDLNFENTYM

SEQ ID NO: 21009 - protein, 85 aa, unidentified
  REGION 1..85: note = Description of Unknown:cds_NC_035460.1_cds_YP_009408057.1_106 target sequence
LNLIYKDVIDSGNYGFRTRITNGVMFKRDFDNLMEIRKLLTVQSRDIFDRTFQLAKAATDYNVQLPQLVPNTDILLMPSFKPLLM

SEQ ID NO: 21010 - protein, 85 aa, unidentified
  REGION 1..85: note = Description of Unknown:cds_NC_035460.1_cds_YP_009408057.1_106 target sequence
YYQYFNTQYTLDSIYYNADKILTSNPSIPSIVASMRFQSVLPKLLKLYPDLPVRQDAVLTLQDSTTMAVHVINVQIGGTFVDISS

SEQ ID NO: 21011 - protein, 85 aa, unidentified
  REGION 1..85: note = Description of Unknown:cds_NC_035460.1_cds_YP_009408057.1_106 target sequence
QTSYFITLLNMLAKEERSTPIKKQHSLFWDGISYDEYKSKKITDIVMYNSTCYVMGLYNKNNITYCSMLSDIILANETPIRVCFL

SEQ ID NO: 21012 - protein, 85 aa, unidentified
  REGION 1..85: note = Description of Unknown:cds_NC_035460.1_cds_YP_009408057.1_106 target sequence
PRVIAGKTVPALISEILDNVNNISHKDFPKKTRSSLMHIGLSENNFMKFFQLIRLTANKQPEVAIKEILMSYIGFKLNDTGSPYY

SEQ ID NO: 21013 - protein, 85 aa, unidentified
  REGION 1..85: note = Description of Unknown:cds_NC_035460.1_cds_YP_009408057.1_106 target sequence
IKRESYQDFCLLLFTAMGFKVSVKKSIIGSDNHTIISIKPKVTKQYIHHMLVKSSCCKEDANKIISAAYDLLNFMVSVGDYKNYQ

SEQ ID NO: 21014 - protein, 85 aa, unidentified
  REGION 1..85: note = Description of Unknown:cds_NC_035460.1_cds_YP_009408057.1_106 target sequence
TYCFTKNLFPNYFYFGGVKENDFSAGSVSDNIDDIQETIIHLTEPINILDRINVRGIFSATTVNEMLDVDAFGPENTAFKNNLSQ

SEQ ID NO: 21015 - protein, 85 aa, unidentified
  REGION 1..85: note = Description of Unknown:cds_NC_035460.1_cds_YP_009408057.1_106 target sequence
LINSGNLSGNTVVQALPFNILDKIVTIAGGPCTVSFSELIDGIGEDEDDEECNDTHKVLSIINTALKDNLLKTNTAMVAQTMNSV

SEQ ID NO: 21016 - protein, 85 aa, unidentified
  REGION 1..85: note = Description of Unknown:cds_NC_035460.1_cds_YP_009408057.1_106 target sequence
AAYSQKQLNDVKNSTCQTAMLFKSLARSIYAIERIFRIKIGDDVKTNILEKFKAFNSLTKSLYTDLVSIETLKAMLYIVKRSGRN

SEQ ID NO: 21017 - protein, 84 aa, unidentified
  REGION 1..84: note = Description of Unknown:cds_NC_035460.1_cds_YP_009408057.1_106 target sequence
TKSLYTDLVSIETLKAMLYIVKRSGRNISDTEIGIEELQKTYNAIKPKIASMVNYYSEMHKDYFHFLKKNLNFMDGDAVTFDTE

SEQ ID NO: 21018 - protein, 85 aa, unidentified
  REGION 1..85: note = Description of Unknown:cds_NC_035460.1_cds_YP_009408057.1_106 target sequence
SLCLDYKICPKLKTTYVHPFDILLHSDCGKPADIEQVQSSIEKIGINYLLDLFSNPKLFNYVVHPGFVDIIQYYSKIKTSHNTIH

SEQ ID NO: 21019 - protein, 85 aa, unidentified
  REGION 1..85: note = Description of Unknown:cds_NC_035460.1_cds_YP_009408057.1_106 target sequence
NTRSFNDLPPFTKELMFTRLTEPEYVARFIGGYVKSDDDSLDLFPEKHPDLNFENTYMLNLIYKDVIDSGNYGFRTRITNGVMFK

SEQ ID NO: 21020 - protein, 85 aa, unidentified
  REGION 1..85: note = Description of Unknown:cds_NC_035460.1_cds_YP_009408057.1_106 target sequence
RDFDNLMEIRKLLTVQSRDIFDRTFQLAKAATDYNVQLPQLVPNTDILLMPSFKPLLMYYQYFNTQYTLDSIYYNADKILTSNPS

SEQ ID NO: 21021 - protein, 85 aa, unidentified
  REGION 1..85: note = Description of Unknown:cds_NC_035460.1_cds_YP_009408057.1_106 target sequence
IPSIVASMRFQSVLPKLLKLYPDLPVRQDAVLTLQDSTTMAVHVINVQIGGTFVDISSQTSYFITLLNMLAKEERSTPIKKQHSL

SEQ ID NO: 21022 - protein, 85 aa, unidentified
  REGION 1..85: note = Description of Unknown:cds_NC_035460.1_cds_YP_009408057.1_106 target sequence
FWDGISYDEYKSKKITDIVMYNSTCYVMGLYNKNNITYCSMLSDIILANETPIRVCFLPRVIAGKTVPALISEILDNVNNISHKD

SEQ ID NO: 21023 - protein, 85 aa, unidentified
  REGION 1..85: note = Description of Unknown:cds_NC_035460.1_cds_YP_009408057.1_106 target sequence
FPKKTRSSLMHIGLSENNFMKFFQLIRLTANKQPEVAIKEILMSYIGFKLNDTGSPYYIKRESYQDFCLLLFTAMGFKVSVKKSI

SEQ ID NO: 21024 - protein, 85 aa, unidentified
  REGION 1..85: note = Description of Unknown:cds_NC_035460.1_cds_YP_009408057.1_106 target sequence
IGSDNHTIISIKPKVTKQYIHHMLVKSSCCKEDANKIISAAYDLLNFMVSVGDYKNYQTYCFTKNLFPNYFYFGGVKENDFSAGS

SEQ ID NO: 21025 - protein, 85 aa, unidentified
  REGION 1..85: note = Description of Unknown:cds_NC_035460.1_cds_YP_009408057.1_106 target sequence
VSDNIDDIQETIIHLTEPINILDRINVRGIFSATTVNEMLDVDAFGPENTAFKNNLSQLINSGNLSGNTVVQALPFNILDKIVTI

SEQ ID NO: 21026 - protein, 85 aa, unidentified
  REGION 1..85: note = Description of Unknown:cds_NC_035460.1_cds_YP_009408057.1_106 target sequence
AGGPCTVSFSELIDGIGEDEDDEECNDTHKVLSIINTALKDNLLKTNTAMVAQTMNSVAAYSQKQLNDVKNSTCQTAMLFKSLAR

SEQ ID NO: 21027 - protein, 85 aa, unidentified
  REGION 1..85: note = Description of Unknown:cds_NC_035460.1_cds_YP_009408057.1_106 target sequence
SIYAIERIFRIKIGDDVKTNILEKFKAFNSLTKSLYTDLVSIETLKAMLYIVKRSGRNISDTEIGIEELQKTYNAIKPKIASMVN

SEQ ID NO: 21028 - protein, 85 aa, unidentified
  REGION 1..85: note = Description of Unknown:cds_NZ_WFIY01000004.1_cds_WP_155862998.1_875 target sequence
QEDLVFVDNLRKLGYEKLTPIQKLAIPIILKGNNTLIIAPTGYGKTEAAIIPIFYRIFASRPQEISTLYITPLKALNRDLESRLK

SEQ ID NO: 21029 - protein, 85 aa, unidentified
  REGION 1..85: note = Description of Unknown:cds_NZ_WFIY01000004.1_cds_WP_155862998.1_875 target sequence
RLGEAFGISIKTRHGDTTPKERKEIAEKPPDVLITTPESLQYIILNEFYRKYFANLRWIIIDELQEMLDEKRGYELSVVLQRLKR

SEQ ID NO: 21030 - protein, 85 aa, unidentified
  REGION 1..85: note = Description of Unknown:cds_NZ_WFIY01000004.1_cds_WP_155862998.1_875 target sequence
LIKGTPQIIGISATIGNVELAKKYLDINGNVEVVKIDATKEMELKLLIPRPNDDIKNLALKEGLDVILTARLNEISKIIKENKPV

SEQ ID NO: 21031 - protein, 85 aa, unidentified
  REGION 1..85: note = Description of Unknown:cds_NZ_WFIY01000004.1_cds_WP_155862998.1_875 target sequence
LIFTNTRETAEFLANKLQSIFNLNVATHHGSLYRDVRINVEKDFKEGKLDAIVATSSLELGIDIGIISLVIQYMSPKQVIRLLQR

SEQ ID NO: 21032 - protein, 85 aa, unidentified
  REGION 1..85: note = Description of Unknown:cds_NZ_WFIY01000004.1_cds_WP_155862998.1_875 target sequence
IGRSGHSLYKKAKGVLIPSNYLFDILECEALIEAVGNYLEKPSYEENPLDVLAHQIAGMVLEGYDDKKEILQIIRNSVYFANLKE

SEQ ID NO: 21033 - protein, 85 aa, unidentified
  REGION 1..85: note = Description of Unknown:cds_NZ_WFIY01000004.1_cds_WP_155862998.1_875 target sequence
EELDNVISLLESERIIKIKDNGKLSPSSRTWKYYYQVNMIPDSIRSYDVIEISSNTKIGKLDEDFVVMLDEDSIFILGGKLWKVV

SEQ ID NO: 21034 - protein, 85 aa, unidentified
  REGION 1..85: note = Description of Unknown:cds_NZ_WFIY01000004.1_cds_WP_155862998.1_875 target sequence
SIEDNKVIVEKASLKEGILPSWFGESIPVEKEIAKKVFKNLEKYMKESSPYEEVNEKLEKYKTKGYPEIKSNEILVEIIGQNKDL

SEQ ID NO: 21035 - protein, 85 aa, unidentified
  REGION 1..85: note = Description of Unknown:cds_NZ_WFIY01000004.1_cds_WP_155862998.1_875 target sequence
TVILSPFGSKGNNTLGAVISFILSKISGIKVTYRNDPYHIVLASMTPMSREMVEKAIKTITSLSKREIIEIVSNAIKESPQFKWQ

SEQ ID NO: 21036 - protein, 85 aa, unidentified
  REGION 1..85: note = Description of Unknown:cds_NZ_WFIY01000004.1_cds_WP_155862998.1_875 target sequence
LLIEAERFGAIDLNSDIQVSSTLLKAFTDTIVGQEAVKEMTVKYHDLSIFEELKYYSWNILEVPEPSPLSQDFLDRLLAFTTESN

SEQ ID NO: 21037 - protein, 85 aa, unidentified
  REGION 1..85: note = Description of Unknown:cds_NZ_WFIY01000004.1_cds_WP_155862998.1_875 target sequence
SAMLEIFKRRLLSKDVKVLCIMCGWNEIVSIRNTPDKCPKCNSVFLTVTTPDDKNSPEIIRKVLKGEKLKRLESKKLEELRTISS

SEQ ID NO: 21038 - protein, 84 aa, unidentified
  REGION 1..84: note = Description of Unknown:cds_NZ_WFIY01000004.1_cds_WP_155862998.1_875 target sequence
EIIRKVLKGEKLKRLESKKLEELRTISSLFSRYGKYAFIALTVPGVGPSNAGRVLSKLSDGEEKFYLTLIEEEKKFLRNSKYWK

SEQ ID NO: 21039 - protein, 85 aa, unidentified
  REGION 1..85: note = Description of Unknown:cds_NZ_WFIY01000004.1_cds_WP_155862998.1_875 target sequence
IILKGNNTLIIAPTGYGKTEAAIIPIFYRIFASRPQEISTLYITPLKALNRDLESRLKRLGEAFGISIKTRHGDTTPKERKEIAE

SEQ ID NO: 21040 - protein, 85 aa, unidentified
  REGION 1..85: note = Description of Unknown:cds_NZ_WFIY01000004.1_cds_WP_155862998.1_875 target sequence
KPPDVLITTPESLQYIILNEFYRKYFANLRWIIIDELQEMLDEKRGYELSVVLQRLKRLIKGTPQIIGISATIGNVELAKKYLDI

SEQ ID NO: 21041 - protein, 85 aa, unidentified
  REGION 1..85: note = Description of Unknown:cds_NZ_WFIY01000004.1_cds_WP_155862998.1_875 target sequence
NGNVEVVKIDATKEMELKLLIPRPNDDIKNLALKEGLDVILTARLNEISKIIKENKPVLIFTNTRETAEFLANKLQSIFNLNVAT

SEQ ID NO: 21042 - protein, 85 aa, unidentified
  REGION 1..85: note = Description of Unknown:cds_NZ_WFIY01000004.1_cds_WP_155862998.1_875 target sequence
HHGSLYRDVRINVEKDFKEGKLDAIVATSSLELGIDIGIISLVIQYMSPKQVIRLLQRIGRSGHSLYKKAKGVLIPSNYLFDILE

SEQ ID NO: 21043 - protein, 85 aa, unidentified
  REGION 1..85: note = Description of Unknown:cds_NZ_WFIY01000004.1_cds_WP_155862998.1_875 target sequence
CEALIEAVGNYLEKPSYEENPLDVLAHQIAGMVLEGYDDKKEILQIIRNSVYFANLKEEELDNVISLLESERIIKIKDNGKLSPS

SEQ ID NO: 21044 - protein, 85 aa, unidentified
  REGION 1..85: note = Description of Unknown:cds_NZ_WFIY01000004.1_cds_WP_155862998.1_875 target sequence
SRTWKYYYQVNMIPDSIRSYDVIEISSNTKIGKLDEDFVVMLDEDSIFILGGKLWKVVSIEDNKVIVEKASLKEGILPSWFGESI

SEQ ID NO: 21045 - protein, 85 aa, unidentified
  REGION 1..85: note = Description of Unknown:cds_NZ_WFIY01000004.1_cds_WP_155862998.1_875 target sequence
PVEKEIAKKVFKNLEKYMKESSPYEEVNEKLEKYKTKGYPEIKSNEILVEIIGQNKDLTVILSPFGSKGNNTLGAVISFILSKIS

SEQ ID NO: 21046 - protein, 85 aa, unidentified
  REGION 1..85: note = Description of Unknown:cds_NZ_WFIY01000004.1_cds_WP_155862998.1_875 target sequence
GIKVTYRNDPYHIVLASMTPMSREMVEKAIKTITSLSKREIIEIVSNAIKESPQFKWQLLIEAERFGAIDLNSDIQVSSTLLKAF

SEQ ID NO: 21047 - protein, 85 aa, unidentified
  REGION 1..85: note = Description of Unknown:cds_NZ_WFIY01000004.1_cds_WP_155862998.1_875 target sequence
TDTIVGQEAVKEMTVKYHDLSIFEELKYYSWNILEVPEPSPLSQDFLDRLLAFTTESNSAMLEIFKRRLLSKDVKVLCIMCGWNE

SEQ ID NO: 21048 - protein, 85 aa, unidentified
  REGION 1..85: note = Description of Unknown:cds_NZ_WFIY01000004.1_cds_WP_155862998.1_875 target sequence
IVSIRNTPDKCPKCNSVFLTVTTPDDKNSPEIIRKVLKGEKLKRLESKKLEELRTISSLFSRYGKYAFIALTVPGVGPSNAGRVL

SEQ ID NO: 21049 - protein, 85 aa, unidentified
  REGION 1..85: note = Description of Unknown:cds_NZ_WFIY01000004.1_cds_WP_155862537.1_302 target sequence
KVDENEYRLKFFLENHYVRKQCVSCKTPFWTTDGNRDNCADIPCTDYTFLDSNIGKLNLSVSEARKKFLEFFHKHGHTIIPPKPV

SEQ ID NO: 21050 - protein, 85 aa, unidentified
  REGION 1..85: note = Description of Unknown:cds_NZ_WFIY01000004.1_cds_WP_155862537.1_302 target sequence
LARWRDDLYLTIASIVDFQPHVTSGMVQPPANPLVVSQPCIRLEDVDNVGITFGRHLTTFEMGGHHAFNYPDKFVYWKDETVGLA

SEQ ID NO: 21051 - protein, 85 aa, unidentified
  REGION 1..85: note = Description of Unknown:cds_NZ_WFIY01000004.1_cds_WP_155862537.1_302 target sequence
KEFFTEELKIPEELLTFKESWWEGGGNAGPSFEVTVGGLELATLVFMQYQVINGEYVPLKLKIVDTGYGIERIAWFTQKTPTAFH

SEQ ID NO: 21052 - protein, 85 aa, unidentified
  REGION 1..85: note = Description of Unknown:cds_NZ_WFIY01000004.1_cds_WP_155862537.1_302 target sequence
AIYGNLVYTFFKKLDQPYVDEEMLKTAARFAGRIDPDNPLTITHHREMVAKALGLKKEEVEKELTRAARVFQVLDHTKTIALMLA

SEQ ID NO: 21053 - protein, 85 aa, unidentified
  REGION 1..85: note = Description of Unknown:cds_NZ_WFIY01000004.1_cds_WP_155862537.1_302 target sequence
DGLVPSNSGEGYLGRLLIRRSLRVMKILGSDVRLKDLVLEQINFWKEDFPQFLKNKDYILDVVEYEQEKYEETLQKVPSVASTLA

SEQ ID NO: 21054 - protein, 85 aa, unidentified
  REGION 1..85: note = Description of Unknown:cds_NZ_WFIY01000004.1_cds_WP_155862537.1_302 target sequence
KKGSITTEDLIKTYDTNGIPPDLIAEELKKKGIEISVPFNFYALVAKRHQSAPIKGEKEKAKLTPDVIEFAKKFEPTNKLYYKDQ

SEQ ID NO: 21055 - protein, 85 aa, unidentified
  REGION 1..85: note = Description of Unknown:cds_NZ_WFIY01000004.1_cds_WP_155862537.1_302 target sequence
YMRSFNGKVLGVYKNFLILDKTTFYPEGGGQLGDSGIIKTKSGEEYHVIDTQKVSDVVVHVLDKEAKLNVGEEVYGEIDWQRRYR

SEQ ID NO: 21056 - protein, 85 aa, unidentified
  REGION 1..85: note = Description of Unknown:cds_NZ_WFIY01000004.1_cds_WP_155862537.1_302 target sequence
LMRHHTATHVILAAAKKLLGEHVWQAGAEKTPEKARLDITHYKMLTPEEIKKLEDMANYVINDRRPVTAIEMDRMKAEMTFGVSI

SEQ ID NO: 21057 - protein, 85 aa, unidentified
  REGION 1..85: note = Description of Unknown:cds_NZ_WFIY01000004.1_cds_WP_155862537.1_302 target sequence
YEGGVVNKPTIRLLEIKDWDVESCGGTHVSNTSEIGAIKIINVEKIQDGVIRLEYVAGDMVSNYARSIEDRINKISEDLETSPEQ

SEQ ID NO: 21058 - protein, 85 aa, unidentified
  REGION 1..85: note = Description of Unknown:cds_NZ_WFIY01000004.1_cds_WP_155862537.1_302 target sequence
VEIRLKRTLEEMKEIKETLSMYRNWYSSYVESKVIEEKVNGINLKILPEIIDEDIVKDLLRKLTSQGSKTIAVFIGKKTVDIASS

SEQ ID NO: 21059 - protein, 84 aa, unidentified
  REGION 1..84: note = Description of Unknown:cds_NZ_WFIY01000004.1_cds_WP_155862537.1_302 target sequence
EDIVKDLLRKLTSQGSKTIAVFIGKKTVDIASSKDLKLDELASFLRNKGGKGGGKGTYVSMMLEGKSREEIINDIKEGIERSIH

SEQ ID NO: 21060 - protein, 85 aa, unidentified
  REGION 1..85: note = Description of Unknown:cds_NZ_WFIY01000004.1_cds_WP_155862537.1_302 target sequence
PFWTTDGNRDNCADIPCTDYTFLDSNIGKLNLSVSEARKKFLEFFHKHGHTIIPPKPVLARWRDDLYLTIASIVDFQPHVTSGMV

SEQ ID NO: 21061 - protein, 85 aa, unidentified
  REGION 1..85: note = Description of Unknown:cds_NZ_WFIY01000004.1_cds_WP_155862537.1_302 target sequence
QPPANPLVVSQPCIRLEDVDNVGITFGRHLTTFEMGGHHAFNYPDKFVYWKDETVGLAKEFFTEELKIPEELLTFKESWWEGGGN

SEQ ID NO: 21062 - protein, 85 aa, unidentified
  REGION 1..85: note = Description of Unknown:cds_NZ_WFIY01000004.1_cds_WP_155862537.1_302 target sequence
AGPSFEVTVGGLELATLVFMQYQVINGEYVPLKLKIVDTGYGIERIAWFTQKTPTAFHAIYGNLVYTFFKKLDQPYVDEEMLKTA

SEQ ID NO: 21063 - protein, 85 aa, unidentified
  REGION 1..85: note = Description of Unknown:cds_NZ_WFIY01000004.1_cds_WP_155862537.1_302 target sequence
ARFAGRIDPDNPLTITHHREMVAKALGLKKEEVEKELTRAARVFQVLDHTKTIALMLADGLVPSNSGEGYLGRLLIRRSLRVMKI

SEQ ID NO: 21064 - protein, 85 aa, unidentified
  REGION 1..85: note = Description of Unknown:cds_NZ_WFIY01000004.1_cds_WP_155862537.1_302 target sequence
LGSDVRLKDLVLEQINFWKEDFPQFLKNKDYILDVVEYEQEKYEETLQKVPSVASTLAKKGSITTEDLIKTYDTNGIPPDLIAEE

SEQ ID NO: 21065 - protein, 85 aa, unidentified
  REGION 1..85: note = Description of Unknown:cds_NZ_WFIY01000004.1_cds_WP_155862537.1_302 target sequence
LKKKGIEISVPFNFYALVAKRHQSAPIKGEKEKAKLTPDVIEFAKKFEPTNKLYYKDQYMRSFNGKVLGVYKNFLILDKTTFYPE

SEQ ID NO: 21066 - protein, 85 aa, unidentified
  REGION 1..85: note = Description of Unknown:cds_NZ_WFIY01000004.1_cds_WP_155862537.1_302 target sequence
GGGQLGDSGIIKTKSGEEYHVIDTQKVSDVVVHVLDKEAKLNVGEEVYGEIDWQRRYRLMRHHTATHVILAAAKKLLGEHVWQAG

SEQ ID NO: 21067 - protein, 85 aa, unidentified
  REGION 1..85: note = Description of Unknown:cds_NZ_WFIY01000004.1_cds_WP_155862537.1_302 target sequence
AEKTPEKARLDITHYKMLTPEEIKKLEDMANYVINDRRPVTAIEMDRMKAEMTFGVSIYEGGVVNKPTIRLLEIKDWDVESCGGT

SEQ ID NO: 21068 - protein, 85 aa, unidentified
  REGION 1..85: note = Description of Unknown:cds_NZ_WFIY01000004.1_cds_WP_155862537.1_302 target sequence
HVSNTSEIGAIKIINVEKIQDGVIRLEYVAGDMVSNYARSIEDRINKISEDLETSPEQVEIRLKRTLEEMKEIKETLSMYRNWYS

SEQ ID NO: 21069 - protein, 85 aa, unidentified
  REGION 1..85: note = Description of Unknown:cds_NZ_WFIY01000004.1_cds_WP_155862537.1_302 target sequence
SYVESKVIEEKVNGINLKILPEIIDEDIVKDLLRKLTSQGSKTIAVFIGKKTVDIASSKDLKLDELASFLRNKGGKGGGKGTYVS

SEQ ID NO: 21070 - protein, 85 aa, unidentified
  REGION 1..85: note = Description of Unknown:cds_NZ_WFIY01000004.1_cds_WP_155863229.1_1176 target sequence
KHRIFTYIIFMILLVSLSSTLMLAQSQGYKVNFNVTSSGYVTIYISGICKSNTVILHYGIENGPQQSWTEIFNKEMIWDGNNFTA

SEQ ID NO: 21071 - protein, 85 aa, unidentified
  REGION 1..85: note = Description of Unknown:cds_NZ_WFIY01000004.1_cds_WP_155863229.1_1176 target sequence
TIGPFNNGTWIAWVFYDNTTGQWINYDCHPFWNWNLEVNPQNVGQTYATVLSNGSILITTIGRAPDKLFIHYGLSTGPQTGLPWS

SEQ ID NO: 21072 - protein, 85 aa, unidentified
  REGION 1..85: note = Description of Unknown:cds_NZ_WFIY01000004.1_cds_WP_155863229.1_1176 target sequence
DITCEKMQYNPLWGNYSIIIGPFERGQWVQWVYHDQTLNEWIHNTSCTNFYIQDVYSPIFIINSTYNRYVYVEGEEATISIYLNN

SEQ ID NO: 21073 - protein, 85 aa, unidentified
  REGION 1..85: note = Description of Unknown:cds_NZ_WFIY01000004.1_cds_WP_155863229.1_1176 target sequence
EYNRVIQTSFCLLINSASHTYIVNLNPGINMVNLTFNTNCIPQGIYYPTLKIYYNNSLCRISQLPALYVLNTTGKEPLSFVLVWN

SEQ ID NO: 21074 - protein, 85 aa, unidentified
  REGION 1..85: note = Description of Unknown:cds_NZ_WFIY01000004.1_cds_WP_155863229.1_1176 target sequence
MHQPLYIAPNGTWEQPWVWLHTGQDFYWNGQLVGSYELQAMLINQFNVAVTIDFTPVLLYQWETILHEKNASFTSNFGVNVTHDL

SEQ ID NO: 21075 - protein, 85 aa, unidentified
  REGION 1..85: note = Description of Unknown:cds_NZ_WFIY01000004.1_cds_WP_155863229.1_1176 target sequence
LAVNYTLNLFKKLVREGKVDVLTVPFYHPLQPLLLEDGYWSDVETQILMGKNMTKTVFGVCANGTWTPEMAFCNALIGLYNESNI

SEQ ID NO: 21076 - protein, 85 aa, unidentified
  REGION 1..85: note = Description of Unknown:cds_NZ_WFIY01000004.1_cds_WP_155863229.1_1176 target sequence
SYTILDCEAFLPYVTIVNGTINPDEPFVVENNLGQTIYVLFRNTTLSNEFGFKFFSQSPQLTARELIQQLAQIYMAHPGGVVTVA

SEQ ID NO: 21077 - protein, 85 aa, unidentified
  REGION 1..85: note = Description of Unknown:cds_NZ_WFIY01000004.1_cds_WP_155863229.1_1176 target sequence
LDGENPLIFNPTTGPADLYAIYSSLSQCQGKWFITQTAYDAIKTHKPTAVITNLPVNSWDLNLDYWNNGCPGKIEIWRNLSLARE

SEQ ID NO: 21078 - protein, 85 aa, unidentified
  REGION 1..85: note = Description of Unknown:cds_NZ_WFIY01000004.1_cds_WP_155863229.1_1176 target sequence
YLVAYTVALGKELSPEVPLLFNDTPNSTNLLYSLWNYLYIAEGSDWTWQTGAPAHGPAWFKEQALLYTSIIINTVKSQFSKINIE

SEQ ID NO: 21079 - protein, 85 aa, unidentified
  REGION 1..85: note = Description of Unknown:cds_NZ_WFIY01000004.1_cds_WP_155863229.1_1176 target sequence
CIIEGFNGVVIIINNGLQYKITLNVVANNGTYCVCKTVKLYPGINVVPLEGISGKIEVCLYSPVTSGDVGDVIIPINHHGFLIQK

SEQ ID NO: 21080 - protein, 84 aa, unidentified
  REGION 1..84: note = Description of Unknown:cds_NZ_WFIY01000004.1_cds_WP_155863229.1_1176 target sequence
LEGISGKIEVCLYSPVTSGDVGDVIIPINHHGFLIQKTTVEQGLCCIKVDKVEYNTQPKFILLPLILSVAIIAVIFVEKGMKEI

SEQ ID NO: 21081 - protein, 85 aa, unidentified
  REGION 1..85: note = Description of Unknown:cds_NZ_WFIY01000004.1_cds_WP_155863229.1_1176 target sequence
GYKVNFNVTSSGYVTIYISGICKSNTVILHYGIENGPQQSWTEIFNKEMIWDGNNFTATIGPFNNGTWIAWVFYDNTTGQWINYD

SEQ ID NO: 21082 - protein, 85 aa, unidentified
  REGION 1..85: note = Description of Unknown:cds_NZ_WFIY01000004.1_cds_WP_155863229.1_1176 target sequence
CHPFWNWNLEVNPQNVGQTYATVLSNGSILITTIGRAPDKLFIHYGLSTGPQTGLPWSDITCEKMQYNPLWGNYSIIIGPFERGQ

SEQ ID NO: 21083 - protein, 85 aa, unidentified
  REGION 1..85: note = Description of Unknown:cds_NZ_WFIY01000004.1_cds_WP_155863229.1_1176 target sequence
WVQWVYHDQTLNEWIHNTSCTNFYIQDVYSPIFIINSTYNRYVYVEGEEATISIYLNNEYNRVIQTSFCLLINSASHTYIVNLNP

SEQ ID NO: 21084 - protein, 85 aa, unidentified
  REGION 1..85: note = Description of Unknown:cds_NZ_WFIY01000004.1_cds_WP_155863229.1_1176 target sequence
GINMVNLTFNTNCIPQGIYYPTLKIYYNNSLCRISQLPALYVLNTTGKEPLSFVLVWNMHQPLYIAPNGTWEQPWVWLHTGQDFY

SEQ ID NO: 21085 - protein, 85 aa, unidentified
  REGION 1..85: note = Description of Unknown:cds_NZ_WFIY01000004.1_cds_WP_155863229.1_1176 target sequence
WNGQLVGSYELQAMLINQFNVAVTIDFTPVLLYQWETILHEKNASFTSNFGVNVTHDLLAVNYTLNLFKKLVREGKVDVLTVPFY

SEQ ID NO: 21086 - protein, 85 aa, unidentified
  REGION 1..85: note = Description of Unknown:cds_NZ_WFIY01000004.1_cds_WP_155863229.1_1176 target sequence
HPLQPLLLEDGYWSDVETQILMGKNMTKTVFGVCANGTWTPEMAFCNALIGLYNESNISYTILDCEAFLPYVTIVNGTINPDEPF

SEQ ID NO: 21087 - protein, 85 aa, unidentified
  REGION 1..85: note = Description of Unknown:cds_NZ_WFIY01000004.1_cds_WP_155863229.1_1176 target sequence
VVENNLGQTIYVLFRNTTLSNEFGFKFFSQSPQLTARELIQQLAQIYMAHPGGVVTVALDGENPLIFNPTTGPADLYAIYSSLSQ

SEQ ID NO: 21088 - protein, 85 aa, unidentified
  REGION 1..85: note = Description of Unknown:cds_NZ_WFIY01000004.1_cds_WP_155863229.1_1176 target sequence
CQGKWFITQTAYDAIKTHKPTAVITNLPVNSWDLNLDYWNNGCPGKIEIWRNLSLAREYLVAYTVALGKELSPEVPLLFNDTPNS

SEQ ID NO: 21089 - protein, 85 aa, unidentified
  REGION 1..85: note = Description of Unknown:cds_NZ_WFIY01000004.1_cds_WP_155863229.1_1176 target sequence
TNLLYSLWNYLYIAEGSDWTWQTGAPAHGPAWFKEQALLYTSIIINTVKSQFSKINIECIIEGFNGVVIIINNGLQYKITLNVVA

SEQ ID NO: 21090 - protein, 85 aa, unidentified
  REGION 1..85: note = Description of Unknown:cds_NZ_WFIY01000004.1_cds_WP_155863229.1_1176 target sequence
NNGTYCVCKTVKLYPGINVVPLEGISGKIEVCLYSPVTSGDVGDVIIPINHHGFLIQKTTVEQGLCCIKVDKVEYNTQPKFILLP

SEQ ID NO: 21091 - protein, 85 aa, unidentified
  REGION 1..85: note = Description of Unknown:cds_NZ_WFIY01000004.1_cds_WP_155864199.1_2162 target sequence
SEFVLNYLDLLKETHPMFRYPLLTAGDYEPYVHQSEMFYRILARNPSRFLIADDVGLGKTIEGIMIMDQLIKLRGVKRVLLVVPK

SEQ ID NO: 21092 - protein, 85 aa, unidentified
  REGION 1..85: note = Description of Unknown:cds_NZ_WFIY01000004.1_cds_WP_155864199.1_2162 target sequence
VLVNQWVYELRRFSREWNLSVFEYDQSSSMDENGIYVVSIDTLKRKNHLEKFLSLNWDLILVDEIHKVGVIGNRENQRYKAMASL

SEQ ID NO: 21093 - protein, 85 aa, unidentified
  REGION 1..85: note = Description of Unknown:cds_NZ_WFIY01000004.1_cds_WP_155864199.1_2162 target sequence
VSKNPNTHFLGMTATPHKGNDNDYLKRLVLIDPYLRDPNDQILSGTVRAITLKRNKDNVNKVYEQDDIFPKAIFIQYLAEPTEDE

SEQ ID NO: 21094 - protein, 85 aa, unidentified
  REGION 1..85: note = Description of Unknown:cds_NZ_WFIY01000004.1_cds_WP_155864199.1_2162 target sequence
KNYYTLIRDLSLSILKEYYNLINKQPKGLQLLAFIIGRRSLSSPWAGLRTLEHIIENRVPEKNIDEQEVLEEAEEYAEEEETEEV

SEQ ID NO: 21095 - protein, 85 aa, unidentified
  REGION 1..85: note = Description of Unknown:cds_NZ_WFIY01000004.1_cds_WP_155864199.1_2162 target sequence
EPDELAEKLTKINAPFLQRFKDYIDKLIESAKKVMENDTRIKSVVELVKSHLEKGDKVIVFTEYKDTANYIQKKLKESLNLSEDE

SEQ ID NO: 21096 - protein, 85 aa, unidentified
  REGION 1..85: note = Description of Unknown:cds_NZ_WFIY01000004.1_cds_WP_155864199.1_2162 target sequence
IEIASSETVSKKGIEHFKKWIAEKGRKVLVATDVASEGLNLQSANVIIHYEIPLSIVRFEQRNGRVWRLKQFKPVYIYYVSLNVK

SEQ ID NO: 21097 - protein, 85 aa, unidentified
  REGION 1..85: note = Description of Unknown:cds_NZ_WFIY01000004.1_cds_WP_155864199.1_2162 target sequence
LEQALLENYYNKLLSITRGTGSNSKITDALIYKGLTSKAVFDLTEEKEDIPIYALYNDPEKNEKITPMKIWEAALQDRLDDVVRQ

SEQ ID NO: 21098 - protein, 85 aa, unidentified
  REGION 1..85: note = Description of Unknown:cds_NZ_WFIY01000004.1_cds_WP_155864199.1_2162 target sequence
MIKRIKIVKDAMKKFALFEKMHGAIITEIDKVRSISGFRNRKELKEAIEAFLKEFVKRQGGTFDNNSIIIRSKQIIKSFDENRIG

SEQ ID NO: 21099 - protein, 85 aa, unidentified
  REGION 1..85: note = Description of Unknown:cds_NZ_WFIY01000004.1_cds_WP_155864199.1_2162 target sequence
KDIYLLYSIIKEFARDYTRGFVVSDALDYNVYLIKAEVRDKDGKKLIEIPLIVNSKGDIISHKDFFEKTLPQLLSGNYLYADEVV

SEQ ID NO: 21100 - protein, 85 aa, unidentified
  REGION 1..85: note = Description of Unknown:cds_NZ_WFIY01000004.1_cds_WP_155864199.1_2162 target sequence
PIGNSWKFKVINYVMDNLYALEQQFVTYRKSRGIRDHWFPDNRNDFKVNVNILGGIIGVKGQANDVEKEVIEALQKLGWKVSQGS

SEQ ID NO: 21101 - protein, 84 aa, unidentified
  REGION 1..84: note = Description of Unknown:cds_NZ_WFIY01000004.1_cds_WP_155864199.1_2162 target sequence
FKVNVNILGGIIGVKGQANDVEKEVIEALQKLGWKVSQGSEVRIEKPGEVRYIKVIKPLEVFNKGKNWVYTYVNDALVGVRGDV

SEQ ID NO: 21102 - protein, 85 aa, unidentified
  REGION 1..85: note = Description of Unknown:cds_NZ_WFIY01000004.1_cds_WP_155864199.1_2162 target sequence
YEPYVHQSEMFYRILARNPSRFLIADDVGLGKTIEGIMIMDQLIKLRGVKRVLLVVPKVLVNQWVYELRRFSREWNLSVFEYDQS

SEQ ID NO: 21103 - protein, 85 aa, unidentified
  REGION 1..85: note = Description of Unknown:cds_NZ_WFIY01000004.1_cds_WP_155864199.1_2162 target sequence
SSMDENGIYVVSIDTLKRKNHLEKFLSLNWDLILVDEIHKVGVIGNRENQRYKAMASLVSKNPNTHFLGMTATPHKGNDNDYLKR

SEQ ID NO: 21104 - protein, 85 aa, unidentified
  REGION 1..85: note = Description of Unknown:cds_NZ_WFIY01000004.1_cds_WP_155864199.1_2162 target sequence
LVLIDPYLRDPNDQILSGTVRAITLKRNKDNVNKVYEQDDIFPKAIFIQYLAEPTEDEKNYYTLIRDLSLSILKEYYNLINKQPK

SEQ ID NO: 21105 - protein, 85 aa, unidentified
  REGION 1..85: note = Description of Unknown:cds_NZ_WFIY01000004.1_cds_WP_155864199.1_2162 target sequence
GLQLLAFIIGRRSLSSPWAGLRTLEHIIENRVPEKNIDEQEVLEEAEEYAEEEETEEVEPDELAEKLTKINAPFLQRFKDYIDKL

SEQ ID NO: 21106 - protein, 85 aa, unidentified
  REGION 1..85: note = Description of Unknown:cds_NZ_WFIY01000004.1_cds_WP_155864199.1_2162 target sequence
IESAKKVMENDTRIKSVVELVKSHLEKGDKVIVFTEYKDTANYIQKKLKESLNLSEDEIEIASSETVSKKGIEHFKKWIAEKGRK

SEQ ID NO: 21107 - protein, 85 aa, unidentified
  REGION 1..85: note = Description of Unknown:cds_NZ_WFIY01000004.1_cds_WP_155864199.1_2162 target sequence
VLVATDVASEGLNLQSANVIIHYEIPLSIVRFEQRNGRVWRLKQFKPVYIYYVSLNVKLEQALLENYYNKLLSITRGTGSNSKIT

SEQ ID NO: 21108 - protein, 85 aa, unidentified
  REGION 1..85: note = Description of Unknown:cds_NZ_WFIY01000004.1_cds_WP_155864199.1_2162 target sequence
DALIYKGLTSKAVFDLTEEKEDIPIYALYNDPEKNEKITPMKIWEAALQDRLDDVVRQMIKRIKIVKDAMKKFALFEKMHGAIIT

SEQ ID NO: 21109 - protein, 85 aa, unidentified
  REGION 1..85: note = Description of Unknown:cds_NZ_WFIY01000004.1_cds_WP_155864199.1_2162 target sequence
EIDKVRSISGFRNRKELKEAIEAFLKEFVKRQGGTFDNNSIIIRSKQIIKSFDENRIGKDIYLLYSIIKEFARDYTRGFVVSDAL

SEQ ID NO: 21110 - protein, 85 aa, unidentified
  REGION 1..85: note = Description of Unknown:cds_NZ_WFIY01000004.1_cds_WP_155864199.1_2162 target sequence
DYNVYLIKAEVRDKDGKKLIEIPLIVNSKGDIISHKDFFEKTLPQLLSGNYLYADEVVPIGNSWKFKVINYVMDNLYALEQQFVT

SEQ ID NO: 21111 - protein, 85 aa, unidentified
  REGION 1..85: note = Description of Unknown:cds_NZ_WFIY01000004.1_cds_WP_155864199.1_2162 target sequence
YRKSRGIRDHWFPDNRNDFKVNVNILGGIIGVKGQANDVEKEVIEALQKLGWKVSQGSEVRIEKPGEVRYIKVIKPLEVFNKGKN

SEQ ID NO: 21112 - protein, 85 aa, unidentified
  REGION 1..85: note = Description of Unknown:cds_NC_007409.1_cds_YP_319892.1_61 target sequence
SVDQDVVDEAYQYYAEDKRQISDKARKFIEFIDPILRKYSKLFRYYQNFAKFTLEYYYKLFYPFLEKLPENVVEDLKRQIINEIM

SEQ ID NO: 21113 - protein, 85 aa, unidentified
  REGION 1..85: note = Description of Unknown:cds_NC_007409.1_cds_YP_319892.1_61 target sequence
SNPNQSIRDVLAKAVQKEAQRIEEQLQRRPQRAKQQPQKTKTSEVANQRVSRSAENQGKRGNEEKQQQKTPGKTEEASGAEQESG

SEQ ID NO: 21114 - protein, 85 aa, unidentified
  REGION 1..85: note = Description of Unknown:cds_NC_007409.1_cds_YP_319892.1_61 target sequence
EEGNQQEESGEEQEGVKGSRSKQREEQEEEVSESEGKQSEESGESESEEGQSSEETQLSSSGEGNQQEEGKGGEGEGAETEEGGR

SEQ ID NO: 21115 - protein, 85 aa, unidentified
  REGION 1..85: note = Description of Unknown:cds_NC_007409.1_cds_YP_319892.1_61 target sequence
RGEAESEQEEGEETGNGQESSGEAQNGGESGESEGEITESESASEEQTGSKGKSGQQGEEGQQQSGSEGEEGAEQEESGEEGNQQ

SEQ ID NO: 21116 - protein, 85 aa, unidentified
  REGION 1..85: note = Description of Unknown:cds_NC_007409.1_cds_YP_319892.1_61 target sequence
EGVGKQKKRSSRGQESEAGEEPGSAPEETQLSSGEEEAGQESGGETGSEQGFGEEGEQGQESETTGKQKGKKREATESGGGAESE

SEQ ID NO: 21117 - protein, 85 aa, unidentified
  REGION 1..85: note = Description of Unknown:cds_NC_007409.1_cds_YP_319892.1_61 target sequence
SEEGQSPEETQEGGEGGAETEEGGQGSEAEGTAAEGEVGQPSEQGVSSSTGSGQRSEGSEASEEQNAGESGEGSESEGAESIAGE

SEQ ID NO: 21118 - protein, 85 aa, unidentified
  REGION 1..85: note = Description of Unknown:cds_NC_007409.1_cds_YP_319892.1_61 target sequence
QTGSSSESAGSEQLGSQQGELSLEEGGRGYAHGDEDLLSSPQEINSILQTLSQLRDTVQQLRNYDFYSNAIDERTFDDQNVSEHR

SEQ ID NO: 21119 - protein, 85 aa, unidentified
  REGION 1..85: note = Description of Unknown:cds_NC_007409.1_cds_YP_319892.1_61 target sequence
KEKEIENLYDTANNVQKLLKDLNVSEGEQNKILQELVTQYSLRRLLGNIATKYKGLLDFVRNKGESEVESRHGSGKGPSSTMGDD

SEQ ID NO: 21120 - protein, 85 aa, unidentified
  REGION 1..85: note = Description of Unknown:cds_NC_007409.1_cds_YP_319892.1_61 target sequence
LSRLFIKEYAKLSNPIQQKMFLLDYLNGALSIHKSEEKKQGDFLFVIDSSGSMEGNKIATALAIPLVTYKKYKGKRNILVETFSD

SEQ ID NO: 21121 - protein, 85 aa, unidentified
  REGION 1..85: note = Description of Unknown:cds_NC_007409.1_cds_YP_319892.1_61 target sequence
EPSPIYNIKNIANVLGSMKFGGTNIGSAVLYALKNIDKPDSDYDRKLRESLRKTRTLILLTDGEDEIPDDIAREINSLKKKNKVE

SEQ ID NO: 21122 - protein, 84 aa, unidentified
  REGION 1..84: note = Description of Unknown:cds_NC_007409.1_cds_YP_319892.1_61 target sequence
YDRKLRESLRKTRTLILLTDGEDEIPDDIAREINSLKKKNKVELLCYGIDLGERGLKTLKEICDEVYAVGSNNFGNIVLKRLVH

SEQ ID NO: 21123 - protein, 85 aa, unidentified
  REGION 1..85: note = Description of Unknown:cds_NC_007409.1_cds_YP_319892.1_61 target sequence
FIEFIDPILRKYSKLFRYYQNFAKFTLEYYYKLFYPFLEKLPENVVEDLKRQIINEIMSNPNQSIRDVLAKAVQKEAQRIEEQLQ

SEQ ID NO: 21124 - protein, 85 aa, unidentified
  REGION 1..85: note = Description of Unknown:cds_NC_007409.1_cds_YP_319892.1_61 target sequence
RRPQRAKQQPQKTKTSEVANQRVSRSAENQGKRGNEEKQQQKTPGKTEEASGAEQESGEEGNQQEESGEEQEGVKGSRSKQREEQ

SEQ ID NO: 21125 - protein, 85 aa, unidentified
  REGION 1..85: note = Description of Unknown:cds_NC_007409.1_cds_YP_319892.1_61 target sequence
EEEVSESEGKQSEESGESESEEGQSSEETQLSSSGEGNQQEEGKGGEGEGAETEEGGRRGEAESEQEEGEETGNGQESSGEAQNG

SEQ ID NO: 21126 - protein, 85 aa, unidentified
  REGION 1..85: note = Description of Unknown:cds_NC_007409.1_cds_YP_319892.1_61 target sequence
GESGESEGEITESESASEEQTGSKGKSGQQGEEGQQQSGSEGEEGAEQEESGEEGNQQEGVGKQKKRSSRGQESEAGEEPGSAPE

SEQ ID NO: 21127 - protein, 85 aa, unidentified
  REGION 1..85: note = Description of Unknown:cds_NC_007409.1_cds_YP_319892.1_61 target sequence
ETQLSSGEEEAGQESGGETGSEQGFGEEGEQGQESETTGKQKGKKREATESGGGAESESEEGQSPEETQEGGEGGAETEEGGQGS

SEQ ID NO: 21128 - protein, 85 aa, unidentified
  REGION 1..85: note = Description of Unknown:cds_NC_007409.1_cds_YP_319892.1_61 target sequence
EAEGTAAEGEVGQPSEQGVSSSTGSGQRSEGSEASEEQNAGESGEGSESEGAESIAGEQTGSSSESAGSEQLGSQQGELSLEEGG

SEQ ID NO: 21129 - protein, 85 aa, unidentified
  REGION 1..85: note = Description of Unknown:cds_NC_007409.1_cds_YP_319892.1_61 target sequence
RGYAHGDEDLLSSPQEINSILQTLSQLRDTVQQLRNYDFYSNAIDERTFDDQNVSEHRKEKEIENLYDTANNVQKLLKDLNVSEG

SEQ ID NO: 21130 - protein, 85 aa, unidentified
  REGION 1..85: note = Description of Unknown:cds_NC_007409.1_cds_YP_319892.1_61 target sequence
EQNKILQELVTQYSLRRLLGNIATKYKGLLDFVRNKGESEVESRHGSGKGPSSTMGDDLSRLFIKEYAKLSNPIQQKMFLLDYLN

SEQ ID NO: 21131 - protein, 85 aa, unidentified
  REGION 1..85: note = Description of Unknown:cds_NC_007409.1_cds_YP_319892.1_61 target sequence
GALSIHKSEEKKQGDFLFVIDSSGSMEGNKIATALAIPLVTYKKYKGKRNILVETFSDEPSPIYNIKNIANVLGSMKFGGTNIGS

SEQ ID NO: 21132 - protein, 85 aa, unidentified
  REGION 1..85: note = Description of Unknown:cds_NC_007409.1_cds_YP_319892.1_61 target sequence
AVLYALKNIDKPDSDYDRKLRESLRKTRTLILLTDGEDEIPDDIAREINSLKKKNKVELLCYGIDLGERGLKTLKEICDEVYAVG

SEQ ID NO: 21133 - protein, 85 aa, unidentified
  REGION 1..85: note = Description of Unknown:cds_NZ_WFIY01000004.1_cds_WP_155862631.1_411 target sequence
LKEYFFHLYIVAKQITLFDFSIKQESHDEGKGVEKEKEEVQQLEVENKRGQVEWIKEAKEGRTYYLLGVDYDGKKGKAVMKLYDP

SEQ ID NO: 21134 - protein, 85 aa, unidentified
  REGION 1..85: note = Description of Unknown:cds_NZ_WFIY01000004.1_cds_WP_155862631.1_411 target sequence
ETQEAAILYDNTGHKSYFLVDLDPEKVRKIAKIIRDPSFDHLEVVTKIDPYTWKPITLTKIVVKDPLAVRRMRNYVPKAYEAHIK

SEQ ID NO: 21135 - protein, 85 aa, unidentified
  REGION 1..85: note = Description of Unknown:cds_NZ_WFIY01000004.1_cds_WP_155862631.1_411 target sequence
YFNNYIYDMQLIPGMPYKVNKGRLEAIIPKVDTEEVTKAFQDSDEVTKEMALQWAPLFESEIPSIKRVAVDIEVFTPMKGRVPDP

SEQ ID NO: 21136 - protein, 85 aa, unidentified
  REGION 1..85: note = Description of Unknown:cds_NZ_WFIY01000004.1_cds_WP_155862631.1_411 target sequence
YKAEFPIISISLAGSDGLKKVLVIEREDVGEGNTNNEGISVEKFKTEREMLSRFFEIVKTYPLLLTFNGDDFDVPYIYFRSLKLG

SEQ ID NO: 21137 - protein, 85 aa, unidentified
  REGION 1..85: note = Description of Unknown:cds_NZ_WFIY01000004.1_cds_WP_155862631.1_411 target sequence
FFPEEIPFDIGSRETKFLPGFHIDLYRFFFNKAVRNYAFEGKYSEYNLDAVASALLGMSKVKVDSLISDLDISKLIQYNFRDSEI

SEQ ID NO: 21138 - protein, 85 aa, unidentified
  REGION 1..85: note = Description of Unknown:cds_NZ_WFIY01000004.1_cds_WP_155862631.1_411 target sequence
TLKLTTFNNDLTWKLIVLFARISKLGIEELTRTEISAWVKNLYYWEHRRRNWLIPLKEEILERSSTLKTSAIIKGKGYKGAVVID

SEQ ID NO: 21139 - protein, 85 aa, unidentified
  REGION 1..85: note = Description of Unknown:cds_NZ_WFIY01000004.1_cds_WP_155862631.1_411 target sequence
PPVGVFFNVTVLDFASLYPSIIRTWNLSYETVDIENCKNVVDVKDETGQVLHHVCMDRPGITAVITGLLRDFRVKIYKKKSKQKD

SEQ ID NO: 21140 - protein, 85 aa, unidentified
  REGION 1..85: note = Description of Unknown:cds_NZ_WFIY01000004.1_cds_WP_155862631.1_411 target sequence
LDPERKMMYEVVQRGMKVFINATYGVFGAESFPLYAPAVAESVTALGRYVITSTVKKAQEVGTRVLYGDTDSLFLYQPTQEQLNT

SEQ ID NO: 21141 - protein, 85 aa, unidentified
  REGION 1..85: note = Description of Unknown:cds_NZ_WFIY01000004.1_cds_WP_155862631.1_411 target sequence
IIKWVKENFKLDLELDKSYRFVAFSGLKKNYFGVFTDSTFDIKGMLAKKRNTPEFLKEAFKEVKDLMGTINSPSDLEKVKKEIAE

SEQ ID NO: 21142 - protein, 85 aa, unidentified
  REGION 1..85: note = Description of Unknown:cds_NZ_WFIY01000004.1_cds_WP_155862631.1_411 target sequence
KVKSVYDKLKNKEYNLDELAFRVMLSKDLDSYTKNTPQHVKAAMQLRALGIQVLPRDMILFVKVKSKEGVKPVQLAKLTEIDLDK

SEQ ID NO: 21143 - protein, 84 aa, unidentified
  REGION 1..84: note = Description of Unknown:cds_NZ_WFIY01000004.1_cds_WP_155862631.1_411 target sequence
PQHVKAAMQLRALGIQVLPRDMILFVKVKSKEGVKPVQLAKLTEIDLDKYYDAVKSTFEQLLKSLGISWDEIASTISIDSFFKF

SEQ ID NO: 21144 - protein, 85 aa, unidentified
  REGION 1..85: note = Description of Unknown:cds_NZ_WFIY01000004.1_cds_WP_155862631.1_411 target sequence
DEGKGVEKEKEEVQQLEVENKRGQVEWIKEAKEGRTYYLLGVDYDGKKGKAVMKLYDPETQEAAILYDNTGHKSYFLVDLDPEKV

SEQ ID NO: 21145 - protein, 85 aa, unidentified
  REGION 1..85: note = Description of Unknown:cds_NZ_WFIY01000004.1_cds_WP_155862631.1_411 target sequence
RKIAKIIRDPSFDHLEVVTKIDPYTWKPITLTKIVVKDPLAVRRMRNYVPKAYEAHIKYFNNYIYDMQLIPGMPYKVNKGRLEAI

SEQ ID NO: 21146 - protein, 85 aa, unidentified
  REGION 1..85: note = Description of Unknown:cds_NZ_WFIY01000004.1_cds_WP_155862631.1_411 target sequence
IPKVDTEEVTKAFQDSDEVTKEMALQWAPLFESEIPSIKRVAVDIEVFTPMKGRVPDPYKAEFPIISISLAGSDGLKKVLVIERE

SEQ ID NO: 21147 - protein, 85 aa, unidentified
  REGION 1..85: note = Description of Unknown:cds_NZ_WFIY01000004.1_cds_WP_155862631.1_411 target sequence
DVGEGNTNNEGISVEKFKTEREMLSRFFEIVKTYPLLLTFNGDDFDVPYIYFRSLKLGFFPEEIPFDIGSRETKFLPGFHIDLYR

SEQ ID NO: 21148 - protein, 85 aa, unidentified
  REGION 1..85: note = Description of Unknown:cds_NZ_WFIY01000004.1_cds_WP_155862631.1_411 target sequence
FFFNKAVRNYAFEGKYSEYNLDAVASALLGMSKVKVDSLISDLDISKLIQYNFRDSEITLKLTTFNNDLTWKLIVLFARISKLGI

SEQ ID NO: 21149 - protein, 85 aa, unidentified
  REGION 1..85: note = Description of Unknown:cds_NZ_WFIY01000004.1_cds_WP_155862631.1_411 target sequence
EELTRTEISAWVKNLYYWEHRRRNWLIPLKEEILERSSTLKTSAIIKGKGYKGAVVIDPPVGVFFNVTVLDFASLYPSIIRTWNL

SEQ ID NO: 21150 - protein, 85 aa, unidentified
  REGION 1..85: note = Description of Unknown:cds_NZ_WFIY01000004.1_cds_WP_155862631.1_411 target sequence
SYETVDIENCKNVVDVKDETGQVLHHVCMDRPGITAVITGLLRDFRVKIYKKKSKQKDLDPERKMMYEVVQRGMKVFINATYGVF

SEQ ID NO: 21151 - protein, 85 aa, unidentified
  REGION 1..85: note = Description of Unknown:cds_NZ_WFIY01000004.1_cds_WP_155862631.1_411 target sequence
GAESFPLYAPAVAESVTALGRYVITSTVKKAQEVGTRVLYGDTDSLFLYQPTQEQLNTIIKWVKENFKLDLELDKSYRFVAFSGL

SEQ ID NO: 21152 - protein, 85 aa, unidentified
  REGION 1..85: note = Description of Unknown:cds_NZ_WFIY01000004.1_cds_WP_155862631.1_411 target sequence
KKNYFGVFTDSTFDIKGMLAKKRNTPEFLKEAFKEVKDLMGTINSPSDLEKVKKEIAEKVKSVYDKLKNKEYNLDELAFRVMLSK

SEQ ID NO: 21153 - protein, 85 aa, unidentified
  REGION 1..85: note = Description of Unknown:cds_NZ_WFIY01000004.1_cds_WP_155862631.1_411 target sequence
DLDSYTKNTPQHVKAAMQLRALGIQVLPRDMILFVKVKSKEGVKPVQLAKLTEIDLDKYYDAVKSTFEQLLKSLGISWDEIASTI

SEQ ID NO: 21154 - protein, 85 aa, unidentified
  REGION 1..85: note = Description of Unknown:cds_NC_040413.1_cds_YP_009551539.1_2 target sequence
AYRKRGARRETNLKQDERMQEKEDSKNINNDSPKSQLSEKVLSKKEEIVTDTQEEIKITEEIKKSNREESKQLLEILRTKEEHQK

SEQ ID NO: 21155 - protein, 85 aa, unidentified
  REGION 1..85: note = Description of Unknown:cds_NC_040413.1_cds_YP_009551539.1_2 target sequence
EIQYEILQKTIPTFEPKESILKKLEEIKPEQAKKQTKLFRIFEPKQLPIYRPNGEKELRNRWYWKLKRDTLPDGDYDVREYFLNL

SEQ ID NO: 21156 - protein, 85 aa, unidentified
  REGION 1..85: note = Description of Unknown:cds_NC_040413.1_cds_YP_009551539.1_2 target sequence
YDQVLMEMPDYLLLKDMAVDNKNSRDAGKVVDEETARICDAIFQDEETEGFIRRFISEMRQRVQADRNVVNYPSILHPIDYAFNE

SEQ ID NO: 21157 - protein, 85 aa, unidentified
  REGION 1..85: note = Description of Unknown:cds_NC_040413.1_cds_YP_009551539.1_2 target sequence
YFLQHQLVEPLNNDIIFNYIPERIRNDVNYILNMDRNLPSTARYIRPNLLQDRLNLHDNFESLWDTITTSNYILARSVIPDLKEL

SEQ ID NO: 21158 - protein, 85 aa, unidentified
  REGION 1..85: note = Description of Unknown:cds_NC_040413.1_cds_YP_009551539.1_2 target sequence
VSTEAQIQKMSQDLQLEALTIQSETQFLTGINSQAANDCFKTLLAAMLSQRTMSLDFVTTNYMSLISGMWLLTFVPNDMFIRESL

SEQ ID NO: 21159 - protein, 85 aa, unidentified
  REGION 1..85: note = Description of Unknown:cds_NC_040413.1_cds_YP_009551539.1_2 target sequence
VACQLAIINTIVYPAFGMQRMHYRNGDPLTPFQIAEQQIQNFQVANWLHFVNNNQFRQVVIDGVLNQVLNDNVRSGQVINQLMEA

SEQ ID NO: 21160 - protein, 85 aa, unidentified
  REGION 1..85: note = Description of Unknown:cds_NC_040413.1_cds_YP_009551539.1_2 target sequence
LMQLSRQQFPTMPVDYKRSIQRGILLLSNRLGQLVDLTRLLSYNYETLMACITMNMQHVQTLTTEKLQLTSVTSLCMLIGNATVI

SEQ ID NO: 21161 - protein, 85 aa, unidentified
  REGION 1..85: note = Description of Unknown:cds_NC_040413.1_cds_YP_009551539.1_2 target sequence
PSPQTLFHYYNINVNFHSNYNERINDAVAVITAANRLNLYQKKMKAIVEDFLKRLQIFDVARVPDDQMYRLRDRLRTLPVEIRRL

SEQ ID NO: 21162 - protein, 85 aa, unidentified
  REGION 1..85: note = Description of Unknown:cds_NC_040413.1_cds_YP_009551539.1_2 target sequence
DIFNLILMNMEQIERASDKIAQGVVIAYREMQLERDEMYGFVNIARNLDGFQQINLEELMRSGDYAQITNMLLNNQPVALVGALP

SEQ ID NO: 21163 - protein, 85 aa, unidentified
  REGION 1..85: note = Description of Unknown:cds_NC_040413.1_cds_YP_009551539.1_2 target sequence
FNTESSVISLIAKLDATVFAQIVKLRKVDTLKPILYKINSDSNDFYLVANYDWVPTSTTKVYKQVPQQFDFRASMHMLTSNLTFT

SEQ ID NO: 21164 - protein, 84 aa, unidentified
  REGION 1..84: note = Description of Unknown:cds_NC_040413.1_cds_YP_009551539.1_2 target sequence
PILYKINSDSNDFYLVANYDWVPTSTTKVYKQVPQQFDFRASMHMLTSNLTFTVYSDLLAFVSADTVEPINAVAFDHMRIMNEL

SEQ ID NO: 21165 - protein, 85 aa, unidentified
  REGION 1..85: note = Description of Unknown:cds_NC_040413.1_cds_YP_009551539.1_2 target sequence
INNDSPKSQLSEKVLSKKEEIVTDTQEEIKITEEIKKSNREESKQLLEILRTKEEHQKEIQYEILQKTIPTFEPKESILKKLEEI

SEQ ID NO: 21166 - protein, 85 aa, unidentified
  REGION 1..85: note = Description of Unknown:cds_NC_040413.1_cds_YP_009551539.1_2 target sequence
KPEQAKKQTKLFRIFEPKQLPIYRPNGEKELRNRWYWKLKRDTLPDGDYDVREYFLNLYDQVLMEMPDYLLLKDMAVDNKNSRDA

SEQ ID NO: 21167 - protein, 85 aa, unidentified
  REGION 1..85: note = Description of Unknown:cds_NC_040413.1_cds_YP_009551539.1_2 target sequence
GKVVDEETARICDAIFQDEETEGFIRRFISEMRQRVQADRNVVNYPSILHPIDYAFNEYFLQHQLVEPLNNDIIFNYIPERIRND

SEQ ID NO: 21168 - protein, 85 aa, unidentified
  REGION 1..85: note = Description of Unknown:cds_NC_040413.1_cds_YP_009551539.1_2 target sequence
VNYILNMDRNLPSTARYIRPNLLQDRLNLHDNFESLWDTITTSNYILARSVIPDLKELVSTEAQIQKMSQDLQLEALTIQSETQF

SEQ ID NO: 21169 - protein, 85 aa, unidentified
  REGION 1..85: note = Description of Unknown:cds_NC_040413.1_cds_YP_009551539.1_2 target sequence
LTGINSQAANDCFKTLLAAMLSQRTMSLDFVTTNYMSLISGMWLLTFVPNDMFIRESLVACQLAIINTIVYPAFGMQRMHYRNGD

SEQ ID NO: 21170 - protein, 85 aa, unidentified
  REGION 1..85: note = Description of Unknown:cds_NC_040413.1_cds_YP_009551539.1_2 target sequence
PLTPFQIAEQQIQNFQVANWLHFVNNNQFRQVVIDGVLNQVLNDNVRSGQVINQLMEALMQLSRQQFPTMPVDYKRSIQRGILLL

SEQ ID NO: 21171 - protein, 85 aa, unidentified
  REGION 1..85: note = Description of Unknown:cds_NC_040413.1_cds_YP_009551539.1_2 target sequence
SNRLGQLVDLTRLLSYNYETLMACITMNMQHVQTLTTEKLQLTSVTSLCMLIGNATVIPSPQTLFHYYNINVNFHSNYNERINDA

SEQ ID NO: 21172 - protein, 85 aa, unidentified
  REGION 1..85: note = Description of Unknown:cds_NC_040413.1_cds_YP_009551539.1_2 target sequence
VAVITAANRLNLYQKKMKAIVEDFLKRLQIFDVARVPDDQMYRLRDRLRTLPVEIRRLDIFNLILMNMEQIERASDKIAQGVVIA

SEQ ID NO: 21173 - protein, 85 aa, unidentified
  REGION 1..85: note = Description of Unknown:cds_NC_040413.1_cds_YP_009551539.1_2 target sequence
YREMQLERDEMYGFVNIARNLDGFQQINLEELMRSGDYAQITNMLLNNQPVALVGALPFNTESSVISLIAKLDATVFAQIVKLRK

SEQ ID NO: 21174 - protein, 85 aa, unidentified
  REGION 1..85: note = Description of Unknown:cds_NC_040413.1_cds_YP_009551539.1_2 target sequence
VDTLKPILYKINSDSNDFYLVANYDWVPTSTTKVYKQVPQQFDFRASMHMLTSNLTFTVYSDLLAFVSADTVEPINAVAFDHMRI

SEQ ID NO: 21175 - protein, 85 aa, unidentified
  REGION 1..85: note = Description of Unknown:cds_NC_011506.2_cds_YP_002302226.1_2 target sequence
AYRKRGARRETNLKQDERMQEKEDSKNINNDSPKSQLSEKVLSKKEEIITDNQEEVKISDEVKKSNKEESKQLLEVLKTKEEHQK

SEQ ID NO: 21176 - protein, 85 aa, unidentified
  REGION 1..85: note = Description of Unknown:cds_NC_011506.2_cds_YP_002302226.1_2 target sequence
EVQYEILQKTIPTFEPKESILKKLEDIKPEQAKKQTKLFRIFEPKQLPIYRANGERELRNRWYWKLKRDTLPDGDYDVREYFLNL

SEQ ID NO: 21177 - protein, 85 aa, unidentified
  REGION 1..85: note = Description of Unknown:cds_NC_011506.2_cds_YP_002302226.1_2 target sequence
YDQVLMEMPDYLLLKDMAVENKNSRDAGKVVDSETAAICDAIFQDEETEGAVRRFIAEMRQRVQADRNVVNYPSILHPIDHAFNE

SEQ ID NO: 21178 - protein, 85 aa, unidentified
  REGION 1..85: note = Description of Unknown:cds_NC_011506.2_cds_YP_002302226.1_2 target sequence
YFLQHQLVEPLNNDIIFNYIPERIRNDVNYILNMDRNLPSTARYIRPNLLQDRLNLHDNFESLWDTITTSNYILARSVVPDLKEL

SEQ ID NO: 21179 - protein, 85 aa, unidentified
  REGION 1..85: note = Description of Unknown:cds_NC_011506.2_cds_YP_002302226.1_2 target sequence
VSTEAQIQKMSQDLQLEALTIQSETQFLTGINSQAANDCFKTLIAAMLSQRTMSLDFVTTNYMSLISGMWLLTVIPNDMFIRESL

SEQ ID NO: 21180 - protein, 85 aa, unidentified
  REGION 1..85: note = Description of Unknown:cds_NC_011506.2_cds_YP_002302226.1_2 target sequence
VACQLAIINTIVYPAFGMQRMHYRNGDPQTPFQIAEQQIQNFQVANWLHFVNYNQFRQVVIDGVLNQVLNDNIRNGHVVNQLMEA

SEQ ID NO: 21181 - protein, 85 aa, unidentified; identical to SEQ ID NO: 21160
  REGION 1..85: note = Description of Unknown:cds_NC_011506.2_cds_YP_002302226.1_2 target sequence

SEQ ID NO: 21182 - protein, 85 aa, unidentified
  REGION 1..85: note = Description of Unknown:cds_NC_011506.2_cds_YP_002302226.1_2 target sequence
PSPQTLFHYYNVNVNFHSNYNERINDAVAIITAANRLNLYQKKMKSIVEDFLKRLQIFDVARVPDDQMYRLRDRLRLLPVEIRRL

SEQ ID NO: 21183 - protein, 85 aa, unidentified
  REGION 1..85: note = Description of Unknown:cds_NC_011506.2_cds_YP_002302226.1_2 target sequence
DIFNLIAMNMEQIERASDKIAQGVIIAYRDMQLERDEMYGYVNIARNLDGFQQINLEELMRSGDYAQITNMLLNNQPVALVGALP

SEQ ID NO: 21184 - protein, 85 aa, unidentified
  REGION 1..85: note = Description of Unknown:cds_NC_011506.2_cds_YP_002302226.1_2 target sequence
FITDSSVISLIAKLDATVFAQIVKLRKVDTLKPILYKINSDSNDFYLVANYDWIPTSTTKVYKQVPQQFDFRASMHMLTSNLTFT

SEQ ID NO: 21185 - protein, 84 aa, unidentified
  REGION 1..84: note = Description of Unknown:cds_NC_011506.2_cds_YP_002302226.1_2 target sequence
PILYKINSDSNDFYLVANYDWIPTSTTKVYKQVPQQFDFRASMHMLTSNLTFTVYSDLLAFVSADTVEPINAVAFDNMRIMNEL

SEQ ID NO: 21186 - protein, 85 aa, unidentified
  REGION 1..85: note = Description of Unknown:cds_NC_011506.2_cds_YP_002302226.1_2 target sequence
INNDSPKSQLSEKVLSKKEEIITDNQEEVKISDEVKKSNKEESKQLLEVLKTKEEHQKEVQYEILQKTIPTFEPKESILKKLEDI

SEQ ID NO: 21187 - protein, 85 aa, unidentified
  REGION 1..85: note = Description of Unknown:cds_NC_011506.2_cds_YP_002302226.1_2 target sequence
KPEQAKKQTKLFRIFEPKQLPIYRANGERELRNRWYWKLKRDTLPDGDYDVREYFLNLYDQVLMEMPDYLLLKDMAVENKNSRDA

SEQ ID NO: 21188 - protein, 85 aa, unidentified
  REGION 1..85: note = Description of Unknown:cds_NC_011506.2_cds_YP_002302226.1_2 target sequence
GKVVDSETAAICDAIFQDEETEGAVRRFIAEMRQRVQADRNVVNYPSILHPIDHAFNEYFLQHQLVEPLNNDIIFNYIPERIRND

SEQ ID NO: 21189 - protein, 85 aa, unidentified
  REGION 1..85: note = Description of Unknown:cds_NC_011506.2_cds_YP_002302226.1_2 target sequence
VNYILNMDRNLPSTARYIRPNLLQDRLNLHDNFESLWDTITTSNYILARSVVPDLKELVSTEAQIQKMSQDLQLEALTIQSETQF

SEQ ID NO: 21190 - protein, 85 aa, unidentified
  REGION 1..85: note = Description of Unknown:cds_NC_011506.2_cds_YP_002302226.1_2 target sequence
LTGINSQAANDCFKTLIAAMLSQRTMSLDFVTTNYMSLISGMWLLTVIPNDMFIRESLVACQLAIINTIVYPAFGMQRMHYRNGD

SEQ ID NO: 21191 - protein, 85 aa, unidentified
  REGION 1..85: note = Description of Unknown:cds_NC_011506.2_cds_YP_002302226.1_2 target sequence
PQTPFQIAEQQIQNFQVANWLHFVNYNQFRQVVIDGVLNQVLNDNIRNGHVVNQLMEALMQLSRQQFPTMPVDYKRSIQRGILLL

SEQ ID NO: 21192 - protein, 85 aa, unidentified
  REGION 1..85: note = Description of Unknown:cds_NC_011506.2_cds_YP_002302226.1_2 target sequence
SNRLGQLVDLTRLLSYNYETLMACITMNMQHVQTLTTEKLQLTSVTSLCMLIGNATVIPSPQTLFHYYNVNVNFHSNYNERINDA

SEQ ID NO: 21193 - protein, 85 aa, unidentified
  REGION 1..85: note = Description of Unknown:cds_NC_011506.2_cds_YP_002302226.1_2 target sequence
VAIITAANRLNLYQKKMKSIVEDFLKRLQIFDVARVPDDQMYRLRDRLRLLPVEIRRLDIFNLIAMNMEQIERASDKIAQGVIIA

SEQ ID NO: 21194 - protein, 85 aa, unidentified
  REGION 1..85: note = Description of Unknown:cds_NC_011506.2_cds_YP_002302226.1_2 target sequence
YRDMQLERDEMYGYVNIARNLDGFQQINLEELMRSGDYAQITNMLLNNQPVALVGALPFITDSSVISLIAKLDATVFAQIVKLRK

SEQ ID NO: 21195 - protein, 85 aa, unidentified
  REGION 1..85: note = Description of Unknown:cds_NC_011506.2_cds_YP_002302226.1_2 target sequence
VDTLKPILYKINSDSNDFYLVANYDWIPTSTTKVYKQVPQQFDFRASMHMLTSNLTFTVYSDLLAFVSADTVEPINAVAFDNMRI

SEQ ID NO: 21196 - protein, 85 aa, unidentified
  REGION 1..85: note = Description of Unknown:cds_NZ_WFIY01000004.1_cds_WP_155862987.1_861 target sequence
SEKIIKGVKFGILSPDEIRKMSVTAIITSEVYDEDGTPIEGSVMDPRLGVIEPGQRCPTCGNMMGNCPGHFGHIELVKPVIHVGF

SEQ ID NO: 21197 - protein, 85 aa, unidentified
  REGION 1..85: note = Description of Unknown:cds_NZ_WFIY01000004.1_cds_WP_155862987.1_861 target sequence
VKHIYDLLRATCRRCGRIKLEDQELERYRRIYHAINKRWPSAAKRLVEHIKKSSMKAPVCPHCGEKQLKIKLEKPYNFYEERKEG

SEQ ID NO: 21198 - protein, 85 aa, unidentified
  REGION 1..85: note = Description of Unknown:cds_NZ_WFIY01000004.1_cds_WP_155862987.1_861 target sequence
VVRLTPVDIRDRLERIPDDDVELLGYDPKTSRPEWMILTVLPVPPITIRPSIMIENGIRAEDDLTHKLVDIVRINERLKESIDAG

SEQ ID NO: 21199 - protein, 85 aa, unidentified
  REGION 1..85: note = Description of Unknown:cds_NZ_WFIY01000004.1_cds_WP_155862987.1_861 target sequence
APQLIVEDLWDLLQYHVATYFDNEIPGLPTSKHRSGRPLRTLAQRLKGKEGRFRGNLSGKRVDFSSRTVISPDPNISIDEVGVPI

SEQ ID NO: 21200 - protein, 85 aa, unidentified
  REGION 1..85: note = Description of Unknown:cds_NZ_WFIY01000004.1_cds_WP_155862987.1_861 target sequence
DIAKILTVPERVTKWNIERMREYVLNGPDKWPGANYVIKPDGRRIDLRYVKDRKEFASTLAPGFIVERHLIDGDIVIFNRQPSLH

SEQ ID NO: 21201 - protein, 85 aa, unidentified
  REGION 1..85: note = Description of Unknown:cds_NZ_WFIY01000004.1_cds_WP_155862987.1_861 target sequence
RISMMAHKVRVLPGRTFRLNLLVCPPYNADFDGDEMNLHVPQSEEAIAEAKELMLVHKNILTPRYGGPIMGSAQDYISGAYLLTV

SEQ ID NO: 21202 - protein, 85 aa, unidentified
  REGION 1..85: note = Description of Unknown:cds_NZ_WFIY01000004.1_cds_WP_155862987.1_861 target sequence
KTTLLTEDEVQTILGVANISKDIGEPAILAPKRLYTGKQVVSLFLPEDFNYHGQANIASGPRLCTDEDCPHDSYIVIKNGKLLEG

SEQ ID NO: 21203 - protein, 85 aa, unidentified
  REGION 1..85: note = Description of Unknown:cds_NZ_WFIY01000004.1_cds_WP_155862987.1_861 target sequence
VFDKKALGNQQPESILHWLIREYPEDYGLWLMDNIFKVFIRYIEIHGLTMSINDVTISQEAMAKIAEKAKQADKQVQELIEKYEK

SEQ ID NO: 21204 - protein, 85 aa, unidentified
  REGION 1..85: note = Description of Unknown:cds_NZ_WFIY01000004.1_cds_WP_155862987.1_861 target sequence
GELEQIPGRTLEESLESYILDTLDKLRNDAGEIAAADLDPFNNVYIMARTGARGSVLNITQMAAMLGQQSVRGERISRGYYKRAL

SEQ ID NO: 21205 - protein, 85 aa, unidentified
  REGION 1..85: note = Description of Unknown:cds_NZ_WFIY01000004.1_cds_WP_155862987.1_861 target sequence
PHFKRDDISAEARGFIYSSFRSGLNPIELFFHAAAGREGLVDTAVRTSQSGYMQRRLINALSDLRVEYDGTVRTLYGEVIQTLYG

SEQ ID NO: 21206 - protein, 84 aa, unidentified
  REGION 1..84: note = Description of Unknown:cds_NZ_WFIY01000004.1_cds_WP_155862987.1_861 target sequence
FHAAAGREGLVDTAVRTSQSGYMQRRLINALSDLRVEYDGTVRTLYGEVIQTLYGGDGVHPMYSSHGKTVDVNRILERVVGWKR

SEQ ID NO: 21207 - protein, 85 aa, unidentified
  REGION 1..85: note = Description of Unknown:cds_NZ_WFIY01000004.1_cds_WP_155862987.1_861 target sequence
TSEVYDEDGTPIEGSVMDPRLGVIEPGQRCPTCGNMMGNCPGHFGHIELVKPVIHVGFVKHIYDLLRATCRRCGRIKLEDQELER

SEQ ID NO: 21208 - protein, 85 aa, unidentified
  REGION 1..85: note = Description of Unknown:cds_NZ_WFIY01000004.1_cds_WP_155862987.1_861 target sequence
YRRIYHAINKRWPSAAKRLVEHIKKSSMKAPVCPHCGEKQLKIKLEKPYNFYEERKEGVVRLTPVDIRDRLERIPDDDVELLGYD

SEQ ID NO: 21209 - protein, 85 aa, unidentified
  REGION 1..85: note = Description of Unknown:cds_NZ_WFIY01000004.1_cds_WP_155862987.1_861 target sequence
PKTSRPEWMILTVLPVPPITIRPSIMIENGIRAEDDLTHKLVDIVRINERLKESIDAGAPQLIVEDLWDLLQYHVATYFDNEIPG

SEQ ID NO: 21210 - protein, 85 aa, unidentified
  REGION 1..85: note = Description of Unknown:cds_NZ_WFIY01000004.1_cds_WP_155862987.1_861 target sequence
LPTSKHRSGRPLRTLAQRLKGKEGRFRGNLSGKRVDFSSRTVISPDPNISIDEVGVPIDIAKILTVPERVTKWNIERMREYVLNG

SEQ ID NO: 21211 - protein, 85 aa, unidentified
  REGION 1..85: note = Description of Unknown:cds_NZ_WFIY01000004.1_cds_WP_155862987.1_861 target sequence
PDKWPGANYVIKPDGRRIDLRYVKDRKEFASTLAPGFIVERHLIDGDIVIFNRQPSLHRISMMAHKVRVLPGRTFRLNLLVCPPY

SEQ ID NO: 21212 - protein, 85 aa, unidentified
  REGION 1..85: note = Description of Unknown:cds_NZ_WFIY01000004.1_cds_WP_155862987.1_861 target sequence
NADFDGDEMNLHVPQSEEAIAEAKELMLVHKNILTPRYGGPIMGSAQDYISGAYLLTVKTTLLTEDEVQTILGVANISKDIGEPA

SEQ ID NO: 21213 - protein, 85 aa, unidentified
  REGION 1..85: note = Description of Unknown:cds_NZ_WFIY01000004.1_cds_WP_155862987.1_861 target sequence
ILAPKRLYTGKQVVSLFLPEDFNYHGQANIASGPRLCTDEDCPHDSYIVIKNGKLLEGVFDKKALGNQQPESILHWLIREYPEDY

SEQ ID NO: 21214 - protein, 85 aa, unidentified
  REGION 1..85: note = Description of Unknown:cds_NZ_WFIY01000004.1_cds_WP_155862987.1_861 target sequence
GLWLMDNIFKVFIRYIEIHGLTMSINDVTISQEAMAKIAEKAKQADKQVQELIEKYEKGELEQIPGRTLEESLESYILDTLDKLR

SEQ ID NO: 21215 - protein, 85 aa, unidentified
  REGION 1..85: note = Description of Unknown:cds_NZ_WFIY01000004.1_cds_WP_155862987.1_861 target sequence
NDAGEIAAADLDPFNNVYIMARTGARGSVLNITQMAAMLGQQSVRGERISRGYYKRALPHFKRDDISAEARGFIYSSFRSGLNPI

SEQ ID NO: 21216 - protein, 85 aa, unidentified
  REGION 1..85: note = Description of Unknown:cds_NZ_WFIY01000004.1_cds_WP_155862987.1_861 target sequence
ELFFHAAAGREGLVDTAVRTSQSGYMQRRLINALSDLRVEYDGTVRTLYGEVIQTLYGGDGVHPMYSSHGKTVDVNRILERVVGW

SEQ ID NO: 21217 - protein, 85 aa, unidentified
  REGION 1..85: note = Description of Unknown:cds_NZ_WFIY01000004.1_cds_WP_155863115.1_1033 target sequence
SIEYARGLSDEELFKLLRPYVADWFKKKYQTFTPPQRAAIPLIKNYENVLVSSPTGSGKTLAAFLGIIDNLFELAEKGQLEDKIY

SEQ ID NO: 21218 - protein, 85 aa, unidentified
  REGION 1..85: note = Description of Unknown:cds_NZ_WFIY01000004.1_cds_WP_155863115.1_1033 target sequence
AVYISPLRALNNDMYKNLIEPLTEIKEQEKVDYNIRVGVRTSDTSSYQKEKMLKLPPHILITTPESFAISLTSPKFSEKLKNVKW

SEQ ID NO: 21219 - protein, 85 aa, unidentified
  REGION 1..85: note = Description of Unknown:cds_NZ_WFIY01000004.1_cds_WP_155863115.1_1033 target sequence
VIVDEIHELASSKRGSFLSGFLEIFENMIAEDKVSRIGLSATISPLEEIAKFLVGPKRSCKIVDARFVKDIDLKVISPVRDLIHA

SEQ ID NO: 21220 - protein, 85 aa, unidentified
  REGION 1..85: note = Description of Unknown:cds_NZ_WFIY01000004.1_cds_WP_155863115.1_1033 target sequence
TEDEISEGIYKTIIEEVLKHRTTLIFTNTRSAAERVSFKLRKLVQAQNLFDADMIGAHHSSLSRDVRLEIEEKLKRGELKAVVSS

SEQ ID NO: 21221 - protein, 85 aa, unidentified
  REGION 1..85: note = Description of Unknown:cds_NZ_WFIY01000004.1_cds_WP_155863115.1_1033 target sequence
TSLELGIDIGYIDLVILLSSPKSVSRLLQRLGRAGHHIRSISKGRIIVVDRDDLVECTVLAKLAKERKIDRVYIPKNPLDVLSQL

SEQ ID NO: 21222 - protein, 85 aa, unidentified
  REGION 1..85: note = Description of Unknown:cds_NZ_WFIY01000004.1_cds_WP_155863115.1_1033 target sequence
IVSASLIRPISIDEFYNIITKSYTFSGLTLDSLKATVDYLTGKYGLESNKVYAKIREENGVIKPKRGSRMIFYMNSGTIPEESLV

SEQ ID NO: 21223 - protein, 85 aa, unidentified
  REGION 1..85: note = Description of Unknown:cds_NZ_WFIY01000004.1_cds_WP_155863115.1_1033 target sequence
PVYTESNKYVGNLEEEFVEILSPGDIFVLGGKTYEFLSSKGNKIIVRDAEGQRPTVPSWFSEMLPLAYDSALEVGKFRKEVAEMI

SEQ ID NO: 21224 - protein, 85 aa, unidentified
  REGION 1..85: note = Description of Unknown:cds_NZ_WFIY01000004.1_cds_WP_155863115.1_1033 target sequence
ENNVDKKTAIEEISRKYNISKHAAFSIYEYILEEYLFTDGKVPNDKFILIEIYDDEEDRRNFIFHALYGRRALDALSRALAYIIS

SEQ ID NO: 21225 - protein, 85 aa, unidentified
  REGION 1..85: note = Description of Unknown:cds_NZ_WFIY01000004.1_cds_WP_155863115.1_1033 target sequence
EQLNVDVRISVSDNGFILTIPERTAYRINKIFDYLNPDDMYDILSKVILRTEMIKRRFRQTAERSFMILKKYKGRETNLERRQLS

SEQ ID NO: 21226 - protein, 85 aa, unidentified
  REGION 1..85: note = Description of Unknown:cds_NZ_WFIY01000004.1_cds_WP_155863115.1_1033 target sequence
SEALLNVVKEIPNFPVLKETIREILEDHMDIKSAIEIVRKVKSGEIKIDVIGPRRVPSPFAHGIIAKEHADVVLAEEKRELLKKL

SEQ ID NO: 21227 - protein, 84 aa, unidentified
  REGION 1..84: note = Description of Unknown:cds_NZ_WFIY01000004.1_cds_WP_155863115.1_1033 target sequence
ILEDHMDIKSAIEIVRKVKSGEIKIDVIGPRRVPSPFAHGIIAKEHADVVLAEEKRELLKKLHEEVIAYLKRKGINIDLNYTET

SEQ ID NO: 21228 - protein, 85 aa, unidentified
  REGION 1..85: note = Description of Unknown:cds_NZ_WFIY01000004.1_cds_WP_155863115.1_1033 target sequence
KYQTFTPPQRAAIPLIKNYENVLVSSPTGSGKTLAAFLGIIDNLFELAEKGQLEDKIYAVYISPLRALNNDMYKNLIEPLTEIKE

SEQ ID NO: 21229 - protein, 85 aa, unidentified
  REGION 1..85: note = Description of Unknown:cds_NZ_WFIY01000004.1_cds_WP_155863115.1_1033 target sequence
QEKVDYNIRVGVRTSDTSSYQKEKMLKLPPHILITTPESFAISLTSPKFSEKLKNVKWVIVDEIHELASSKRGSFLSGFLEIFEN

SEQ ID NO: 21230 - protein, 85 aa, unidentified
  REGION 1..85: note = Description of Unknown:cds_NZ_WFIY01000004.1_cds_WP_155863115.1_1033 target sequence
MIAEDKVSRIGLSATISPLEEIAKFLVGPKRSCKIVDARFVKDIDLKVISPVRDLIHATEDEISEGIYKTIIEEVLKHRTTLIFT

SEQ ID NO: 21231 - protein, 85 aa, unidentified
  REGION 1..85: note = Description of Unknown:cds_NZ_WFIY01000004.1_cds_WP_155863115.1_1033 target sequence
NTRSAAERVSFKLRKLVQAQNLFDADMIGAHHSSLSRDVRLEIEEKLKRGELKAVVSSTSLELGIDIGYIDLVILLSSPKSVSRL

SEQ ID NO: 21232 - protein, 85 aa, unidentified
  REGION 1..85: note = Description of Unknown:cds_NZ_WFIY01000004.1_cds_WP_155863115.1_1033 target sequence
LQRLGRAGHHIRSISKGRIIVVDRDDLVECTVLAKLAKERKIDRVYIPKNPLDVLSQLIVSASLIRPISIDEFYNIITKSYTFSG

SEQ ID NO: 21233 - protein, 85 aa, unidentified
  REGION 1..85: note = Description of Unknown:cds_NZ_WFIY01000004.1_cds_WP_155863115.1_1033 target sequence
LTLDSLKATVDYLTGKYGLESNKVYAKIREENGVIKPKRGSRMIFYMNSGTIPEESLVPVYTESNKYVGNLEEEFVEILSPGDIF

SEQ ID NO: 21234 - protein, 85 aa, unidentified
  REGION 1..85: note = Description of Unknown:cds_NZ_WFIY01000004.1_cds_WP_155863115.1_1033 target sequence
VLGGKTYEFLSSKGNKIIVRDAEGQRPTVPSWFSEMLPLAYDSALEVGKFRKEVAEMIENNVDKKTAIEEISRKYNISKHAAFSI

SEQ ID NO: 21235 - protein, 85 aa, unidentified
  REGION 1..85: note = Description of Unknown:cds_NZ_WFIY01000004.1_cds_WP_155863115.1_1033 target sequence
YEYILEEYLFTDGKVPNDKFILIEIYDDEEDRRNFIFHALYGRRALDALSRALAYIISEQLNVDVRISVSDNGFILTIPERTAYR

SEQ ID NO: 21236 - protein, 85 aa, unidentified
  REGION 1..85: note = Description of Unknown:cds_NZ_WFIY01000004.1_cds_WP_155863115.1_1033 target sequence
INKIFDYLNPDDMYDILSKVILRTEMIKRRFRQTAERSFMILKKYKGRETNLERRQLSSEALLNVVKEIPNFPVLKETIREILED

SEQ ID NO: 21237 - protein, 85 aa, unidentified
  REGION 1..85: note = Description of Unknown:cds_NC_024711.1_cds_YP_009052544.1_67 target sequence
KTIEEELGKVSLTCNGQWNDRPYERLCIVHDGFYASYISRKAVPAGIPLSNEEYWQPIAKLREDLVIDYETFKKEILELIAVVQR

SEQ ID NO: 21238 - protein, 85 aa, unidentified
  REGION 1..85: note = Description of Unknown:cds_NC_024711.1_cds_YP_009052544.1_67 target sequence
GLKAARIVVSTMEDRDALTWEQIGVGCEVYVIETKKSYILDEITPVTNAKKWHLEADSEIGSKFVESFSGMFPRAIAERAVADEF

SEQ ID NO: 21239 - protein, 85 aa, unidentified
  REGION 1..85: note = Description of Unknown:cds_NC_024711.1_cds_YP_009052544.1_67 target sequence
GINIQDNYLRRNVVVNYMAQVLKQYFEDNAVQILEGQITPEMLSESVKQMFTASQITNAADEEDLTVVDNLLKFADKDYNVNDYS

SEQ ID NO: 21240 - protein, 85 aa, unidentified
  REGION 1..85: note = Description of Unknown:cds_NC_024711.1_cds_YP_009052544.1_67 target sequence
GKARKYLRKNMISGVNTLTQDMINEPNTIYILQYDYCLAGQTIELPDNSIILWRGGRIYDGAVKLNQCRLLSNYRQEDMFDKESI

SEQ ID NO: 21241 - protein, 85 aa, unidentified
  REGION 1..85: note = Description of Unknown:cds_NC_024711.1_cds_YP_009052544.1_67 target sequence
SLDGNWAVGQILYHPLDLGEDNKQVEIVGWGGSYTNDFYWFWDGEKWVSMGFDLSVYLTRAEFEAFLEKLREEMEKFYAWLLAEL

SEQ ID NO: 21242 - protein, 85 aa, unidentified
  REGION 1..85: note = Description of Unknown:cds_NC_024711.1_cds_YP_009052544.1_67 target sequence
KKINDHLEIHDQQISELQQDIIDINTRINNLITEYNAKFEDIYNKIGDLNSSIEGSINNLEQYINNKIEEILNKINQSGNNISNE

SEQ ID NO: 21243 - protein, 85 aa, unidentified
  REGION 1..85: note = Description of Unknown:cds_NC_024711.1_cds_YP_009052544.1_67 target sequence
YKQYFESNYVSMFKNKIRPGTNITFVENDDGTITINAAGGGSGGGGLTEEEVRNIINSILNNYYTKQEINNIIAGLEGGGGSGGD

SEQ ID NO: 21244 - protein, 85 aa, unidentified
  REGION 1..85: note = Description of Unknown:cds_NC_024711.1_cds_YP_009052544.1_67 target sequence
GTHNVMSVTQLGEARTGKYLVMNKFADSETKPSRLDVDFNSLYTDIKNKLVREGFGQGGGSGQGGGVAASQIQAWIAAVVPIGSI

SEQ ID NO: 21245 - protein, 85 aa, unidentified
  REGION 1..85: note = Description of Unknown:cds_NC_024711.1_cds_YP_009052544.1_67 target sequence
MLWDTSTPPNGWEVYTAAQGRFVMGYIPNGINIYNNPKQGNLDWKTVLENIKDTYDPAAPGRNVSAYAFYIGGTDLPLHQHAVAV

SEQ ID NO: 21246 - protein, 85 aa, unidentified
  REGION 1..85: note = Description of Unknown:cds_NC_024711.1_cds_YP_009052544.1_67 target sequence
GKTKSGDNNHQVIAPSNWRFISGNLDNDVKNGYPYGTDRNRFDNLGINRSTNWYMTGPNISNNGEMTWSQISGNRWTGDYLAINK

SEQ ID NO: 21247 - protein, 84 aa, unidentified
  REGION 1..84: note = Description of Unknown:cds_NC_024711.1_cds_YP_009052544.1_67 target sequence
RFISGNLDNDVKNGYPYGTDRNRFDNLGINRSTNWYMTGPNISNNGEMTWSQISGNRWTGDYLAINKLMPTIALHYIKRVSNPW

SEQ ID NO: 21248 - protein, 85 aa, unidentified
  REGION 1..85: note = Description of Unknown:cds_NC_024711.1_cds_YP_009052544.1_67 target sequence
IVHDGFYASYISRKAVPAGIPLSNEEYWQPIAKLREDLVIDYETFKKEILELIAVVQRGLKAARIVVSTMEDRDALTWEQIGVGC

SEQ ID NO: 21249 - protein, 85 aa, unidentified
  REGION 1..85: note = Description of Unknown:cds_NC_024711.1_cds_YP_009052544.1_67 target sequence
EVYVIETKKSYILDEITPVTNAKKWHLEADSEIGSKFVESFSGMFPRAIAERAVADEFGINIQDNYLRRNVVVNYMAQVLKQYFE

SEQ ID NO: 21250 - protein, 85 aa, unidentified
  REGION 1..85: note = Description of Unknown:cds_NC_024711.1_cds_YP_009052544.1_67 target sequence
DNAVQILEGQITPEMLSESVKQMFTASQITNAADEEDLTVVDNLLKFADKDYNVNDYSGKARKYLRKNMISGVNTLTQDMINEPN

SEQ ID NO: 21251 - protein, 85 aa, unidentified
  REGION 1..85: note = Description of Unknown:cds_NC_024711.1_cds_YP_009052544.1_67 target sequence
TIYILQYDYCLAGQTIELPDNSIILWRGGRIYDGAVKLNQCRLLSNYRQEDMFDKESISLDGNWAVGQILYHPLDLGEDNKQVEI

SEQ ID NO: 21252 - protein, 85 aa, unidentified
  REGION 1..85: note = Description of Unknown:cds_NC_024711.1_cds_YP_009052544.1_67 target sequence
VGWGGSYTNDFYWFWDGEKWVSMGFDLSVYLTRAEFEAFLEKLREEMEKFYAWLLAELKKINDHLEIHDQQISELQQDIIDINTR

SEQ ID NO: 21253 - protein, 85 aa, unidentified
  REGION 1..85: note = Description of Unknown:cds_NC_024711.1_cds_YP_009052544.1_67 target sequence
INNLITEYNAKFEDIYNKIGDLNSSIEGSINNLEQYINNKIEEILNKINQSGNNISNEYKQYFESNYVSMFKNKIRPGTNITFVE

SEQ ID NO: 21254 - protein, 85 aa, unidentified
  REGION 1..85: note = Description of Unknown:cds_NC_024711.1_cds_YP_009052544.1_67 target sequence
NDDGTITINAAGGGSGGGGLTEEEVRNIINSILNNYYTKQEINNIIAGLEGGGGSGGDGTHNVMSVTQLGEARTGKYLVMNKFAD

SEQ ID NO: 21255 - protein, 85 aa, unidentified
  REGION 1..85: note = Description of Unknown:cds_NC_024711.1_cds_YP_009052544.1_67 target sequence
SETKPSRLDVDFNSLYTDIKNKLVREGFGQGGGSGQGGGVAASQIQAWIAAVVPIGSIMLWDTSTPPNGWEVYTAAQGRFVMGYI

SEQ ID NO: 21256 - protein, 85 aa, unidentified
  REGION 1..85: note = Description of Unknown:cds_NC_024711.1_cds_YP_009052544.1_67 target sequence
PNGINIYNNPKQGNLDWKTVLENIKDTYDPAAPGRNVSAYAFYIGGTDLPLHQHAVAVGKTKSGDNNHQVIAPSNWRFISGNLDN

SEQ ID NO: 21257 - protein, 85 aa, unidentified
  REGION 1..85: note = Description of Unknown:cds_NZ_WFIY01000004.1_cds_WP_155863824.1_1717 target sequence
KIEKIFLQNFLSHESSEINFKGSINAIVGQNGAGKTSIIDGIVFSLFSESSRGNIKNLVKKGKSTGIVQTEIRDGNNLYLIKRDI

SEQ ID NO: 21258 - protein, 85 aa, unidentified
  REGION 1..85: note = Description of Unknown:cds_NZ_WFIY01000004.1_cds_WP_155863824.1_1717 target sequence
ANSSNDFIAKNNIGIARGRKEVDRKIQEILKLDKDILLSTVIIRQGEIENIFKELPDVLKKILKIENLEKLTSSTGPLYSVQKEI

SEQ ID NO: 21259 - protein, 85 aa, unidentified
  REGION 1..85: note = Description of Unknown:cds_NZ_WFIY01000004.1_cds_WP_155863824.1_1717 target sequence
ESELKYLENRKIEYENKKLEKEKLEKEIEESKKKLEDLKIKKLEKEKEIKDNSAKLDELKGKRDKYLELTGRLSFLTERKKSIEK

SEQ ID NO: 21260 - protein, 85 aa, unidentified
  REGION 1..85: note = Description of Unknown:cds_NZ_WFIY01000004.1_cds_WP_155863824.1_1717 target sequence
DVENYDKIKSEKEKLEKEIEENSYLEGGESLLSELHELRKSEKNLKDQLNTLEKEIEEYEQNLTKKISLEDDAKRYEELKERKEK

SEQ ID NO: 21261 - protein, 85 aa, unidentified
  REGION 1..85: note = Description of Unknown:cds_NZ_WFIY01000004.1_cds_WP_155863824.1_1717 target sequence
IEEAYNEYNSLKSLLNDKLKRKEKIENEIKSLGNIPSLDNVNEEVENIEKEIDNLQNIKGAMKGRKEQLIQVIKNLENIRENKCP

SEQ ID NO: 21262 - protein, 85 aa, unidentified
  REGION 1..85: note = Description of Unknown:cds_NZ_WFIY01000004.1_cds_WP_155863824.1_1717 target sequence
VCGRELTEEHKIKIKIEAETEVKDIEKKLSDVEKKVEELRARKSELSNLRLEIISKLTKLRKLNEDLTRISQEVQDIQTKLKELE

SEQ ID NO: 21263 - protein, 85 aa, unidentified
  REGION 1..85: note = Description of Unknown:cds_NZ_WFIY01000004.1_cds_WP_155863824.1_1717 target sequence
KSYKEYSEIREKLILLEPKYKEYLKVSNYNEKTLEEKKNRLSSIKAELDDLQKRIKGLLEKIGDEREFEGKLKLYKENKNKLDKL

SEQ ID NO: 21264 - protein, 85 aa, unidentified
  REGION 1..85: note = Description of Unknown:cds_NZ_WFIY01000004.1_cds_WP_155863824.1_1717 target sequence
REYFIKIESEKNELEKISKEIIELEEEIRQLNFNEEEFENLNKKLEDLNNERINIEKEISTIEGKINASSDLLVNLNSELNKIME

SEQ ID NO: 21265 - protein, 85 aa, unidentified
  REGION 1..85: note = Description of Unknown:cds_NZ_WFIY01000004.1_cds_WP_155863824.1_1717 target sequence
DLNKIPKLQKAVDRVEKLRKILGGSGLQNYIISIFKSRIENNLNDILNMFNLSFSRVTINFEIGGKTQKSKVIIKAYNTAGNDLD

SEQ ID NO: 21266 - protein, 85 aa, unidentified
  REGION 1..85: note = Description of Unknown:cds_NZ_WFIY01000004.1_cds_WP_155863824.1_1717 target sequence
IESLSGGERISIALALRIAIAKSLMDEIGFMIMDEPTIHLDEERKKELLNVIKYSMNIIPQIIIVTHDEEIKEISDYIISVIKKG

SEQ ID NO: 21267 - protein, 84 aa, unidentified
  REGION 1..84: note = Description of Unknown:cds_NZ_WFIY01000004.1_cds_WP_155863824.1_1717 target sequence
LALRIAIAKSLMDEIGFMIMDEPTIHLDEERKKELLNVIKYSMNIIPQIIIVTHDEEIKEISDYIISVIKKGDKSIIKQGEYID

SEQ ID NO: 21268 - protein, 85 aa, unidentified
  REGION 1..85: note = Description of Unknown:cds_NZ_WFIY01000004.1_cds_WP_155863824.1_1717 target sequence
VGQNGAGKTSIIDGIVFSLFSESSRGNIKNLVKKGKSTGIVQTEIRDGNNLYLIKRDIANSSNDFIAKNNIGIARGRKEVDRKIQ

SEQ ID NO: 21269 - protein, 85 aa, unidentified
  REGION 1..85: note = Description of Unknown:cds_NZ_WFIY01000004.1_cds_WP_155863824.1_1717 target sequence
EILKLDKDILLSTVIIRQGEIENIFKELPDVLKKILKIENLEKLTSSTGPLYSVQKEIESELKYLENRKIEYENKKLEKEKLEKE

SEQ ID NO: 21270 - protein, 85 aa, unidentified
  REGION 1..85: note = Description of Unknown:cds_NZ_WFIY01000004.1_cds_WP_155863824.1_1717 target sequence
IEESKKKLEDLKIKKLEKEKEIKDNSAKLDELKGKRDKYLELTGRLSFLTERKKSIEKDVENYDKIKSEKEKLEKEIEENSYLEG

SEQ ID NO: 21271 - protein, 85 aa, unidentified
  REGION 1..85: note = Description of Unknown:cds_NZ_WFIY01000004.1_cds_WP_155863824.1_1717 target sequence
GESLLSELHELRKSEKNLKDQLNTLEKEIEEYEQNLTKKISLEDDAKRYEELKERKEKIEEAYNEYNSLKSLLNDKLKRKEKIEN

SEQ ID NO: 21272 - protein, 85 aa, unidentified
  REGION 1..85: note = Description of Unknown:cds_NZ_WFIY01000004.1_cds_WP_155863824.1_1717 target sequence
EIKSLGNIPSLDNVNEEVENIEKEIDNLQNIKGAMKGRKEQLIQVIKNLENIRENKCPVCGRELTEEHKIKIKIEAETEVKDIEK

SEQ ID NO: 21273 - protein, 85 aa, unidentified
  REGION 1..85: note = Description of Unknown:cds_NZ_WFIY01000004.1_cds_WP_155863824.1_1717 target sequence
KLSDVEKKVEELRARKSELSNLRLEIISKLTKLRKLNEDLTRISQEVQDIQTKLKELEKSYKEYSEIREKLILLEPKYKEYLKVS

SEQ ID NO: 21274 - protein, 85 aa, unidentified
  REGION 1..85: note = Description of Unknown:cds_NZ_WFIY01000004.1_cds_WP_155863824.1_1717 target sequence
NYNEKTLEEKKNRLSSIKAELDDLQKRIKGLLEKIGDEREFEGKLKLYKENKNKLDKLREYFIKIESEKNELEKISKEIIELEEE

SEQ ID NO: 21275 - protein, 85 aa, unidentified
  REGION 1..85: note = Description of Unknown:cds_NZ_WFIY01000004.1_cds_WP_155863824.1_1717 target sequence
IRQLNFNEEEFENLNKKLEDLNNERINIEKEISTIEGKINASSDLLVNLNSELNKIMEDLNKIPKLQKAVDRVEKLRKILGGSGL

SEQ ID NO: 21276 - protein, 85 aa, unidentified
  REGION 1..85: note = Description of Unknown:cds_NZ_WFIY01000004.1_cds_WP_155863824.1_1717 target sequence
QNYIISIFKSRIENNLNDILNMFNLSFSRVTINFEIGGKTQKSKVIIKAYNTAGNDLDIESLSGGERISIALALRIAIAKSLMDE

SEQ ID NO: 21277 - protein, 85 aa, unidentified
  REGION 1..85: note = Description of Unknown:cds_NC_024711.1_cds_YP_009052524.1_46 target sequence
PINFYTPTFRQQVNPIDLNVLARTYNTLEQGHQQAIQTKSQIDAQLAQLDLNEAEDAWRQEQLNKVRNALTENMQYGNAYSSLDD

SEQ ID NO: 21278 - protein, 85 aa, unidentified
  REGION 1..85: note = Description of Unknown:cds_NC_024711.1_cds_YP_009052524.1_46 target sequence
IVGTYGDITSSPGMIGRLRAQQDYKAYMDNLDKRTDLSEDYKNYYRAVNKYNYQDITDKNGNVIGGSKWTPIDKEVSEIPMNQIL

SEQ ID NO: 21279 - protein, 85 aa, unidentified
  REGION 1..85: note = Description of Unknown:cds_NC_024711.1_cds_YP_009052524.1_46 target sequence
NQALQWAAKEQGGGSQTRWLDANGKVTDDITKSVTGEIYSHTKGDWQRLSKAKLAEAVKAVIENTPGAKASLEQDYKIAKWKYDQ

SEQ ID NO: 21280 - protein, 85 aa, unidentified
  REGION 1..85: note = Description of Unknown:cds_NC_024711.1_cds_YP_009052524.1_46 target sequence
NGSNPDITDKNGILLTPEQYLAKRIDPFYNAATFYNQSSNTTYGEAWKAQLALAKQAGLGSTNQRKQAIDNLTYKGTPVHIDNFM

SEQ ID NO: 21281 - protein, 85 aa, unidentified
  REGION 1..85: note = Description of Unknown:cds_NC_024711.1_cds_YP_009052524.1_46 target sequence
PAQAQAEITSNRQSIAGLLSKYNPDININLSTANPDDIRTSIMTNITNPSDRAYALSYLNDIIDNQEYINSLKVGKSQDSIDGFD

SEQ ID NO: 21282 - protein, 85 aa, unidentified
  REGION 1..85: note = Description of Unknown:cds_NC_024711.1_cds_YP_009052524.1_46 target sequence
TYNSIISLSDLPSNKYSDRYSKYVNQIFGDSSAIRQYFNNDDVYNSFINAIGGEKKAASLGVRFGSDGNGYRYAELPKDYHKSIY

SEQ ID NO: 21283 - protein, 85 aa, unidentified
  REGION 1..85: note = Description of Unknown:cds_NC_024711.1_cds_YP_009052524.1_46 target sequence
SFGKAVKEAEDTRNPLNAFLNSAKTRFFGYGDKFVRVNSNGEEHHAGLPTGNKEPYIGLIDYVDSLKSKNDAVLDGGQITSSTIG

SEQ ID NO: 21284 - protein, 85 aa, unidentified
  REGION 1..85: note = Description of Unknown:cds_NC_024711.1_cds_YP_009052524.1_46 target sequence
ISAMTPELAELNFVMSSNPEAASKYSAQKKQLEEQAMSAIKAGIDLTQGESYITSENGIFEPMSSEDRKAYTAYLRSAKENEITP

SEQ ID NO: 21285 - protein, 85 aa, unidentified
  REGION 1..85: note = Description of Unknown:cds_NC_024711.1_cds_YP_009052524.1_46 target sequence
TIVRDPKTGDVGVQINIAGYYDTEGKLKREPITLLVGSGAIDSSIIQSWNQDTSWRAAGKVENYYNANRPISLTNNAAFTGIDKF

SEQ ID NO: 21286 - protein, 85 aa, unidentified
  REGION 1..85: note = Description of Unknown:cds_NC_024711.1_cds_YP_009052524.1_46 target sequence
KLVPNGGGFNLINSTNNQTIGLVSKENAVDIVDNLSQWEQTVTAVKAGMAVDENAVKAIQQNVATKLAQLSGSSDPYVIQYYYDE

SEQ ID NO: 21287 - protein, 84 aa, unidentified
  REGION 1..84: note = Description of Unknown:cds_NC_024711.1_cds_YP_009052524.1_46 target sequence
GFNLINSTNNQTIGLVSKENAVDIVDNLSQWEQTVTAVKAGMAVDENAVKAIQQNVATKLAQLSGSSDPYVIQYYYDELTNNLY

SEQ ID NO: 21288 - protein, 85 aa, unidentified
  REGION 1..85: note = Description of Unknown:cds_NC_024711.1_cds_YP_009052524.1_46 target sequence
LEQGHQQAIQTKSQIDAQLAQLDLNEAEDAWRQEQLNKVRNALTENMQYGNAYSSLDDIVGTYGDITSSPGMIGRLRAQQDYKAY

SEQ ID NO: 21289 - protein, 85 aa, unidentified
  REGION 1..85: note = Description of Unknown:cds_NC_024711.1_cds_YP_009052524.1_46 target sequence
MDNLDKRTDLSEDYKNYYRAVNKYNYQDITDKNGNVIGGSKWTPIDKEVSEIPMNQILNQALQWAAKEQGGGSQTRWLDANGKVT

SEQ ID NO: 21290 - protein, 85 aa, unidentified
  REGION 1..85: note = Description of Unknown:cds_NC_024711.1_cds_YP_009052524.1_46 target sequence
DDITKSVTGEIYSHTKGDWQRLSKAKLAEAVKAVIENTPGAKASLEQDYKIAKWKYDQNGSNPDITDKNGILLTPEQYLAKRIDP

SEQ ID NO: 21291 - protein, 85 aa, unidentified
  REGION 1..85: note = Description of Unknown:cds_NC_024711.1_cds_YP_009052524.1_46 target sequence
FYNAATFYNQSSNTTYGEAWKAQLALAKQAGLGSTNQRKQAIDNLTYKGTPVHIDNFMPAQAQAEITSNRQSIAGLLSKYNPDIN

SEQ ID NO: 21292 - protein, 85 aa, unidentified
  REGION 1..85: note = Description of Unknown:cds_NC_024711.1_cds_YP_009052524.1_46 target sequence
INLSTANPDDIRTSIMTNITNPSDRAYALSYLNDIIDNQEYINSLKVGKSQDSIDGFDTYNSIISLSDLPSNKYSDRYSKYVNQI

SEQ ID NO: 21293 - protein, 85 aa, unidentified
  REGION 1..85: note = Description of Unknown:cds_NC_024711.1_cds_YP_009052524.1_46 target sequence
FGDSSAIRQYFNNDDVYNSFINAIGGEKKAASLGVRFGSDGNGYRYAELPKDYHKSIYSFGKAVKEAEDTRNPLNAFLNSAKTRF

SEQ ID NO: 21294 - protein, 85 aa, unidentified
  REGION 1..85: note = Description of Unknown:cds_NC_024711.1_cds_YP_009052524.1_46 target sequence
FGYGDKFVRVNSNGEEHHAGLPTGNKEPYIGLIDYVDSLKSKNDAVLDGGQITSSTIGISAMTPELAELNFVMSSNPEAASKYSA

SEQ ID NO: 21295 - protein, 85 aa, unidentified
  REGION 1..85: note = Description of Unknown:cds_NC_024711.1_cds_YP_009052524.1_46 target sequence
QKKQLEEQAMSAIKAGIDLTQGESYITSENGIFEPMSSEDRKAYTAYLRSAKENEITPTIVRDPKTGDVGVQINIAGYYDTEGKL

SEQ ID NO: 21296 - protein, 85 aa, unidentified
  REGION 1..85: note = Description of Unknown:cds_NC_024711.1_cds_YP_009052524.1_46 target sequence
KREPITLLVGSGAIDSSIIQSWNQDTSWRAAGKVENYYNANRPISLTNNAAFTGIDKFKLVPNGGGFNLINSTNNQTIGLVSKEN

SEQ ID NO: 21297 - protein, 85 aa, unidentified
  REGION 1..85: note = Description of Unknown:cds_NC_024711.1_cds_YP_009052525.1_47 target sequence
PRKDKVIHISNLPSTFRGNVTRNGRFIQNGIPPLGGAYDKVAKSTGLIRLGNEFLYNGVNNLVSKDNREKLMNNTAGRLINYVKD

SEQ ID NO: 21298 - protein, 85 aa, unidentified
  REGION 1..85: note = Description of Unknown:cds_NC_024711.1_cds_YP_009052525.1_47 target sequence
FNKESFPSDDELGPTFPFNIIQTPRSNGKKLPQKQYAVGGKIPNVVAGGIAQPIGNNFFYMNGRKHSQGGIDIGPNDKTGIEVED

SEQ ID NO: 21299 - protein, 85 aa, unidentified
  REGION 1..85: note = Description of Unknown:cds_NC_024711.1_cds_YP_009052525.1_47 target sequence
GEVVETNGNELKVYSAQPIINGVSPAKLVMGGANPNKVFKAQEDFKDRNRINDDGTKYKEGGKIYQAPDEYKRQIAESGSIIIGG

SEQ ID NO: 21300 - protein, 85 aa, unidentified
  REGION 1..85: note = Description of Unknown:cds_NC_024711.1_cds_YP_009052525.1_47 target sequence
YPTIAGNRNYKFIKGLTKASRIGRIATNFINLGRQKIYDLANKIDNTWINQGIKEVYRTTIGKHGSNLPRTIDYINKNNINENKK

SEQ ID NO: 21301 - protein, 85 aa, unidentified
  REGION 1..85: note = Description of Unknown:cds_NC_024711.1_cds_YP_009052525.1_47 target sequence
AMGGLNRNKDYGSKKKPYPSVAKKDFAGGHRSYPIPTKADAVDALRLAGLHGRSDVKAKVYNKYPELRKKGNTGLIVSISGNVKN

SEQ ID NO: 21302 - protein, 85 aa, unidentified
  REGION 1..85: note = Description of Unknown:cds_NC_024711.1_cds_YP_009052525.1_47 target sequence
GLIHSPSSTGGLRDKFAVGGTRINRHGRTWEYDEQIGAYVPITNRTINRTSTYPINKSARGETIVGSDYTFRNGRWSKNNNVNTN

SEQ ID NO: 21303 - protein, 85 aa, unidentified
  REGION 1..85: note = Description of Unknown:cds_NC_024711.1_cds_YP_009052525.1_47 target sequence
TNKPNIDNGNRRPQYYAERRLPLFEDGAGITSGLVRAGWSHGNNKGVSMNNINIPSLSATKSSGKTPRRGRSKSSQSTQSVPTKT

SEQ ID NO: 21304 - protein, 85 aa, unidentified
  REGION 1..85: note = Description of Unknown:cds_NC_024711.1_cds_YP_009052525.1_47 target sequence
PPTAVYNRNLPKVEASIPTTLPVSTNIPAKGTTSFDGKGQGKFKNLTTADWIGLGSNVAGSLASYFASRRAINKMRGPGQPTLIS

SEQ ID NO: 21305 - protein, 85 aa, unidentified
  REGION 1..85: note = Description of Unknown:cds_NC_024711.1_cds_YP_009052525.1_47 target sequence
ANKLKTKYNINPQLDRIREDKFEAYRDIDSNTASSRVSLARKQRVRNAAGQAANELYGNKENIETNLINQDRRNQQSVRQFNAQQ

SEQ ID NO: 21306 - protein, 85 aa, unidentified
  REGION 1..85: note = Description of Unknown:cds_NC_024711.1_cds_YP_009052525.1_47 target sequence
YNQYIDRKAAFDNGIREAKVTNINNLFSGINAGIQDMISRYENRKALNNTIGAMRASAPNVDDRIMRDAGVDYDEFIIRKRRKLG

SEQ ID NO: 21307 - protein, 84 aa, unidentified
  REGION 1..84: note = Description of Unknown:cds_NC_024711.1_cds_YP_009052525.1_47 target sequence
KAAFDNGIREAKVTNINNLFSGINAGIQDMISRYENRKALNNTIGAMRASAPNVDDRIMRDAGVDYDEFIIRKRRKLGGKQSCR

SEQ ID NO: 21308 - protein, 85 aa, unidentified
  REGION 1..85: note = Description of Unknown:cds_NC_024711.1_cds_YP_009052525.1_47 target sequence
QNGIPPLGGAYDKVAKSTGLIRLGNEFLYNGVNNLVSKDNREKLMNNTAGRLINYVKDFNKESFPSDDELGPTFPFNIIQTPRSN

SEQ ID NO: 21309 - protein, 85 aa, unidentified
  REGION 1..85: note = Description of Unknown:cds_NC_024711.1_cds_YP_009052525.1_47 target sequence
GKKLPQKQYAVGGKIPNVVAGGIAQPIGNNFFYMNGRKHSQGGIDIGPNDKTGIEVEDGEVVETNGNELKVYSAQPIINGVSPAK

SEQ ID NO: 21310 - protein, 85 aa, unidentified
  REGION 1..85: note = Description of Unknown:cds_NC_024711.1_cds_YP_009052525.1_47 target sequence
LVMGGANPNKVFKAQEDFKDRNRINDDGTKYKEGGKIYQAPDEYKRQIAESGSIIIGGYPTIAGNRNYKFIKGLTKASRIGRIAT

SEQ ID NO: 21311 - protein, 85 aa, unidentified
  REGION 1..85: note = Description of Unknown:cds_NC_024711.1_cds_YP_009052525.1_47 target sequence
NFINLGRQKIYDLANKIDNTWINQGIKEVYRTTIGKHGSNLPRTIDYINKNNINENKKAMGGLNRNKDYGSKKKPYPSVAKKDFA

SEQ ID NO: 21312 - protein, 85 aa, unidentified
  REGION 1..85: note = Description of Unknown:cds_NC_024711.1_cds_YP_009052525.1_47 target sequence
GGHRSYPIPTKADAVDALRLAGLHGRSDVKAKVYNKYPELRKKGNTGLIVSISGNVKNGLIHSPSSTGGLRDKFAVGGTRINRHG

SEQ ID NO: 21313 - protein, 85 aa, unidentified
  REGION 1..85: note = Description of Unknown:cds_NC_024711.1_cds_YP_009052525.1_47 target sequence
RTWEYDEQIGAYVPITNRTINRTSTYPINKSARGETIVGSDYTFRNGRWSKNNNVNTNTNKPNIDNGNRRPQYYAERRLPLFEDG

SEQ ID NO: 21314 - protein, 85 aa, unidentified
  REGION 1..85: note = Description of Unknown:cds_NC_024711.1_cds_YP_009052525.1_47 target sequence
AGITSGLVRAGWSHGNNKGVSMNNINIPSLSATKSSGKTPRRGRSKSSQSTQSVPTKTPPTAVYNRNLPKVEASIPTTLPVSTNI

SEQ ID NO: 21315 - protein, 85 aa, unidentified
  REGION 1..85: note = Description of Unknown:cds_NC_024711.1_cds_YP_009052525.1_47 target sequence
PAKGTTSFDGKGQGKFKNLTTADWIGLGSNVAGSLASYFASRRAINKMRGPGQPTLISANKLKTKYNINPQLDRIREDKFEAYRD

SEQ ID NO: 21316 - protein, 85 aa, unidentified
  REGION 1..85: note = Description of Unknown:cds_NC_024711.1_cds_YP_009052525.1_47 target sequence
IDSNTASSRVSLARKQRVRNAAGQAANELYGNKENIETNLINQDRRNQQSVRQFNAQQYNQYIDRKAAFDNGIREAKVTNINNLF

SEQ ID NO: 21317 - protein, 85 aa, unidentified
  REGION 1..85: note = Description of Unknown:cds_NZ_WFIY01000004.1_cds_WP_155864154.1_2108 target sequence
NNALVTFLFLIITISMALGILVYYSTSSSLIEAKTNPLYIAEDYSKGLEVSSTQPVINYIIPQHKCQPINFTVNFILTVNIPGYQ

SEQ ID NO: 21318 - protein, 85 aa, unidentified
  REGION 1..85: note = Description of Unknown:cds_NZ_WFIY01000004.1_cds_WP_155864154.1_2108 target sequence
GGKLYLIPFLMPSNYNPYYYVPTSIPNQVSNPNYVGYVSIKIGDTQLKPILFNNNVYFLNQQQGKIEAYAFCICNGQTLNVTFVT

SEQ ID NO: 21319 - protein, 85 aa, unidentified
  REGION 1..85: note = Description of Unknown:cds_NZ_WFIY01000004.1_cds_WP_155864154.1_2108 target sequence
SPNETPVIWIIANICGQMYRLAYPYFISLSKGINTANGIITSAPLTYYELYQKELGCLSILFSSSSRGFVKIYGNDEIKTNHGNI

SEQ ID NO: 21320 - protein, 85 aa, unidentified
  REGION 1..85: note = Description of Unknown:cds_NZ_WFIY01000004.1_cds_WP_155864154.1_2108 target sequence
GYFANEGCLQIVGDVKFCNVCTLYLSKGIEVHVGDHCPIPKCCKIEYVPPCPCVFVNPIYQYYNPSNYQQELQSEINSVKFCKCT

SEQ ID NO: 21321 - protein, 85 aa, unidentified
  REGION 1..85: note = Description of Unknown:cds_NZ_WFIY01000004.1_cds_WP_155864154.1_2108 target sequence
AHDSSCINNKFIKYCDGILYICKPIKFCNQLCIEKSSPIHTKCIIFKCPVIFSNGFVDQSCVNLRFCKCVVSEGCTSVISNAELV

SEQ ID NO: 21322 - protein, 85 aa, unidentified
  REGION 1..85: note = Description of Unknown:cds_NZ_WFIY01000004.1_cds_WP_155864154.1_2108 target sequence
FEKGVLFNCTTNKNVGKLILTSTHKQSCGIQIISCGPFIAYFECAPKGKSLVELRGVHLQDKNNIISFTAKCIEICGVDTICSCY

SEQ ID NO: 21323 - protein, 85 aa, unidentified
  REGION 1..85: note = Description of Unknown:cds_NZ_WFIY01000004.1_cds_WP_155864154.1_2108 target sequence
PLFIQAPSYPTIGFNNVTICGGLVLKSGCHTTLTFTGCNKLCVKKGPLIIDTGSCSSLTMARNSQINVCGYSLIKVNNIKLDGGA

SEQ ID NO: 21324 - protein, 85 aa, unidentified
  REGION 1..85: note = Description of Unknown:cds_NZ_WFIY01000004.1_cds_WP_155864154.1_2108 target sequence
KLVTSKYDLFYGCRVDFCGNELIVCNYQPPQGKLSQITVYPTITSSFGVAGWFSVFPNNTEVNYLNIKLSNSTCTFCMFLNISPL

SEQ ID NO: 21325 - protein, 85 aa, unidentified
  REGION 1..85: note = Description of Unknown:cds_NZ_WFIY01000004.1_cds_WP_155864154.1_2108 target sequence
NNGKYNITPIIHPSSVILPSSGSGAKPACLIVEQGAKIFYNIYVSFISTCEVRISIYLYIPCSNEPYYYSTYTWYSGGRSFGYIG

SEQ ID NO: 21326 - protein, 85 aa, unidentified
  REGION 1..85: note = Description of Unknown:cds_NZ_WFIY01000004.1_cds_WP_155864154.1_2108 target sequence
VPKDSHLSISLYDEPTYQVLLYEEAQPQAVNLMENCGPYVKLNLNCKTPVEYFYLISSCINDNILTPTYSTMGNEYCMYHVTYLC

SEQ ID NO: 21327 - protein, 84 aa, unidentified
  REGION 1..84: note = Description of Unknown:cds_NZ_WFIY01000004.1_cds_WP_155864154.1_2108 target sequence
PKDSHLSISLYDEPTYQVLLYEEAQPQAVNLMENCGPYVKLNLNCKTPVEYFYLISSCINDNILTPTYSTMGNEYCMYHVTYLC

SEQ ID NO: 21328 - protein, 85 aa, unidentified
  REGION 1..85: note = Description of Unknown:cds_NZ_WFIY01000004.1_cds_WP_155864154.1_2108 target sequence
SSLIEAKTNPLYIAEDYSKGLEVSSTQPVINYIIPQHKCQPINFTVNFILTVNIPGYQGGKLYLIPFLMPSNYNPYYYVPTSIPN

SEQ ID NO: 21329 - protein, 85 aa, unidentified
  REGION 1..85: note = Description of Unknown:cds_NZ_WFIY01000004.1_cds_WP_155864154.1_2108 target sequence
QVSNPNYVGYVSIKIGDTQLKPILFNNNVYFLNQQQGKIEAYAFCICNGQTLNVTFVTSPNETPVIWIIANICGQMYRLAYPYFI

SEQ ID NO: 21330 - protein, 85 aa, unidentified
  REGION 1..85: note = Description of Unknown:cds_NZ_WFIY01000004.1_cds_WP_155864154.1_2108 target sequence
SLSKGINTANGIITSAPLTYYELYQKELGCLSILFSSSSRGFVKIYGNDEIKTNHGNIGYFANEGCLQIVGDVKFCNVCTLYLSK

SEQ ID NO: 21331 - protein, 85 aa, unidentified
  REGION 1..85: note = Description of Unknown:cds_NZ_WFIY01000004.1_cds_WP_155864154.1_2108 target sequence
GIEVHVGDHCPIPKCCKIEYVPPCPCVFVNPIYQYYNPSNYQQELQSEINSVKFCKCTAHDSSCINNKFIKYCDGILYICKPIKF

SEQ ID NO: 21332 - protein, 85 aa, unidentified
  REGION 1..85: note = Description of Unknown:cds_NZ_WFIY01000004.1_cds_WP_155864154.1_2108 target sequence
CNQLCIEKSSPIHTKCIIFKCPVIFSNGFVDQSCVNLRFCKCVVSEGCTSVISNAELVFEKGVLFNCTTNKNVGKLILTSTHKQS

SEQ ID NO: 21333 - protein, 85 aa, unidentified
  REGION 1..85: note = Description of Unknown:cds_NZ_WFIY01000004.1_cds_WP_155864154.1_2108 target sequence
CGIQIISCGPFIAYFECAPKGKSLVELRGVHLQDKNNIISFTAKCIEICGVDTICSCYPLFIQAPSYPTIGFNNVTICGGLVLKS

SEQ ID NO: 21334 - protein, 85 aa, unidentified
  REGION 1..85: note = Description of Unknown:cds_NZ_WFIY01000004.1_cds_WP_155864154.1_2108 target sequence
GCHTTLTFTGCNKLCVKKGPLIIDTGSCSSLTMARNSQINVCGYSLIKVNNIKLDGGAKLVTSKYDLFYGCRVDFCGNELIVCNY

SEQ ID NO: 21335 - protein, 85 aa, unidentified
  REGION 1..85: note = Description of Unknown:cds_NZ_WFIY01000004.1_cds_WP_155864154.1_2108 target sequence
QPPQGKLSQITVYPTITSSFGVAGWFSVFPNNTEVNYLNIKLSNSTCTFCMFLNISPLNNGKYNITPIIHPSSVILPSSGSGAKP

SEQ ID NO: 21336 - protein, 85 aa, unidentified
  REGION 1..85: note = Description of Unknown:cds_NZ_WFIY01000004.1_cds_WP_155864154.1_2108 target sequence
ACLIVEQGAKIFYNIYVSFISTCEVRISIYLYIPCSNEPYYYSTYTWYSGGRSFGYIGVPKDSHLSISLYDEPTYQVLLYEEAQP

SEQ ID NO: 21337 - protein, 85 aa, unidentified
  REGION 1..85: note = Description of Unknown:cds_NC_030656.1_cds_YP_009268797.1_82 target sequence
EKSKVSDSLSCFLHALVNEIDSLPPHNPKEDKHHELELVFIHPPLITLSNILNISTLVDSYVQFTVTMSEDNSKIRTRTPMTNVH

SEQ ID NO: 21338 - protein, 85 aa, unidentified
  REGION 1..85: note = Description of Unknown:cds_NC_030656.1_cds_YP_009268797.1_82 target sequence
GLDIKNNQLVDNIQRIVWEKKSLISQKEFCYKECILRHATEENYVFVDFRKFNSSIKIELVNRVRAKLKNVMAEFKIKYFLGSGS

SEQ ID NO: 21339 - protein, 85 aa, unidentified
  REGION 1..85: note = Description of Unknown:cds_NC_030656.1_cds_YP_009268797.1_82 target sequence
QSKSSMLHALNHPKSKPNTTLEIEILSTEDERPSKEELRDEVFKLSKLLFMGHPDNIFFYYQSPKMYPKTIMLKKQELLTLQLEN

SEQ ID NO: 21340 - protein, 85 aa, unidentified
  REGION 1..85: note = Description of Unknown:cds_NC_030656.1_cds_YP_009268797.1_82 target sequence
LYIVGKTDGVTTHVLVDQSGILCYFKHLGYAIKYKCNKKLTGVIELVCEAVKNQSNNTWTLYVIKVIKPSMNDRLSELEFVNEEL

SEQ ID NO: 21341 - protein, 85 aa, unidentified
  REGION 1..85: note = Description of Unknown:cds_NC_030656.1_cds_YP_009268797.1_82 target sequence
KNICDRITFKTKKFNGPFTTHTELIESLSKMMEDQPEGVIVFYSKGPKSTLDYKIKKDNTIDLFLNITYRYMSSEPVIFGENNLF

SEQ ID NO: 21342 - protein, 85 aa, unidentified
  REGION 1..85: note = Description of Unknown:cds_NC_030656.1_cds_YP_009268797.1_82 target sequence
LEYKKFANDKGFPKDFGTGKLIISDSVKYLNNLYCISFHNMFNDVGIKTVTVPIKFVGEFSYNGEFIKPRLDKTMQFFTDLGYYG

SEQ ID NO: 21343 - protein, 85 aa, unidentified
  REGION 1..85: note = Description of Unknown:cds_NC_030656.1_cds_YP_009268797.1_82 target sequence
NQYNVVMTHINDQELKINEIFDTDKLADVGKRSQFDDTSRLNQDTAYFTKKRTRGPLGILTNFVKTLLISLYCSKTFMDNTARRK

SEQ ID NO: 21344 - protein, 85 aa, unidentified
  REGION 1..85: note = Description of Unknown:cds_NC_030656.1_cds_YP_009268797.1_82 target sequence
VLAIDFGNGADLEKYFFGEISLMVATDPDARAIETGMERYNKLNAGVKSKYYKFNYIQETIRSSSFVSSVREVFYFGKFDLVDWQ

SEQ ID NO: 21345 - protein, 85 aa, unidentified
  REGION 1..85: note = Description of Unknown:cds_NC_030656.1_cds_YP_009268797.1_82 target sequence
LAIHYSFHPKHYSTIMKNLSELTASRGTVLITTMDGDFLETLTEKKTFVIHKDLPPSENFMSLEKIDDSKVLAYSPATMSKPMVE

SEQ ID NO: 21346 - protein, 84 aa, unidentified
  REGION 1..84: note = Description of Unknown:cds_NC_030656.1_cds_YP_009268797.1_82 target sequence
VEYIVKKNTITRVFSEYGFELIDYVSFYDVIKRSKDFITGVSKLEKRQSTKNFFELNRSVVHSLDSLDVEDLLRYYVVYVFSKR

SEQ ID NO: 21347 - protein, 85 aa, unidentified
  REGION 1..85: note = Description of Unknown:cds_NC_030656.1_cds_YP_009268797.1_82 target sequence
PKEDKHHELELVFIHPPLITLSNILNISTLVDSYVQFTVTMSEDNSKIRTRTPMTNVHGLDIKNNQLVDNIQRIVWEKKSLISQK

SEQ ID NO: 21348 - protein, 85 aa, unidentified
  REGION 1..85: note = Description of Unknown:cds_NC_030656.1_cds_YP_009268797.1_82 target sequence
EFCYKECILRHATEENYVFVDFRKFNSSIKIELVNRVRAKLKNVMAEFKIKYFLGSGSQSKSSMLHALNHPKSKPNTTLEIEILS

SEQ ID NO: 21349 - protein, 85 aa, unidentified
  REGION 1..85: note = Description of Unknown:cds_NC_030656.1_cds_YP_009268797.1_82 target sequence
TEDERPSKEELRDEVFKLSKLLFMGHPDNIFFYYQSPKMYPKTIMLKKQELLTLQLENLYIVGKTDGVTTHVLVDQSGILCYFKH

SEQ ID NO: 21350 - protein, 85 aa, unidentified
  REGION 1..85: note = Description of Unknown:cds_NC_030656.1_cds_YP_009268797.1_82 target sequence
LGYAIKYKCNKKLTGVIELVCEAVKNQSNNTWTLYVIKVIKPSMNDRLSELEFVNEELKNICDRITFKTKKFNGPFTTHTELIES

SEQ ID NO: 21351 - protein, 85 aa, unidentified
  REGION 1..85: note = Description of Unknown:cds_NC_030656.1_cds_YP_009268797.1_82 target sequence
LSKMMEDQPEGVIVFYSKGPKSTLDYKIKKDNTIDLFLNITYRYMSSEPVIFGENNLFLEYKKFANDKGFPKDFGTGKLIISDSV

SEQ ID NO: 21352 - protein, 85 aa, unidentified
  REGION 1..85: note = Description of Unknown:cds_NC_030656.1_cds_YP_009268797.1_82 target sequence
KYLNNLYCISFHNMFNDVGIKTVTVPIKFVGEFSYNGEFIKPRLDKTMQFFTDLGYYGNQYNVVMTHINDQELKINEIFDTDKLA

SEQ ID NO: 21353 - protein, 85 aa, unidentified
  REGION 1..85: note = Description of Unknown:cds_NC_030656.1_cds_YP_009268797.1_82 target sequence
DVGKRSQFDDTSRLNQDTAYFTKKRTRGPLGILTNFVKTLLISLYCSKTFMDNTARRKVLAIDFGNGADLEKYFFGEISLMVATD

SEQ ID NO: 21354 - protein, 85 aa, unidentified
  REGION 1..85: note = Description of Unknown:cds_NC_030656.1_cds_YP_009268797.1_82 target sequence
PDARAIETGMERYNKLNAGVKSKYYKFNYIQETIRSSSFVSSVREVFYFGKFDLVDWQLAIHYSFHPKHYSTIMKNLSELTASRG

SEQ ID NO: 21355 - protein, 85 aa, unidentified
  REGION 1..85: note = Description of Unknown:cds_NC_030656.1_cds_YP_009268797.1_82 target sequence
TVLITTMDGDFLETLTEKKTFVIHKDLPPSENFMSLEKIDDSKVLAYSPATMSKPMVEYIVKKNTITRVFSEYGFELIDYVSFYD

SEQ ID NO: 21356 - protein, 85 aa, unidentified
  REGION 1..85: note = Description of Unknown:cds_NZ_WFIY01000004.1_cds_WP_155863560.1_1488 target sequence
KSKSIYFKILLLGIIVLLGGMIVSEAAGVFVAPSALKQHVTPAIDYCKFGPYLGSIIFLWNYTINTQIYECFLSGNIQLINALPA

SEQ ID NO: 21357 - protein, 85 aa, unidentified
  REGION 1..85: note = Description of Unknown:cds_NZ_WFIY01000004.1_cds_WP_155863560.1_1488 target sequence
SQFLSSCIETLEKLPSVSVYDEVTYSFIFFQFNFKYYPENNVYFRWAIASLINPACVESQILCNGLKGVPNGLYICPAVFPCLAS

SEQ ID NO: 21358 - protein, 85 aa, unidentified
  REGION 1..85: note = Description of Unknown:cds_NZ_WFIY01000004.1_cds_WP_155863560.1_1488 target sequence
NTTLISELYSIYSAHESYCPKRACQYLKDAGLVYNPSLGEWTYPNGTPVVIPVYIQEDFYNCKAWISMLEHNACEIHFGKNLEII

SEQ ID NO: 21359 - protein, 85 aa, unidentified
  REGION 1..85: note = Description of Unknown:cds_NZ_WFIY01000004.1_cds_WP_155863560.1_1488 target sequence
DYPGSCLGTDLSSLKYGLINFGYLSYTALIADYYSTLGPLAPIVEFNCYVNSTVNAQLSAAYTKDPTYSQALVNLANALVDLQWD

SEQ ID NO: 21360 - protein, 85 aa, unidentified
  REGION 1..85: note = Description of Unknown:cds_NZ_WFIY01000004.1_cds_WP_155863560.1_1488 target sequence
EPWVILGWTTCITPAITNNYYGYVASPDEGYTLTYTDIHEGNTITGRLVEAMGTCGFKAPNMDILYCNFYSSSEIWDQGVPTPLT

SEQ ID NO: 21361 - protein, 85 aa, unidentified
  REGION 1..85: note = Description of Unknown:cds_NZ_WFIY01000004.1_cds_WP_155863560.1_1488 target sequence
TPPSEPTPLGLQPYVANYKIIHLYNVTINGHKIINGTEIIFCFVHNATWINGMPLTALDYNFSIWYFDMPGYCPNNNPLGLNISH

SEQ ID NO: 21362 - protein, 85 aa, unidentified
  REGION 1..85: note = Description of Unknown:cds_NZ_WFIY01000004.1_cds_WP_155863560.1_1488 target sequence
VYIGNYFGIPVYVNYSEIPNYAMKIVYGTMPSLVYSCVPANNIYEIKLYFNSTAACLLSASNEIIVPPCIYLNYKPCQYNPDYPS

SEQ ID NO: 21363 - protein, 85 aa, unidentified
  REGION 1..85: note = Description of Unknown:cds_NZ_WFIY01000004.1_cds_WP_155863560.1_1488 target sequence
FVCLAYKGELPGGFPWYIYEWNYSIGAIVKPFVGNFLWNPLACTYNVTAGSVATITTKITQIIASPYIVVASNGTVIKTAPKPCC

SEQ ID NO: 21364 - protein, 85 aa, unidentified
  REGION 1..85: note = Description of Unknown:cds_NZ_WFIY01000004.1_cds_WP_155863560.1_1488 target sequence
PITNATGYAEVWAYGSTTPIEKLNLIHVKGTDEYEVEVNTSYLKPNEFYVVFINATYYAPITVMGHTMMMPHYAYRWYAVYPYSP

SEQ ID NO: 21365 - protein, 84 aa, unidentified
  REGION 1..84: note = Description of Unknown:cds_NZ_WFIY01000004.1_cds_WP_155863560.1_1488 target sequence
VYPYSPTVITITTYVSNISSLISCASKLTRYTYAPASLFSVTVNSTLLTYTPPSVPSVSSAVIAMIGITVVLALIGVAILIRFK

SEQ ID NO: 21366 - protein, 85 aa, unidentified
  REGION 1..85: note = Description of Unknown:cds_NZ_WFIY01000004.1_cds_WP_155863560.1_1488 target sequence
GVFVAPSALKQHVTPAIDYCKFGPYLGSIIFLWNYTINTQIYECFLSGNIQLINALPASQFLSSCIETLEKLPSVSVYDEVTYSF

SEQ ID NO: 21367 - protein, 85 aa, unidentified
  REGION 1..85: note = Description of Unknown:cds_NZ_WFIY01000004.1_cds_WP_155863560.1_1488 target sequence
IFFQFNFKYYPENNVYFRWAIASLINPACVESQILCNGLKGVPNGLYICPAVFPCLASNTTLISELYSIYSAHESYCPKRACQYL

SEQ ID NO: 21368 - protein, 85 aa, unidentified
  REGION 1..85: note = Description of Unknown:cds_NZ_WFIY01000004.1_cds_WP_155863560.1_1488 target sequence
KDAGLVYNPSLGEWTYPNGTPVVIPVYIQEDFYNCKAWISMLEHNACEIHFGKNLEIIDYPGSCLGTDLSSLKYGLINFGYLSYT

SEQ ID NO: 21369 - protein, 85 aa, unidentified
  REGION 1..85: note = Description of Unknown:cds_NZ_WFIY01000004.1_cds_WP_155863560.1_1488 target sequence
ALIADYYSTLGPLAPIVEFNCYVNSTVNAQLSAAYTKDPTYSQALVNLANALVDLQWDEPWVILGWTTCITPAITNNYYGYVASP

SEQ ID NO: 21370 - protein, 85 aa, unidentified
  REGION 1..85: note = Description of Unknown:cds_NZ_WFIY01000004.1_cds_WP_155863560.1_1488 target sequence
DEGYTLTYTDIHEGNTITGRLVEAMGTCGFKAPNMDILYCNFYSSSEIWDQGVPTPLTTPPSEPTPLGLQPYVANYKIIHLYNVT

SEQ ID NO: 21371 - protein, 85 aa, unidentified
  REGION 1..85: note = Description of Unknown:cds_NZ_WFIY01000004.1_cds_WP_155863560.1_1488 target sequence
INGHKIINGTEIIFCFVHNATWINGMPLTALDYNFSIWYFDMPGYCPNNNPLGLNISHVYIGNYFGIPVYVNYSEIPNYAMKIVY

SEQ ID NO: 21372 - protein, 85 aa, unidentified
  REGION 1..85: note = Description of Unknown:cds_NZ_WFIY01000004.1_cds_WP_155863560.1_1488 target sequence
GTMPSLVYSCVPANNIYEIKLYFNSTAACLLSASNEIIVPPCIYLNYKPCQYNPDYPSFVCLAYKGELPGGFPWYIYEWNYSIGA

SEQ ID NO: 21373 - protein, 85 aa, unidentified
  REGION 1..85: note = Description of Unknown:cds_NZ_WFIY01000004.1_cds_WP_155863560.1_1488 target sequence
IVKPFVGNFLWNPLACTYNVTAGSVATITTKITQIIASPYIVVASNGTVIKTAPKPCCPITNATGYAEVWAYGSTTPIEKLNLIH

SEQ ID NO: 21374 - protein, 85 aa, unidentified
  REGION 1..85: note = Description of Unknown:cds_NZ_WFIY01000004.1_cds_WP_155863560.1_1488 target sequence
VKGTDEYEVEVNTSYLKPNEFYVVFINATYYAPITVMGHTMMMPHYAYRWYAVYPYSPTVITITTYVSNISSLISCASKLTRYTY

SEQ ID NO: 21375 - protein, 85 aa, unidentified
  REGION 1..85: note = Description of Unknown:cds_NC_035460.1_cds_YP_009408034.1_83 target sequence
DEKMLTVSLNEYINLFIDTIDNFKKPPLKDDINHEFEIIFIDPPLIALSNIYKISTKHESFILFTVTDKENSVKYRTTIPLSNIH

SEQ ID NO: 21376 - protein, 85 aa, unidentified
  REGION 1..85: note = Description of Unknown:cds_NC_035460.1_cds_YP_009408034.1_83 target sequence
GLDIKNVQLVESINNIVWEKKTLISENKLSSKCILKHSTEERHIFLDFIKYISAIKLELVNLIQVRAKNFNIDFKFKYFLGSGAQ

SEQ ID NO: 21377 - protein, 85 aa, unidentified
  REGION 1..85: note = Description of Unknown:cds_NC_035460.1_cds_YP_009408034.1_83 target sequence
SKSSLLHVLNHPKSKPNPTIEFEYVYNDIGEKPSKKLLQNELKTLFRSVFMALPENIFIPQQILHMPIKTIMLKKQDIINLDVED

SEQ ID NO: 21378 - protein, 85 aa, unidentified
  REGION 1..85: note = Description of Unknown:cds_NC_035460.1_cds_YP_009408034.1_83 target sequence
LYATTKTDGVPTIVNIINNNIYCYFSHLNYIIKYESIHNFDKSITLFGEAIKNSNKQWIIYLIKLLTPTFNTRFEEKEFIDKTLN

SEQ ID NO: 21379 - protein, 85 aa, unidentified
  REGION 1..85: note = Description of Unknown:cds_NC_035460.1_cds_YP_009408034.1_83 target sequence
NVSNRIIFKTKKYDGPFLSSSEIIDFLSSTLSLQPEGIIFFYNNNVKAKVDYKIKNNNTTDQMLNIVFRYMSSEPIIFGEKTTFL

SEQ ID NO: 21380 - protein, 85 aa, unidentified
  REGION 1..85: note = Description of Unknown:cds_NC_035460.1_cds_YP_009408034.1_83 target sequence
EYKKFNDDKGFPKEFGSDKIILGQNVKYLNNIYCLEFNNIDKDVGLNNVIVPIKFIAEFSSDGSLIKPRIDKTIKYFNKDYYGNQ

SEQ ID NO: 21381 - protein, 85 aa, unidentified
  REGION 1..85: note = Description of Unknown:cds_NC_035460.1_cds_YP_009408034.1_83 target sequence
HVIVLEHQRDQRLNVNDVLNEDKLSDIGKECFVDKYRLNPEKVYFTSKRTRGPLGILSNYIKTLIISLYCSKTFLDNTNKRKVLA

SEQ ID NO: 21382 - protein, 85 aa, unidentified
  REGION 1..85: note = Description of Unknown:cds_NC_035460.1_cds_YP_009408034.1_83 target sequence
IDFGNGADLEKYFFGEIALLVATDPDEDAIARGYERYNKLNSGDKSKYYKFNYIKETIRSDTFISSVREVFYFGKFDIIDWQFAI

SEQ ID NO: 21383 - protein, 85 aa, unidentified
  REGION 1..85: note = Description of Unknown:cds_NC_035460.1_cds_YP_009408034.1_83 target sequence
HYSFHPRHYSTIMKNLLELTASGGKVLITTMDGDKLNLLTEKKTFVIHKNLPESENYMSVEKISNDKILVYNPSTMSSPMSEYIV

SEQ ID NO: 21384 - protein, 84 aa, unidentified
  REGION 1..84: note = Description of Unknown:cds_NC_035460.1_cds_YP_009408034.1_83 target sequence
MSEYIVKRADITRVFNEHGFELIDCVNFDTIIERNKHFINGVSKMEERSSTKNFFELNRTALKFDTLDVEELLSYYIVYIFSKR

SEQ ID NO: 21385 - protein, 85 aa, unidentified
  REGION 1..85: note = Description of Unknown:cds_NC_035460.1_cds_YP_009408034.1_83 target sequence
LKDDINHEFEIIFIDPPLIALSNIYKISTKHESFILFTVTDKENSVKYRTTIPLSNIHGLDIKNVQLVESINNIVWEKKTLISEN

SEQ ID NO: 21386 - protein, 85 aa, unidentified
  REGION 1..85: note = Description of Unknown:cds_NC_035460.1_cds_YP_009408034.1_83 target sequence
KLSSKCILKHSTEERHIFLDFIKYISAIKLELVNLIQVRAKNFNIDFKFKYFLGSGAQSKSSLLHVLNHPKSKPNPTIEFEYVYN

SEQ ID NO: 21387 - protein, 85 aa, unidentified
  REGION 1..85: note = Description of Unknown:cds_NC_035460.1_cds_YP_009408034.1_83 target sequence
DIGEKPSKKLLQNELKTLFRSVFMALPENIFIPQQILHMPIKTIMLKKQDIINLDVEDLYATTKTDGVPTIVNIINNNIYCYFSH

SEQ ID NO: 21388 - protein, 85 aa, unidentified
  REGION 1..85: note = Description of Unknown:cds_NC_035460.1_cds_YP_009408034.1_83 target sequence
LNYIIKYESIHNFDKSITLFGEAIKNSNKQWIIYLIKLLTPTFNTRFEEKEFIDKTLNNVSNRIIFKTKKYDGPFLSSSEIIDFL

SEQ ID NO: 21389 - protein, 85 aa, unidentified
  REGION 1..85: note = Description of Unknown:cds_NC_035460.1_cds_YP_009408034.1_83 target sequence
SSTLSLQPEGIIFFYNNNVKAKVDYKIKNNNTTDQMLNIVFRYMSSEPIIFGEKTTFLEYKKFNDDKGFPKEFGSDKIILGQNVK

SEQ ID NO: 21390 - protein, 85 aa, unidentified
  REGION 1..85: note = Description of Unknown:cds_NC_035460.1_cds_YP_009408034.1_83 target sequence
YLNNIYCLEFNNIDKDVGLNNVIVPIKFIAEFSSDGSLIKPRIDKTIKYFNKDYYGNQHVIVLEHQRDQRLNVNDVLNEDKLSDI

SEQ ID NO: 21391 - protein, 85 aa, unidentified
  REGION 1..85: note = Description of Unknown:cds_NC_035460.1_cds_YP_009408034.1_83 target sequence
GKECFVDKYRLNPEKVYFTSKRTRGPLGILSNYIKTLIISLYCSKTFLDNTNKRKVLAIDFGNGADLEKYFFGEIALLVATDPDE

SEQ ID NO: 21392 - protein, 85 aa, unidentified
  REGION 1..85: note = Description of Unknown:cds_NC_035460.1_cds_YP_009408034.1_83 target sequence
DAIARGYERYNKLNSGDKSKYYKFNYIKETIRSDTFISSVREVFYFGKFDIIDWQFAIHYSFHPRHYSTIMKNLLELTASGGKVL

SEQ ID NO: 21393 - protein, 85 aa, unidentified
  REGION 1..85: note = Description of Unknown:cds_NC_035460.1_cds_YP_009408034.1_83 target sequence
ITTMDGDKLNLLTEKKTFVIHKNLPESENYMSVEKISNDKILVYNPSTMSSPMSEYIVKRADITRVFNEHGFELIDCVNFDTIIE

SEQ ID NO: 21394 - protein, 85 aa, unidentified
  REGION 1..85: note = Description of Unknown:hvTR_Q6TVN7 target sequence
VSVMRKPRPASVAMRMYGATSTLFFFMTFSVRSASSDRNCRLTSRDVRKSSRCRKKPSDSLRSSSLLRCGYMRLLRAKKTVFSRA

SEQ ID NO: 21395 - protein, 85 aa, unidentified
  REGION 1..85: note = Description of Unknown:hvTR_Q6TVN7 target sequence
PARVASTLTSPRSMSASAAMSGTGWNMALPRDPRILFQFNAGYKYARATMLYTVAPQLVVLVGRHQEIERVLYLSLYDSVDEASP

SEQ ID NO: 21396 - protein, 85 aa, unidentified
  REGION 1..85: note = Description of Unknown:hvTR_Q6TVN7 target sequence
IYFFAKQYIQKDPEHVRRHILLTMRVRQLKGYLGSLLGLQDEIIVYSHKNNLEYSYVDNTIFNPFSPTQKKTLIRTDGILYNAYA

SEQ ID NO: 21397 - protein, 85 aa, unidentified
  REGION 1..85: note = Description of Unknown:hvTR_Q6TVN7 target sequence
DACNFLVVWVARAADTSAPEFGSFEEPNDSILKFEERLIREFANLDLNMNVETKFNNIFRTNLRESGLRAIAQQSPDKRAEVGDF

SEQ ID NO: 21398 - protein, 85 aa, unidentified
  REGION 1..85: note = Description of Unknown:hvTR_Q6TVN7 target sequence
DILLSKTDDFFVSMTGTRFMLVDEPLNLSVWGPEGDLVISSDGKTLTVNDVGLFTKLIESMDVKMDRVKGDITYKVSLNTTITSK

SEQ ID NO: 21399 - protein, 85 aa, unidentified
  REGION 1..85: note = Description of Unknown:hvTR_Q6TVN7 target sequence
MKLDMETSFIFVETATNNILLSTDKRISIILAKSHVSVKVKNYIPNIEKYFTFLIVAISVMFNNVKQSSDFTKVETVYWSRICQN

SEQ ID NO: 21400 - protein, 85 aa, unidentified
  REGION 1..85: note = Description of Unknown:hvTR_Q6TVN7 target sequence
TKTKNRKPVIVQSLDADMAKVSNNFFKSETREVFVNGNGVMFSCMDPDGRYNSVGFLSIFHRLQRICIPCCFLRSQAHTDTFKSC

SEQ ID NO: 21401 - protein, 85 aa, unidentified
  REGION 1..85: note = Description of Unknown:hvTR_Q6TVN7 target sequence
VYDEEVDRSALNPYILNFGKVVTESKLSFLPIIFDKYFNEGLEADFEADNKRLRATAGYYVVHCCEGAIVRLRTVSEIVSYVNAS

SEQ ID NO: 21402 - protein, 85 aa, unidentified
  REGION 1..85: note = Description of Unknown:hvTR_Q6TVN7 target sequence
GNVLISGDMVYFPMRLADTAATRILIQEIVHDVVRIRKDAATDAIHLDQDASGRLASMFPHKAARRVVREENGLSLTTSGFFVDG

SEQ ID NO: 21403 - protein, 84 aa, unidentified
  REGION 1..84: note = Description of Unknown:hvTR_Q6TVN7 target sequence
TTSGFFVDGKRFAPKLTSRFTAFVRNATVPNAVSRHFAKLFRHVVTDAPDRFMKTWSVNCALKLGVEPDSARAPALLQEFYPQP

SEQ ID NO: 21404 - protein, 85 aa, unidentified
  REGION 1..85: note = Description of Unknown:hvTR_Q6TVN7 target sequence
TFSVRSASSDRNCRLTSRDVRKSSRCRKKPSDSLRSSSLLRCGYMRLLRAKKTVFSRAPARVASTLTSPRSMSASAAMSGTGWNM

SEQ ID NO: 21405 - protein, 85 aa, unidentified
  REGION 1..85: note = Description of Unknown:hvTR_Q6TVN7 target sequence
ALPRDPRILFQFNAGYKYARATMLYTVAPQLVVLVGRHQEIERVLYLSLYDSVDEASPIYFFAKQYIQKDPEHVRRHILLTMRVR

SEQ ID NO: 21406 - protein, 85 aa, unidentified
  REGION 1..85: note = Description of Unknown:hvTR_Q6TVN7 target sequence
QLKGYLGSLLGLQDEIIVYSHKNNLEYSYVDNTIFNPFSPTQKKTLIRTDGILYNAYADACNFLVVWVARAADTSAPEFGSFEEP

SEQ ID NO: 21407 - protein, 85 aa, unidentified
  REGION 1..85: note = Description of Unknown:hvTR_Q6TVN7 target sequence
NDSILKFEERLIREFANLDLNMNVETKFNNIFRTNLRESGLRAIAQQSPDKRAEVGDFDILLSKTDDFFVSMTGTRFMLVDEPLN

SEQ ID NO: 21408 - protein, 85 aa, unidentified
  REGION 1..85: note = Description of Unknown:hvTR_Q6TVN7 target sequence
LSVWGPEGDLVISSDGKTLTVNDVGLFTKLIESMDVKMDRVKGDITYKVSLNTTITSKMKLDMETSFIFVETATNNILLSTDKRI

SEQ ID NO: 21409 - protein, 85 aa, unidentified
  REGION 1..85: note = Description of Unknown:hvTR_Q6TVN7 target sequence
SIILAKSHVSVKVKNYIPNIEKYFTFLIVAISVMFNNVKQSSDFTKVETVYWSRICQNTKTKNRKPVIVQSLDADMAKVSNNFFK

SEQ ID NO: 21410 - protein, 85 aa, unidentified
  REGION 1..85: note = Description of Unknown:hvTR_Q6TVN7 target sequence
SETREVFVNGNGVMFSCMDPDGRYNSVGFLSIFHRLQRICIPCCFLRSQAHTDTFKSCVYDEEVDRSALNPYILNFGKVVTESKL

SEQ ID NO: 21411 - protein, 85 aa, unidentified
  REGION 1..85: note = Description of Unknown:hvTR_Q6TVN7 target sequence
SFLPIIFDKYFNEGLEADFEADNKRLRATAGYYVVHCCEGAIVRLRTVSEIVSYVNASGNVLISGDMVYFPMRLADTAATRILIQ

SEQ ID NO: 21412 - protein, 85 aa, unidentified
  REGION 1..85: note = Description of Unknown:hvTR_Q6TVN7 target sequence
EIVHDVVRIRKDAATDAIHLDQDASGRLASMFPHKAARRVVREENGLSLTTSGFFVDGKRFAPKLTSRFTAFVRNATVPNAVSRH

SEQ ID NO: 21413 - protein, 85 aa, unidentified
  REGION 1..85: note = Description of Unknown:cds_NZ_WFIY01000001.1_cds_WP_155862277.1_2387 target sequence
VSIRLFNKEYLLYLIPLITSVIEWYILNHNSIPPAYPIIPNSVERQWTFSIMAGSSFTGILYLLVGFPLDVLNLYLGVPVTLTST

SEQ ID NO: 21414 - protein, 85 aa, unidentified
  REGION 1..85: note = Description of Unknown:cds_NZ_WFIY01000001.1_cds_WP_155862277.1_2387 target sequence
LWNFFTFEVLFLGVFFSSKYFLKKYFNASGILLYFIPTLASIPVPITWYTVSGVIYFYPGVYALTLALLDYSLDIEGKLTLKQAL

SEQ ID NO: 21415 - protein, 85 aa, unidentified
  REGION 1..85: note = Description of Unknown:cds_NZ_WFIY01000001.1_cds_WP_155862277.1_2387 target sequence
LRSMIASLGVTLDFTDPRGILYGILTFFIFSLYFMVLKRGKRLLYLKEWAKVFFLGVVFFALLNSSTIIYTEFIKPYIPLVGSST

SEQ ID NO: 21416 - protein, 85 aa, unidentified
  REGION 1..85: note = Description of Unknown:cds_NZ_WFIY01000001.1_cds_WP_155862277.1_2387 target sequence
VYNQLGIALQHVSPFYTLTGIMYWLGANYYISHYHANLILGVISTVIGLTALLIRKPITIFLGIIILAVVTYNYYGVTTLGYYLA

SEQ ID NO: 21417 - protein, 85 aa, unidentified
  REGION 1..85: note = Description of Unknown:cds_NZ_WFIY01000001.1_cds_WP_155862277.1_2387 target sequence
QTPYVGYLVYLYPTYLPSYFFVAPFYILVSFALFMIGKYLYRGKRVITKSVKTLPILFLLISPFISFYSPIAFSIESYHTTPPPN

SEQ ID NO: 21418 - protein, 85 aa, unidentified
  REGION 1..85: note = Description of Unknown:cds_NZ_WFIY01000001.1_cds_WP_155862277.1_2387 target sequence
AVIDSINLISRNDSGIVLVLGNSTLAGFYSGLPSMLSPAFYGYMNFIWNCLPEAVNAARFLSYFGIQYIVILQPSLVNCFNLFVN

SEQ ID NO: 21419 - protein, 85 aa, unidentified
  REGION 1..85: note = Description of Unknown:cds_NZ_WFIY01000001.1_cds_WP_155862277.1_2387 target sequence
SSDFTLVYNNSGVLVFKNDLYESAIIQRGVYVAFNFPKILEQISKLNSSFVIIPFYYVNDLHAILPYVKGFIGYNLSPIDIIPML

SEQ ID NO: 21420 - protein, 85 aa, unidentified
  REGION 1..85: note = Description of Unknown:cds_NZ_WFIY01000001.1_cds_WP_155862277.1_2387 target sequence
ISNSSYVISASNVYLNQLYTNGWVHESPFWTPDIMDAISEGNKVPLNLTLKIPDGQYYVFVLPVGTTFNKEVSGKVEIYSGNALS

SEQ ID NO: 21421 - protein, 85 aa, unidentified
  REGION 1..85: note = Description of Unknown:cds_NZ_WFIY01000001.1_cds_WP_155862277.1_2387 target sequence
VYFSNSVYNVSWVLAGKLNLVNHQIHVISNNLGIVKIVLVPSSCYNSLFNEALSILNSREVISVINNSINVKAGNYSPTAYGISV

SEQ ID NO: 21422 - protein, 84 aa, unidentified
  REGION 1..84: note = Description of Unknown:cds_NZ_WFIY01000001.1_cds_WP_155862277.1_2387 target sequence
YSPTAYGISVFANPWFLFLPYAHVIYVKNYLYKSNYYFGTAEVYITTTYPDINLTYPSFLPELIMNFIVDVGIISFIVKKRNWY

SEQ ID NO: 21423 - protein, 85 aa, unidentified
  REGION 1..85: note = Description of Unknown:cds_NZ_WFIY01000001.1_cds_WP_155862277.1_2387 target sequence
NHNSIPPAYPIIPNSVERQWTFSIMAGSSFTGILYLLVGFPLDVLNLYLGVPVTLTSTLWNFFTFEVLFLGVFFSSKYFLKKYFN

SEQ ID NO: 21424 - protein, 85 aa, unidentified
  REGION 1..85: note = Description of Unknown:cds_NZ_WFIY01000001.1_cds_WP_155862277.1_2387 target sequence
ASGILLYFIPTLASIPVPITWYTVSGVIYFYPGVYALTLALLDYSLDIEGKLTLKQALLRSMIASLGVTLDFTDPRGILYGILTF

SEQ ID NO: 21425 - protein, 85 aa, unidentified
  REGION 1..85: note = Description of Unknown:cds_NZ_WFIY01000001.1_cds_WP_155862277.1_2387 target sequence
FIFSLYFMVLKRGKRLLYLKEWAKVFFLGVVFFALLNSSTIIYTEFIKPYIPLVGSSTVYNQLGIALQHVSPFYTLTGIMYWLGA

SEQ ID NO: 21426 - protein, 85 aa, unidentified
  REGION 1..85: note = Description of Unknown:cds_NZ_WFIY01000001.1_cds_WP_155862277.1_2387 target sequence
NYYISHYHANLILGVISTVIGLTALLIRKPITIFLGIIILAVVTYNYYGVTTLGYYLAQTPYVGYLVYLYPTYLPSYFFVAPFYI

SEQ ID NO: 21427 - protein, 85 aa, unidentified
  REGION 1..85: note = Description of Unknown:cds_NZ_WFIY01000001.1_cds_WP_155862277.1_2387 target sequence
LVSFALFMIGKYLYRGKRVITKSVKTLPILFLLISPFISFYSPIAFSIESYHTTPPPNAVIDSINLISRNDSGIVLVLGNSTLAG

SEQ ID NO: 21428 - protein, 85 aa, unidentified
  REGION 1..85: note = Description of Unknown:cds_NZ_WFIY01000001.1_cds_WP_155862277.1_2387 target sequence
FYSGLPSMLSPAFYGYMNFIWNCLPEAVNAARFLSYFGIQYIVILQPSLVNCFNLFVNSSDFTLVYNNSGVLVFKNDLYESAIIQ

SEQ ID NO: 21429 - protein, 85 aa, unidentified
  REGION 1..85: note = Description of Unknown:cds_NZ_WFIY01000001.1_cds_WP_155862277.1_2387 target sequence
RGVYVAFNFPKILEQISKLNSSFVIIPFYYVNDLHAILPYVKGFIGYNLSPIDIIPMLISNSSYVISASNVYLNQLYTNGWVHES

SEQ ID NO: 21430 - protein, 85 aa, unidentified
  REGION 1..85: note = Description of Unknown:cds_NZ_WFIY01000001.1_cds_WP_155862277.1_2387 target sequence
PFWTPDIMDAISEGNKVPLNLTLKIPDGQYYVFVLPVGTTFNKEVSGKVEIYSGNALSVYFSNSVYNVSWVLAGKLNLVNHQIHV

SEQ ID NO: 21431 - protein, 85 aa, unidentified
  REGION 1..85: note = Description of Unknown:cds_NZ_WFIY01000001.1_cds_WP_155862277.1_2387 target sequence
ISNNLGIVKIVLVPSSCYNSLFNEALSILNSREVISVINNSINVKAGNYSPTAYGISVFANPWFLFLPYAHVIYVKNYLYKSNYY

SEQ ID NO: 21432 - protein, 85 aa, unidentified
  REGION 1..85: note = Description of Unknown:cds_NZ_WFIY01000004.1_cds_WP_155862466.1_219 target sequence
QTSTVSLLSLNKIKVIKRDGRKEEFKLEKILVKIGFVPSEVIDGIASDIIQNSKDNTIDTRTIADIVERNLIENSLEHPELMDLA

SEQ ID NO: 21433 - protein, 85 aa, unidentified
  REGION 1..85: note = Description of Unknown:cds_NZ_WFIY01000004.1_cds_WP_155862466.1_219 target sequence
KKYVLARIYNHVYGKGKWKDFDPKDLLLTYNALKVLEARYLLKDPNTLRYIETPQMMFRRVAKYLASVELKYGKSESEVKALEEK

SEQ ID NO: 21434 - protein, 85 aa, unidentified
  REGION 1..85: note = Description of Unknown:cds_NZ_WFIY01000004.1_cds_WP_155862466.1_219 target sequence
FYEIMSNLRFLPNTPTLMNSGTRLGILSACFVIPVRDSMTTPEGDGIYDALRAMALVHQQGGGTGFDFSELRPKGDVVASTAGVA

SEQ ID NO: 21435 - protein, 85 aa, unidentified
  REGION 1..85: note = Description of Unknown:cds_NZ_WFIY01000004.1_cds_WP_155862466.1_219 target sequence
SGPVSFMKIFDVSTDVVKQGGKRRGANMGVMHVWHAEIEDFINSKSGKLKDVQLQNFNISVGVYDYFMEKVERGEEVPLITPRKT

SEQ ID NO: 21436 - protein, 85 aa, unidentified
  REGION 1..85: note = Description of Unknown:cds_NZ_WFIY01000004.1_cds_WP_155862466.1_219 target sequence
RIPGTDHDYYINKARNYMSEEWVQEEILNELEEKGGAVWLDESKIITVDEALAIAEKEGAIIRWINARSLFEEIVKSAWDSGDPG

SEQ ID NO: 21437 - protein, 85 aa, unidentified
  REGION 1..85: note = Description of Unknown:cds_NZ_WFIY01000004.1_cds_WP_155862466.1_219 target sequence
LLFIDEINRRHPVWYLGKINATNPCGEEPLLPWESCNLGSINLEKFVKETENGKYIDWDGLAETIKYAVRLLDNVIDANKYPLKQ

SEQ ID NO: 21438 - protein, 85 aa, unidentified
  REGION 1..85: note = Description of Unknown:cds_NZ_WFIY01000004.1_cds_WP_155862466.1_219 target sequence
IEQATKNTRKVGLGVMGLARMLIRLGIPYDSVDAIYLSYQVAKFIYYHAFKTSIELAKEKGSFPAYDPLRYHDIWESARPFEYLL

SEQ ID NO: 21439 - protein, 85 aa, unidentified
  REGION 1..85: note = Description of Unknown:cds_NZ_WFIY01000004.1_cds_WP_155862466.1_219 target sequence
EVTKVEGKPSEYVRKLTAIVDKLDFSELKAERIKYGLRNSTVVSVAPTGTISIIAGTSSSIEPLFALAFIRNVAVGKFMEIDPLF

SEQ ID NO: 21440 - protein, 85 aa, unidentified
  REGION 1..85: note = Description of Unknown:cds_NZ_WFIY01000004.1_cds_WP_155862466.1_219 target sequence
LEYLRKYELDNPEVVKKVAETGTVGENMFMPATIRKLFRTAHEVPPEFHLLHQAAWQQWNDSGTSKTINLRSEEPPETVERVYLM

SEQ ID NO: 21441 - protein, 84 aa, unidentified
  REGION 1..84: note = Description of Unknown:cds_NZ_WFIY01000004.1_cds_WP_155862466.1_219 target sequence
EEPPETVERVYLMAWKLGVKGITVYRDKSKSQQVIYFGIKKEREEKEKREQEKKQQIIPSSFRMEKKFVEVDENYAGGCKTCEL

SEQ ID NO: 21442 - protein, 85 aa, unidentified
  REGION 1..85: note = Description of Unknown:cds_NZ_WFIY01000004.1_cds_WP_155862466.1_219 target sequence
EKILVKIGFVPSEVIDGIASDIIQNSKDNTIDTRTIADIVERNLIENSLEHPELMDLAKKYVLARIYNHVYGKGKWKDFDPKDLL

SEQ ID NO: 21443 - protein, 85 aa, unidentified
  REGION 1..85: note = Description of Unknown:cds_NZ_WFIY01000004.1_cds_WP_155862466.1_219 target sequence
LTYNALKVLEARYLLKDPNTLRYIETPQMMFRRVAKYLASVELKYGKSESEVKALEEKFYEIMSNLRFLPNTPTLMNSGTRLGIL

SEQ ID NO: 21444 - protein, 85 aa, unidentified
  REGION 1..85: note = Description of Unknown:cds_NZ_WFIY01000004.1_cds_WP_155862466.1_219 target sequence
SACFVIPVRDSMTTPEGDGIYDALRAMALVHQQGGGTGFDFSELRPKGDVVASTAGVASGPVSFMKIFDVSTDVVKQGGKRRGAN

SEQ ID NO: 21445 - protein, 85 aa, unidentified
  REGION 1..85: note = Description of Unknown:cds_NZ_WFIY01000004.1_cds_WP_155862466.1_219 target sequence
MGVMHVWHAEIEDFINSKSGKLKDVQLQNFNISVGVYDYFMEKVERGEEVPLITPRKTRIPGTDHDYYINKARNYMSEEWVQEEI

SEQ ID NO: 21446 - protein, 85 aa, unidentified
  REGION 1..85: note = Description of Unknown:cds_NZ_WFIY01000004.1_cds_WP_155862466.1_219 target sequence
LNELEEKGGAVWLDESKIITVDEALAIAEKEGAIIRWINARSLFEEIVKSAWDSGDPGLLFIDEINRRHPVWYLGKINATNPCGE

SEQ ID NO: 21447 - protein, 85 aa, unidentified
  REGION 1..85: note = Description of Unknown:cds_NZ_WFIY01000004.1_cds_WP_155862466.1_219 target sequence
EPLLPWESCNLGSINLEKFVKETENGKYIDWDGLAETIKYAVRLLDNVIDANKYPLKQIEQATKNTRKVGLGVMGLARMLIRLGI

SEQ ID NO: 21448 - protein, 85 aa, unidentified
  REGION 1..85: note = Description of Unknown:cds_NZ_WFIY01000004.1_cds_WP_155862466.1_219 target sequence
PYDSVDAIYLSYQVAKFIYYHAFKTSIELAKEKGSFPAYDPLRYHDIWESARPFEYLLEVTKVEGKPSEYVRKLTAIVDKLDFSE

SEQ ID NO: 21449 - protein, 85 aa, unidentified
  REGION 1..85: note = Description of Unknown:cds_NZ_WFIY01000004.1_cds_WP_155862466.1_219 target sequence
LKAERIKYGLRNSTVVSVAPTGTISIIAGTSSSIEPLFALAFIRNVAVGKFMEIDPLFLEYLRKYELDNPEVVKKVAETGTVGEN

SEQ ID NO: 21450 - protein, 85 aa, unidentified
  REGION 1..85: note = Description of Unknown:cds_NZ_WFIY01000004.1_cds_WP_155862466.1_219 target sequence
MFMPATIRKLFRTAHEVPPEFHLLHQAAWQQWNDSGTSKTINLRSEEPPETVERVYLMAWKLGVKGITVYRDKSKSQQVIYFGIK

SEQ ID NO: 21451 - protein, 85 aa, unidentified
  REGION 1..85: note = Description of Unknown:cds_NZ_WFIY01000004.1_cds_WP_155863306.1_1265 target sequence
DFEADVNDGKFSNVKISLHDGKLEVDGNSYNLSDIEDVSLEEGLGINRIFITYKGKKVLIAEFTNRKKEELLTLYYALKNRYEEK

SEQ ID NO: 21452 - protein, 85 aa, unidentified
  REGION 1..85: note = Description of Unknown:cds_NZ_WFIY01000004.1_cds_WP_155863306.1_1265 target sequence
QKEKEEEERRRRKKDTGHFIVSLISPYKYKVILGTILSSILVILSLIPPYLLKILINNVFQEREIYLFPILIASLISVNVLNVIL

SEQ ID NO: 21453 - protein, 85 aa, unidentified
  REGION 1..85: note = Description of Unknown:cds_NZ_WFIY01000004.1_cds_WP_155863306.1_1265 target sequence
SALQNFILNLNGQRIVNELRLKLYKHVMEMSSSFIDRYNTGRILSRLTTDISNTLWFVTWGIPSIITNVGTIVGVGIAIFLITPS

SEQ ID NO: 21454 - protein, 85 aa, unidentified
  REGION 1..85: note = Description of Unknown:cds_NZ_WFIY01000004.1_cds_WP_155863306.1_1265 target sequence
LGLYALIPFPIIVLGTIMYRRRSKIAYHKLWRRTADISSLLTDTVPNIDSIKSYVKEDFESERLSRLNSEVISAQMNVIKTNLTW

SEQ ID NO: 21455 - protein, 85 aa, unidentified
  REGION 1..85: note = Description of Unknown:cds_NZ_WFIY01000004.1_cds_WP_155863306.1_1265 target sequence
FPLVSASISIISVLIWYVGGEEVLVGKIELGSLVAFVTYTTMFYQPVQNLINNVIPFTQQSLTSMDRLIEVFNAENDVKIADNPK

SEQ ID NO: 21456 - protein, 85 aa, unidentified
  REGION 1..85: note = Description of Unknown:cds_NZ_WFIY01000004.1_cds_WP_155863306.1_1265 target sequence
KIEVKGDVEFKNVTFSYDQVKPVIKDFSLKVKKGEKIAIVGKSGSGKSTVVKLLLRLYDPQSGEILIDGIPLKELDLKNYREQLG

SEQ ID NO: 21457 - protein, 85 aa, unidentified
  REGION 1..85: note = Description of Unknown:cds_NZ_WFIY01000004.1_cds_WP_155863306.1_1265 target sequence
LIKAEPTIFYGTVEYNIRYGKIDAKPEEIVAAAMASGSHDFIMEMPFAYDTHLGERGNKISSGQKQMIEIARLFLKNPKMLVLDE

SEQ ID NO: 21458 - protein, 85 aa, unidentified
  REGION 1..85: note = Description of Unknown:cds_NZ_WFIY01000004.1_cds_WP_155863306.1_1265 target sequence
ATSSVDSYSERKIMDTVISQFKDSTIIMIAHRISTLYYADRIIVMEEGRIVEEGTLEELLKRKDSKFYQIFQTQIPYMEETKPRI

SEQ ID NO: 21459 - protein, 85 aa, unidentified
  REGION 1..85: note = Description of Unknown:cds_NZ_WFIY01000004.1_cds_WP_155863306.1_1265 target sequence
EGKGFSYYLEMLKPVNLEILSKDKVVYEGTVYEVKSYYKPFPITRPYFLLIETNEGRYFAVDDFRKLKGSEIIEKELERKYFIPK

SEQ ID NO: 21460 - protein, 84 aa, unidentified
  REGION 1..84: note = Description of Unknown:cds_NZ_WFIY01000004.1_cds_WP_155863306.1_1265 target sequence
IEKELERKYFIPKIERIIKIDTTGDEFIWKVITNKGNTSFKTRGRNSLFKVDGKVFIIDTEDDVFEIELNAIDKRSAKMIDAIL

SEQ ID NO: 21461 - protein, 85 aa, unidentified
  REGION 1..85: note = Description of Unknown:cds_NZ_WFIY01000004.1_cds_WP_155863306.1_1265 target sequence
NSYNLSDIEDVSLEEGLGINRIFITYKGKKVLIAEFTNRKKEELLTLYYALKNRYEEKQKEKEEEERRRRKKDTGHFIVSLISPY

SEQ ID NO: 21462 - protein, 85 aa, unidentified
  REGION 1..85: note = Description of Unknown:cds_NZ_WFIY01000004.1_cds_WP_155863306.1_1265 target sequence
KYKVILGTILSSILVILSLIPPYLLKILINNVFQEREIYLFPILIASLISVNVLNVILSALQNFILNLNGQRIVNELRLKLYKHV

SEQ ID NO: 21463 - protein, 85 aa, unidentified
  REGION 1..85: note = Description of Unknown:cds_NZ_WFIY01000004.1_cds_WP_155863306.1_1265 target sequence
MEMSSSFIDRYNTGRILSRLTTDISNTLWFVTWGIPSIITNVGTIVGVGIAIFLITPSLGLYALIPFPIIVLGTIMYRRRSKIAY

SEQ ID NO: 21464 - protein, 85 aa, unidentified
  REGION 1..85: note = Description of Unknown:cds_NZ_WFIY01000004.1_cds_WP_155863306.1_1265 target sequence
HKLWRRTADISSLLTDTVPNIDSIKSYVKEDFESERLSRLNSEVISAQMNVIKTNLTWFPLVSASISIISVLIWYVGGEEVLVGK

SEQ ID NO: 21465 - protein, 85 aa, unidentified
  REGION 1..85: note = Description of Unknown:cds_NZ_WFIY01000004.1_cds_WP_155863306.1_1265 target sequence
IELGSLVAFVTYTTMFYQPVQNLINNVIPFTQQSLTSMDRLIEVFNAENDVKIADNPKKIEVKGDVEFKNVTFSYDQVKPVIKDF

SEQ ID NO: 21466 - protein, 85 aa, unidentified
  REGION 1..85: note = Description of Unknown:cds_NZ_WFIY01000004.1_cds_WP_155863306.1_1265 target sequence
SLKVKKGEKIAIVGKSGSGKSTVVKLLLRLYDPQSGEILIDGIPLKELDLKNYREQLGLIKAEPTIFYGTVEYNIRYGKIDAKPE

SEQ ID NO: 21467 - protein, 85 aa, unidentified
  REGION 1..85: note = Description of Unknown:cds_NZ_WFIY01000004.1_cds_WP_155863306.1_1265 target sequence
EIVAAAMASGSHDFIMEMPFAYDTHLGERGNKISSGQKQMIEIARLFLKNPKMLVLDEATSSVDSYSERKIMDTVISQFKDSTII

SEQ ID NO: 21468 - protein, 85 aa, unidentified
  REGION 1..85: note = Description of Unknown:cds_NZ_WFIY01000004.1_cds_WP_155863306.1_1265 target sequence
MIAHRISTLYYADRIIVMEEGRIVEEGTLEELLKRKDSKFYQIFQTQIPYMEETKPRIEGKGFSYYLEMLKPVNLEILSKDKVVY

SEQ ID NO: 21469 - protein, 85 aa, unidentified
  REGION 1..85: note = Description of Unknown:cds_NZ_WFIY01000004.1_cds_WP_155863306.1_1265 target sequence
EGTVYEVKSYYKPFPITRPYFLLIETNEGRYFAVDDFRKLKGSEIIEKELERKYFIPKIERIIKIDTTGDEFIWKVITNKGNTSF

SEQ ID NO: 21470 - protein, 85 aa, unidentified
  REGION 1..85: note = Description of Unknown:cds_NC_040408.1_cds_YP_009551534.1_3 target sequence
KVLALRRCTVQTYADTQTYIHDYNKDDYENAFLISNLTTHNILYVNYSLKVLEILNKSGIAAVEVTSDEELMVLMKCNFTYDYEA

SEQ ID NO: 21471 - protein, 85 aa, unidentified
  REGION 1..85: note = Description of Unknown:cds_NC_040408.1_cds_YP_009551534.1_3 target sequence
NCIYLHDYSYYANNELRTDQFWVTKTDIEEYLLPGWKLTYVGCNGVMTQGHYSFSFKCQNAATDDDMIIEYIYSEQLDFQTFMLE

SEQ ID NO: 21472 - protein, 85 aa, unidentified
  REGION 1..85: note = Description of Unknown:cds_NC_040408.1_cds_YP_009551534.1_3 target sequence
KIKERMTTALPIARLSNRVFRKKLFTSLQKKSKAIVNVGPRNESMFTFLEFPKVKQFSNGSYQVKDTIKLRQEKWLGKRLSQFDI

SEQ ID NO: 21473 - protein, 85 aa, unidentified
  REGION 1..85: note = Description of Unknown:cds_NC_040408.1_cds_YP_009551534.1_3 target sequence
GQYKNMLNVVTAIYYYYQLFGDKPKIYMAGSAPSYWIKDVLSYSIFEFETWDPLDTPFSNLHHAELFTIDTVYKLRSNSILYIDI

SEQ ID NO: 21474 - protein, 85 aa, unidentified
  REGION 1..85: note = Description of Unknown:cds_NC_040408.1_cds_YP_009551534.1_3 target sequence
RTDRGNTSWKEWRNIVEQQTISNLELAYKYLSNGRCKVCCVKMTAMDLELPITAKLLHHPTTEIRSEFYLLLDICDVRSTRRYIP

SEQ ID NO: 21475 - protein, 85 aa, unidentified
  REGION 1..85: note = Description of Unknown:cds_NC_040408.1_cds_YP_009551534.1_3 target sequence
KGVLYAYINTTITENVFIQDPFKVKPIKNTYIVALYALSNDFNARNSVVNLINNQVDSLITVRINNSFDDEPKVSFKNIYDWTFL

SEQ ID NO: 21476 - protein, 85 aa, unidentified
  REGION 1..85: note = Description of Unknown:cds_NC_040408.1_cds_YP_009551534.1_3 target sequence
PTDFDTKKSIITSYNACIAMYGLSLTLQHKPTGNNHLFILNGEDDYFKLDEYANHMSISRRSHQVRFSESATTYSGYIFRDITNG

SEQ ID NO: 21477 - protein, 85 aa, unidentified
  REGION 1..85: note = Description of Unknown:cds_NC_040408.1_cds_YP_009551534.1_3 target sequence
NFNLIDTNTENSVSGHVYNALIYYRYNYSFDLKRWIYLHSVNKVSVEGGKYYEHAPIELLYACRSAKEFARLQSDLTTVRFAAEI

SEQ ID NO: 21478 - protein, 85 aa, unidentified
  REGION 1..85: note = Description of Unknown:cds_NC_040408.1_cds_YP_009551534.1_3 target sequence
EQYINGVYNITYADDPNYFIGITFTNLPYECKVKTPHLTFGVLFISDNMVPDVVDILSSFKNEIEKMDMYTNYTYMLADGVYVAN

SEQ ID NO: 21479 - protein, 84 aa, unidentified
  REGION 1..84: note = Description of Unknown:cds_NC_040408.1_cds_YP_009551534.1_3 target sequence
TNYTYMLADGVYVANVGGVLSTYFKLYNIFYRAHITFGQSRMYIPHITLSFNNMRTVRIETTKLQIKSIYLRKIKGDTVFDMVE

SEQ ID NO: 21480 - protein, 85 aa, unidentified
  REGION 1..85: note = Description of Unknown:cds_NC_040408.1_cds_YP_009551534.1_3 target sequence
YENAFLISNLTTHNILYVNYSLKVLEILNKSGIAAVEVTSDEELMVLMKCNFTYDYEANCIYLHDYSYYANNELRTDQFWVTKTD

SEQ ID NO: 21481 - protein, 85 aa, unidentified
  REGION 1..85: note = Description of Unknown:cds_NC_040408.1_cds_YP_009551534.1_3 target sequence
IEEYLLPGWKLTYVGCNGVMTQGHYSFSFKCQNAATDDDMIIEYIYSEQLDFQTFMLEKIKERMTTALPIARLSNRVFRKKLFTS

SEQ ID NO: 21482 - protein, 85 aa, unidentified
  REGION 1..85: note = Description of Unknown:cds_NC_040408.1_cds_YP_009551534.1_3 target sequence
LQKKSKAIVNVGPRNESMFTFLEFPKVKQFSNGSYQVKDTIKLRQEKWLGKRLSQFDIGQYKNMLNVVTAIYYYYQLFGDKPKIY

SEQ ID NO: 21483 - protein, 85 aa, unidentified
  REGION 1..85: note = Description of Unknown:cds_NC_040408.1_cds_YP_009551534.1_3 target sequence
MAGSAPSYWIKDVLSYSIFEFETWDPLDTPFSNLHHAELFTIDTVYKLRSNSILYIDIRTDRGNTSWKEWRNIVEQQTISNLELA

SEQ ID NO: 21484 - protein, 85 aa, unidentified
  REGION 1..85: note = Description of Unknown:cds_NC_040408.1_cds_YP_009551534.1_3 target sequence
YKYLSNGRCKVCCVKMTAMDLELPITAKLLHHPTTEIRSEFYLLLDICDVRSTRRYIPKGVLYAYINTTITENVFIQDPFKVKPI

SEQ ID NO: 21485 - protein, 85 aa, unidentified
  REGION 1..85: note = Description of Unknown:cds_NC_040408.1_cds_YP_009551534.1_3 target sequence
KNTYIVALYALSNDFNARNSVVNLINNQVDSLITVRINNSFDDEPKVSFKNIYDWTFLPTDFDTKKSIITSYNACIAMYGLSLTL

SEQ ID NO: 21486 - protein, 85 aa, unidentified
  REGION 1..85: note = Description of Unknown:cds_NC_040408.1_cds_YP_009551534.1_3 target sequence
QHKPTGNNHLFILNGEDDYFKLDEYANHMSISRRSHQVRFSESATTYSGYIFRDITNGNFNLIDTNTENSVSGHVYNALIYYRYN

SEQ ID NO: 21487 - protein, 85 aa, unidentified
  REGION 1..85: note = Description of Unknown:cds_NC_040408.1_cds_YP_009551534.1_3 target sequence
YSFDLKRWIYLHSVNKVSVEGGKYYEHAPIELLYACRSAKEFARLQSDLTTVRFAAEIEQYINGVYNITYADDPNYFIGITFTNL

SEQ ID NO: 21488 - protein, 85 aa, unidentified
  REGION 1..85: note = Description of Unknown:cds_NC_040408.1_cds_YP_009551534.1_3 target sequence
PYECKVKTPHLTFGVLFISDNMVPDVVDILSSFKNEIEKMDMYTNYTYMLADGVYVANVGGVLSTYFKLYNIFYRAHITFGQSRM

SEQ ID NO: 21489 - protein, 85 aa, unidentified
  REGION 1..85: note = Description of Unknown:cds_NC_011508.2_cds_YP_002302228.1_3 target sequence
KVLALRHSVAQVYADTQVYVHDDTKDSYENAFLISNLTTHNILYLNYSIKTLEILNKSGIAAIALQSLEELFTLIRCNFTYDYEL

SEQ ID NO: 21490 - protein, 85 aa, unidentified
  REGION 1..85: note = Description of Unknown:cds_NC_011508.2_cds_YP_002302228.1_3 target sequence
DIIYLHDYSYYTNNEIRTDQHWITKTNIEEYLLPGWKLTYVGYNGSETRGHYNFSFKCQNAATDDDLIIEYIYSEALDFQNFMLK

SEQ ID NO: 21491 - protein, 85 aa, unidentified
  REGION 1..85: note = Description of Unknown:cds_NC_011508.2_cds_YP_002302228.1_3 target sequence
KIKERMTTSLPIARLSNRVFRDKLFPSLLKEHKNVVNVGPRNESMFTFLNYPTIKQFSNGAYLVKDTIKLKQERWLGKRISQFDI

SEQ ID NO: 21492 - protein, 85 aa, unidentified
  REGION 1..85: note = Description of Unknown:cds_NC_011508.2_cds_YP_002302228.1_3 target sequence
GQYKNMLNVLTAIYYYYNLYKSKPIIYMIGSAPSYWIYDVRHYSDFFFETWDPLDTPYSSIHHKELFFINDVKKLKDNSILYIDI

SEQ ID NO: 21493 - protein, 85 aa, unidentified
  REGION 1..85: note = Description of Unknown:cds_NC_011508.2_cds_YP_002302228.1_3 target sequence
RTDRGNADWKKWRKTVEEQTINNLDIAYEYLRTGKAKVCCVKMTAMDLELPISAKLLHHPTTEIRSEFYLLLDTWDLTNIRRFIP

SEQ ID NO: 21494 - protein, 85 aa, unidentified
  REGION 1..85: note = Description of Unknown:cds_NC_011508.2_cds_YP_002302228.1_3 target sequence
KGVLYSFINNIITENVFIQQPFKVKVLNDSYIVALYALSNDFNNRSEVIKLINNQKQSLITVRINNTFKDEPKVGFKNIYDWTFL

SEQ ID NO: 21495 - protein, 85 aa, unidentified
  REGION 1..85: note = Description of Unknown:cds_NC_011508.2_cds_YP_002302228.1_3 target sequence
PTDFDTKEAIITSYDGCLGLFGLSISLASKPTGNNHLFILSGTDKYYKLDQFANHTSISRRSHQIRFSESATSYSGYIFRDLSNN

SEQ ID NO: 21496 - protein, 85 aa, unidentified
  REGION 1..85: note = Description of Unknown:cds_NC_011508.2_cds_YP_002302228.1_3 target sequence
NFNLIGTNIENSVSGHVYNALIYYRYNYSFDLKRWIYLHSIDKVDIEGGKYYELAPIELIYACRSAKEFATLQDDLTVLRYSNEI

SEQ ID NO: 21497 - protein, 85 aa, unidentified
  REGION 1..85: note = Description of Unknown:cds_NC_011508.2_cds_YP_002302228.1_3 target sequence
ENYINTVYSITYADDPNYFIGIQFRNIPYKYDVKIPHLTFGVLHISDNMVPDVIDILKIMKNELFKMDITTSYTYMLSDGIYVAN

SEQ ID NO: 21498 - protein, 84 aa, unidentified
  REGION 1..84: note = Description of Unknown:cds_NC_011508.2_cds_YP_002302228.1_3 target sequence
TSYTYMLSDGIYVANVSGVLSTYFKIYNVFYKNQITFGQSRMFIPHITLSFNNMRTVRIETTKLQIKSIYLRKIKGDTVFDMVE

SEQ ID NO: 21499 - protein, 85 aa, unidentified
  REGION 1..85: note = Description of Unknown:cds_NC_011508.2_cds_YP_002302228.1_3 target sequence
YENAFLISNLTTHNILYLNYSIKTLEILNKSGIAAIALQSLEELFTLIRCNFTYDYELDIIYLHDYSYYTNNEIRTDQHWITKTN

SEQ ID NO: 21500 - protein, 85 aa, unidentified
  REGION 1..85: note = Description of Unknown:cds_NC_011508.2_cds_YP_002302228.1_3 target sequence
IEEYLLPGWKLTYVGYNGSETRGHYNFSFKCQNAATDDDLIIEYIYSEALDFQNFMLKKIKERMTTSLPIARLSNRVFRDKLFPS

SEQ ID NO: 21501 - protein, 85 aa, unidentified
  REGION 1..85: note = Description of Unknown:cds_NC_011508.2_cds_YP_002302228.1_3 target sequence
LLKEHKNVVNVGPRNESMFTFLNYPTIKQFSNGAYLVKDTIKLKQERWLGKRISQFDIGQYKNMLNVLTAIYYYYNLYKSKPIIY

SEQ ID NO: 21502 - protein, 85 aa, unidentified
  REGION 1..85: note = Description of Unknown:cds_NC_011508.2_cds_YP_002302228.1_3 target sequence
MIGSAPSYWIYDVRHYSDFFFETWDPLDTPYSSIHHKELFFINDVKKLKDNSILYIDIRTDRGNADWKKWRKTVEEQTINNLDIA

SEQ ID NO: 21503 - protein, 85 aa, unidentified
  REGION 1..85: note = Description of Unknown:cds_NC_011508.2_cds_YP_002302228.1_3 target sequence
YEYLRTGKAKVCCVKMTAMDLELPISAKLLHHPTTEIRSEFYLLLDTWDLTNIRRFIPKGVLYSFINNIITENVFIQQPFKVKVL

SEQ ID NO: 21504 - protein, 85 aa, unidentified
  REGION 1..85: note = Description of Unknown:cds_NC_011508.2_cds_YP_002302228.1_3 target sequence
NDSYIVALYALSNDFNNRSEVIKLINNQKQSLITVRINNTFKDEPKVGFKNIYDWTFLPTDFDTKEAIITSYDGCLGLFGLSISL

SEQ ID NO: 21505 - protein, 85 aa, unidentified
  REGION 1..85: note = Description of Unknown:cds_NC_011508.2_cds_YP_002302228.1_3 target sequence
ASKPTGNNHLFILSGTDKYYKLDQFANHTSISRRSHQIRFSESATSYSGYIFRDLSNNNFNLIGTNIENSVSGHVYNALIYYRYN

SEQ ID NO: 21506 - protein, 85 aa, unidentified
  REGION 1..85: note = Description of Unknown:cds_NC_011508.2_cds_YP_002302228.1_3 target sequence
YSFDLKRWIYLHSIDKVDIEGGKYYELAPIELIYACRSAKEFATLQDDLTVLRYSNEIENYINTVYSITYADDPNYFIGIQFRNI

SEQ ID NO: 21507 - protein, 85 aa, unidentified
  REGION 1..85: note = Description of Unknown:cds_NC_011508.2_cds_YP_002302228.1_3 target sequence
PYKYDVKIPHLTFGVLHISDNMVPDVIDILKIMKNELFKMDITTSYTYMLSDGIYVANVSGVLSTYFKIYNVFYKNQITFGQSRM

SEQ ID NO: 21508 - protein, 85 aa, unidentified
  REGION 1..85: note = Description of Unknown:cds_NC_030656.1_cds_YP_009268761.1_46 target sequence
EFVLNAEVREALEQRFNTHDELTISSLCKTTLCGTLHKYSDFDVVKLVIKLSEYTTLSALYVHPSYIYAHHVVDMILNCTRIHDD

SEQ ID NO: 21509 - protein, 85 aa, unidentified
  REGION 1..85: note = Description of Unknown:cds_NC_030656.1_cds_YP_009268761.1_46 target sequence
CIPYVNKHVPSCVKILDHDMLIKLVQIHSTKYKTVYAERCKQREYNYFCASYAFSHPLKPFLTEAIRKGYSKYHKTFPYWLVKGI

SEQ ID NO: 21510 - protein, 85 aa, unidentified
  REGION 1..85: note = Description of Unknown:cds_NC_030656.1_cds_YP_009268761.1_46 target sequence
PSAVEFIHDDKLEWFLDDNFRVVTEALNYRYVPSQILLKLFKSYNILPYNHGLLEIKDPNVLCDIVFHFMKNPEIDFTSFVDHKT

SEQ ID NO: 21511 - protein, 85 aa, unidentified
  REGION 1..85: note = Description of Unknown:cds_NC_030656.1_cds_YP_009268761.1_46 target sequence
FCSEKVCKVIINNLCPHVSKPLIRTCLTTFYTNVELRAIIGMSYYVCVATEDEIIEMGQLETFNMLTMDDINMLLKNVYVLELMD

SEQ ID NO: 21512 - protein, 85 aa, unidentified
  REGION 1..85: note = Description of Unknown:cds_NC_030656.1_cds_YP_009268761.1_46 target sequence
IKDLVKTLVIQLAELAPSKIFSCAVSNPEGYLKLMENSLSEEHCAVLIRSCARKIYAVIPHSVTTPCIFEALIATNTFSIQLMEV

SEQ ID NO: 21513 - protein, 85 aa, unidentified
  REGION 1..85: note = Description of Unknown:cds_NC_030656.1_cds_YP_009268761.1_46 target sequence
EELANIASYPHLQKIIDSIELEDLLCIDFHYINALVSDNKLDLFRIYAEKFSEHPCYFGVVTSHKFKPVREILLNHTFAGRFPMT

SEQ ID NO: 21514 - protein, 85 aa, unidentified
  REGION 1..85: note = Description of Unknown:cds_NC_030656.1_cds_YP_009268761.1_46 target sequence
YLHHVMYTEAYKWCPKSMSLNTPLNITKTMHLEIQSDKNIESTLSDGSIVLVGSFVRRRAIISEVFSKSFNGGNEPTKRFKSEEC

SEQ ID NO: 21515 - protein, 85 aa, unidentified
  REGION 1..85: note = Description of Unknown:cds_NC_030656.1_cds_YP_009268761.1_46 target sequence
YKIIIPNIQESPNHNNQYFDVWREFGHSYVNIISQADAFVGLNFHRVQVKLSAVNAINQLLLDLLTLMERGIFFKLFNTTNTDLY

SEQ ID NO: 21516 - protein, 85 aa, unidentified
  REGION 1..85: note = Description of Unknown:cds_NC_030656.1_cds_YP_009268761.1_46 target sequence
EHVMDCSIINIIRHDAIKLCYDSYITLDDELATITMSFKKTNLYLARVRIYAHYLLQYILYTSVLWFRYNNTTIQFDHVLKLLCI

SEQ ID NO: 21517 - protein, 84 aa, unidentified
  REGION 1..84: note = Description of Unknown:cds_NC_030656.1_cds_YP_009268761.1_46 target sequence
RYNNTTIQFDHVLKLLCITLTDGNTDIYDDDIFKLAADELYSLFNFIIPLNEEYSGTVNSTTYIDALMSKVLALSIKARLSRCK

SEQ ID NO: 21518 - protein, 85 aa, unidentified
  REGION 1..85: note = Description of Unknown:cds_NC_030656.1_cds_YP_009268761.1_46 target sequence
CKTTLCGTLHKYSDFDVVKLVIKLSEYTTLSALYVHPSYIYAHHVVDMILNCTRIHDDCIPYVNKHVPSCVKILDHDMLIKLVQI

SEQ ID NO: 21519 - protein, 85 aa, unidentified
  REGION 1..85: note = Description of Unknown:cds_NC_030656.1_cds_YP_009268761.1_46 target sequence
HSTKYKTVYAERCKQREYNYFCASYAFSHPLKPFLTEAIRKGYSKYHKTFPYWLVKGIPSAVEFIHDDKLEWFLDDNFRVVTEAL

SEQ ID NO: 21520 - protein, 85 aa, unidentified
  REGION 1..85: note = Description of Unknown:cds_NC_030656.1_cds_YP_009268761.1_46 target sequence
NYRYVPSQILLKLFKSYNILPYNHGLLEIKDPNVLCDIVFHFMKNPEIDFTSFVDHKTFCSEKVCKVIINNLCPHVSKPLIRTCL

SEQ ID NO: 21521 - protein, 85 aa, unidentified
  REGION 1..85: note = Description of Unknown:cds_NC_030656.1_cds_YP_009268761.1_46 target sequence
TTFYTNVELRAIIGMSYYVCVATEDEIIEMGQLETFNMLTMDDINMLLKNVYVLELMDIKDLVKTLVIQLAELAPSKIFSCAVSN

SEQ ID NO: 21522 - protein, 85 aa, unidentified
  REGION 1..85: note = Description of Unknown:cds_NC_030656.1_cds_YP_009268761.1_46 target sequence
PEGYLKLMENSLSEEHCAVLIRSCARKIYAVIPHSVTTPCIFEALIATNTFSIQLMEVEELANIASYPHLQKIIDSIELEDLLCI

SEQ ID NO: 21523 - protein, 85 aa, unidentified
  REGION 1..85: note = Description of Unknown:cds_NC_030656.1_cds_YP_009268761.1_46 target sequence
DFHYINALVSDNKLDLFRIYAEKFSEHPCYFGVVTSHKFKPVREILLNHTFAGRFPMTYLHHVMYTEAYKWCPKSMSLNTPLNIT

SEQ ID NO: 21524 - protein, 85 aa, unidentified
  REGION 1..85: note = Description of Unknown:cds_NC_030656.1_cds_YP_009268761.1_46 target sequence
KTMHLEIQSDKNIESTLSDGSIVLVGSFVRRRAIISEVFSKSFNGGNEPTKRFKSEECYKIIIPNIQESPNHNNQYFDVWREFGH

SEQ ID NO: 21525 - protein, 85 aa, unidentified
  REGION 1..85: note = Description of Unknown:cds_NC_030656.1_cds_YP_009268761.1_46 target sequence
SYVNIISQADAFVGLNFHRVQVKLSAVNAINQLLLDLLTLMERGIFFKLFNTTNTDLYEHVMDCSIINIIRHDAIKLCYDSYITL

SEQ ID NO: 21526 - protein, 85 aa, unidentified
  REGION 1..85: note = Description of Unknown:cds_NC_030656.1_cds_YP_009268761.1_46 target sequence
DDELATITMSFKKTNLYLARVRIYAHYLLQYILYTSVLWFRYNNTTIQFDHVLKLLCITLTDGNTDIYDDDIFKLAADELYSLFN

SEQ ID NO: 21527 - protein, 84 aa, unidentified
  REGION 1..84: note = Description of Unknown:cds_NC_001449.1_cds_YP_006491235.1_4 target sequence
CLAVLCCARTARAETTWESLDHLWNNNQQMFWIQLLIPLAALIVVTRLLKCVCCVVPFLSRGRRRRRRRLRARDHDAEPSGNLV

SEQ ID NO: 21528 - protein, 85 aa, unidentified
  REGION 1..85: note = Description of Unknown:hvTR_P28284 target sequence
EPRPGTSSRADPGPERPPRQTPGTQPAAPHAWGMLNDMQWLASSDSEEETEVGISDDDLHRDSTSEAGSTDTEMFEAGLMDAATP

SEQ ID NO: 21529 - protein, 85 aa, unidentified
  REGION 1..85: note = Description of Unknown:hvTR_P28284 target sequence
PARPPAERQGSPTPADAQGSCGGGPVGEEEAEAGGGGDVCAVCTDEIAPPLRCQSFPCLHPFCIPCMKTWIPLRNTCPLCNTPVA

SEQ ID NO: 21530 - protein, 85 aa, unidentified
  REGION 1..85: note = Description of Unknown:hvTR_P28284 target sequence
YLIVGVTASGSFSTIPIVNDPRTRVEAEAAVRAGTAVDFIWTGNPRTAPRSLSLGGHTVRALSPTPPWPGTDDEDDDLADVDYVP

SEQ ID NO: 21531 - protein, 85 aa, unidentified
  REGION 1..85: note = Description of Unknown:hvTR_P28284 target sequence
PAPRRAPRRGGGGAGATRGTSQPAATRPAPPGAPRSSSSGGAPLRAGVGSGSGGGPAVAAVVPRVASLPPAAGGGRAQARRVGED

SEQ ID NO: 21532 - protein, 85 aa, unidentified
  REGION 1..85: note = Description of Unknown:hvTR_P28284 target sequence
AAAAEGRTPPARQPRAAQEPPIVISDSPPPSPRRPAGPGPLSFVSSSSAQVSSGPGGGGLPQSSGRAARPRAAVAPRVRSPPRAA

SEQ ID NO: 21533 - protein, 85 aa, unidentified
  REGION 1..85: note = Description of Unknown:hvTR_P28284 target sequence
AAPVVSASADAAGPAPPAVPVDAHRAPRSRMTQAQTDTQAQSLGRAGATDARGSGGPGAEGGPGVPRGTNTPGAAPHAAEGAAAR

SEQ ID NO: 21534 - protein, 85 aa, unidentified
  REGION 1..85: note = Description of Unknown:hvTR_P28284 target sequence
PRKRRGSDSGPAASSSASSSAAPRSPLAPQGVGAKRAAPRRAPDSDSGDRGHGPLAPASAGAAPPSASPSSQAAVAAASSSSASS

SEQ ID NO: 21535 - protein, 85 aa, unidentified
  REGION 1..85: note = Description of Unknown:hvTR_P28284 target sequence
SSASSSSASSSSASSSSASSSSASSSSASSSAGGAGGSVASASGAGERRETSLGPRAAAPRGPRKCARKTRHAEGGPEPGARDPA

SEQ ID NO: 21536 - protein, 85 aa, unidentified
  REGION 1..85: note = Description of Unknown:hvTR_P28284 target sequence
PGLTRYLPIAGVSSVVALAPYVNKTVTGDCLPVLDMETGHIGAYVVLVDQTGNVADLLRAAAPAWSRRTLLPEHARNCVRPPDYP

SEQ ID NO: 21537 - protein, 84 aa, unidentified
  REGION 1..84: note = Description of Unknown:hvTR_P28284 target sequence
AAPAWSRRTLLPEHARNCVRPPDYPTPPASEWNSLWMTPVGNMLFDQGTLVGALDFHGLRSRHPWSREQGAPAPAGDAPAGHGE

SEQ ID NO: 21538 - protein, 85 aa, unidentified
  REGION 1..85: note = Description of Unknown:hvTR_P28284 target sequence
APHAWGMLNDMQWLASSDSEEETEVGISDDDLHRDSTSEAGSTDTEMFEAGLMDAATPPARPPAERQGSPTPADAQGSCGGGPVG

SEQ ID NO: 21539 - protein, 85 aa, unidentified
  REGION 1..85: note = Description of Unknown:hvTR_P28284 target sequence
EEEAEAGGGGDVCAVCTDEIAPPLRCQSFPCLHPFCIPCMKTWIPLRNTCPLCNTPVAYLIVGVTASGSFSTIPIVNDPRTRVEA

SEQ ID NO: 21540 - protein, 85 aa, unidentified
  REGION 1..85: note = Description of Unknown:hvTR_P28284 target sequence
EAAVRAGTAVDFIWTGNPRTAPRSLSLGGHTVRALSPTPPWPGTDDEDDDLADVDYVPPAPRRAPRRGGGGAGATRGTSQPAATR

SEQ ID NO: 21541 - protein, 85 aa, unidentified
  REGION 1..85: note = Description of Unknown:hvTR_P28284 target sequence
PAPPGAPRSSSSGGAPLRAGVGSGSGGGPAVAAVVPRVASLPPAAGGGRAQARRVGEDAAAAEGRTPPARQPRAAQEPPIVISDS

SEQ ID NO: 21542 - protein, 85 aa, unidentified
  REGION 1..85: note = Description of Unknown:hvTR_P28284 target sequence
PPPSPRRPAGPGPLSFVSSSSAQVSSGPGGGGLPQSSGRAARPRAAVAPRVRSPPRAAAAPVVSASADAAGPAPPAVPVDAHRAP

SEQ ID NO: 21543 - protein, 85 aa, unidentified
  REGION 1..85: note = Description of Unknown:hvTR_P28284 target sequence
RSRMTQAQTDTQAQSLGRAGATDARGSGGPGAEGGPGVPRGTNTPGAAPHAAEGAAARPRKRRGSDSGPAASSSASSSAAPRSPL

SEQ ID NO: 21544 - protein, 85 aa, unidentified
  REGION 1..85: note = Description of Unknown:hvTR_P28284 target sequence
APQGVGAKRAAPRRAPDSDSGDRGHGPLAPASAGAAPPSASPSSQAAVAAASSSSASSSSASSSSASSSSASSSSASSSSASSSS

SEQ ID NO: 21545 - protein, 85 aa, unidentified
  REGION 1..85: note = Description of Unknown:hvTR_P28284 target sequence
ASSSAGGAGGSVASASGAGERRETSLGPRAAAPRGPRKCARKTRHAEGGPEPGARDPAPGLTRYLPIAGVSSVVALAPYVNKTVT

SEQ ID NO: 21546 - protein, 85 aa, unidentified
  REGION 1..85: note = Description of Unknown:hvTR_P28284 target sequence
GDCLPVLDMETGHIGAYVVLVDQTGNVADLLRAAAPAWSRRTLLPEHARNCVRPPDYPTPPASEWNSLWMTPVGNMLFDQGTLVG

SEQ ID NO: 21547 - protein, 85 aa, unidentified
  REGION 1..85: note = Description of Unknown:cds_NZ_WFIY01000004.1_cds_WP_155864000.1_1927 target sequence
SREIFFLALIILTVITPLSICNFHVLQRMPGEPPPVIKTYAVAYPIFEKYVSLNNCCQEIVVQDNCPGIYCLYVFTPQTYCLWSL

SEQ ID NO: 21548 - protein, 85 aa, unidentified
  REGION 1..85: note = Description of Unknown:cds_NZ_WFIY01000004.1_cds_WP_155864000.1_1927 target sequence
GHSENAIFSTQITKGTYVIPLNKGNYVVVINHFLGKDSNINVNVEARSFCSYIMSNRLASPKGIVSYGIYDYAGELQNYCIRTKS

SEQ ID NO: 21549 - protein, 85 aa, unidentified
  REGION 1..85: note = Description of Unknown:cds_NZ_WFIY01000004.1_cds_WP_155864000.1_1927 target sequence
ILGYFNISCFEPKGCLASLQLNAVLLINGSNDYEYFLQNIIKFENCFHWFYLEDNIWNFSSYRANIYHVEGKGIINSYCDRKYYC

SEQ ID NO: 21550 - protein, 85 aa, unidentified
  REGION 1..85: note = Description of Unknown:cds_NZ_WFIY01000004.1_cds_WP_155864000.1_1927 target sequence
YSPPCLYDIKYSLPLAGYLIINVTTVQGKGVYVTFGFSNIQNGQKILPPVFTYYDKVFISCPNVNSACIVIKPAFTKSLNAFSAG

SEQ ID NO: 21551 - protein, 85 aa, unidentified
  REGION 1..85: note = Description of Unknown:cds_NZ_WFIY01000004.1_cds_WP_155864000.1_1927 target sequence
LVFGSYEQLSTVEFNNLNSTLALLYCNQGWKPVPSFLSYCVNSLESACNLDFKAGKCEIFVSTNLQCSNNLIIDMPHVSVPFTFV

SEQ ID NO: 21552 - protein, 85 aa, unidentified
  REGION 1..85: note = Description of Unknown:cds_NZ_WFIY01000004.1_cds_WP_155864000.1_1927 target sequence
DYNGKAIYIQKPLNISFPKTIYICKYTKECLCKICICINGFRQPIENGYIIYPKCYFNTINISAFYNTYYFVKILYPNGTLCAWI

SEQ ID NO: 21553 - protein, 85 aa, unidentified
  REGION 1..85: note = Description of Unknown:cds_NZ_WFIY01000004.1_cds_WP_155864000.1_1927 target sequence
LQGSKICLPRIIQLCDLARYLLLPEQNTTIIITEPQVISPKYELQYLVNINYVNNGTKIEEWVNNGTIIQIPKVIYINSTTRYYL

SEQ ID NO: 21554 - protein, 85 aa, unidentified
  REGION 1..85: note = Description of Unknown:cds_NZ_WFIY01000004.1_cds_WP_155864000.1_1927 target sequence
NSTTNKIVVLKPMNISLKYELQYLVTKYLLNGTKIEEWVNNGTIIQIPKVIYINSTTRYYLNSTTNLFIIDSPIIIKPMYILQYY

SEQ ID NO: 21555 - protein, 85 aa, unidentified
  REGION 1..85: note = Description of Unknown:cds_NZ_WFIY01000004.1_cds_WP_155864000.1_1927 target sequence
VKIILPNETIEKWVKDGCVITFPQYIYISNCERYVLNSTQFIIIHSPTLVKPVYIKQYLVKINGVSYWYNEGTKLLIKIVTTPFF

SEQ ID NO: 21556 - protein, 84 aa, unidentified
  REGION 1..84: note = Description of Unknown:cds_NZ_WFIY01000004.1_cds_WP_155864000.1_1927 target sequence
KINGVSYWYNEGTKLLIKIVTTPFFIVKWVGSIKVTNGEIITINGPLDLKAEILINPLFEYLGIAGIITIIALAITNVIRHKSK

SEQ ID NO: 21557 - protein, 85 aa, unidentified
  REGION 1..85: note = Description of Unknown:cds_NZ_WFIY01000004.1_cds_WP_155864000.1_1927 target sequence
RMPGEPPPVIKTYAVAYPIFEKYVSLNNCCQEIVVQDNCPGIYCLYVFTPQTYCLWSLGHSENAIFSTQITKGTYVIPLNKGNYV

SEQ ID NO: 21558 - protein, 85 aa, unidentified
  REGION 1..85: note = Description of Unknown:cds_NZ_WFIY01000004.1_cds_WP_155864000.1_1927 target sequence
VVINHFLGKDSNINVNVEARSFCSYIMSNRLASPKGIVSYGIYDYAGELQNYCIRTKSILGYFNISCFEPKGCLASLQLNAVLLI

SEQ ID NO: 21559 - protein, 85 aa, unidentified
  REGION 1..85: note = Description of Unknown:cds_NZ_WFIY01000004.1_cds_WP_155864000.1_1927 target sequence
NGSNDYEYFLQNIIKFENCFHWFYLEDNIWNFSSYRANIYHVEGKGIINSYCDRKYYCYSPPCLYDIKYSLPLAGYLIINVTTVQ

SEQ ID NO: 21560 - protein, 85 aa, unidentified
  REGION 1..85: note = Description of Unknown:cds_NZ_WFIY01000004.1_cds_WP_155864000.1_1927 target sequence
GKGVYVTFGFSNIQNGQKILPPVFTYYDKVFISCPNVNSACIVIKPAFTKSLNAFSAGLVFGSYEQLSTVEFNNLNSTLALLYCN

SEQ ID NO: 21561 - protein, 85 aa, unidentified
  REGION 1..85: note = Description of Unknown:cds_NZ_WFIY01000004.1_cds_WP_155864000.1_1927 target sequence
QGWKPVPSFLSYCVNSLESACNLDFKAGKCEIFVSTNLQCSNNLIIDMPHVSVPFTFVDYNGKAIYIQKPLNISFPKTIYICKYT

SEQ ID NO: 21562 - protein, 85 aa, unidentified
  REGION 1..85: note = Description of Unknown:cds_NZ_WFIY01000004.1_cds_WP_155864000.1_1927 target sequence
KECLCKICICINGFRQPIENGYIIYPKCYFNTINISAFYNTYYFVKILYPNGTLCAWILQGSKICLPRIIQLCDLARYLLLPEQN

SEQ ID NO: 21563 - protein, 85 aa, unidentified
  REGION 1..85: note = Description of Unknown:cds_NZ_WFIY01000004.1_cds_WP_155864000.1_1927 target sequence
TTIIITEPQVISPKYELQYLVNINYVNNGTKIEEWVNNGTIIQIPKVIYINSTTRYYLNSTTNKIVVLKPMNISLKYELQYLVTK

SEQ ID NO: 21564 - protein, 85 aa, unidentified
  REGION 1..85: note = Description of Unknown:cds_NZ_WFIY01000004.1_cds_WP_155864000.1_1927 target sequence
YLLNGTKIEEWVNNGTIIQIPKVIYINSTTRYYLNSTTNLFIIDSPIIIKPMYILQYYVKIILPNETIEKWVKDGCVITFPQYIY

SEQ ID NO: 21565 - protein, 85 aa, unidentified
  REGION 1..85: note = Description of Unknown:cds_NZ_WFIY01000004.1_cds_WP_155864000.1_1927 target sequence
ISNCERYVLNSTQFIIIHSPTLVKPVYIKQYLVKINGVSYWYNEGTKLLIKIVTTPFFIVKWVGSIKVTNGEIITINGPLDLKAE

SEQ ID NO: 21566 - protein, 85 aa, unidentified
  REGION 1..85: note = Description of Unknown:hvTR_B6DVW7 target sequence
DLVLNRKEREALCKLLEIAPNCYGNIPLMKAAFKRSCLKHHPDKGGNPVIMMELNTLWSKFQQNIHKLRSDFSMFDEVDEAPIYG

SEQ ID NO: 21567 - protein, 85 aa, unidentified
  REGION 1..85: note = Description of Unknown:hvTR_B6DVW7 target sequence
TTKFKEWWRSGGFSFGKAYEYGPNPHGTNSRSRKPSSNASRGAPSGSSPPHSQSSSSGYGSFSASQASDSQSRGPDIPPEHHEEP

SEQ ID NO: 21568 - protein, 85 aa, unidentified
  REGION 1..85: note = Description of Unknown:hvTR_B6DVW7 target sequence
TSSSGSSSREETTNSGRESSTPNGTSVPRNSSRTDGTWEDLFCDESLSSPEPPSSSEEPEEPPSSRSSPRQPPSSSAEEASSSQF

SEQ ID NO: 21569 - protein, 85 aa, unidentified
  REGION 1..85: note = Description of Unknown:hvTR_B6DVW7 target sequence
TDEEYRSSSFTTPKTPPPFSRKRKFGGSRSSASSASSASFTSTPPKPKKNRETPVPTDFPIDLSDYLSHAVYSNKTVSCFAIYTT

SEQ ID NO: 21570 - protein, 85 aa, unidentified
  REGION 1..85: note = Description of Unknown:hvTR_B6DVW7 target sequence
SDKAIELYDKIEKFKVDFKSRHACELGCILLFITLSKHRVSAIKNFCSTFCTISFLICKGVNKMPEMYNNLCKPPYKLLQENKPL

SEQ ID NO: 21571 - protein, 85 aa, unidentified
  REGION 1..85: note = Description of Unknown:hvTR_B6DVW7 target sequence
LNYEFQEKEKEASCNWNLVAEFACEYELDDHFIILAHYLDFAKPFPCQKCENRSRLKPHKAHEAHHSNAKLFYESKSQKTICQQA

SEQ ID NO: 21572 - protein, 85 aa, unidentified
  REGION 1..85: note = Description of Unknown:hvTR_B6DVW7 target sequence
ADTVLAKRRLEMLEMTRTEMLCKKFKKHLERLRDLDTIDLLYYMGGVAWYCCLFEEFEKKLQKIIQLLTENIPKYRNIWFKGPIN

SEQ ID NO: 21573 - protein, 85 aa, unidentified
  REGION 1..85: note = Description of Unknown:hvTR_B6DVW7 target sequence
SGKTSFAAALIDLLEGKALNINCPSDKLPFELGCALDKFMVVFEDVKGQNSLNKDLQPGQGINNLDNLRDHLDGAVAVSLEKKHV

SEQ ID NO: 21574 - protein, 85 aa, unidentified
  REGION 1..85: note = Description of Unknown:hvTR_B6DVW7 target sequence
NKKHQIFPPCIVTANDYFIPKTLIARFSYTLHFSPKANLRDSLDQNMEIRKRRILQSGTTLLLCLIWCLPDTTFKPCLQEEIKNW

SEQ ID NO: 21575 - protein, 84 aa, unidentified
  REGION 1..84: note = Description of Unknown:hvTR_B6DVW7 target sequence
RILQSGTTLLLCLIWCLPDTTFKPCLQEEIKNWKQILQSEISYGKFCQMIENVEAGQDPLLNILIEEEGPEETEETQDSGTFSQ

SEQ ID NO: 21576 - protein, 85 aa, unidentified
  REGION 1..85: note = Description of Unknown:hvTR_B6DVW7 target sequence
LMKAAFKRSCLKHHPDKGGNPVIMMELNTLWSKFQQNIHKLRSDFSMFDEVDEAPIYGTTKFKEWWRSGGFSFGKAYEYGPNPHG

SEQ ID NO: 21577 - protein, 85 aa, unidentified
  REGION 1..85: note = Description of Unknown:hvTR_B6DVW7 target sequence
TNSRSRKPSSNASRGAPSGSSPPHSQSSSSGYGSFSASQASDSQSRGPDIPPEHHEEPTSSSGSSSREETTNSGRESSTPNGTSV

SEQ ID NO: 21578 - protein, 85 aa, unidentified
  REGION 1..85: note = Description of Unknown:hvTR_B6DVW7 target sequence
PRNSSRTDGTWEDLFCDESLSSPEPPSSSEEPEEPPSSRSSPRQPPSSSAEEASSSQFTDEEYRSSSFTTPKTPPPFSRKRKFGG

SEQ ID NO: 21579 - protein, 85 aa, unidentified
  REGION 1..85: note = Description of Unknown:hvTR_B6DVW7 target sequence
SRSSASSASSASFTSTPPKPKKNRETPVPTDFPIDLSDYLSHAVYSNKTVSCFAIYTTSDKAIELYDKIEKFKVDFKSRHACELG

SEQ ID NO: 21580 - protein, 85 aa, unidentified
  REGION 1..85: note = Description of Unknown:hvTR_B6DVW7 target sequence
CILLFITLSKHRVSAIKNFCSTFCTISFLICKGVNKMPEMYNNLCKPPYKLLQENKPLLNYEFQEKEKEASCNWNLVAEFACEYE

SEQ ID NO: 21581 - protein, 85 aa, unidentified
  REGION 1..85: note = Description of Unknown:hvTR_B6DVW7 target sequence
LDDHFIILAHYLDFAKPFPCQKCENRSRLKPHKAHEAHHSNAKLFYESKSQKTICQQAADTVLAKRRLEMLEMTRTEMLCKKFKK

SEQ ID NO: 21582 - protein, 85 aa, unidentified
  REGION 1..85: note = Description of Unknown:hvTR_B6DVW7 target sequence
HLERLRDLDTIDLLYYMGGVAWYCCLFEEFEKKLQKIIQLLTENIPKYRNIWFKGPINSGKTSFAAALIDLLEGKALNINCPSDK

SEQ ID NO: 21583 - protein, 85 aa, unidentified
  REGION 1..85: note = Description of Unknown:hvTR_B6DVW7 target sequence
LPFELGCALDKFMVVFEDVKGQNSLNKDLQPGQGINNLDNLRDHLDGAVAVSLEKKHVNKKHQIFPPCIVTANDYFIPKTLIARF

SEQ ID NO: 21584 - protein, 85 aa, unidentified
  REGION 1..85: note = Description of Unknown:hvTR_B6DVW7 target sequence
SYTLHFSPKANLRDSLDQNMEIRKRRILQSGTTLLLCLIWCLPDTTFKPCLQEEIKNWKQILQSEISYGKFCQMIENVEAGQDPL

SEQ ID NO: 21585 - protein, 85 aa, unidentified
  REGION 1..85: note = Description of Unknown:cds_NZ_WFIY01000004.1_cds_WP_155862496.1_255 target sequence
LLSQEYVTKKMEEWPKHYNPAEIEPKWENLWLSKEYWEKVFRFDEKSNKPVFYIDTPPPFTSGELHMGHAYWVTIADAIARFKKL

SEQ ID NO: 21586 - protein, 85 aa, unidentified
  REGION 1..85: note = Description of Unknown:cds_NZ_WFIY01000004.1_cds_WP_155862496.1_255 target sequence
QGYNVLIPQGWDTQGLPTELKVQYKLGIPKENRELFLQKCIEWTNEMINRMKTAMIRLGYRPDWEDFEYKTYSPEYRKVIQKSLI

SEQ ID NO: 21587 - protein, 85 aa, unidentified
  REGION 1..85: note = Description of Unknown:cds_NZ_WFIY01000004.1_cds_WP_155862496.1_255 target sequence
DMYKMGIVKIKEGPVYWCPKCETAVAQSEVGYLEKEGVLVYISFPLKDGGEIVIATTRPELLAATQAVVVNPTDERYKDLIGKTA

SEQ ID NO: 21588 - protein, 85 aa, unidentified
  REGION 1..85: note = Description of Unknown:cds_NZ_WFIY01000004.1_cds_WP_155862496.1_255 target sequence
IVPIFNKEVKIIADEAVEKDFGTGAVMVSTYGDPQDIKWKLKYDLPSTEIIDNKGRIKGTGILDGLTVAQAKQKMIEILKEKGYV

SEQ ID NO: 21589 - protein, 85 aa, unidentified
  REGION 1..85: note = Description of Unknown:cds_NZ_WFIY01000004.1_cds_WP_155862496.1_255 target sequence
RKIEKIKHNVLSHTERSDCLSPIEFLTKKQIYIDVLKFKDKLLEEYKKMQFKPSRMSYYLEEWIKSLEWDWNISRQRVYGTPLPF

SEQ ID NO: 21590 - protein, 85 aa, unidentified
  REGION 1..85: note = Description of Unknown:cds_NZ_WFIY01000004.1_cds_WP_155862496.1_255 target sequence
WYCDNNHLIPAKEEDLPVDPTKTKPPFEKCPYCGLPLKPVTDVADVWIDSSVTVIYLSGFYTNKERFAKAFPASLRLQGTDIIRT

SEQ ID NO: 21591 - protein, 85 aa, unidentified
  REGION 1..85: note = Description of Unknown:cds_NZ_WFIY01000004.1_cds_WP_155862496.1_255 target sequence
WLFYTFFRTLMLTGNVPFKQVLINGQVLGPDGSRMSKSKGNVVSPLERVNEFGADAIRMTLLDASIGEDFPFKWDNVRGKKLLLQ

SEQ ID NO: 21592 - protein, 85 aa, unidentified
  REGION 1..85: note = Description of Unknown:cds_NZ_WFIY01000004.1_cds_WP_155862496.1_255 target sequence
KLWNASRLSYPFIHGKDITKPNDLHILDKWILIKHKKFVKKAIEAYNSYDFYIIIDELYNYFWETVADEYLELIKYRLFNEDQSA

SEQ ID NO: 21593 - protein, 85 aa, unidentified
  REGION 1..85: note = Description of Unknown:cds_NZ_WFIY01000004.1_cds_WP_155862496.1_255 target sequence
LYTLRRILKDIIIILHPIVPHITEEIYSRLFGDKISVLLEELPNVDDIEEDKEAEKIGDYVKKFNSMVRTSKIKNKMSIVTPVNV

SEQ ID NO: 21594 - protein, 84 aa, unidentified
  REGION 1..84: note = Description of Unknown:cds_NZ_WFIY01000004.1_cds_WP_155862496.1_255 target sequence
EAEKIGDYVKKFNSMVRTSKIKNKMSIVTPVNVKLYASNDMIESIKKVENDVKITLKINSLEYIPSQDREEVIIEKAENQPMGV

SEQ ID NO: 21595 - protein, 85 aa, unidentified
  REGION 1..85: note = Description of Unknown:cds_NZ_WFIY01000004.1_cds_WP_155862496.1_255 target sequence
ENLWLSKEYWEKVFRFDEKSNKPVFYIDTPPPFTSGELHMGHAYWVTIADAIARFKKLQGYNVLIPQGWDTQGLPTELKVQYKLG

SEQ ID NO: 21596 - protein, 85 aa, unidentified
  REGION 1..85: note = Description of Unknown:cds_NZ_WFIY01000004.1_cds_WP_155862496.1_255 target sequence
IPKENRELFLQKCIEWTNEMINRMKTAMIRLGYRPDWEDFEYKTYSPEYRKVIQKSLIDMYKMGIVKIKEGPVYWCPKCETAVAQ

SEQ ID NO: 21597 - protein, 85 aa, unidentified
  REGION 1..85: note = Description of Unknown:cds_NZ_WFIY01000004.1_cds_WP_155862496.1_255 target sequence
SEVGYLEKEGVLVYISFPLKDGGEIVIATTRPELLAATQAVVVNPTDERYKDLIGKTAIVPIFNKEVKIIADEAVEKDFGTGAVM

SEQ ID NO: 21598 - protein, 85 aa, unidentified
  REGION 1..85: note = Description of Unknown:cds_NZ_WFIY01000004.1_cds_WP_155862496.1_255 target sequence
VSTYGDPQDIKWKLKYDLPSTEIIDNKGRIKGTGILDGLTVAQAKQKMIEILKEKGYVRKIEKIKHNVLSHTERSDCLSPIEFLT

SEQ ID NO: 21599 - protein, 85 aa, unidentified
  REGION 1..85: note = Description of Unknown:cds_NZ_WFIY01000004.1_cds_WP_155862496.1_255 target sequence
KKQIYIDVLKFKDKLLEEYKKMQFKPSRMSYYLEEWIKSLEWDWNISRQRVYGTPLPFWYCDNNHLIPAKEEDLPVDPTKTKPPF

SEQ ID NO: 21600 - protein, 85 aa, unidentified
  REGION 1..85: note = Description of Unknown:cds_NZ_WFIY01000004.1_cds_WP_155862496.1_255 target sequence
EKCPYCGLPLKPVTDVADVWIDSSVTVIYLSGFYTNKERFAKAFPASLRLQGTDIIRTWLFYTFFRTLMLTGNVPFKQVLINGQV

SEQ ID NO: 21601 - protein, 85 aa, unidentified
  REGION 1..85: note = Description of Unknown:cds_NZ_WFIY01000004.1_cds_WP_155862496.1_255 target sequence
LGPDGSRMSKSKGNVVSPLERVNEFGADAIRMTLLDASIGEDFPFKWDNVRGKKLLLQKLWNASRLSYPFIHGKDITKPNDLHIL

SEQ ID NO: 21602 - protein, 85 aa, unidentified
  REGION 1..85: note = Description of Unknown:cds_NZ_WFIY01000004.1_cds_WP_155862496.1_255 target sequence
DKWILIKHKKFVKKAIEAYNSYDFYIIIDELYNYFWETVADEYLELIKYRLFNEDQSALYTLRRILKDIIIILHPIVPHITEEIY

SEQ ID NO: 21603 - protein, 85 aa, unidentified
  REGION 1..85: note = Description of Unknown:cds_NZ_WFIY01000004.1_cds_WP_155862496.1_255 target sequence
SRLFGDKISVLLEELPNVDDIEEDKEAEKIGDYVKKFNSMVRTSKIKNKMSIVTPVNVKLYASNDMIESIKKVENDVKITLKINS

SEQ ID NO: 21604 - protein, 85 aa, unidentified
  REGION 1..85: note = Description of Unknown:cds_NZ_WFIY01000004.1_cds_WP_155862809.1_636 target sequence
KRSIFIIAVWVLIALLLAPITLNIQSHFVYSDSPFLTTQYQSVKVENILKEYFNYTKESELFVIINGSYNESLEKINASLHYLYD

SEQ ID NO: 21605 - protein, 85 aa, unidentified
  REGION 1..85: note = Description of Unknown:cds_NZ_WFIY01000004.1_cds_WP_155862809.1_636 target sequence
AKLITPYEYISQVNSSYMSFVNPIIKEYEKNLSYAIELYHNLTVEREELLSNLSWFYYQLNVTFKEGHNVTPSSYVTMYEEYLEE

SEQ ID NO: 21606 - protein, 85 aa, unidentified
  REGION 1..85: note = Description of Unknown:cds_NZ_WFIY01000004.1_cds_WP_155862809.1_636 target sequence
THNPILAGVKTFDDPFILLFSINNYTNESLIKETLDTFSNYSYLIYKLTGKYFPLCALQNTSVYVLHEVESKIPPPPIRLCNFHR

SEQ ID NO: 21607 - protein, 85 aa, unidentified
  REGION 1..85: note = Description of Unknown:cds_NZ_WFIY01000004.1_cds_WP_155862809.1_636 target sequence
GNTWIFIVQVPDNESLTNVEEFMQNTPAIVTGHFAIYAQSAYYTQQDLKIIDLVTIILVGSLLVILLRALFPIVFLIFSAVLGIE

SEQ ID NO: 21608 - protein, 85 aa, unidentified
  REGION 1..85: note = Description of Unknown:cds_NZ_WFIY01000004.1_cds_WP_155862809.1_636 target sequence
IAYSLLYLATFAGYKIYYISGLVIPPIVFGITIDYSILFMYRYFEEVKKNSNNALRMAFRTAGKGAIFSGLSITIGFSSFLLSPS

SEQ ID NO: 21609 - protein, 85 aa, unidentified
  REGION 1..85: note = Description of Unknown:cds_NZ_WFIY01000004.1_cds_WP_155862809.1_636 target sequence
PLLKNIGEALIIASLSALIPAILFNYTALKIVSLRLLSFPRKEVPNPIDVRQKYLRDVSEFSIKHKFYVIGIMVILALVSFSVFF

SEQ ID NO: 21610 - protein, 85 aa, unidentified
  REGION 1..85: note = Description of Unknown:cds_NZ_WFIY01000004.1_cds_WP_155862809.1_636 target sequence
THTTTVNFTEIVPSSSETIIGENILSNYFNYSIDYIIIKGNPNLTYDKIYNVSKEIIDCGGLAYGPASFGKFITRNLTYLENIYS

SEQ ID NO: 21611 - protein, 85 aa, unidentified
  REGION 1..85: note = Description of Unknown:cds_NZ_WFIY01000004.1_cds_WP_155862809.1_636 target sequence
SHNYSLIEAYIPYPVFSKGAISFTQKLINQGYMVGGSNADRIDIVNNTVSTYYGFTLPLTIILITAYIALVLRSIVVPIRLSLTL

SEQ ID NO: 21612 - protein, 85 aa, unidentified
  REGION 1..85: note = Description of Unknown:cds_NZ_WFIY01000004.1_cds_WP_155862809.1_636 target sequence
LVSSLVGVAIMFEVFKEVYWLSPLIVFALLFSLGIDYDMFIILRIKEEKGKDEDERIIKGVTYTGLVVTAAGLILAGAFFSLISA

SEQ ID NO: 21613 - protein, 84 aa, unidentified
  REGION 1..84: note = Description of Unknown:cds_NZ_WFIY01000004.1_cds_WP_155862809.1_636 target sequence
EEKGKDEDERIIKGVTYTGLVVTAAGLILAGAFFSLISADMRFLEEIGFSVGFSVIFDTFIVRPIFVPAIMSILKKYNWWPFAS

SEQ ID NO: 21614 - protein, 85 aa, unidentified
  REGION 1..85: note = Description of Unknown:cds_NZ_WFIY01000004.1_cds_WP_155862809.1_636 target sequence
FVYSDSPFLTTQYQSVKVENILKEYFNYTKESELFVIINGSYNESLEKINASLHYLYDAKLITPYEYISQVNSSYMSFVNPIIKE

SEQ ID NO: 21615 - protein, 85 aa, unidentified
  REGION 1..85: note = Description of Unknown:cds_NZ_WFIY01000004.1_cds_WP_155862809.1_636 target sequence
YEKNLSYAIELYHNLTVEREELLSNLSWFYYQLNVTFKEGHNVTPSSYVTMYEEYLEETHNPILAGVKTFDDPFILLFSINNYTN

SEQ ID NO: 21616 - protein, 85 aa, unidentified
  REGION 1..85: note = Description of Unknown:cds_NZ_WFIY01000004.1_cds_WP_155862809.1_636 target sequence
ESLIKETLDTFSNYSYLIYKLTGKYFPLCALQNTSVYVLHEVESKIPPPPIRLCNFHRGNTWIFIVQVPDNESLTNVEEFMQNTP

SEQ ID NO: 21617 - protein, 85 aa, unidentified
  REGION 1..85: note = Description of Unknown:cds_NZ_WFIY01000004.1_cds_WP_155862809.1_636 target sequence
AIVTGHFAIYAQSAYYTQQDLKIIDLVTIILVGSLLVILLRALFPIVFLIFSAVLGIEIAYSLLYLATFAGYKIYYISGLVIPPI

SEQ ID NO: 21618 - protein, 85 aa, unidentified
  REGION 1..85: note = Description of Unknown:cds_NZ_WFIY01000004.1_cds_WP_155862809.1_636 target sequence
VFGITIDYSILFMYRYFEEVKKNSNNALRMAFRTAGKGAIFSGLSITIGFSSFLLSPSPLLKNIGEALIIASLSALIPAILFNYT

SEQ ID NO: 21619 - protein, 85 aa, unidentified
  REGION 1..85: note = Description of Unknown:cds_NZ_WFIY01000004.1_cds_WP_155862809.1_636 target sequence
ALKIVSLRLLSFPRKEVPNPIDVRQKYLRDVSEFSIKHKFYVIGIMVILALVSFSVFFTHTTTVNFTEIVPSSSETIIGENILSN

SEQ ID NO: 21620 - protein, 85 aa, unidentified
  REGION 1..85: note = Description of Unknown:cds_NZ_WFIY01000004.1_cds_WP_155862809.1_636 target sequence
YFNYSIDYIIIKGNPNLTYDKIYNVSKEIIDCGGLAYGPASFGKFITRNLTYLENIYSSHNYSLIEAYIPYPVFSKGAISFTQKL

SEQ ID NO: 21621 - protein, 85 aa, unidentified
  REGION 1..85: note = Description of Unknown:cds_NZ_WFIY01000004.1_cds_WP_155862809.1_636 target sequence
INQGYMVGGSNADRIDIVNNTVSTYYGFTLPLTIILITAYIALVLRSIVVPIRLSLTLLVSSLVGVAIMFEVFKEVYWLSPLIVF

SEQ ID NO: 21622 - protein, 85 aa, unidentified
  REGION 1..85: note = Description of Unknown:cds_NZ_WFIY01000004.1_cds_WP_155862809.1_636 target sequence
ALLFSLGIDYDMFIILRIKEEKGKDEDERIIKGVTYTGLVVTAAGLILAGAFFSLISADMRFLEEIGFSVGFSVIFDTFIVRPIF

SEQ ID NO: 21623 - protein, 85 aa, unidentified
  REGION 1..85: note = Description of Unknown:cds_NZ_WFIY01000004.1_cds_WP_155864381.1_670 target sequence
LNNLPYSLRVLAINISKHIDGEKITQDDLDAIINWKVGNEISFMPTRVIMQDYTGVPLLVDLAEMRSELARRGLNPEKVNPIIQS

SEQ ID NO: 21624 - protein, 85 aa, unidentified
  REGION 1..85: note = Description of Unknown:cds_NZ_WFIY01000004.1_cds_WP_155864381.1_670 target sequence
DLVIDHSIQVDYYGTSYALTLNMKKEFERNEERYKFLKWAQRSFKNLRIIPPGKGIIHQINLEYLSKVINDNNEPEIVIGTDSHT

SEQ ID NO: 21625 - protein, 85 aa, unidentified
  REGION 1..85: note = Description of Unknown:cds_NZ_WFIY01000004.1_cds_WP_155864381.1_670 target sequence
TMIGGLGILGWGVGGLEAEAVMLGEPYHSIVPEVIGVKLEGEIREGVTPTDIVLYITELLRKKGVVGKYVEFFGNSLSKLTIQDR

SEQ ID NO: 21626 - protein, 85 aa, unidentified
  REGION 1..85: note = Description of Unknown:cds_NZ_WFIY01000004.1_cds_WP_155864381.1_670 target sequence
ATIANMAPEYGATVGYFPIDEQTVKYLNLTGRDGDKVKKIAMELGIFYNEKEEVKYSDVVEVNLSEIEPSIAGPKNPDERIRFGS

SEQ ID NO: 21627 - protein, 85 aa, unidentified
  REGION 1..85: note = Description of Unknown:cds_NZ_WFIY01000004.1_cds_WP_155864381.1_670 target sequence
LKIERKKKGNIIQDGDVVLAAITSCTNTSNPTVMLGAGILAKKAVELGLRSKPYVKTSLAPGSPVVVKYLKDAGLLPYLEALGFH

SEQ ID NO: 21628 - protein, 85 aa, unidentified
  REGION 1..85: note = Description of Unknown:cds_NZ_WFIY01000004.1_cds_WP_155864381.1_670 target sequence
VVGFGCTTCIGNAGPLIKEVENDIRTYGIEAYAVISGNRNFEGRINPLLKGTFLASPILVVAFAIAGRIDINYEEPIAFDPNGKP

SEQ ID NO: 21629 - protein, 85 aa, unidentified
  REGION 1..85: note = Description of Unknown:cds_NZ_WFIY01000004.1_cds_WP_155864381.1_670 target sequence
VYLRDIWPTLEEINSYMNLAMNPEYYLSQYSTIFKGDENWEKLSVTPSPIYDWPKSTYIVEPPWFKEENEKLEIKKARILLLLGD

SEQ ID NO: 21630 - protein, 85 aa, unidentified
  REGION 1..85: note = Description of Unknown:cds_NZ_WFIY01000004.1_cds_WP_155864381.1_670 target sequence
KITTDHISPAGPISPDSEAGKYLLSLGVKELNTFGARRGNHEVMIRGGFSNPKLKNYLVNKEGGYTIHFPDKREGTVYEIAMQYK

SEQ ID NO: 21631 - protein, 85 aa, unidentified
  REGION 1..85: note = Description of Unknown:cds_NZ_WFIY01000004.1_cds_WP_155864381.1_670 target sequence
KEGVPLVVVAGKQYGSGSSRDWAAKVTALLGIKAVLAESFERIHRSNLVAMGVLPIEIEDWRKLGIKGDELVSIEFNDLNPGSRV

SEQ ID NO: 21632 - protein, 84 aa, unidentified
  REGION 1..84: note = Description of Unknown:cds_NZ_WFIY01000004.1_cds_WP_155864381.1_670 target sequence
LVAMGVLPIEIEDWRKLGIKGDELVSIEFNDLNPGSRVRIIFENNERKVETYGILRVNTKTEIEYIKSGGILKYVLEKMIKDEN

SEQ ID NO: 21633 - protein, 85 aa, unidentified
  REGION 1..85: note = Description of Unknown:cds_NZ_WFIY01000004.1_cds_WP_155864381.1_670 target sequence
DLDAIINWKVGNEISFMPTRVIMQDYTGVPLLVDLAEMRSELARRGLNPEKVNPIIQSDLVIDHSIQVDYYGTSYALTLNMKKEF

SEQ ID NO: 21634 - protein, 85 aa, unidentified
  REGION 1..85: note = Description of Unknown:cds_NZ_WFIY01000004.1_cds_WP_155864381.1_670 target sequence
ERNEERYKFLKWAQRSFKNLRIIPPGKGIIHQINLEYLSKVINDNNEPEIVIGTDSHTTMIGGLGILGWGVGGLEAEAVMLGEPY

SEQ ID NO: 21635 - protein, 85 aa, unidentified
  REGION 1..85: note = Description of Unknown:cds_NZ_WFIY01000004.1_cds_WP_155864381.1_670 target sequence
HSIVPEVIGVKLEGEIREGVTPTDIVLYITELLRKKGVVGKYVEFFGNSLSKLTIQDRATIANMAPEYGATVGYFPIDEQTVKYL

SEQ ID NO: 21636 - protein, 85 aa, unidentified
  REGION 1..85: note = Description of Unknown:cds_NZ_WFIY01000004.1_cds_WP_155864381.1_670 target sequence
NLTGRDGDKVKKIAMELGIFYNEKEEVKYSDVVEVNLSEIEPSIAGPKNPDERIRFGSLKIERKKKGNIIQDGDVVLAAITSCTN

SEQ ID NO: 21637 - protein, 85 aa, unidentified
  REGION 1..85: note = Description of Unknown:cds_NZ_WFIY01000004.1_cds_WP_155864381.1_670 target sequence
TSNPTVMLGAGILAKKAVELGLRSKPYVKTSLAPGSPVVVKYLKDAGLLPYLEALGFHVVGFGCTTCIGNAGPLIKEVENDIRTY

SEQ ID NO: 21638 - protein, 85 aa, unidentified
  REGION 1..85: note = Description of Unknown:cds_NZ_WFIY01000004.1_cds_WP_155864381.1_670 target sequence
GIEAYAVISGNRNFEGRINPLLKGTFLASPILVVAFAIAGRIDINYEEPIAFDPNGKPVYLRDIWPTLEEINSYMNLAMNPEYYL

SEQ ID NO: 21639 - protein, 85 aa, unidentified
  REGION 1..85: note = Description of Unknown:cds_NZ_WFIY01000004.1_cds_WP_155864381.1_670 target sequence
SQYSTIFKGDENWEKLSVTPSPIYDWPKSTYIVEPPWFKEENEKLEIKKARILLLLGDKITTDHISPAGPISPDSEAGKYLLSLG

SEQ ID NO: 21640 - protein, 85 aa, unidentified
  REGION 1..85: note = Description of Unknown:cds_NZ_WFIY01000004.1_cds_WP_155864381.1_670 target sequence
VKELNTFGARRGNHEVMIRGGFSNPKLKNYLVNKEGGYTIHFPDKREGTVYEIAMQYKKEGVPLVVVAGKQYGSGSSRDWAAKVT

SEQ ID NO: 21641 - protein, 85 aa, unidentified
  REGION 1..85: note = Description of Unknown:cds_NZ_WFIY01000004.1_cds_WP_155864381.1_670 target sequence
ALLGIKAVLAESFERIHRSNLVAMGVLPIEIEDWRKLGIKGDELVSIEFNDLNPGSRVRIIFENNERKVETYGILRVNTKTEIEY

SEQ ID NO: 21642 - protein, 85 aa, unidentified
  REGION 1..85: note = Description of Unknown:cds_NC_005830.1_cds_YP_003754.1_29 target sequence
SAQQQCDLTSYDAMYYLQTGDLQLAVNLFISPNSSFSYSGNSGQSILQSLGTIIIWVYKVNGQIHIYTIGWQPIYYSLQNGCRAN

SEQ ID NO: 21643 - protein, 85 aa, unidentified
  REGION 1..85: note = Description of Unknown:cds_NC_005830.1_cds_YP_003754.1_29 target sequence
IYFRLWALIQIQGAWLASEIMNMPVTLKNTGGQFVGTFIPLHLLGFAIADFPSLSSGSQGYTHMLMSQTDGSIKLLPSAPGVLPY

SEQ ID NO: 21644 - protein, 85 aa, unidentified
  REGION 1..85: note = Description of Unknown:cds_NC_005830.1_cds_YP_003754.1_29 target sequence
FITVGFQCRAGAYVLKQPCPNCIFVRLCVPTSNGIPYEVLMLICLLIYAGCYASYSDILGKNGLSTVGAGVNAKVPVTAIVYFDT

SEQ ID NO: 21645 - protein, 85 aa, unidentified
  REGION 1..85: note = Description of Unknown:cds_NC_005830.1_cds_YP_003754.1_29 target sequence
QQYIQQNVVSQLNVTIQLYALIWVGISTTNFVILPEISQILKMPSGLILNIPVPFQAYPTPTVAIPRILTLITCCGTPYIYNQYF

SEQ ID NO: 21646 - protein, 85 aa, unidentified
  REGION 1..85: note = Description of Unknown:cds_NC_005830.1_cds_YP_003754.1_29 target sequence
PCSFDKASTVTTECGVPLVAYPTISQMQPIAGSNVAFLLSNQSADFADLLSLNYGLLNLTTQQKVSLANQYSYTMTQCKKEVIRG

SEQ ID NO: 21647 - protein, 85 aa, unidentified
  REGION 1..85: note = Description of Unknown:cds_NC_005830.1_cds_YP_003754.1_29 target sequence
TYYEECVKNVSSNLNQYSSQPASPQPNIPVDEILIGVGAVALIVIGTVALVLTGGASAPVSAGLDVAGAEALGSLLLDNGALSLS

SEQ ID NO: 21648 - protein, 85 aa, unidentified
  REGION 1..85: note = Description of Unknown:cds_NC_005830.1_cds_YP_003754.1_29 target sequence
SLQEEGLANTLMQTSVSDSFESEDEEIVQNEPNSAKLVVFTNTNQPFTLTVTGTDITGTVTIQSGIADFDLTITLPSGVSVPISV

SEQ ID NO: 21649 - protein, 85 aa, unidentified
  REGION 1..85: note = Description of Unknown:cds_NC_005830.1_cds_YP_003754.1_29 target sequence
PAGVIDDFTDDQGYTIYEQEDQPVRLKYSDGQVIYNTISQLGKKLDGFFSLLKKLLKYIAVALLSAIASILVNMFLFMPLVASIM

SEQ ID NO: 21650 - protein, 85 aa, unidentified
  REGION 1..85: note = Description of Unknown:cds_NC_005830.1_cds_YP_003754.1_29 target sequence
TSIIQSGQGVSSGGTVTVTGQSTSTTLSTALSDIASTFGQIPQILEEIPVALASAYLITDLLTDFFGDLWRGFSKNLLPNKAVNV

SEQ ID NO: 21651 - protein, 84 aa, unidentified
  REGION 1..84: note = Description of Unknown:cds_NC_005830.1_cds_YP_003754.1_29 target sequence
QILEEIPVALASAYLITDLLTDFFGDLWRGFSKNLLPNKAVNVNIPQPLEVDLKSRLKAYSEAVISKNDKGEWVINKKLRGRFS

SEQ ID NO: 21652 - protein, 85 aa, unidentified
  REGION 1..85: note = Description of Unknown:cds_NC_005830.1_cds_YP_003754.1_29 target sequence
LFISPNSSFSYSGNSGQSILQSLGTIIIWVYKVNGQIHIYTIGWQPIYYSLQNGCRANIYFRLWALIQIQGAWLASEIMNMPVTL

SEQ ID NO: 21653 - protein, 85 aa, unidentified
  REGION 1..85: note = Description of Unknown:cds_NC_005830.1_cds_YP_003754.1_29 target sequence
KNTGGQFVGTFIPLHLLGFAIADFPSLSSGSQGYTHMLMSQTDGSIKLLPSAPGVLPYFITVGFQCRAGAYVLKQPCPNCIFVRL

SEQ ID NO: 21654 - protein, 85 aa, unidentified
  REGION 1..85: note = Description of Unknown:cds_NC_005830.1_cds_YP_003754.1_29 target sequence
CVPTSNGIPYEVLMLICLLIYAGCYASYSDILGKNGLSTVGAGVNAKVPVTAIVYFDTQQYIQQNVVSQLNVTIQLYALIWVGIS

SEQ ID NO: 21655 - protein, 85 aa, unidentified
  REGION 1..85: note = Description of Unknown:cds_NC_005830.1_cds_YP_003754.1_29 target sequence
TTNFVILPEISQILKMPSGLILNIPVPFQAYPTPTVAIPRILTLITCCGTPYIYNQYFPCSFDKASTVTTECGVPLVAYPTISQM

SEQ ID NO: 21656 - protein, 85 aa, unidentified
  REGION 1..85: note = Description of Unknown:cds_NC_005830.1_cds_YP_003754.1_29 target sequence
QPIAGSNVAFLLSNQSADFADLLSLNYGLLNLTTQQKVSLANQYSYTMTQCKKEVIRGTYYEECVKNVSSNLNQYSSQPASPQPN

SEQ ID NO: 21657 - protein, 85 aa, unidentified
  REGION 1..85: note = Description of Unknown:cds_NC_005830.1_cds_YP_003754.1_29 target sequence
IPVDEILIGVGAVALIVIGTVALVLTGGASAPVSAGLDVAGAEALGSLLLDNGALSLSSLQEEGLANTLMQTSVSDSFESEDEEI

SEQ ID NO: 21658 - protein, 85 aa, unidentified
  REGION 1..85: note = Description of Unknown:cds_NC_005830.1_cds_YP_003754.1_29 target sequence
VQNEPNSAKLVVFTNTNQPFTLTVTGTDITGTVTIQSGIADFDLTITLPSGVSVPISVPAGVIDDFTDDQGYTIYEQEDQPVRLK

SEQ ID NO: 21659 - protein, 85 aa, unidentified
  REGION 1..85: note = Description of Unknown:cds_NC_005830.1_cds_YP_003754.1_29 target sequence
YSDGQVIYNTISQLGKKLDGFFSLLKKLLKYIAVALLSAIASILVNMFLFMPLVASIMTSIIQSGQGVSSGGTVTVTGQSTSTTL

SEQ ID NO: 21660 - protein, 85 aa, unidentified
  REGION 1..85: note = Description of Unknown:cds_NC_005830.1_cds_YP_003754.1_29 target sequence
STALSDIASTFGQIPQILEEIPVALASAYLITDLLTDFFGDLWRGFSKNLLPNKAVNVNIPQPLEVDLKSRLKAYSEAVISKNDK

SEQ ID NO: 21661 - protein, 85 aa, unidentified
  REGION 1..85: note = Description of Unknown:cds_NZ_WFIY01000004.1_cds_WP_155862306.1_22 target sequence
KTIRGVYLNGVKITDENKNKEAREELKRLVVELMLTSESGDVDLLTDYLSLIIKAPLLLPYIPYSGKILLNNFDFLTSYIATRRK

SEQ ID NO: 21662 - protein, 85 aa, unidentified
  REGION 1..85: note = Description of Unknown:cds_NZ_WFIY01000004.1_cds_WP_155862306.1_22 target sequence
EFIESGEELLKRRTSIPKSFAEVIYGGRIDTFNSLRTIFEALSTTPADTRPGLNFVPLSSHLTLTSLIGWLEQPYSQDLPYLRLA

SEQ ID NO: 21663 - protein, 85 aa, unidentified
  REGION 1..85: note = Description of Unknown:cds_NZ_WFIY01000004.1_cds_WP_155862306.1_22 target sequence
SILHDIGKLTSPSHHLTEGIEFMEEVIKELELEEKNIKKNINLDELKKALELIRTHHNRDDSIVKRADHVASSVDRLIDEVKEII

SEQ ID NO: 21664 - protein, 85 aa, unidentified
  REGION 1..85: note = Description of Unknown:cds_NZ_WFIY01000004.1_cds_WP_155862306.1_22 target sequence
QSIEECKPFLECYEAGAKAECMEQIKYDEKDYITCTEKLYDALHKKEKVREKDDVVSNYECPSIEGNKGSSGNVKGYLYFIDFPG

SEQ ID NO: 21665 - protein, 85 aa, unidentified
  REGION 1..85: note = Description of Unknown:cds_NZ_WFIY01000004.1_cds_WP_155862306.1_22 target sequence
VQSFINYFSNLRDLSAASFLVDFLSSTVPFLHLDKLHRGKTFLPPEALLSSMGGHSYIVGRADVNPEDFINKLKEDKIFKELDVN

SEQ ID NO: 21666 - protein, 85 aa, unidentified
  REGION 1..85: note = Description of Unknown:cds_NZ_WFIY01000004.1_cds_WP_155862306.1_22 target sequence
LKVSCVPFYYDNHVISYDSLSEVIRKTNLYSLMLNFKEEVLSYGLHKVCDSCGIRPAVYFEGDYAYCKRCYFVHQHSGNRGVMAK

SEQ ID NO: 21667 - protein, 85 aa, unidentified
  REGION 1..85: note = Description of Unknown:cds_NZ_WFIY01000004.1_cds_WP_155862306.1_22 target sequence
LNSKFYVVGEPWEYKKEGEEEIDPMEKIAENSNYISVIKFDGNDAGKYFKDSLTFGEYSAKSFWVDYAVKKAYYDTLKELGEEAM

SEQ ID NO: 21668 - protein, 85 aa, unidentified
  REGION 1..85: note = Description of Unknown:cds_NZ_WFIY01000004.1_cds_WP_155862306.1_22 target sequence
MIPVGTLYIGGDEGVIISPASISLRFVLSFIKKAEEEARLSFKVGVITAKYDHPIQFLINATDKLMEESKYAKSTVGVLTTSSFL

SEQ ID NO: 21669 - protein, 85 aa, unidentified
  REGION 1..85: note = Description of Unknown:cds_NZ_WFIY01000004.1_cds_WP_155862306.1_22 target sequence
SDRAVEEEMEKFKEIYSPKITLDELDKLVSLVIRLKTKNKFKHAVSSLDEALELYLNSGKDLLKLLAYLVRERQRVEDDDEKELY

SEQ ID NO: 21670 - protein, 84 aa, unidentified
  REGION 1..84: note = Description of Unknown:cds_NZ_WFIY01000004.1_cds_WP_155862306.1_22 target sequence
KHAVSSLDEALELYLNSGKDLLKLLAYLVRERQRVEDDDEKELYKLILKTYKEGFVNLLGYYHVLKTFVLGEKKNDNKSKSKNP

SEQ ID NO: 21671 - protein, 85 aa, unidentified
  REGION 1..85: note = Description of Unknown:cds_NZ_WFIY01000004.1_cds_WP_155862306.1_22 target sequence
RLVVELMLTSESGDVDLLTDYLSLIIKAPLLLPYIPYSGKILLNNFDFLTSYIATRRKEFIESGEELLKRRTSIPKSFAEVIYGG

SEQ ID NO: 21672 - protein, 85 aa, unidentified
  REGION 1..85: note = Description of Unknown:cds_NZ_WFIY01000004.1_cds_WP_155862306.1_22 target sequence
RIDTFNSLRTIFEALSTTPADTRPGLNFVPLSSHLTLTSLIGWLEQPYSQDLPYLRLASILHDIGKLTSPSHHLTEGIEFMEEVI

SEQ ID NO: 21673 - protein, 85 aa, unidentified
  REGION 1..85: note = Description of Unknown:cds_NZ_WFIY01000004.1_cds_WP_155862306.1_22 target sequence
KELELEEKNIKKNINLDELKKALELIRTHHNRDDSIVKRADHVASSVDRLIDEVKEIIQSIEECKPFLECYEAGAKAECMEQIKY

SEQ ID NO: 21674 - protein, 85 aa, unidentified
  REGION 1..85: note = Description of Unknown:cds_NZ_WFIY01000004.1_cds_WP_155862306.1_22 target sequence
DEKDYITCTEKLYDALHKKEKVREKDDVVSNYECPSIEGNKGSSGNVKGYLYFIDFPGVQSFINYFSNLRDLSAASFLVDFLSST

SEQ ID NO: 21675 - protein, 85 aa, unidentified
  REGION 1..85: note = Description of Unknown:cds_NZ_WFIY01000004.1_cds_WP_155862306.1_22 target sequence
VPFLHLDKLHRGKTFLPPEALLSSMGGHSYIVGRADVNPEDFINKLKEDKIFKELDVNLKVSCVPFYYDNHVISYDSLSEVIRKT

SEQ ID NO: 21676 - protein, 85 aa, unidentified
  REGION 1..85: note = Description of Unknown:cds_NZ_WFIY01000004.1_cds_WP_155862306.1_22 target sequence
NLYSLMLNFKEEVLSYGLHKVCDSCGIRPAVYFEGDYAYCKRCYFVHQHSGNRGVMAKLNSKFYVVGEPWEYKKEGEEEIDPMEK

SEQ ID NO: 21677 - protein, 85 aa, unidentified
  REGION 1..85: note = Description of Unknown:cds_NZ_WFIY01000004.1_cds_WP_155862306.1_22 target sequence
IAENSNYISVIKFDGNDAGKYFKDSLTFGEYSAKSFWVDYAVKKAYYDTLKELGEEAMMIPVGTLYIGGDEGVIISPASISLRFV

SEQ ID NO: 21678 - protein, 85 aa, unidentified
  REGION 1..85: note = Description of Unknown:cds_NZ_WFIY01000004.1_cds_WP_155862306.1_22 target sequence
LSFIKKAEEEARLSFKVGVITAKYDHPIQFLINATDKLMEESKYAKSTVGVLTTSSFLSDRAVEEEMEKFKEIYSPKITLDELDK

SEQ ID NO: 21679 - protein, 85 aa, unidentified
  REGION 1..85: note = Description of Unknown:cds_NZ_WFIY01000004.1_cds_WP_155862306.1_22 target sequence
LVSLVIRLKTKNKFKHAVSSLDEALELYLNSGKDLLKLLAYLVRERQRVEDDDEKELYKLILKTYKEGFVNLLGYYHVLKTFVLG

SEQ ID NO: 21680 - protein, 85 aa, unidentified
  REGION 1..85: note = Description of Unknown:hvTR_Q6TVR0 target sequence
DSRESILASIVPKIRAYMRDPNTATKSYTDFIADNKSIFVVNLYNVDAITEDDIRLLFATMEQNPDADDATLISIFSYIGYKFEK

SEQ ID NO: 21681 - protein, 85 aa, unidentified
  REGION 1..85: note = Description of Unknown:hvTR_Q6TVR0 target sequence
QVRDDATASLSVGERIADDTRHSMYEMFFNTFDMVIRQRRVNVLVHDDATGEAVVVQRTSDLRTAFDDAAEPAVREIPFNMRNML

SEQ ID NO: 21682 - protein, 85 aa, unidentified
  REGION 1..85: note = Description of Unknown:hvTR_Q6TVR0 target sequence
PYVSKNLDRIRFSKKYLEFAYLCRHIGIPVSRRKLNLRYVFMYELDGARIPIVIRDFLDVKKVFLAATDKVYPNNFAEEQPAVAE

SEQ ID NO: 21683 - protein, 85 aa, unidentified
  REGION 1..85: note = Description of Unknown:hvTR_Q6TVR0 target sequence
WGRAFVDAMAADARRLLYKYVFLSSRHLCDLFPALLNARDAKFRPASRAALVVREPPGWGEGVRFESPPCEHQIRLAVAMRVDVD

SEQ ID NO: 21684 - protein, 85 aa, unidentified
  REGION 1..85: note = Description of Unknown:hvTR_Q6TVR0 target sequence
YFAKINEFVEEFVYFEDGMAYCRICGMNIPDLNTDASGARAGVVVPATNKSIFLSEPYSYFSHSQRFIFNIVMSFDTIMKTQTWA

SEQ ID NO: 21685 - protein, 85 aa, unidentified
  REGION 1..85: note = Description of Unknown:hvTR_Q6TVR0 target sequence
VKYNINRLILNFLIAINARRQEYERRFAAEIKRGVFFLRLSANLLDVHASATELFQSAKTLNLNFIVALVIVLNSSADFLVSFMA

SEQ ID NO: 21686 - protein, 85 aa, unidentified
  REGION 1..85: note = Description of Unknown:hvTR_Q6TVR0 target sequence
SRSAKKTKDASVEVTESTLRLSIATAVHHFLVKTRVCGKEDFDTVMLLTEVYTSIMPDELEAHYRRLVAELHRLNTIGRTTRSRN

SEQ ID NO: 21687 - protein, 85 aa, unidentified
  REGION 1..85: note = Description of Unknown:hvTR_Q6TVR0 target sequence
YLVESYADAGEARAVEFFASQRVGARSMRTPPRARPTVCAEVARPAETPAESPDARAEFQDIMSDSRVLIRVHDTNAYNMKRFED

SEQ ID NO: 21688 - protein, 85 aa, unidentified
  REGION 1..85: note = Description of Unknown:hvTR_Q6TVR0 target sequence
HIKIEIEKKKIIISLASLFVTNTMKYYYANPAMYVFRFSDPYPFDETLLSAEHVAHKVNGYNMFRRSFFPDSDVFVYFSDSLSRV

SEQ ID NO: 21689 - protein, 84 aa, unidentified
  REGION 1..84: note = Description of Unknown:hvTR_Q6TVR0 target sequence
DPYPFDETLLSAEHVAHKVNGYNMFRRSFFPDSDVFVYFSDSLSRVDLEFAFFLFLAGIVGSVKDWIAESIAAIKELYMINFNN

SEQ ID NO: 21690 - protein, 85 aa, unidentified
  REGION 1..85: note = Description of Unknown:hvTR_Q6TVR0 target sequence
YTDFIADNKSIFVVNLYNVDAITEDDIRLLFATMEQNPDADDATLISIFSYIGYKFEKQVRDDATASLSVGERIADDTRHSMYEM

SEQ ID NO: 21691 - protein, 85 aa, unidentified
  REGION 1..85: note = Description of Unknown:hvTR_Q6TVR0 target sequence
FFNTFDMVIRQRRVNVLVHDDATGEAVVVQRTSDLRTAFDDAAEPAVREIPFNMRNMLPYVSKNLDRIRFSKKYLEFAYLCRHIG

SEQ ID NO: 21692 - protein, 85 aa, unidentified
  REGION 1..85: note = Description of Unknown:hvTR_Q6TVR0 target sequence
IPVSRRKLNLRYVFMYELDGARIPIVIRDFLDVKKVFLAATDKVYPNNFAEEQPAVAEWGRAFVDAMAADARRLLYKYVFLSSRH

SEQ ID NO: 21693 - protein, 85 aa, unidentified
  REGION 1..85: note = Description of Unknown:hvTR_Q6TVR0 target sequence
LCDLFPALLNARDAKFRPASRAALVVREPPGWGEGVRFESPPCEHQIRLAVAMRVDVDYFAKINEFVEEFVYFEDGMAYCRICGM

SEQ ID NO: 21694 - protein, 85 aa, unidentified
  REGION 1..85: note = Description of Unknown:hvTR_Q6TVR0 target sequence
NIPDLNTDASGARAGVVVPATNKSIFLSEPYSYFSHSQRFIFNIVMSFDTIMKTQTWAVKYNINRLILNFLIAINARRQEYERRF

SEQ ID NO: 21695 - protein, 85 aa, unidentified
  REGION 1..85: note = Description of Unknown:hvTR_Q6TVR0 target sequence
AAEIKRGVFFLRLSANLLDVHASATELFQSAKTLNLNFIVALVIVLNSSADFLVSFMASRSAKKTKDASVEVTESTLRLSIATAV

SEQ ID NO: 21696 - protein, 85 aa, unidentified
  REGION 1..85: note = Description of Unknown:hvTR_Q6TVR0 target sequence
HHFLVKTRVCGKEDFDTVMLLTEVYTSIMPDELEAHYRRLVAELHRLNTIGRTTRSRNYLVESYADAGEARAVEFFASQRVGARS

SEQ ID NO: 21697 - protein, 85 aa, unidentified
  REGION 1..85: note = Description of Unknown:hvTR_Q6TVR0 target sequence
MRTPPRARPTVCAEVARPAETPAESPDARAEFQDIMSDSRVLIRVHDTNAYNMKRFEDHIKIEIEKKKIIISLASLFVTNTMKYY

SEQ ID NO: 21698 - protein, 85 aa, unidentified
  REGION 1..85: note = Description of Unknown:hvTR_Q6TVR0 target sequence
YANPAMYVFRFSDPYPFDETLLSAEHVAHKVNGYNMFRRSFFPDSDVFVYFSDSLSRVDLEFAFFLFLAGIVGSVKDWIAESIAA

SEQ ID NO: 21699 - protein, 85 aa, unidentified
  REGION 1..85: note = Description of Unknown:hvTR_D3IZK7 target sequence
DSRESILASIVPKIRAYMRDPNTATKSYTDFIADNKSIFVVNLYNVDAITEDDIRLLFATIEQNPDADDATLISIFSYIGYKFEK

SEQ ID NO: 21700 - protein, 85 aa, unidentified
  REGION 1..85: note = Description of Unknown:hvTR_D3IZK7 target sequence
QVRDDATVSLSVGERIADDTRHSMYEMFFNTFDMVIRQRRVNVLVHDDATGEAVVVQRTSDLRTAFDDAAEPAVREIPFNMRNLL

SEQ ID NO: 21701 - protein, 85 aa, unidentified
  REGION 1..85: note = Description of Unknown:hvTR_D3IZK7 target sequence
QYVSKNLDRIRFSKKYLEFAYLCRHIGIPVSRRKLNLRYVFIYELDGARIPIVIRDFLDVKKVFLAATDKVYLNNFAEEQPAVAE

SEQ ID NO: 21702 - protein, 85 aa, unidentified
  REGION 1..85: note = Description of Unknown:hvTR_D3IZK7 target sequence
WGRAFVDAMAADARRLLYKYVFLSSRHLCDLFPALLNTRDAKFRAVSRTALVVREPPGWGEGVRFESPPCEHQIRLAVAMRVDVD

SEQ ID NO: 21703 - protein, 85 aa, unidentified
  REGION 1..85: note = Description of Unknown:hvTR_D3IZK7 target sequence
YFAKINEFVEEFVYFEDGMAYCRICGMNIPDLNTDASGARAGVVVPSTNKSIFLSEPYSYFSHSQRFIFNIVMSFDTIMKTQTWA

SEQ ID NO: 21704 - protein, 85 aa, unidentified
  REGION 1..85: note = Description of Unknown:hvTR_D3IZK7 target sequence
VKYNINRLILNFLIAINARRQEYERRFAAEIKRGVFFLRLSANLLDVHTSAAELFQSAKTLNLNFIVVLVIVLNSSADFIVSFMA

SEQ ID NO: 21705 - protein, 85 aa, unidentified
  REGION 1..85: note = Description of Unknown:hvTR_D3IZK7 target sequence
SRPAKKTKDAEVEVTEASLRLSIATVVHHFLVKTRICSKEDFDTVVLLTEVYTSIMPEELEAHYRRIVAELHRLNTIGRTTRSRN

SEQ ID NO: 21706 - protein, 85 aa, unidentified
  REGION 1..85: note = Description of Unknown:hvTR_D3IZK7 target sequence
YLVESYADAGEARAVEFFASQRVGARPMRTPPRARPAVCTEVARPADTPAESPDARAEFQDIMADSRVLIRVHDTNAYNMKRFED

SEQ ID NO: 21707 - protein, 85 aa, unidentified
  REGION 1..85: note = Description of Unknown:hvTR_D3IZK7 target sequence
HIKIEIEKKKIIISLASLFVTNTMKYYYANPAMYVFRFSDPYPFDETLLSAEHVAHKVNGYNMFRRSFFPESDVFVYFSDSLNRV

SEQ ID NO: 21708 - protein, 84 aa, unidentified
  REGION 1..84: note = Description of Unknown:hvTR_D3IZK7 target sequence
DPYPFDETLLSAEHVAHKVNGYNMFRRSFFPESDVFVYFSDSLNRVDLEFAFFLFLAGIVGSVKDWIAESIAAIKELYMINFNN

SEQ ID NO: 21709 - protein, 85 aa, unidentified
  REGION 1..85: note = Description of Unknown:hvTR_D3IZK7 target sequence
YTDFIADNKSIFVVNLYNVDAITEDDIRLLFATIEQNPDADDATLISIFSYIGYKFEKQVRDDATVSLSVGERIADDTRHSMYEM

SEQ ID NO: 21710 - protein, 85 aa, unidentified
  REGION 1..85: note = Description of Unknown:hvTR_D3IZK7 target sequence
FFNTFDMVIRQRRVNVLVHDDATGEAVVVQRTSDLRTAFDDAAEPAVREIPFNMRNLLQYVSKNLDRIRFSKKYLEFAYLCRHIG

SEQ ID NO: 21711 - protein, 85 aa, unidentified
  REGION 1..85: note = Description of Unknown:hvTR_D3IZK7 target sequence
IPVSRRKLNLRYVFIYELDGARIPIVIRDFLDVKKVFLAATDKVYLNNFAEEQPAVAEWGRAFVDAMAADARRLLYKYVFLSSRH

SEQ ID NO: 21712 - protein, 85 aa, unidentified
  REGION 1..85: note = Description of Unknown:hvTR_D3IZK7 target sequence
LCDLFPALLNTRDAKFRAVSRTALVVREPPGWGEGVRFESPPCEHQIRLAVAMRVDVDYFAKINEFVEEFVYFEDGMAYCRICGM

SEQ ID NO: 21713 - protein, 85 aa, unidentified
  REGION 1..85: note = Description of Unknown:hvTR_D3IZK7 target sequence
NIPDLNTDASGARAGVVVPSTNKSIFLSEPYSYFSHSQRFIFNIVMSFDTIMKTQTWAVKYNINRLILNFLIAINARRQEYERRF

SEQ ID NO: 21714 - protein, 85 aa, unidentified
  REGION 1..85: note = Description of Unknown:hvTR_D3IZK7 target sequence
AAEIKRGVFFLRLSANLLDVHTSAAELFQSAKTLNLNFIVVLVIVLNSSADFIVSFMASRPAKKTKDAEVEVTEASLRLSIATVV

SEQ ID NO: 21715 - protein, 85 aa, unidentified
  REGION 1..85: note = Description of Unknown:hvTR_D3IZK7 target sequence
HHFLVKTRICSKEDFDTVVLLTEVYTSIMPEELEAHYRRIVAELHRLNTIGRTTRSRNYLVESYADAGEARAVEFFASQRVGARP

SEQ ID NO: 21716 - protein, 85 aa, unidentified
  REGION 1..85: note = Description of Unknown:hvTR_D3IZK7 target sequence
MRTPPRARPAVCTEVARPADTPAESPDARAEFQDIMADSRVLIRVHDTNAYNMKRFEDHIKIEIEKKKIIISLASLFVTNTMKYY

SEQ ID NO: 21717 - protein, 85 aa, unidentified
  REGION 1..85: note = Description of Unknown:hvTR_D3IZK7 target sequence
YANPAMYVFRFSDPYPFDETLLSAEHVAHKVNGYNMFRRSFFPESDVFVYFSDSLNRVDLEFAFFLFLAGIVGSVKDWIAESIAA

SEQ ID NO: 21718 - protein, 85 aa, unidentified
  REGION 1..85: note = Description of Unknown:hvTR_Q6TVC8 target sequence
DSREAILSSIIPKIRAYMRDPNTAAKSYTDFIADNKSIFVVNLYNVDAITDDDIRLLFATMEQNPDADDATLISIFSYIGYKFEK

SEQ ID NO: 21719 - protein, 85 aa, unidentified
  REGION 1..85: note = Description of Unknown:hvTR_Q6TVC8 target sequence
QVRDDATVSLSVGERIADDTKHSMYDMFFNRFDMIIRQRRVNVLVHDDATGEAAVVNRTSDLRTAFDDSVDPEVREIPFNMRNLL

SEQ ID NO: 21720 - protein, 85 aa, unidentified
  REGION 1..85: note = Description of Unknown:hvTR_Q6TVC8 target sequence
QYVSKNIDRIRFSKKYLEFAYLCRHIGIPVSRRKLNLRYVFMYDLDGVRIPIVIRDFLDVKKVFLEATGKVYLNNFADDHPGIVE

SEQ ID NO: 21721 - protein, 85 aa, unidentified
  REGION 1..85: note = Description of Unknown:hvTR_Q6TVC8 target sequence
WGRAFVDAMAHDERRLLYKYVFLSSRHLCDMFTDLLNPRNAKFRAIARTAVAVSEPPGWRDVVHYESPPCEHQLKLAAAMRVDVD

SEQ ID NO: 21722 - protein, 85 aa, unidentified
  REGION 1..85: note = Description of Unknown:hvTR_Q6TVC8 target sequence
YFAKVNEFVEEYVYFEDGMAYCNICGMNIPDLNTDASGSRAGVVVPATNKSIFLSEPYSYFSHSQRFIFNIVMSFDTIMKTQTWS

SEQ ID NO: 21723 - protein, 85 aa, unidentified
  REGION 1..85: note = Description of Unknown:hvTR_Q6TVC8 target sequence
VKYNINRLILNFLIAINARRQEYERRFAAEIKKGVFFLRLSANLLDVHASATELFQSAKTLNLNFIVALVIVLNSSADFLVSFMM

SEQ ID NO: 21724 - protein, 85 aa, unidentified
  REGION 1..85: note = Description of Unknown:hvTR_Q6TVC8 target sequence
ARGAKKKDRPVEVTEGTLRLSIATVVHHFLVKTRVCTKEDFDTVVLLTEVYTAIMPEELNAHYHRLVAELHRLNTIGRTTRSRNY

SEQ ID NO: 21725 - protein, 85 aa, unidentified
  REGION 1..85: note = Description of Unknown:hvTR_Q6TVC8 target sequence
LVEAYSDREEARSIEFFESQRVGARPMRMPARQWRVACPTVAVPAHTPDETPDARSEFQEIMSDTRVLIRVHDTNAYNMRRFDDH

SEQ ID NO: 21726 - protein, 85 aa, unidentified
  REGION 1..85: note = Description of Unknown:hvTR_Q6TVC8 target sequence
IKIEIEKKKIIISLASLFVTNTMKYYYANPAMYVFRFSDPYPFDETLLGPEHVSHKVNGYNAFRRNFFPDSDLFVYFSDSLSRVD

SEQ ID NO: 21727 - protein, 84 aa, unidentified
  REGION 1..84: note = Description of Unknown:hvTR_Q6TVC8 target sequence
DPYPFDETLLGPEHVSHKVNGYNAFRRNFFPDSDLFVYFSDSLSRVDLEFAFFLFLSGLVGSVKDWIDKSITAIKELYMINFNN

SEQ ID NO: 21728 - protein, 85 aa, unidentified
  REGION 1..85: note = Description of Unknown:hvTR_Q6TVC8 target sequence
YTDFIADNKSIFVVNLYNVDAITDDDIRLLFATMEQNPDADDATLISIFSYIGYKFEKQVRDDATVSLSVGERIADDTKHSMYDM

SEQ ID NO: 21729 - protein, 85 aa, unidentified
  REGION 1..85: note = Description of Unknown:hvTR_Q6TVC8 target sequence
FFNRFDMIIRQRRVNVLVHDDATGEAAVVNRTSDLRTAFDDSVDPEVREIPFNMRNLLQYVSKNIDRIRFSKKYLEFAYLCRHIG

SEQ ID NO: 21730 - protein, 85 aa, unidentified
  REGION 1..85: note = Description of Unknown:hvTR_Q6TVC8 target sequence
IPVSRRKLNLRYVFMYDLDGVRIPIVIRDFLDVKKVFLEATGKVYLNNFADDHPGIVEWGRAFVDAMAHDERRLLYKYVFLSSRH

SEQ ID NO: 21731 - protein, 85 aa, unidentified
  REGION 1..85: note = Description of Unknown:hvTR_Q6TVC8 target sequence
LCDMFTDLLNPRNAKFRAIARTAVAVSEPPGWRDVVHYESPPCEHQLKLAAAMRVDVDYFAKVNEFVEEYVYFEDGMAYCNICGM

SEQ ID NO: 21732 - protein, 85 aa, unidentified
  REGION 1..85: note = Description of Unknown:hvTR_Q6TVC8 target sequence
NIPDLNTDASGSRAGVVVPATNKSIFLSEPYSYFSHSQRFIFNIVMSFDTIMKTQTWSVKYNINRLILNFLIAINARRQEYERRF

SEQ ID NO: 21733 - protein, 85 aa, unidentified
  REGION 1..85: note = Description of Unknown:hvTR_Q6TVC8 target sequence
AAEIKKGVFFLRLSANLLDVHASATELFQSAKTLNLNFIVALVIVLNSSADFLVSFMMARGAKKKDRPVEVTEGTLRLSIATVVH

SEQ ID NO: 21734 - protein, 85 aa, unidentified
  REGION 1..85: note = Description of Unknown:hvTR_Q6TVC8 target sequence
HFLVKTRVCTKEDFDTVVLLTEVYTAIMPEELNAHYHRLVAELHRLNTIGRTTRSRNYLVEAYSDREEARSIEFFESQRVGARPM

SEQ ID NO: 21735 - protein, 85 aa, unidentified
  REGION 1..85: note = Description of Unknown:hvTR_Q6TVC8 target sequence
RMPARQWRVACPTVAVPAHTPDETPDARSEFQEIMSDTRVLIRVHDTNAYNMRRFDDHIKIEIEKKKIIISLASLFVTNTMKYYY

SEQ ID NO: 21736 - protein, 85 aa, unidentified
  REGION 1..85: note = Description of Unknown:hvTR_Q6TVC8 target sequence
ANPAMYVFRFSDPYPFDETLLGPEHVSHKVNGYNAFRRNFFPDSDLFVYFSDSLSRVDLEFAFFLFLSGLVGSVKDWIDKSITAI

SEQ ID NO: 21737 - protein, 85 aa, unidentified
  REGION 1..85: note = Description of Unknown:cds_NC_024711.1_cds_YP_009052553.1_76 target sequence
YNFGRLDFPNQHVSYAEKQEVDWYAKCCDYVIEAGIACKADFNVEEKFNILLGNIPREYYRKTLNPYNEKDENLTRFPATMRNYD

SEQ ID NO: 21738 - protein, 85 aa, unidentified
  REGION 1..85: note = Description of Unknown:cds_NC_024711.1_cds_YP_009052553.1_76 target sequence
MMKGIIRRYIGEYIKNPHDFIVGANNPEVVFARDAELGKQIMMLAEQAVAKKIQESYMQFVNEGNNPEQFNPEQAVDIEAFIKEF

SEQ ID NO: 21739 - protein, 85 aa, unidentified
  REGION 1..85: note = Description of Unknown:cds_NC_024711.1_cds_YP_009052553.1_76 target sequence
NENFIDDISAQGQDLINVIDDLTDAFTIYARAYFEFVAFGACYTYRDVVGNQLIKRVVSVRDAFPVPNDNMFAEDYDMFAERRML

SEQ ID NO: 21740 - protein, 85 aa, unidentified
  REGION 1..85: note = Description of Unknown:cds_NC_024711.1_cds_YP_009052553.1_76 target sequence
TKQQIIDEFYEYLSEKEREALDTYYQYSATTSSDRALLNWDKYMYYFGDICSKFNKDDLQHIKNTNIMARDANNGLFEVWHTVWR

SEQ ID NO: 21741 - protein, 85 aa, unidentified
  REGION 1..85: note = Description of Unknown:cds_NC_024711.1_cds_YP_009052553.1_76 target sequence
GEIKEGILTYSNGAFVTTRIVDETYQLNPAGGDISIEWVWRPQVYESVRIGSRATSIYPYKARPIAYNRNGKLPYNGIAELLPGF

SEQ ID NO: 21742 - protein, 85 aa, unidentified
  REGION 1..85: note = Description of Unknown:cds_NC_024711.1_cds_YP_009052553.1_76 target sequence
GRFSVVDTVIPYQVFRNIVSYHREMAIAKNKMNVLMIAKSLLGKKPAETIYRMAADGVLYIDDEDDANLVKAQNVRYLESRMNNY

SEQ ID NO: 21743 - protein, 85 aa, unidentified
  REGION 1..85: note = Description of Unknown:cds_NC_024711.1_cds_YP_009052553.1_76 target sequence
ITELGQLIQEIEQTAKMECDMTPQRYGEIANSAGKGVTDEAVIRGSMGSVIIEFIFDKMRERDYQAEMDYTKLAWIDGLNTSYKT

SEQ ID NO: 21744 - protein, 85 aa, unidentified
  REGION 1..85: note = Description of Unknown:cds_NC_024711.1_cds_YP_009052553.1_76 target sequence
KDGDIRYLSLDVNSHIFANYIVTCKTSVKEREKLEQYKQLAFSAAQNGNMDMANAAIRGDNVAQISKLIDKYQNIQREHELDVER

SEQ ID NO: 21745 - protein, 85 aa, unidentified
  REGION 1..85: note = Description of Unknown:cds_NC_024711.1_cds_YP_009052553.1_76 target sequence
VSQQTEQLRQEFELAKIDRKAEQDRETIRVEKYLDGQIEAMKANANIMSFDNGLSDAEKNQAEERMENARLNLERSKLSLDAQKT

SEQ ID NO: 21746 - protein, 84 aa, unidentified
  REGION 1..84: note = Description of Unknown:cds_NC_024711.1_cds_YP_009052553.1_76 target sequence
EAMKANANIMSFDNGLSDAEKNQAEERMENARLNLERSKLSLDAQKTSVEAQLKEKELAVKLKESDDKVKIAKTNKNRYDSKSK

SEQ ID NO: 21747 - protein, 85 aa, unidentified
  REGION 1..85: note = Description of Unknown:cds_NC_024711.1_cds_YP_009052553.1_76 target sequence
CDYVIEAGIACKADFNVEEKFNILLGNIPREYYRKTLNPYNEKDENLTRFPATMRNYDMMKGIIRRYIGEYIKNPHDFIVGANNP

SEQ ID NO: 21748 - protein, 85 aa, unidentified
  REGION 1..85: note = Description of Unknown:cds_NC_024711.1_cds_YP_009052553.1_76 target sequence
EVVFARDAELGKQIMMLAEQAVAKKIQESYMQFVNEGNNPEQFNPEQAVDIEAFIKEFNENFIDDISAQGQDLINVIDDLTDAFT

SEQ ID NO: 21749 - protein, 85 aa, unidentified
  REGION 1..85: note = Description of Unknown:cds_NC_024711.1_cds_YP_009052553.1_76 target sequence
IYARAYFEFVAFGACYTYRDVVGNQLIKRVVSVRDAFPVPNDNMFAEDYDMFAERRMLTKQQIIDEFYEYLSEKEREALDTYYQY

SEQ ID NO: 21750 - protein, 85 aa, unidentified
  REGION 1..85: note = Description of Unknown:cds_NC_024711.1_cds_YP_009052553.1_76 target sequence
SATTSSDRALLNWDKYMYYFGDICSKFNKDDLQHIKNTNIMARDANNGLFEVWHTVWRGEIKEGILTYSNGAFVTTRIVDETYQL

SEQ ID NO: 21751 - protein, 85 aa, unidentified
  REGION 1..85: note = Description of Unknown:cds_NC_024711.1_cds_YP_009052553.1_76 target sequence
NPAGGDISIEWVWRPQVYESVRIGSRATSIYPYKARPIAYNRNGKLPYNGIAELLPGFGRFSVVDTVIPYQVFRNIVSYHREMAI

SEQ ID NO: 21752 - protein, 85 aa, unidentified
  REGION 1..85: note = Description of Unknown:cds_NC_024711.1_cds_YP_009052553.1_76 target sequence
AKNKMNVLMIAKSLLGKKPAETIYRMAADGVLYIDDEDDANLVKAQNVRYLESRMNNYITELGQLIQEIEQTAKMECDMTPQRYG

SEQ ID NO: 21753 - protein, 85 aa, unidentified
  REGION 1..85: note = Description of Unknown:cds_NC_024711.1_cds_YP_009052553.1_76 target sequence
EIANSAGKGVTDEAVIRGSMGSVIIEFIFDKMRERDYQAEMDYTKLAWIDGLNTSYKTKDGDIRYLSLDVNSHIFANYIVTCKTS

SEQ ID NO: 21754 - protein, 85 aa, unidentified
  REGION 1..85: note = Description of Unknown:cds_NC_024711.1_cds_YP_009052553.1_76 target sequence
VKEREKLEQYKQLAFSAAQNGNMDMANAAIRGDNVAQISKLIDKYQNIQREHELDVERVSQQTEQLRQEFELAKIDRKAEQDRET

SEQ ID NO: 21755 - protein, 85 aa, unidentified
  REGION 1..85: note = Description of Unknown:cds_NC_024711.1_cds_YP_009052553.1_76 target sequence
IRVEKYLDGQIEAMKANANIMSFDNGLSDAEKNQAEERMENARLNLERSKLSLDAQKTSVEAQLKEKELAVKLKESDDKVKIAKT

SEQ ID NO: 21756 - protein, 85 aa, unidentified
  REGION 1..85: note = Description of Unknown:cds_NZ_WFIY01000004.1_cds_WP_155862315.1_39 target sequence
SYSSELIALERLKRGTKYLILSPLLFGITMEILSAIKVTTIYLLSTTSLLVGVAIILIFMVKGMLYLRSGFSLLSRVRSGKTGAT

SEQ ID NO: 21757 - protein, 85 aa, unidentified
  REGION 1..85: note = Description of Unknown:cds_NZ_WFIY01000004.1_cds_WP_155862315.1_39 target sequence
LWLVALFLFFVCISLNFVLTFSPNIFEGYGLNVANLITLSLPLGIILAIIANILIGVGFYKVGRFYNSRTLKAGGILITTFIFTF

SEQ ID NO: 21758 - protein, 85 aa, unidentified
  REGION 1..85: note = Description of Unknown:cds_NZ_WFIY01000004.1_cds_WP_155862315.1_39 target sequence
IGFILTYLGLRKIVRRISAGMIVTQRGSPSLSLRLSPSNYPLFLFPLFTLSSYYFYKLGIVIASILYFILYLAFVILYFYSKKWV

SEQ ID NO: 21759 - protein, 85 aa, unidentified
  REGION 1..85: note = Description of Unknown:cds_NZ_WFIY01000004.1_cds_WP_155862315.1_39 target sequence
LPLIYNLFAALLPLYFTNELSLATSTTPTEYIIAYLFLALAGLGIGNALTNPNSNLKAFGAFATFMWVFLSALGLIFSCNQYLSF

SEQ ID NO: 21760 - protein, 85 aa, unidentified
  REGION 1..85: note = Description of Unknown:cds_NZ_WFIY01000004.1_cds_WP_155862315.1_39 target sequence
SIWFMSTLYFMTVIITKRLHPRYVLLYTTPQIIKPPVHFWIVGLPQGISLKITVNGKKYKITNYYKGAYYLTVKGNKDQYVWSVP

SEQ ID NO: 21761 - protein, 85 aa, unidentified
  REGION 1..85: note = Description of Unknown:cds_NZ_WFIY01000004.1_cds_WP_155862315.1_39 target sequence
ERILISNYTYTTYVSNGIAYAGDDVIIRYNLITPTPVQTTPQPAPSSVANIQLGSTVSRKLYTVKQIQWDPRTWIGKTLSIYRIS

SEQ ID NO: 21762 - protein, 85 aa, unidentified
  REGION 1..85: note = Description of Unknown:cds_NZ_WFIY01000004.1_cds_WP_155862315.1_39 target sequence
DVIGEGGYAYVLKGEHDGKLVALKVLKLGNFNPSENFKELFEESSNLVSLSEKSPKIIKIYGIYIDKQVMEGISKGNIKLYETNP

SEQ ID NO: 21763 - protein, 85 aa, unidentified
  REGION 1..85: note = Description of Unknown:cds_NZ_WFIY01000004.1_cds_WP_155862315.1_39 target sequence
PMIAMEFMEGGTLKEILMDDMMYYSSKWEKTVYRAIRDVAEALYVIHSNGYVHMDVKPQNIFLTEKPSQPYDLDKVGFKLGDLGS

SEQ ID NO: 21764 - protein, 85 aa, unidentified
  REGION 1..85: note = Description of Unknown:cds_NZ_WFIY01000004.1_cds_WP_155862315.1_39 target sequence
AVKEGGKITQITVEYSPPEVYEQAVANSSIDIFALGMTMYVLLTRKNDRPDLNDMEEAFDCYQRSDMQCVYKKVIASKIKLASWD

SEQ ID NO: 21765 - protein, 84 aa, unidentified
  REGION 1..84: note = Description of Unknown:cds_NZ_WFIY01000004.1_cds_WP_155862315.1_39 target sequence
MYVLLTRKNDRPDLNDMEEAFDCYQRSDMQCVYKKVIASKIKLASWDPNVPDEVKPLVKAMLSPDPSRRPKAIDVVNYLNRLIK

SEQ ID NO: 21766 - protein, 85 aa, unidentified
  REGION 1..85: note = Description of Unknown:cds_NZ_WFIY01000004.1_cds_WP_155862315.1_39 target sequence
ITMEILSAIKVTTIYLLSTTSLLVGVAIILIFMVKGMLYLRSGFSLLSRVRSGKTGATLWLVALFLFFVCISLNFVLTFSPNIFE

SEQ ID NO: 21767 - protein, 85 aa, unidentified
  REGION 1..85: note = Description of Unknown:cds_NZ_WFIY01000004.1_cds_WP_155862315.1_39 target sequence
GYGLNVANLITLSLPLGIILAIIANILIGVGFYKVGRFYNSRTLKAGGILITTFIFTFIGFILTYLGLRKIVRRISAGMIVTQRG

SEQ ID NO: 21768 - protein, 85 aa, unidentified
  REGION 1..85: note = Description of Unknown:cds_NZ_WFIY01000004.1_cds_WP_155862315.1_39 target sequence
SPSLSLRLSPSNYPLFLFPLFTLSSYYFYKLGIVIASILYFILYLAFVILYFYSKKWVLPLIYNLFAALLPLYFTNELSLATSTT

SEQ ID NO: 21769 - protein, 85 aa, unidentified
  REGION 1..85: note = Description of Unknown:cds_NZ_WFIY01000004.1_cds_WP_155862315.1_39 target sequence
PTEYIIAYLFLALAGLGIGNALTNPNSNLKAFGAFATFMWVFLSALGLIFSCNQYLSFSIWFMSTLYFMTVIITKRLHPRYVLLY

SEQ ID NO: 21770 - protein, 85 aa, unidentified
  REGION 1..85: note = Description of Unknown:cds_NZ_WFIY01000004.1_cds_WP_155862315.1_39 target sequence
TTPQIIKPPVHFWIVGLPQGISLKITVNGKKYKITNYYKGAYYLTVKGNKDQYVWSVPERILISNYTYTTYVSNGIAYAGDDVII

SEQ ID NO: 21771 - protein, 85 aa, unidentified
  REGION 1..85: note = Description of Unknown:cds_NZ_WFIY01000004.1_cds_WP_155862315.1_39 target sequence
RYNLITPTPVQTTPQPAPSSVANIQLGSTVSRKLYTVKQIQWDPRTWIGKTLSIYRISDVIGEGGYAYVLKGEHDGKLVALKVLK

SEQ ID NO: 21772 - protein, 85 aa, unidentified
  REGION 1..85: note = Description of Unknown:cds_NZ_WFIY01000004.1_cds_WP_155862315.1_39 target sequence
LGNFNPSENFKELFEESSNLVSLSEKSPKIIKIYGIYIDKQVMEGISKGNIKLYETNPPMIAMEFMEGGTLKEILMDDMMYYSSK

SEQ ID NO: 21773 - protein, 85 aa, unidentified
  REGION 1..85: note = Description of Unknown:cds_NZ_WFIY01000004.1_cds_WP_155862315.1_39 target sequence
WEKTVYRAIRDVAEALYVIHSNGYVHMDVKPQNIFLTEKPSQPYDLDKVGFKLGDLGSAVKEGGKITQITVEYSPPEVYEQAVAN

SEQ ID NO: 21774 - protein, 85 aa, unidentified
  REGION 1..85: note = Description of Unknown:cds_NZ_WFIY01000004.1_cds_WP_155862315.1_39 target sequence
SSIDIFALGMTMYVLLTRKNDRPDLNDMEEAFDCYQRSDMQCVYKKVIASKIKLASWDPNVPDEVKPLVKAMLSPDPSRRPKAID

SEQ ID NO: 21775 - protein, 85 aa, unidentified
  REGION 1..85: note = Description of Unknown:cds_NC_007409.1_cds_YP_319879.1_48 target sequence
SSNYVPPDVSRSKAKEIALVNKAIQLANQGDYDEALNIIDQLPPSDNTRQVKAYILVKKYLDLLKDTNTPLKDRINYANQLVAIS

SEQ ID NO: 21776 - protein, 85 aa, unidentified
  REGION 1..85: note = Description of Unknown:cds_NC_007409.1_cds_YP_319879.1_48 target sequence
QRYPNVFSPQDAENIVEYLKEEEKVKELLNKLNDALSQADYNLALQYAKQLNDILNNTQTNNLVKALQIVASVPPPPTPEGTITS

SEQ ID NO: 21777 - protein, 85 aa, unidentified
  REGION 1..85: note = Description of Unknown:cds_NC_007409.1_cds_YP_319879.1_48 target sequence
FLSQLVDYYKNASQAYSEASKYEPMFRPVADTLSTSAEMLEELLTNVNQILTTHSVSNAEDALKNIENIVNESKSLPIAPITEDI

SEQ ID NO: 21778 - protein, 85 aa, unidentified
  REGION 1..85: note = Description of Unknown:cds_NC_007409.1_cds_YP_319879.1_48 target sequence
LNIAEEMVKQIQIDNEANQYLHSSVKALDEGDYTKAYEDAEKATELLGPNAPQSVKNYTNALAILTKTEPLPSPPSQIKGMQDLL

SEQ ID NO: 21779 - protein, 85 aa, unidentified
  REGION 1..85: note = Description of Unknown:cds_NC_007409.1_cds_YP_319879.1_48 target sequence
SYFSNVGNALSKNYELTSKASSIYPAFKPIAEAYALHLKDNNHLVDALSKINKKPPKNSDQFAFMSAVLKQISQETAPQNFVTQT

SEQ ID NO: 21780 - protein, 85 aa, unidentified
  REGION 1..85: note = Description of Unknown:cds_NC_007409.1_cds_YP_319879.1_48 target sequence
YQQIGSQLSTATSESANQYSLLAEANNLIDQANAVITQVNNMMNNANNLSLGEVSQLYKNAADTLEKQALPPMQEAYKILQELAK

SEQ ID NO: 21781 - protein, 85 aa, unidentified
  REGION 1..85: note = Description of Unknown:cds_NC_007409.1_cds_YP_319879.1_48 target sequence
QGAINQDSVNQVEENIQNIQNTITEFDMLSTAYEYLDQANAVITQVNNMMNNANNLSLGEVSQLYKNAADTLEKQALPPMQEAYK

SEQ ID NO: 21782 - protein, 85 aa, unidentified
  REGION 1..85: note = Description of Unknown:cds_NC_007409.1_cds_YP_319879.1_48 target sequence
ILQELAKQGAINQDSVNQVEENIQNIQNTITEFNLLAVAYGYMNEGYNQLQKLSNVSSPSQGVIIARSAKHYFEQASREFERANV

SEQ ID NO: 21783 - protein, 85 aa, unidentified
  REGION 1..85: note = Description of Unknown:cds_NC_007409.1_cds_YP_319879.1_48 target sequence
NPNPAKPAIEQATDLILGFDELEKAQNTIAPERKHIAGARPPNPPTNAELAKYYEQLSNAYNTAAEYAYNAEKYFAEAESIAESE

SEQ ID NO: 21784 - protein, 84 aa, unidentified
  REGION 1..84: note = Description of Unknown:cds_NC_007409.1_cds_YP_319879.1_48 target sequence
IAGARPPNPPTNAELAKYYEQLSNAYNTAAEYAYNAEKYFAEAESIAESESETTESENNETTESTANSEGEKQEGEHGARLIRV

SEQ ID NO: 21785 - protein, 85 aa, unidentified
  REGION 1..85: note = Description of Unknown:cds_NC_007409.1_cds_YP_319879.1_48 target sequence
NQGDYDEALNIIDQLPPSDNTRQVKAYILVKKYLDLLKDTNTPLKDRINYANQLVAISQRYPNVFSPQDAENIVEYLKEEEKVKE

SEQ ID NO: 21786 - protein, 85 aa, unidentified
  REGION 1..85: note = Description of Unknown:cds_NC_007409.1_cds_YP_319879.1_48 target sequence
LLNKLNDALSQADYNLALQYAKQLNDILNNTQTNNLVKALQIVASVPPPPTPEGTITSFLSQLVDYYKNASQAYSEASKYEPMFR

SEQ ID NO: 21787 - protein, 85 aa, unidentified
  REGION 1..85: note = Description of Unknown:cds_NC_007409.1_cds_YP_319879.1_48 target sequence
PVADTLSTSAEMLEELLTNVNQILTTHSVSNAEDALKNIENIVNESKSLPIAPITEDILNIAEEMVKQIQIDNEANQYLHSSVKA

SEQ ID NO: 21788 - protein, 85 aa, unidentified
  REGION 1..85: note = Description of Unknown:cds_NC_007409.1_cds_YP_319879.1_48 target sequence
LDEGDYTKAYEDAEKATELLGPNAPQSVKNYTNALAILTKTEPLPSPPSQIKGMQDLLSYFSNVGNALSKNYELTSKASSIYPAF

SEQ ID NO: 21789 - protein, 85 aa, unidentified
  REGION 1..85: note = Description of Unknown:cds_NC_007409.1_cds_YP_319879.1_48 target sequence
KPIAEAYALHLKDNNHLVDALSKINKKPPKNSDQFAFMSAVLKQISQETAPQNFVTQTYQQIGSQLSTATSESANQYSLLAEANN

SEQ ID NO: 21790 - protein, 85 aa, unidentified
  REGION 1..85: note = Description of Unknown:cds_NC_007409.1_cds_YP_319879.1_48 target sequence
LIDQANAVITQVNNMMNNANNLSLGEVSQLYKNAADTLEKQALPPMQEAYKILQELAKQGAINQDSVNQVEENIQNIQNTITEFD

SEQ ID NO: 21791 - protein, 85 aa, unidentified
  REGION 1..85: note = Description of Unknown:cds_NC_007409.1_cds_YP_319879.1_48 target sequence
MLSTAYEYLDQANAVITQVNNMMNNANNLSLGEVSQLYKNAADTLEKQALPPMQEAYKILQELAKQGAINQDSVNQVEENIQNIQ

SEQ ID NO: 21792 - protein, 85 aa, unidentified
  REGION 1..85: note = Description of Unknown:cds_NC_007409.1_cds_YP_319879.1_48 target sequence
NTITEFNLLAVAYGYMNEGYNQLQKLSNVSSPSQGVIIARSAKHYFEQASREFERANVNPNPAKPAIEQATDLILGFDELEKAQN

SEQ ID NO: 21793 - protein, 85 aa, unidentified
  REGION 1..85: note = Description of Unknown:cds_NC_007409.1_cds_YP_319879.1_48 target sequence
TIAPERKHIAGARPPNPPTNAELAKYYEQLSNAYNTAAEYAYNAEKYFAEAESIAESESETTESENNETTESTANSEGEKQEGEH

SEQ ID NO: 21794 - protein, 85 aa, unidentified
  REGION 1..85: note = Description of Unknown:hvTR_A7XCK0 target sequence
ESKETVLIDIIPKIKLYLLDDKIESKSYSDFINKNKNIFVVNLYNVSTITEDDIRLLYATIEQNIDVDDQTLISIFSYIGYKFEQ

SEQ ID NO: 21795 - protein, 85 aa, unidentified
  REGION 1..85: note = Description of Unknown:hvTR_A7XCK0 target sequence
NIKEEISSSLFINESSATDEMTFNLYNMFFNTLDMYLRQKRINVLVNDENNSDININYRTSDIASVFNSTTEPEIREIPFNMKDM

SEQ ID NO: 21796 - protein, 85 aa, unidentified
  REGION 1..85: note = Description of Unknown:hvTR_A7XCK0 target sequence
IQYVSKNIYQLRFSKKYLDFAYLCRHIGIPISKKKLNMRYIYLYNVDGVSIPIVIKDFLDVKYVYLEETGKTYKNSFSEDRNTSL

SEQ ID NO: 21797 - protein, 85 aa, unidentified
  REGION 1..85: note = Description of Unknown:hvTR_A7XCK0 target sequence
IDWGKIIIPKLKNKHMYSYIFLSNHYLKDLFPELIQEKEIFFRDCKQTKKIEVYEPPSWKEDVTIETLPCEHQIKLIDAMKIDVD

SEQ ID NO: 21798 - protein, 85 aa, unidentified
  REGION 1..85: note = Description of Unknown:hvTR_A7XCK0 target sequence
YFNKVNNFAKEYIYYEDGLAYCNLCGINVPTFNLDAADVIKNNVVVSTFNKSIFLSEPYSYFVHSQRFIFNIIMSFDNIMKSQTW

SEQ ID NO: 21799 - protein, 85 aa, unidentified
  REGION 1..85: note = Description of Unknown:hvTR_A7XCK0 target sequence
VMKYNINRLILNFLIEINSKRQKYEKKFNEEIKKGVFFLRLSANLFDIHVSSTELFYSSKILNLNYIVVLVIVLNSSADFIISYM

SEQ ID NO: 21800 - protein, 85 aa, unidentified
  REGION 1..85: note = Description of Unknown:hvTR_A7XCK0 target sequence
NSKKKQIDETSIKYALSVIIYNFLLKTKICEKGSLNTITLLTDVYTSIMPEELDLHFNRILIELKKLVSIKRSEKKPNYDVEVKI

SEQ ID NO: 21801 - protein, 85 aa, unidentified
  REGION 1..85: note = Description of Unknown:hvTR_A7XCK0 target sequence
LDPPLTKIKFFDNCSIIVKNMMLPNIKENINRDIIRPTYTFKFNKNMFQLFKILTTDEDLKVLIRYNDTNATKLVIFPTHLKIEI

SEQ ID NO: 21802 - protein, 85 aa, unidentified
  REGION 1..85: note = Description of Unknown:hvTR_A7XCK0 target sequence
ERKKLIIALKTLFTNNVLKYYYSVPSLYVFRFGDPFPFDDELIDSFHVQYKVNCYNLLRYHMLPNSDVFVYFDKSLKREDLEYSF

SEQ ID NO: 21803 - protein, 84 aa, unidentified
  REGION 1..84: note = Description of Unknown:hvTR_A7XCK0 target sequence
DPFPFDDELIDSFHVQYKVNCYNLLRYHMLPNSDVFVYFDKSLKREDLEYSFYMFLYNYVGDVSTWIDKNITRIRELYVINFNN

SEQ ID NO: 21804 - protein, 85 aa, unidentified
  REGION 1..85: note = Description of Unknown:hvTR_A7XCK0 target sequence
YSDFINKNKNIFVVNLYNVSTITEDDIRLLYATIEQNIDVDDQTLISIFSYIGYKFEQNIKEEISSSLFINESSATDEMTFNLYN

SEQ ID NO: 21805 - protein, 85 aa, unidentified
  REGION 1..85: note = Description of Unknown:hvTR_A7XCK0 target sequence
MFFNTLDMYLRQKRINVLVNDENNSDININYRTSDIASVFNSTTEPEIREIPFNMKDMIQYVSKNIYQLRFSKKYLDFAYLCRHI

SEQ ID NO: 21806 - protein, 85 aa, unidentified
  REGION 1..85: note = Description of Unknown:hvTR_A7XCK0 target sequence
GIPISKKKLNMRYIYLYNVDGVSIPIVIKDFLDVKYVYLEETGKTYKNSFSEDRNTSLIDWGKIIIPKLKNKHMYSYIFLSNHYL

SEQ ID NO: 21807 - protein, 85 aa, unidentified
  REGION 1..85: note = Description of Unknown:hvTR_A7XCK0 target sequence
KDLFPELIQEKEIFFRDCKQTKKIEVYEPPSWKEDVTIETLPCEHQIKLIDAMKIDVDYFNKVNNFAKEYIYYEDGLAYCNLCGI

SEQ ID NO: 21808 - protein, 85 aa, unidentified
  REGION 1..85: note = Description of Unknown:hvTR_A7XCK0 target sequence
NVPTFNLDAADVIKNNVVVSTFNKSIFLSEPYSYFVHSQRFIFNIIMSFDNIMKSQTWVMKYNINRLILNFLIEINSKRQKYEKK

SEQ ID NO: 21809 - protein, 85 aa, unidentified
  REGION 1..85: note = Description of Unknown:hvTR_A7XCK0 target sequence
FNEEIKKGVFFLRLSANLFDIHVSSTELFYSSKILNLNYIVVLVIVLNSSADFIISYMNSKKKQIDETSIKYALSVIIYNFLLKT

SEQ ID NO: 21810 - protein, 85 aa, unidentified
  REGION 1..85: note = Description of Unknown:hvTR_A7XCK0 target sequence
KICEKGSLNTITLLTDVYTSIMPEELDLHFNRILIELKKLVSIKRSEKKPNYDVEVKILDPPLTKIKFFDNCSIIVKNMMLPNIK

SEQ ID NO: 21811 - protein, 85 aa, unidentified
  REGION 1..85: note = Description of Unknown:hvTR_A7XCK0 target sequence
ENINRDIIRPTYTFKFNKNMFQLFKILTTDEDLKVLIRYNDTNATKLVIFPTHLKIEIERKKLIIALKTLFTNNVLKYYYSVPSL

SEQ ID NO: 21812 - protein, 85 aa, unidentified
  REGION 1..85: note = Description of Unknown:hvTR_A7XCK0 target sequence
YVFRFGDPFPFDDELIDSFHVQYKVNCYNLLRYHMLPNSDVFVYFDKSLKREDLEYSFYMFLYNYVGDVSTWIDKNITRIRELYV

SEQ ID NO: 21813 - protein, 85 aa, unidentified; identical to SEQ ID NO: 21794
  REGION 1..85: note = Description of Unknown:hvTR_Q9DHN8 target sequence

SEQ ID NO: 21814 - protein, 85 aa, unidentified; identical to SEQ ID NO: 21795
  REGION 1..85: note = Description of Unknown:hvTR_Q9DHN8 target sequence

SEQ ID NO: 21815 - protein, 85 aa, unidentified
  REGION 1..85: note = Description of Unknown:hvTR_Q9DHN8 target sequence
IQYVSKNIDQLRFSKKYLDFAYLCRHIGIPISKKKLNMRYIYLYNVDGVSIPIVIKDFLDVKYVYLEETGKTYKNSFSEDRNTSL

SEQ ID NO: 21816 - protein, 85 aa, unidentified; identical to SEQ ID NO: 21797
  REGION 1..85: note = Description of Unknown:hvTR_Q9DHN8 target sequence

SEQ ID NO: 21817 - protein, 85 aa, unidentified; identical to SEQ ID NO: 21798
  REGION 1..85: note = Description of Unknown:hvTR_Q9DHN8 target sequence

SEQ ID NO: 21818 - protein, 85 aa, unidentified; identical to SEQ ID NO: 21799
  REGION 1..85: note = Description of Unknown:hvTR_Q9DHN8 target sequence

SEQ ID NO: 21819 - protein, 85 aa, unidentified
  REGION 1..85: note = Description of Unknown:hvTR_Q9DHN8 target sequence
NSKKKQIDETSIKYALSVIIYNFLLKTKICEKGSLNTITLLTDVYTSIMPEELDLHFNRILIELKKLVSIKRSEKQPNYDVEVKI

SEQ ID NO: 21820 - protein, 85 aa, unidentified
  REGION 1..85: note = Description of Unknown:hvTR_Q9DHN8 target sequence
LDPPLTKIKFFNNCSIIVKNMMLPNIKENINRDIIRPTYTFKFNKNMFQLFKILTTDEDLKVLIRYNDTNATKLVIFPTHLKIEI

SEQ ID NO: 21821 - protein, 85 aa, unidentified; identical to SEQ ID NO: 21802
  REGION 1..85: note = Description of Unknown:hvTR_Q9DHN8 target sequence

SEQ ID NO: 21822 - protein, 84 aa, unidentified; identical to SEQ ID NO: 21803
  REGION 1..84: note = Description of Unknown:hvTR_Q9DHN8 target sequence

SEQ ID NO: 21823 - protein, 85 aa, unidentified; identical to SEQ ID NO: 21804
  REGION 1..85: note = Description of Unknown:hvTR_Q9DHN8 target sequence

SEQ ID NO: 21824 - protein, 85 aa, unidentified
  REGION 1..85: note = Description of Unknown:hvTR_Q9DHN8 target sequence
MFFNTLDMYLRQKRINVLVNDENNSDININYRTSDIASVFNSTTEPEIREIPFNMKDMIQYVSKNIDQLRFSKKYLDFAYLCRHI

SEQ ID NO: 21825 - protein, 85 aa, unidentified; identical to SEQ ID NO: 21806
  REGION 1..85: note = Description of Unknown:hvTR_Q9DHN8 target sequence

SEQ ID NO: 21826 - protein, 85 aa, unidentified; identical to SEQ ID NO: 21807
  REGION 1..85: note = Description of Unknown:hvTR_Q9DHN8 target sequence

SEQ ID NO: 21827 - protein, 85 aa, unidentified; identical to SEQ ID NO: 21808
  REGION 1..85: note = Description of Unknown:hvTR_Q9DHN8 target sequence

SEQ ID NO: 21828 - protein, 85 aa, unidentified
  REGION 1..85: note = Description of Unknown:hvTR_Q9DHN8 target sequence
KICEKGSLNTITLLTDVYTSIMPEELDLHFNRILIELKKLVSIKRSEKQPNYDVEVKILDPPLTKIKFFNNCSIIVKNMMLPNIK

SEQ ID NO: 21829 - protein, 85 aa, unidentified; identical to SEQ ID NO: 21811
  REGION 1..85: note = Description of Unknown:hvTR_Q9DHN8 target sequence

SEQ ID NO: 21830 - protein, 85 aa, unidentified; identical to SEQ ID NO: 21812
  REGION 1..85: note = Description of Unknown:hvTR_Q9DHN8 target sequence

SEQ ID NO: 21831 - protein, 85 aa, unidentified
  REGION 1..85: note = Description of Unknown:hvTR_Q6TUU0 target sequence
ESKETVLIDIIPKIKSYLLSETDTKSYSDFITKNKNIFVVNLYNVSTITEEDIRLLYATIEQNIDVDDQTLISIFSYIGYKFEQN

SEQ ID NO: 21832 - protein, 85 aa, unidentified
  REGION 1..85: note = Description of Unknown:hvTR_Q6TUU0 target sequence
IKEEVSSSLFINESSATDEMTFNLYNMFFNTLDMYLRQKRINVLVNDESNSDISINYRTSDIASVFDSNTEPEIREIPFNMKYMI

SEQ ID NO: 21833 - protein, 85 aa, unidentified
  REGION 1..85: note = Description of Unknown:hvTR_Q6TUU0 target sequence
QYVSKNIDRLRFSKKYLDFAYLCRHIGIPISKKKLNMRYIYLYKVDGLSIPIVIKDFLDVKYVYLEETGKTYKNSFSEDKNNSLI

SEQ ID NO: 21834 - protein, 85 aa, unidentified
  REGION 1..85: note = Description of Unknown:hvTR_Q6TUU0 target sequence
DWGKVIIPKLKNKYLYSYIFLSNHYLKDLFPDLIHEKEIFFRDCKQTNKIEVHEPSSWKDDVTIKTLPCEHQIKLIDAMKIDIDY

SEQ ID NO: 21835 - protein, 85 aa, unidentified
  REGION 1..85: note = Description of Unknown:hvTR_Q6TUU0 target sequence
FNKINNFAREYVYYEDGLAYCNVCGMNVPTFNLDAADVIKNNVVVSTFNKSIFLSEPYSYFVHSQRFIFNIIMSFDNIMKSQTWV

SEQ ID NO: 21836 - protein, 85 aa, unidentified
  REGION 1..85: note = Description of Unknown:hvTR_Q6TUU0 target sequence
MKYNINRLILNFLIDINSKRQKYEKKFNDEIKKGVFFLRLSANLFDIHVSSTELFYSSKILNLNYIVVLVIVLNSSADFIISYMN

SEQ ID NO: 21837 - protein, 85 aa, unidentified
  REGION 1..85: note = Description of Unknown:hvTR_Q6TUU0 target sequence
AKKKQIDETSIKYALSVIIYDFLLKTKICEKGFLNTITLLTDVYTSIMPEELNVHFNRILIELKKLISIKRSEKQPSYDVEVKIL

SEQ ID NO: 21838 - protein, 85 aa, unidentified
  REGION 1..85: note = Description of Unknown:hvTR_Q6TUU0 target sequence
DPPLTKIKFFNNCSIIVKTMTLPDIKKKVNKNIERPTYTFKFNEKMFLQFKSLTTDEELKVLIRYNDTNATKLVIFPTHLKIEIE

SEQ ID NO: 21839 - protein, 85 aa, unidentified
  REGION 1..85: note = Description of Unknown:hvTR_Q6TUU0 target sequence
RKKLIIALKTLFTNNVLKYYYSVPSLYVFRFGDPFPFDDELIDFFHVQHKVNCYNLLRYYMLPNSDVFVYFNKSLKREKLEYSFY

SEQ ID NO: 21840 - protein, 84 aa, unidentified
  REGION 1..84: note = Description of Unknown:hvTR_Q6TUU0 target sequence
DPFPFDDELIDFFHVQHKVNCYNLLRYYMLPNSDVFVYFNKSLKREKLEYSFYMFLHNYVGDVSSWIDKNITRIRELYVINFNN

SEQ ID NO: 21841 - protein, 85 aa, unidentified
  REGION 1..85: note = Description of Unknown:hvTR_Q6TUU0 target sequence
SDFITKNKNIFVVNLYNVSTITEEDIRLLYATIEQNIDVDDQTLISIFSYIGYKFEQNIKEEVSSSLFINESSATDEMTFNLYNM

SEQ ID NO: 21842 - protein, 85 aa, unidentified
  REGION 1..85: note = Description of Unknown:hvTR_Q6TUU0 target sequence
FFNTLDMYLRQKRINVLVNDESNSDISINYRTSDIASVFDSNTEPEIREIPFNMKYMIQYVSKNIDRLRFSKKYLDFAYLCRHIG

SEQ ID NO: 21843 - protein, 85 aa, unidentified
  REGION 1..85: note = Description of Unknown:hvTR_Q6TUU0 target sequence
IPISKKKLNMRYIYLYKVDGLSIPIVIKDFLDVKYVYLEETGKTYKNSFSEDKNNSLIDWGKVIIPKLKNKYLYSYIFLSNHYLK

SEQ ID NO: 21844 - protein, 85 aa, unidentified
  REGION 1..85: note = Description of Unknown:hvTR_Q6TUU0 target sequence
DLFPDLIHEKEIFFRDCKQTNKIEVHEPSSWKDDVTIKTLPCEHQIKLIDAMKIDIDYFNKINNFAREYVYYEDGLAYCNVCGMN

SEQ ID NO: 21845 - protein, 85 aa, unidentified
  REGION 1..85: note = Description of Unknown:hvTR_Q6TUU0 target sequence
VPTFNLDAADVIKNNVVVSTFNKSIFLSEPYSYFVHSQRFIFNIIMSFDNIMKSQTWVMKYNINRLILNFLIDINSKRQKYEKKF

SEQ ID NO: 21846 - protein, 85 aa, unidentified
  REGION 1..85: note = Description of Unknown:hvTR_Q6TUU0 target sequence
NDEIKKGVFFLRLSANLFDIHVSSTELFYSSKILNLNYIVVLVIVLNSSADFIISYMNAKKKQIDETSIKYALSVIIYDFLLKTK

SEQ ID NO: 21847 - protein, 85 aa, unidentified
  REGION 1..85: note = Description of Unknown:hvTR_Q6TUU0 target sequence
ICEKGFLNTITLLTDVYTSIMPEELNVHFNRILIELKKLISIKRSEKQPSYDVEVKILDPPLTKIKFFNNCSIIVKTMTLPDIKK

SEQ ID NO: 21848 - protein, 85 aa, unidentified
  REGION 1..85: note = Description of Unknown:hvTR_Q6TUU0 target sequence
KVNKNIERPTYTFKFNEKMFLQFKSLTTDEELKVLIRYNDTNATKLVIFPTHLKIEIERKKLIIALKTLFTNNVLKYYYSVPSLY

SEQ ID NO: 21849 - protein, 85 aa, unidentified
  REGION 1..85: note = Description of Unknown:hvTR_Q6TUU0 target sequence
VFRFGDPFPFDDELIDFFHVQHKVNCYNLLRYYMLPNSDVFVYFNKSLKREKLEYSFYMFLHNYVGDVSSWIDKNITRIRELYVI

SEQ ID NO: 21850 - protein, 85 aa, unidentified
  REGION 1..85: note = Description of Unknown:cds_NC_010495.1_cds_YP_001742077.1_40 target sequence
IQYPSQLTGGFLIMTTNPTNKPIPSEDPRDLKYNAGKIDEFVASLAQQYTDRFGRAHYTIEGLKQLTLQQIYNLGWNLSGSFQDG

SEQ ID NO: 21851 - protein, 85 aa, unidentified
  REGION 1..85: note = Description of Unknown:cds_NC_010495.1_cds_YP_001742077.1_40 target sequence
GTVTSAGDILQDESTNIWYRWDNLKTLPKTVPPGSTPYSSGGTGNGKWMAVDVADVLRKDLAKPTGANLIGIHDTTVGEVLRQKV

SEQ ID NO: 21852 - protein, 85 aa, unidentified
  REGION 1..85: note = Description of Unknown:cds_NC_010495.1_cds_YP_001742077.1_40 target sequence
YIIAITGQSNAVGANKGGPNPANDKIVIWDGVTGGWGSSDYTKPPLSRSTPNGNNGNNNIALAFAHRLVDEHKAEKVFIIYDAVG

SEQ ID NO: 21853 - protein, 85 aa, unidentified
  REGION 1..85: note = Description of Unknown:cds_NC_010495.1_cds_YP_001742077.1_40 target sequence
GRPIEDWMANGVNSERYAAIKSKIEAALVSQEIVATGKTEIDFLVFAQGEENALTDTVTDYQAKLTTLDKQFRAESWMSDTTPMF

SEQ ID NO: 21854 - protein, 85 aa, unidentified
  REGION 1..85: note = Description of Unknown:cds_NC_010495.1_cds_YP_001742077.1_40 target sequence
IMGMSGLHMRYQVWQAQVDYCENYNRNCIYVNSAGLKTQYDVDNTGDYTHWLGESLWEHGYYRIWHALHELGVTHRQQLPPFYSR

SEQ ID NO: 21855 - protein, 85 aa, unidentified
  REGION 1..85: note = Description of Unknown:cds_NC_010495.1_cds_YP_001742077.1_40 target sequence
GTGLWKGDSIAISGFTSLVSSGSTTNDFPKNGPASSHAISWGYQCTASNYSLTGGYQNTMDTGASYSVSWGRGNTFSAAAQYSSS

SEQ ID NO: 21856 - protein, 85 aa, unidentified
  REGION 1..85: note = Description of Unknown:cds_NC_010495.1_cds_YP_001742077.1_40 target sequence
FGRENTINASYAFAAGRGHTIADQNCAALGAFSEYKTSLEDPVRFQVGTGTAAASPKTGFAVFQSGRALFSGNIDFRKDNKHSVG

SEQ ID NO: 21857 - protein, 85 aa, unidentified
  REGION 1..85: note = Description of Unknown:cds_NC_010495.1_cds_YP_001742077.1_40 target sequence
TPGFRASVIYAATANINTSDIATKKVRGDLTDAELRAWAKVPPTIYQILESLDEKGDNARLHAGLIAQDVAAAFESEGLDPRRYA

SEQ ID NO: 21858 - protein, 85 aa, unidentified
  REGION 1..85: note = Description of Unknown:cds_NC_010495.1_cds_YP_001742077.1_40 target sequence
LFCEDETFEEVFEPQVQTVKRQKRGPGVIKETGIVDGVEVTIERTVDDALQYTLDGNELIPLMEETEETIMTPVRKSKGTRLGLR

SEQ ID NO: 21859 - protein, 84 aa, unidentified
  REGION 1..84: note = Description of Unknown:cds_NC_010495.1_cds_YP_001742077.1_40 target sequence
TGIVDGVEVTIERTVDDALQYTLDGNELIPLMEETEETIMTPVRKSKGTRLGLRYIECLIFEAAYQRSIASRLEERLDKLENGD

SEQ ID NO: 21860 - protein, 85 aa, unidentified
  REGION 1..85: note = Description of Unknown:cds_NC_010495.1_cds_YP_001742077.1_40 target sequence
PRDLKYNAGKIDEFVASLAQQYTDRFGRAHYTIEGLKQLTLQQIYNLGWNLSGSFQDGGTVTSAGDILQDESTNIWYRWDNLKTL

SEQ ID NO: 21861 - protein, 85 aa, unidentified
  REGION 1..85: note = Description of Unknown:cds_NC_010495.1_cds_YP_001742077.1_40 target sequence
PKTVPPGSTPYSSGGTGNGKWMAVDVADVLRKDLAKPTGANLIGIHDTTVGEVLRQKVYIIAITGQSNAVGANKGGPNPANDKIV

SEQ ID NO: 21862 - protein, 85 aa, unidentified
  REGION 1..85: note = Description of Unknown:cds_NC_010495.1_cds_YP_001742077.1_40 target sequence
IWDGVTGGWGSSDYTKPPLSRSTPNGNNGNNNIALAFAHRLVDEHKAEKVFIIYDAVGGRPIEDWMANGVNSERYAAIKSKIEAA

SEQ ID NO: 21863 - protein, 85 aa, unidentified
  REGION 1..85: note = Description of Unknown:cds_NC_010495.1_cds_YP_001742077.1_40 target sequence
LVSQEIVATGKTEIDFLVFAQGEENALTDTVTDYQAKLTTLDKQFRAESWMSDTTPMFIMGMSGLHMRYQVWQAQVDYCENYNRN

SEQ ID NO: 21864 - protein, 85 aa, unidentified
  REGION 1..85: note = Description of Unknown:cds_NC_010495.1_cds_YP_001742077.1_40 target sequence
CIYVNSAGLKTQYDVDNTGDYTHWLGESLWEHGYYRIWHALHELGVTHRQQLPPFYSRGTGLWKGDSIAISGFTSLVSSGSTTND

SEQ ID NO: 21865 - protein, 85 aa, unidentified
  REGION 1..85: note = Description of Unknown:cds_NC_010495.1_cds_YP_001742077.1_40 target sequence
FPKNGPASSHAISWGYQCTASNYSLTGGYQNTMDTGASYSVSWGRGNTFSAAAQYSSSFGRENTINASYAFAAGRGHTIADQNCA

SEQ ID NO: 21866 - protein, 85 aa, unidentified
  REGION 1..85: note = Description of Unknown:cds_NC_010495.1_cds_YP_001742077.1_40 target sequence
ALGAFSEYKTSLEDPVRFQVGTGTAAASPKTGFAVFQSGRALFSGNIDFRKDNKHSVGTPGFRASVIYAATANINTSDIATKKVR

SEQ ID NO: 21867 - protein, 85 aa, unidentified
  REGION 1..85: note = Description of Unknown:cds_NC_010495.1_cds_YP_001742077.1_40 target sequence
GDLTDAELRAWAKVPPTIYQILESLDEKGDNARLHAGLIAQDVAAAFESEGLDPRRYALFCEDETFEEVFEPQVQTVKRQKRGPG

SEQ ID NO: 21868 - protein, 85 aa, unidentified
  REGION 1..85: note = Description of Unknown:cds_NC_010495.1_cds_YP_001742077.1_40 target sequence
VIKETGIVDGVEVTIERTVDDALQYTLDGNELIPLMEETEETIMTPVRKSKGTRLGLRYIECLIFEAAYQRSIASRLEERLDKLE

SEQ ID NO: 21869 - protein, 85 aa, unidentified
  REGION 1..85: note = Description of Unknown:hvTR_Q0NPX4 target sequence
DSKETILIEIIPKIKAYLLDANISPKSYDDFISRNKNIFVINLYNVSTITEEDIRLLYTTIEQNIDADDQTLVAIFSYIGYKFEQ

SEQ ID NO: 21870 - protein, 85 aa, unidentified
  REGION 1..85: note = Description of Unknown:hvTR_Q0NPX4 target sequence
TVKEEISTSLSFNDKNTTDEMTYNLYDLFFNTLDMYLRQKKISILVNDDVRGDVIVSYKNSDLVSSFNAELEPEIKKIPFNMKNL

SEQ ID NO: 21871 - protein, 85 aa, unidentified
  REGION 1..85: note = Description of Unknown:hvTR_Q0NPX4 target sequence
LPYLEKNLDQLRFSKKYLDFAYLCRHIGIPISKKKYNVRYVFLYKIDGLSIPIIIKDFLDVKYVYLENTGKIYKNSFSEDHNNSL

SEQ ID NO: 21872 - protein, 85 aa, unidentified
  REGION 1..85: note = Description of Unknown:hvTR_Q0NPX4 target sequence
SDWGKVIIPLLKDRHLYSYIFLSSYHLHSYYTDLIARDEPVFVKRKKLDIIEIDEPEAWKRDVRVEFAPCEHQIRLKEAMKVDAN

SEQ ID NO: 21873 - protein, 85 aa, unidentified
  REGION 1..85: note = Description of Unknown:hvTR_Q0NPX4 target sequence
YFTKINNFANEFIYYEDGVAYCRVCGINIPIFNLDAADVIKNTVIVSTFNKTIFLSEPYSYFVHSQRFIFNIIMSFDNIMKSQTW

SEQ ID NO: 21874 - protein, 85 aa, unidentified
  REGION 1..85: note = Description of Unknown:hvTR_Q0NPX4 target sequence
VMKYNINRLILNFLIDINSRRQEYEKKFSSEIKRGLFFLRLSANLFESQVSSTELFYVSKMLNLNYIVALVIILNSSADFIVSYM

SEQ ID NO: 21875 - protein, 85 aa, unidentified
  REGION 1..85: note = Description of Unknown:hvTR_Q0NPX4 target sequence
KSKNKTVEESTLKYAISVVIYDFLVKTRICEKGSLDTIVLFTDVYTSIMPEELDLHFQRITLELRKLVSIQRSALEPNYDVESRG

SEQ ID NO: 21876 - protein, 85 aa, unidentified
  REGION 1..85: note = Description of Unknown:hvTR_Q0NPX4 target sequence
EELPLSALKFFDTSTIIVKTMAPIHTCIEQKIVAPTPSVEPTDASLKQFKELTCDEDIKILIRVHDTNATKLVIFPSHLKIEIER

SEQ ID NO: 21877 - protein, 85 aa, unidentified
  REGION 1..85: note = Description of Unknown:hvTR_Q0NPX4 target sequence
KKLIIPLKSLYITNTLKYYYSNSYLYVFRFGDPMPFEEELIDHEHVQYKINCYNILRYHLLPDSDVFVYFSNSLNREALEYAFYI

SEQ ID NO: 21878 - protein, 84 aa, unidentified
  REGION 1..84: note = Description of Unknown:hvTR_Q0NPX4 target sequence
GDPMPFEEELIDHEHVQYKINCYNILRYHLLPDSDVFVYFSNSLNREALEYAFYIFLSKYVNVKQWIDENITRIRELYMINFNN

SEQ ID NO: 21879 - protein, 85 aa, unidentified
  REGION 1..85: note = Description of Unknown:hvTR_Q0NPX4 target sequence
YDDFISRNKNIFVINLYNVSTITEEDIRLLYTTIEQNIDADDQTLVAIFSYIGYKFEQTVKEEISTSLSFNDKNTTDEMTYNLYD

SEQ ID NO: 21880 - protein, 85 aa, unidentified
  REGION 1..85: note = Description of Unknown:hvTR_Q0NPX4 target sequence
LFFNTLDMYLRQKKISILVNDDVRGDVIVSYKNSDLVSSFNAELEPEIKKIPFNMKNLLPYLEKNLDQLRFSKKYLDFAYLCRHI

SEQ ID NO: 21881 - protein, 85 aa, unidentified
  REGION 1..85: note = Description of Unknown:hvTR_Q0NPX4 target sequence
GIPISKKKYNVRYVFLYKIDGLSIPIIIKDFLDVKYVYLENTGKIYKNSFSEDHNNSLSDWGKVIIPLLKDRHLYSYIFLSSYHL

SEQ ID NO: 21882 - protein, 85 aa, unidentified
  REGION 1..85: note = Description of Unknown:hvTR_Q0NPX4 target sequence
HSYYTDLIARDEPVFVKRKKLDIIEIDEPEAWKRDVRVEFAPCEHQIRLKEAMKVDANYFTKINNFANEFIYYEDGVAYCRVCGI

SEQ ID NO: 21883 - protein, 85 aa, unidentified
  REGION 1..85: note = Description of Unknown:hvTR_Q0NPX4 target sequence
NIPIFNLDAADVIKNTVIVSTFNKTIFLSEPYSYFVHSQRFIFNIIMSFDNIMKSQTWVMKYNINRLILNFLIDINSRRQEYEKK

SEQ ID NO: 21884 - protein, 85 aa, unidentified
  REGION 1..85: note = Description of Unknown:hvTR_Q0NPX4 target sequence
FSSEIKRGLFFLRLSANLFESQVSSTELFYVSKMLNLNYIVALVIILNSSADFIVSYMKSKNKTVEESTLKYAISVVIYDFLVKT

SEQ ID NO: 21885 - protein, 85 aa, unidentified
  REGION 1..85: note = Description of Unknown:hvTR_Q0NPX4 target sequence
RICEKGSLDTIVLFTDVYTSIMPEELDLHFQRITLELRKLVSIQRSALEPNYDVESRGEELPLSALKFFDTSTIIVKTMAPIHTC

SEQ ID NO: 21886 - protein, 85 aa, unidentified
  REGION 1..85: note = Description of Unknown:hvTR_Q0NPX4 target sequence
IEQKIVAPTPSVEPTDASLKQFKELTCDEDIKILIRVHDTNATKLVIFPSHLKIEIERKKLIIPLKSLYITNTLKYYYSNSYLYV

SEQ ID NO: 21887 - protein, 85 aa, unidentified
  REGION 1..85: note = Description of Unknown:hvTR_Q0NPX4 target sequence
FRFGDPMPFEEELIDHEHVQYKINCYNILRYHLLPDSDVFVYFSNSLNREALEYAFYIFLSKYVNVKQWIDENITRIRELYMINF

SEQ ID NO: 21888 - protein, 85 aa, unidentified
  REGION 1..85: note = Description of Unknown:hvTR_Q3I8S0 target sequence
DSKETILIEIIPKIKSYLLDTNISPKSYNDFISRNKNIFVINLYNVSTITEEDIRLLYTTIEQNIDADDQTLVAIFSYIGYKFEQ

SEQ ID NO: 21889 - protein, 85 aa, unidentified; identical to SEQ ID NO: 21870
  REGION 1..85: note = Description of Unknown:hvTR_Q3I8S0 target sequence

SEQ ID NO: 21890 - protein, 85 aa, unidentified
  REGION 1..85: note = Description of Unknown:hvTR_Q3I8S0 target sequence
LPYLEKNLDQLRFSKKYLDFAYLCRHIGIPISKKKYNMRYVFLYKIDGLSIPIIIKDFLDIKYVYLENTGKIYKNSFSEDHNNSL

SEQ ID NO: 21891 - protein, 85 aa, unidentified; identical to SEQ ID NO: 21872
  REGION 1..85: note = Description of Unknown:hvTR_Q3I8S0 target sequence

SEQ ID NO: 21892 - protein, 85 aa, unidentified
  REGION 1..85: note = Description of Unknown:hvTR_Q3I8S0 target sequence
YFTKINNFANEFIYYEDGVAYCSVCGINIPIFNLDAADVIKNTVIVSTFNKTIFLSEPYSYFVHSQRFIFNIIMSFDNIMKSQTW

SEQ ID NO: 21893 - protein, 85 aa, unidentified; identical to SEQ ID NO: 21874
  REGION 1..85: note = Description of Unknown:hvTR_Q3I8S0 target sequence

SEQ ID NO: 21894 - protein, 85 aa, unidentified; identical to SEQ ID NO: 21875
  REGION 1..85: note = Description of Unknown:hvTR_Q3I8S0 target sequence

SEQ ID NO: 21895 - protein, 85 aa, unidentified
  REGION 1..85: note = Description of Unknown:hvTR_Q3I8S0 target sequence
EELPLSALKFFDTSTIIVKTMAPIHTCIKQKIVTPTPSVKPTDASLKNFKELTCDEDIKILIRVHDTNATKLVIFPSHLKIEIER

SEQ ID NO: 21896 - protein, 85 aa, unidentified; identical to SEQ ID NO: 21877
  REGION 1..85: note = Description of Unknown:hvTR_Q3I8S0 target sequence

SEQ ID NO: 21897 - protein, 84 aa, unidentified; identical to SEQ ID NO: 21878
  REGION 1..84: note = Description of Unknown:hvTR_Q3I8S0 target sequence

SEQ ID NO: 21898 - protein, 85 aa, unidentified
  REGION 1..85: note = Description of Unknown:hvTR_Q3I8S0 target sequence
YNDFISRNKNIFVINLYNVSTITEEDIRLLYTTIEQNIDADDQTLVAIFSYIGYKFEQTVKEEISTSLSFNDKNTTDEMTYNLYD

SEQ ID NO: 21899 - protein, 85 aa, unidentified; identical to SEQ ID NO: 21880
  REGION 1..85: note = Description of Unknown:hvTR_Q3I8S0 target sequence

SEQ ID NO: 21900 - protein, 85 aa, unidentified
  REGION 1..85: note = Description of Unknown:hvTR_Q3I8S0 target sequence
GIPISKKKYNMRYVFLYKIDGLSIPIIIKDFLDIKYVYLENTGKIYKNSFSEDHNNSLSDWGKVIIPLLKDRHLYSYIFLSSYHL

SEQ ID NO: 21901 - protein, 85 aa, unidentified
  REGION 1..85: note = Description of Unknown:hvTR_Q3I8S0 target sequence
HSYYTDLIARDEPVFVKRKKLDIIEIDEPEAWKRDVRVEFAPCEHQIRLKEAMKVDANYFTKINNFANEFIYYEDGVAYCSVCGI

SEQ ID NO: 21902 - protein, 85 aa, unidentified; identical to SEQ ID NO: 21883
  REGION 1..85: note = Description of Unknown:hvTR_Q3I8S0 target sequence

SEQ ID NO: 21903 - protein, 85 aa, unidentified; identical to SEQ ID NO: 21884
  REGION 1..85: note = Description of Unknown:hvTR_Q3I8S0 target sequence

SEQ ID NO: 21904 - protein, 85 aa, unidentified; identical to SEQ ID NO: 21885
  REGION 1..85: note = Description of Unknown:hvTR_Q3I8S0 target sequence

SEQ ID NO: 21905 - protein, 85 aa, unidentified
  REGION 1..85: note = Description of Unknown:hvTR_Q3I8S0 target sequence
IKQKIVTPTPSVKPTDASLKNFKELTCDEDIKILIRVHDTNATKLVIFPSHLKIEIERKKLIIPLKSLYITNTLKYYYSNSYLYV

SEQ ID NO: 21906 - protein, 85 aa, unidentified; identical to SEQ ID NO: 21887
  REGION 1..85: note = Description of Unknown:hvTR_Q3I8S0 target sequence

SEQ ID NO: 21907 - protein, 85 aa, unidentified; identical to SEQ ID NO: 21869
  REGION 1..85: note = Description of Unknown:hvTR_P68438 target sequence

SEQ ID NO: 21908 - protein, 85 aa, unidentified
  REGION 1..85: note = Description of Unknown:hvTR_P68438 target sequence
AVKEEISTSLSFNDKNTTDEMTYNLYDLFFNTLDMYLRQKKISILVNDDVRGDVIVSYKNSDLVSSFNAELEPEIKKIPFNMKNL

SEQ ID NO: 21909 - protein, 85 aa, unidentified; identical to SEQ ID NO: 21871
  REGION 1..85: note = Description of Unknown:hvTR_P68438 target sequence

SEQ ID NO: 21910 - protein, 85 aa, unidentified; identical to SEQ ID NO: 21872
  REGION 1..85: note = Description of Unknown:hvTR_P68438 target sequence

SEQ ID NO: 21911 - protein, 85 aa, unidentified; identical to SEQ ID NO: 21873
  REGION 1..85: note = Description of Unknown:hvTR_P68438 target sequence

SEQ ID NO: 21912 - protein, 85 aa, unidentified; identical to SEQ ID NO: 21874
  REGION 1..85: note = Description of Unknown:hvTR_P68438 target sequence

SEQ ID NO: 21913 - protein, 85 aa, unidentified
  REGION 1..85: note = Description of Unknown:hvTR_P68438 target sequence
TSKNKTVEESTLKYAISVVIYDFLVKTRICEKGSLDTIVLFTDVYTSIMPEELDLHFQRITLELRKLVSIQRSALEPNYDVESRG

SEQ ID NO: 21914 - protein, 85 aa, unidentified
  REGION 1..85: note = Description of Unknown:hvTR_P68438 target sequence
EELPLSALKFFDTSTIIVKTMAPVHTYIEQKIVAPTPSVEPTDASLKNFKELTCDEDIKILIRVHDTNATKLVIFPSHLKIEIER

SEQ ID NO: 21915 - protein, 85 aa, unidentified; identical to SEQ ID NO: 21877
  REGION 1..85: note = Description of Unknown:hvTR_P68438 target sequence

SEQ ID NO: 21916 - protein, 84 aa, unidentified
  REGION 1..84: note = Description of Unknown:hvTR_P68438 target sequence
GDPMPFEEELIDHEHVQYKINCYNILRYHLLPDSDVFVYFSNSLNREALEYAFYIFLSKYVNVKQWIDENITRIKELYMINFNN

SEQ ID NO: 21917 - protein, 85 aa, unidentified
  REGION 1..85: note = Description of Unknown:hvTR_P68438 target sequence
YDDFISRNKNIFVINLYNVSTITEEDIRLLYTTIEQNIDADDQTLVAIFSYIGYKFEQAVKEEISTSLSFNDKNTTDEMTYNLYD

SEQ ID NO: 21918 - protein, 85 aa, unidentified; identical to SEQ ID NO: 21880
  REGION 1..85: note = Description of Unknown:hvTR_P68438 target sequence

SEQ ID NO: 21919 - protein, 85 aa, unidentified; identical to SEQ ID NO: 21881
  REGION 1..85: note = Description of Unknown:hvTR_P68438 target sequence

SEQ ID NO: 21920 - protein, 85 aa, unidentified; identical to SEQ ID NO: 21882
  REGION 1..85: note = Description of Unknown:hvTR_P68438 target sequence

SEQ ID NO: 21921 - protein, 85 aa, unidentified; identical to SEQ ID NO: 21883
  REGION 1..85: note = Description of Unknown:hvTR_P68438 target sequence

SEQ ID NO: 21922 - protein, 85 aa, unidentified
  REGION 1..85: note = Description of Unknown:hvTR_P68438 target sequence
FSSEIKRGLFFLRLSANLFESQVSSTELFYVSKMLNLNYIVALVIILNSSADFIVSYMTSKNKTVEESTLKYAISVVIYDFLVKT

SEQ ID NO: 21923 - protein, 85 aa, unidentified
  REGION 1..85: note = Description of Unknown:hvTR_P68438 target sequence
RICEKGSLDTIVLFTDVYTSIMPEELDLHFQRITLELRKLVSIQRSALEPNYDVESRGEELPLSALKFFDTSTIIVKTMAPVHTY

SEQ ID NO: 21924 - protein, 85 aa, unidentified
  REGION 1..85: note = Description of Unknown:hvTR_P68438 target sequence
IEQKIVAPTPSVEPTDASLKNFKELTCDEDIKILIRVHDTNATKLVIFPSHLKIEIERKKLIIPLKSLYITNTLKYYYSNSYLYV

SEQ ID NO: 21925 - protein, 85 aa, unidentified
  REGION 1..85: note = Description of Unknown:hvTR_P68438 target sequence
FRFGDPMPFEEELIDHEHVQYKINCYNILRYHLLPDSDVFVYFSNSLNREALEYAFYIFLSKYVNVKQWIDENITRIKELYMINF

SEQ ID NO: 21926 - protein, 85 aa, unidentified
  REGION 1..85: note = Description of Unknown:hvTR_P0DSR3 target sequence
DSKETILIEIIPKIKAYLLDANISPKSYDDFISRNKNIFVINLYNVSAITEEDIRLLYTTIEQNIDANDQTLVAIFSYIGYKFEQ

SEQ ID NO: 21927 - protein, 85 aa, unidentified
  REGION 1..85: note = Description of Unknown:hvTR_P0DSR3 target sequence
TVKEEISTSLSLNDKNTTDEMTYNLYDLFFNTLDMYLRQKKISILVNDDVRGDVIVSYKNSDLVSSFNAELEPEIKKIPFNMKNL

SEQ ID NO: 21928 - protein, 85 aa, unidentified; identical to SEQ ID NO: 21871
  REGION 1..85: note = Description of Unknown:hvTR_P0DSR3 target sequence

SEQ ID NO: 21929 - protein, 85 aa, unidentified
  REGION 1..85: note = Description of Unknown:hvTR_P0DSR3 target sequence
SDWGKVIIPLLKDRHLYSYIFLSSYHLHSYYTDLIAKDEPVFIKRKKLDIIEIDEPEAWKRDVKVEFAPCEHQIRLKEAMKVDAN

SEQ ID NO: 21930 - protein, 85 aa, unidentified; identical to SEQ ID NO: 21873
  REGION 1..85: note = Description of Unknown:hvTR_P0DSR3 target sequence

SEQ ID NO: 21931 - protein, 85 aa, unidentified
  REGION 1..85: note = Description of Unknown:hvTR_P0DSR3 target sequence
VMKYNINRLILNFFIDINSRRQEYEKKFSSEIKRGLFFLRLSANLFESQVSSTELFYVSKMLNLNYIVALVIILNSSADFIVSYM

SEQ ID NO: 21932 - protein, 85 aa, unidentified; identical to SEQ ID NO: 21875
  REGION 1..85: note = Description of Unknown:hvTR_P0DSR3 target sequence

SEQ ID NO: 21933 - protein, 85 aa, unidentified
  REGION 1..85: note = Description of Unknown:hvTR_P0DSR3 target sequence
EELPLSTLKFFDTSTIIVKTMAPVHTYVEQKIVAPTPSVEPTDASLKQFKELTCDEDIKILIRVHDTNATKLVIFPSHLKIEIER

SEQ ID NO: 21934 - protein, 85 aa, unidentified
  REGION 1..85: note = Description of Unknown:hvTR_P0DSR3 target sequence
KKLIIPLKSLYITNTLKYYYSNSYLYIFRFGDPMPFEEELIDHEHAQYKINCYNILRYHLLPDSDVFVYFSNSLNREALEYAFYI

SEQ ID NO: 21935 - protein, 84 aa, unidentified
  REGION 1..84: note = Description of Unknown:hvTR_P0DSR3 target sequence
GDPMPFEEELIDHEHAQYKINCYNILRYHLLPDSDVFVYFSNSLNREALEYAFYIFLSKYVNVKQWIDENITRIRELYMINFNN

SEQ ID NO: 21936 - protein, 85 aa, unidentified
  REGION 1..85: note = Description of Unknown:hvTR_P0DSR3 target sequence
YDDFISRNKNIFVINLYNVSAITEEDIRLLYTTIEQNIDANDQTLVAIFSYIGYKFEQTVKEEISTSLSLNDKNTTDEMTYNLYD

SEQ ID NO: 21937 - protein, 85 aa, unidentified; identical to SEQ ID NO: 21880
  REGION 1..85: note = Description of Unknown:hvTR_P0DSR3 target sequence

SEQ ID NO: 21938 - protein, 85 aa, unidentified; identical to SEQ ID NO: 21881
  REGION 1..85: note = Description of Unknown:hvTR_P0DSR3 target sequence

SEQ ID NO: 21939 - protein, 85 aa, unidentified
  REGION 1..85: note = Description of Unknown:hvTR_P0DSR3 target sequence
HSYYTDLIAKDEPVFIKRKKLDIIEIDEPEAWKRDVKVEFAPCEHQIRLKEAMKVDANYFTKINNFANEFIYYEDGVAYCRVCGI

SEQ ID NO: 21940 - protein, 85 aa, unidentified
  REGION 1..85: note = Description of Unknown:hvTR_P0DSR3 target sequence
NIPIFNLDAADVIKNTVIVSTFNKTIFLSEPYSYFVHSQRFIFNIIMSFDNIMKSQTWVMKYNINRLILNFFIDINSRRQEYEKK

SEQ ID NO: 21941 - protein, 85 aa, unidentified; identical to SEQ ID NO: 21884
  REGION 1..85: note = Description of Unknown:hvTR_P0DSR3 target sequence

SEQ ID NO: 21942 - protein, 85 aa, unidentified
  REGION 1..85: note = Description of Unknown:hvTR_P0DSR3 target sequence
RICEKGSLDTIVLFTDVYTSIMPEELDLHFQRITLELRKLVSIQRSALEPNYDVESRGEELPLSTLKFFDTSTIIVKTMAPVHTY

SEQ ID NO: 21943 - protein, 85 aa, unidentified
  REGION 1..85: note = Description of Unknown:hvTR_P0DSR3 target sequence
VEQKIVAPTPSVEPTDASLKQFKELTCDEDIKILIRVHDTNATKLVIFPSHLKIEIERKKLIIPLKSLYITNTLKYYYSNSYLYI

SEQ ID NO: 21944 - protein, 85 aa, unidentified
  REGION 1..85: note = Description of Unknown:hvTR_P0DSR3 target sequence
FRFGDPMPFEEELIDHEHAQYKINCYNILRYHLLPDSDVFVYFSNSLNREALEYAFYIFLSKYVNVKQWIDENITRIRELYMINF

SEQ ID NO: 21945 - protein, 85 aa, unidentified
  REGION 1..85: note = Description of Unknown:cds_NC_035460.1_cds_YP_009408030.1_79 target sequence
DSKETVLIEIIPKIKSYLLNPNTGPKSYTDFISQNKNIFVINLYNVSAITEDDIRLLYATIEQNPDADDQTLVSIFSYIGYKFEQ

SEQ ID NO: 21946 - protein, 85 aa, unidentified
  REGION 1..85: note = Description of Unknown:cds_NC_035460.1_cds_YP_009408030.1_79 target sequence
NVKEEVTTSLFVNDHNTSDEMTHSMYNLFYENLDMYLRQRRVYILVNDDNHGDVNINYRTSDLISNFNTEEEPEVKKIPFNMKDI

SEQ ID NO: 21947 - protein, 85 aa, unidentified
  REGION 1..85: note = Description of Unknown:cds_NC_035460.1_cds_YP_009408030.1_79 target sequence
IQYISKNLDQLRFSKKYLDFAYLCRYIGIPISKRKLNMRYIYLFKVDGLTIPVVIKDFLDVKYVYLEETGKVYKNTFSEESKHLY

SEQ ID NO: 21948 - protein, 85 aa, unidentified
  REGION 1..85: note = Description of Unknown:cds_NC_035460.1_cds_YP_009408030.1_79 target sequence
EWGKILIPKLTDRHLYSYIFLSSYYLKDLFLELIEKKEVTFVKSKPVKKIEIDEPSLWNNDIKIDILPCEHQIKLAEVLKVDTDY

SEQ ID NO: 21949 - protein, 85 aa, unidentified
  REGION 1..85: note = Description of Unknown:cds_NC_035460.1_cds_YP_009408030.1_79 target sequence
YSKVNNFATDYIYYEDGVAYCNICGMNIPNFNLDAADVIKNNIIVSTFNKSIFLTEPYSYFVHSQRFIFNIIMSFDNIMKSQTWI

SEQ ID NO: 21950 - protein, 85 aa, unidentified
  REGION 1..85: note = Description of Unknown:cds_NC_035460.1_cds_YP_009408030.1_79 target sequence
MKYNINRLILNFLININGRRQEYEKKYSNEIKRGIFFLRLSANLFDIHVSSSELFYMSKILNLNYIVVLVIILNSSADFIVSYMN

SEQ ID NO: 21951 - protein, 85 aa, unidentified
  REGION 1..85: note = Description of Unknown:cds_NC_035460.1_cds_YP_009408030.1_79 target sequence
SKKKQVDESNLKYAISVIIYDFLVKTKISEKGILDTIILFTDVYMSIMPDELNAHYQRIVIELRRLVSIQRSAKPPNYDVEIKML

SEQ ID NO: 21952 - protein, 85 aa, unidentified
  REGION 1..85: note = Description of Unknown:cds_NC_035460.1_cds_YP_009408030.1_79 target sequence
EPPLAALKFFDNSTIIVRSMIPTIKTKEIKKIKSPISPLKESDELWSKFKEITTSDELKVLIRYNDTNATKLVIFPTHLKIEIER

SEQ ID NO: 21953 - protein, 85 aa, unidentified
  REGION 1..85: note = Description of Unknown:cds_NC_035460.1_cds_YP_009408030.1_79 target sequence
KKLIIALKNLFVNNVLKYYYSVPALYVFRFGDPFPFDEELIDHAHVQYKVNCYNLLRYILLPNSDVFVYFSNSLNRDKLEYAFYR

SEQ ID NO: 21954 - protein, 84 aa, unidentified
  REGION 1..84: note = Description of Unknown:cds_NC_035460.1_cds_YP_009408030.1_79 target sequence
GDPFPFDEELIDHAHVQYKVNCYNLLRYILLPNSDVFVYFSNSLNRDKLEYAFYRFLSKYVDVPKWIDENITRIRELYLINFNN

SEQ ID NO: 21955 - protein, 85 aa, unidentified
  REGION 1..85: note = Description of Unknown:cds_NC_035460.1_cds_YP_009408030.1_79 target sequence
YTDFISQNKNIFVINLYNVSAITEDDIRLLYATIEQNPDADDQTLVSIFSYIGYKFEQNVKEEVTTSLFVNDHNTSDEMTHSMYN

SEQ ID NO: 21956 - protein, 85 aa, unidentified
  REGION 1..85: note = Description of Unknown:cds_NC_035460.1_cds_YP_009408030.1_79 target sequence
LFYENLDMYLRQRRVYILVNDDNHGDVNINYRTSDLISNFNTEEEPEVKKIPFNMKDIIQYISKNLDQLRFSKKYLDFAYLCRYI

SEQ ID NO: 21957 - protein, 85 aa, unidentified
  REGION 1..85: note = Description of Unknown:cds_NC_035460.1_cds_YP_009408030.1_79 target sequence
GIPISKRKLNMRYIYLFKVDGLTIPVVIKDFLDVKYVYLEETGKVYKNTFSEESKHLYEWGKILIPKLTDRHLYSYIFLSSYYLK

SEQ ID NO: 21958 - protein, 85 aa, unidentified
  REGION 1..85: note = Description of Unknown:cds_NC_035460.1_cds_YP_009408030.1_79 target sequence
DLFLELIEKKEVTFVKSKPVKKIEIDEPSLWNNDIKIDILPCEHQIKLAEVLKVDTDYYSKVNNFATDYIYYEDGVAYCNICGMN

SEQ ID NO: 21959 - protein, 85 aa, unidentified
  REGION 1..85: note = Description of Unknown:cds_NC_035460.1_cds_YP_009408030.1_79 target sequence
IPNFNLDAADVIKNNIIVSTFNKSIFLTEPYSYFVHSQRFIFNIIMSFDNIMKSQTWIMKYNINRLILNFLININGRRQEYEKKY

SEQ ID NO: 21960 - protein, 85 aa, unidentified
  REGION 1..85: note = Description of Unknown:cds_NC_035460.1_cds_YP_009408030.1_79 target sequence
SNEIKRGIFFLRLSANLFDIHVSSSELFYMSKILNLNYIVVLVIILNSSADFIVSYMNSKKKQVDESNLKYAISVIIYDFLVKTK

SEQ ID NO: 21961 - protein, 85 aa, unidentified
  REGION 1..85: note = Description of Unknown:cds_NC_035460.1_cds_YP_009408030.1_79 target sequence
ISEKGILDTIILFTDVYMSIMPDELNAHYQRIVIELRRLVSIQRSAKPPNYDVEIKMLEPPLAALKFFDNSTIIVRSMIPTIKTK

SEQ ID NO: 21962 - protein, 85 aa, unidentified
  REGION 1..85: note = Description of Unknown:cds_NC_035460.1_cds_YP_009408030.1_79 target sequence
EIKKIKSPISPLKESDELWSKFKEITTSDELKVLIRYNDTNATKLVIFPTHLKIEIERKKLIIALKNLFVNNVLKYYYSVPALYV

SEQ ID NO: 21963 - protein, 85 aa, unidentified
  REGION 1..85: note = Description of Unknown:cds_NC_035460.1_cds_YP_009408030.1_79 target sequence
FRFGDPFPFDEELIDHAHVQYKVNCYNLLRYILLPNSDVFVYFSNSLNRDKLEYAFYRFLSKYVDVPKWIDENITRIRELYLINF

SEQ ID NO: 21964 - protein, 85 aa, unidentified
  REGION 1..85: note = Description of Unknown:cds_NZ_WFIY01000004.1_cds_WP_155863959.1_1881 target sequence
ASNFEKMSIEETLTQLNTSLKGLTEKEAEERIKKYGYNEVKEKKESPVVKFLKKFWAPVPWMLEVTIVITYILGKYLDMYIILFL

SEQ ID NO: 21965 - protein, 85 aa, unidentified
  REGION 1..85: note = Description of Unknown:cds_NZ_WFIY01000004.1_cds_WP_155863959.1_1881 target sequence
LVFNSIVSFIQERRAENAVELLKQKLNVKARVLRDGQWKVVPARLLVPGDIVHIRLGDIVPADIKLFEGEVLVDQSALTGESVPV

SEQ ID NO: 21966 - protein, 85 aa, unidentified
  REGION 1..85: note = Description of Unknown:cds_NZ_WFIY01000004.1_cds_WP_155863959.1_1881 target sequence
EKGKGNVVYSGSIIRRGEASGIVIATGAKTYFGKTTELVQTARAESHLEKLIMNIVKYLIIVDVALVIALFVFSLAVGVKLSDVL

SEQ ID NO: 21967 - protein, 85 aa, unidentified
  REGION 1..85: note = Description of Unknown:cds_NZ_WFIY01000004.1_cds_WP_155863959.1_1881 target sequence
PFSLIVLIASVPVALPATFTIAMALGSQELARKGILVTRLTASEDAASMDVLNLDKTGTITENRMRVGDPIPAEGFTKEEVVKYA

SEQ ID NO: 21968 - protein, 85 aa, unidentified
  REGION 1..85: note = Description of Unknown:cds_NZ_WFIY01000004.1_cds_WP_155863959.1_1881 target sequence
YMASDEASQDPIDTAVIACLRENNIEPGNYERLEFKPFDPSTKRTEALVKTENNVFRVVKGAPQVIAELAEVPDLKSYYSTLEDL

SEQ ID NO: 21969 - protein, 85 aa, unidentified
  REGION 1..85: note = Description of Unknown:cds_NZ_WFIY01000004.1_cds_WP_155863959.1_1881 target sequence
SKRGYRTISVAIGDKEGKLKLVGILPLYDRPRKDSREFIEEIKRLNVKPKMVTGDNELIAREIARQVGIGDVICNINEIKKLEGK

SEQ ID NO: 21970 - protein, 85 aa, unidentified
  REGION 1..85: note = Description of Unknown:cds_NZ_WFIY01000004.1_cds_WP_155863959.1_1881 target sequence
ERIKKVEECDVFAEVFPEDKYFIVKTLQEGGHYVGMTGDGVNDAPALKQAEVGIAVANATDVAKASASMVLTHEGLIDIVEAIKT

SEQ ID NO: 21971 - protein, 85 aa, unidentified
  REGION 1..85: note = Description of Unknown:cds_NZ_WFIY01000004.1_cds_WP_155863959.1_1881 target sequence
GRKIYQRMLTYTINKIIKTLQVVLFLTISFFIVRFFVTTPFDVILLLFANDFVTMSIATDNVRYSQKPERLDAGKIVKASLILAF

SEQ ID NO: 21972 - protein, 85 aa, unidentified
  REGION 1..85: note = Description of Unknown:cds_NZ_WFIY01000004.1_cds_WP_155863959.1_1881 target sequence
LIVAESFFSLWLALYLRMSIDEIHTFIFDMLVFTGQFTVYMVRERRSMWSSRPSNFLLISSIFDIIFISTISALGILVYPIPLQY

SEQ ID NO: 21973 - protein, 84 aa, unidentified
  REGION 1..84: note = Description of Unknown:cds_NZ_WFIY01000004.1_cds_WP_155863959.1_1881 target sequence
MLVFTGQFTVYMVRERRSMWSSRPSNFLLISSIFDIIFISTISALGILVYPIPLQYVLLILGISFGFTVIFDHIKNISFKTVGI

SEQ ID NO: 21974 - protein, 85 aa, unidentified
  REGION 1..85: note = Description of Unknown:cds_NZ_WFIY01000004.1_cds_WP_155863959.1_1881 target sequence
AEERIKKYGYNEVKEKKESPVVKFLKKFWAPVPWMLEVTIVITYILGKYLDMYIILFLLVFNSIVSFIQERRAENAVELLKQKLN

SEQ ID NO: 21975 - protein, 85 aa, unidentified
  REGION 1..85: note = Description of Unknown:cds_NZ_WFIY01000004.1_cds_WP_155863959.1_1881 target sequence
VKARVLRDGQWKVVPARLLVPGDIVHIRLGDIVPADIKLFEGEVLVDQSALTGESVPVEKGKGNVVYSGSIIRRGEASGIVIATG

SEQ ID NO: 21976 - protein, 85 aa, unidentified
  REGION 1..85: note = Description of Unknown:cds_NZ_WFIY01000004.1_cds_WP_155863959.1_1881 target sequence
AKTYFGKTTELVQTARAESHLEKLIMNIVKYLIIVDVALVIALFVFSLAVGVKLSDVLPFSLIVLIASVPVALPATFTIAMALGS

SEQ ID NO: 21977 - protein, 85 aa, unidentified
  REGION 1..85: note = Description of Unknown:cds_NZ_WFIY01000004.1_cds_WP_155863959.1_1881 target sequence
QELARKGILVTRLTASEDAASMDVLNLDKTGTITENRMRVGDPIPAEGFTKEEVVKYAYMASDEASQDPIDTAVIACLRENNIEP

SEQ ID NO: 21978 - protein, 85 aa, unidentified
  REGION 1..85: note = Description of Unknown:cds_NZ_WFIY01000004.1_cds_WP_155863959.1_1881 target sequence
GNYERLEFKPFDPSTKRTEALVKTENNVFRVVKGAPQVIAELAEVPDLKSYYSTLEDLSKRGYRTISVAIGDKEGKLKLVGILPL

SEQ ID NO: 21979 - protein, 85 aa, unidentified
  REGION 1..85: note = Description of Unknown:cds_NZ_WFIY01000004.1_cds_WP_155863959.1_1881 target sequence
YDRPRKDSREFIEEIKRLNVKPKMVTGDNELIAREIARQVGIGDVICNINEIKKLEGKERIKKVEECDVFAEVFPEDKYFIVKTL

SEQ ID NO: 21980 - protein, 85 aa, unidentified
  REGION 1..85: note = Description of Unknown:cds_NZ_WFIY01000004.1_cds_WP_155863959.1_1881 target sequence
QEGGHYVGMTGDGVNDAPALKQAEVGIAVANATDVAKASASMVLTHEGLIDIVEAIKTGRKIYQRMLTYTINKIIKTLQVVLFLT

SEQ ID NO: 21981 - protein, 85 aa, unidentified
  REGION 1..85: note = Description of Unknown:cds_NZ_WFIY01000004.1_cds_WP_155863959.1_1881 target sequence
ISFFIVRFFVTTPFDVILLLFANDFVTMSIATDNVRYSQKPERLDAGKIVKASLILAFLIVAESFFSLWLALYLRMSIDEIHTFI

SEQ ID NO: 21982 - protein, 85 aa, unidentified
  REGION 1..85: note = Description of Unknown:cds_NZ_WFIY01000004.1_cds_WP_155863959.1_1881 target sequence
FDMLVFTGQFTVYMVRERRSMWSSRPSNFLLISSIFDIIFISTISALGILVYPIPLQYVLLILGISFGFTVIFDHIKNISFKTVG

SEQ ID NO: 21983 - protein, 85 aa, unidentified
  REGION 1..85: note = Description of Unknown:cds_NC_030656.1_cds_YP_009268793.1_78 target sequence
DSKEAVLTEIVPKIKQYLLDPNTGPKSYTDFIDKNKSIFVVNLYNVSSVTDEDIKLLYVTIEQNPNTDDQTLISIFSYIGYKFEK

SEQ ID NO: 21984 - protein, 85 aa, unidentified
  REGION 1..85: note = Description of Unknown:cds_NC_030656.1_cds_YP_009268793.1_78 target sequence
NVREDVTVSLSVGERITDDMTYAIYYLFFNTLDLYIRQKFVSILVNDESTSDVAVNYKQSNIVSSFDTNIETEIREIPFSMKDLL

SEQ ID NO: 21985 - protein, 85 aa, unidentified
  REGION 1..85: note = Description of Unknown:cds_NC_030656.1_cds_YP_009268793.1_78 target sequence
PYLAKNLDQLRFSKKYLEFAYLCRHIGIPISKRKFNVRYVYSYKVNDIVVPIVIKDYLDVKYVYLEDTNTVYKNSFSEENNKALA

SEQ ID NO: 21986 - protein, 85 aa, unidentified
  REGION 1..85: note = Description of Unknown:cds_NC_030656.1_cds_YP_009268793.1_78 target sequence
DWGKLALPKIKNKKIYHYLFLSSYHLRDLFIDLIDIQNTLFKTKTKTDIIYIDNIDNWNEGISFEYTPCAHQVKLEEVLKIDVDY

SEQ ID NO: 21987 - protein, 85 aa, unidentified
  REGION 1..85: note = Description of Unknown:cds_NC_030656.1_cds_YP_009268793.1_78 target sequence
FVKINNFVTEFIYYEDGVAYCSICGMNVPMFNADAADVVKSNVIVSTFNKSIFLTEPYSYFVHSQRFIFNIIMSFDTIMKSQAWI

SEQ ID NO: 21988 - protein, 85 aa, unidentified
  REGION 1..85: note = Description of Unknown:cds_NC_030656.1_cds_YP_009268793.1_78 target sequence
MKYNINRLILNFLIAINSKRHEYEKKFVNEIKQGVFFLRLTANLFDIHVSASELFYASKVLNLNYIVSLVIILNSSADFIVTYMK

SEQ ID NO: 21989 - protein, 85 aa, unidentified
  REGION 1..85: note = Description of Unknown:cds_NC_030656.1_cds_YP_009268793.1_78 target sequence
NKNKTVTEESLKYSISVIIYDFLVKTNAAEKGSLDTIILLTDVYTSIMPDELNAHYARIVIELNRLESIQRTALQAFYDVESTAK

SEQ ID NO: 21990 - protein, 85 aa, unidentified
  REGION 1..85: note = Description of Unknown:cds_NC_030656.1_cds_YP_009268793.1_78 target sequence
EDALRAIMFFKSTMIASKRLISDKADEYPTQVIKPTATAKDTKEHREEFEKLLGVESRVLIRMYDTNAINLEIFAEHLKIEIEKK

SEQ ID NO: 21991 - protein, 85 aa, unidentified
  REGION 1..85: note = Description of Unknown:cds_NC_030656.1_cds_YP_009268793.1_78 target sequence
KVIIPIKSLFVSNVLKYYFSKTEMLVFKFGDPFPFNDMLIDKEHVQYKVNGYNLFRRELLPESDIFVYFSDSLVRYDLEYAFYLF

SEQ ID NO: 21992 - protein, 84 aa, unidentified
  REGION 1..84: note = Description of Unknown:cds_NC_030656.1_cds_YP_009268793.1_78 target sequence
GDPFPFNDMLIDKEHVQYKVNGYNLFRRELLPESDIFVYFSDSLVRYDLEYAFYLFLSSYVDVPKWISENSAKIKELYMINYNN

SEQ ID NO: 21993 - protein, 85 aa, unidentified
  REGION 1..85: note = Description of Unknown:cds_NC_030656.1_cds_YP_009268793.1_78 target sequence
YTDFIDKNKSIFVVNLYNVSSVTDEDIKLLYVTIEQNPNTDDQTLISIFSYIGYKFEKNVREDVTVSLSVGERITDDMTYAIYYL

SEQ ID NO: 21994 - protein, 85 aa, unidentified
  REGION 1..85: note = Description of Unknown:cds_NC_030656.1_cds_YP_009268793.1_78 target sequence
FFNTLDLYIRQKFVSILVNDESTSDVAVNYKQSNIVSSFDTNIETEIREIPFSMKDLLPYLAKNLDQLRFSKKYLEFAYLCRHIG

SEQ ID NO: 21995 - protein, 85 aa, unidentified
  REGION 1..85: note = Description of Unknown:cds_NC_030656.1_cds_YP_009268793.1_78 target sequence
IPISKRKFNVRYVYSYKVNDIVVPIVIKDYLDVKYVYLEDTNTVYKNSFSEENNKALADWGKLALPKIKNKKIYHYLFLSSYHLR

SEQ ID NO: 21996 - protein, 85 aa, unidentified
  REGION 1..85: note = Description of Unknown:cds_NC_030656.1_cds_YP_009268793.1_78 target sequence
DLFIDLIDIQNTLFKTKTKTDIIYIDNIDNWNEGISFEYTPCAHQVKLEEVLKIDVDYFVKINNFVTEFIYYEDGVAYCSICGMN

SEQ ID NO: 21997 - protein, 85 aa, unidentified
  REGION 1..85: note = Description of Unknown:cds_NC_030656.1_cds_YP_009268793.1_78 target sequence
VPMFNADAADVVKSNVIVSTFNKSIFLTEPYSYFVHSQRFIFNIIMSFDTIMKSQAWIMKYNINRLILNFLIAINSKRHEYEKKF

SEQ ID NO: 21998 - protein, 85 aa, unidentified
  REGION 1..85: note = Description of Unknown:cds_NC_030656.1_cds_YP_009268793.1_78 target sequence
VNEIKQGVFFLRLTANLFDIHVSASELFYASKVLNLNYIVSLVIILNSSADFIVTYMKNKNKTVTEESLKYSISVIIYDFLVKTN

SEQ ID NO: 21999 - protein, 85 aa, unidentified
  REGION 1..85: note = Description of Unknown:cds_NC_030656.1_cds_YP_009268793.1_78 target sequence
AAEKGSLDTIILLTDVYTSIMPDELNAHYARIVIELNRLESIQRTALQAFYDVESTAKEDALRAIMFFKSTMIASKRLISDKADE

SEQ ID NO: 22000 - protein, 85 aa, unidentified
  REGION 1..85: note = Description of Unknown:cds_NC_030656.1_cds_YP_009268793.1_78 target sequence
YPTQVIKPTATAKDTKEHREEFEKLLGVESRVLIRMYDTNAINLEIFAEHLKIEIEKKKVIIPIKSLFVSNVLKYYFSKTEMLVF

SEQ ID NO: 22001 - protein, 85 aa, unidentified
  REGION 1..85: note = Description of Unknown:cds_NC_030656.1_cds_YP_009268793.1_78 target sequence
KFGDPFPFNDMLIDKEHVQYKVNGYNLFRRELLPESDIFVYFSDSLVRYDLEYAFYLFLSSYVDVPKWISENSAKIKELYMINYN

SEQ ID NO: 22002 - protein, 85 aa, unidentified
  REGION 1..85: note = Description of Unknown:hvTR_Q98252 target sequence
NTKESVLLEIIPKIRAYLREGAGEKSYSDFISRNKSIFVCNLYNVNALTDDDVRLLYLTIEQNMDADDQALVSIFSYIGYKFERS

SEQ ID NO: 22003 - protein, 85 aa, unidentified
  REGION 1..85: note = Description of Unknown:hvTR_Q98252 target sequence
VQEDAGESAGAGAQITDDMTYNLYDLFFSTLDMYVRQRRVSVLVNDDAHNDVAIPRHTSDLRSSFDAAREPEVREIPFNMRDLLP

SEQ ID NO: 22004 - protein, 85 aa, unidentified
  REGION 1..85: note = Description of Unknown:hvTR_Q98252 target sequence
YVAKNLDQLRFSKKYLEFAYLCRNIGIPISKRKFNVRYVYLLRVDDLQIPVVIKDYLDVKFVYLRETGKVYRNRFSDERNDSLLE

SEQ ID NO: 22005 - protein, 85 aa, unidentified
  REGION 1..85: note = Description of Unknown:hvTR_Q98252 target sequence
WGRLLIPRLQNRALYSYLFLSSYHLCDLFLELRELGSASFRAAPARSRVPVAEPRAWRAAVSVEVQPCEHQVRLAEALRVDLDYY

SEQ ID NO: 22006 - protein, 85 aa, unidentified
  REGION 1..85: note = Description of Unknown:hvTR_Q98252 target sequence
SKVNRFATEFLEYEDGLAYCVLCGMNVPVFNVGAADVTKSSVLVSTYSKSIFLSEPYNYFVHSQRFIFNIIMSFDTIMKAQTWAM

SEQ ID NO: 22007 - protein, 85 aa, unidentified
  REGION 1..85: note = Description of Unknown:hvTR_Q98252 target sequence
KYNINRLILNFLISINNRRQEYEKRFAAEIKRGIFFLRLAANLFDIHVSSMELFYSAKILNLNFLVVLVIVLNSSADFIMSYMAG

SEQ ID NO: 22008 - protein, 85 aa, unidentified
  REGION 1..85: note = Description of Unknown:hvTR_Q98252 target sequence
KKRALSEDTLDQAIAVIIYDFLLKTRICEKNALDTIVFFARVYMSIMPEELVAHHARIRAELRRLISIQRSRRKPDYDVDNRAPV

SEQ ID NO: 22009 - protein, 85 aa, unidentified
  REGION 1..85: note = Description of Unknown:hvTR_Q98252 target sequence
PALRPRFFPLRATCTQFFPAPPPRAQGTGLVTPAEPVPATPEHVRRFEAMTGADTRVLIRVNDTNATNPVFFTTHLKIEVEKKKL

SEQ ID NO: 22010 - protein, 85 aa, unidentified
  REGION 1..85: note = Description of Unknown:hvTR_Q98252 target sequence
IIPLKKLFVSNTLKYYSSTAFYVFKFGDPFPFDSELIDAEHVQYKVNGYNLLRHALLPRSELFVYFGSSLHRHELELAFYMFLCN

SEQ ID NO: 22011 - protein, 84 aa, unidentified
  REGION 1..84: note = Description of Unknown:hvTR_Q98252 target sequence
GDPFPFDSELIDAEHVQYKVNGYNLLRHALLPRSELFVYFGSSLHRHELELAFYMFLCNYVDVQQWMDENTSLIRDLYLINFNN

SEQ ID NO: 22012 - protein, 85 aa, unidentified
  REGION 1..85: note = Description of Unknown:hvTR_Q98252 target sequence
SDFISRNKSIFVCNLYNVNALTDDDVRLLYLTIEQNMDADDQALVSIFSYIGYKFERSVQEDAGESAGAGAQITDDMTYNLYDLF

SEQ ID NO: 22013 - protein, 85 aa, unidentified
  REGION 1..85: note = Description of Unknown:hvTR_Q98252 target sequence
FSTLDMYVRQRRVSVLVNDDAHNDVAIPRHTSDLRSSFDAAREPEVREIPFNMRDLLPYVAKNLDQLRFSKKYLEFAYLCRNIGI

SEQ ID NO: 22014 - protein, 85 aa, unidentified
  REGION 1..85: note = Description of Unknown:hvTR_Q98252 target sequence
PISKRKFNVRYVYLLRVDDLQIPVVIKDYLDVKFVYLRETGKVYRNRFSDERNDSLLEWGRLLIPRLQNRALYSYLFLSSYHLCD

SEQ ID NO: 22015 - protein, 85 aa, unidentified
  REGION 1..85: note = Description of Unknown:hvTR_Q98252 target sequence
LFLELRELGSASFRAAPARSRVPVAEPRAWRAAVSVEVQPCEHQVRLAEALRVDLDYYSKVNRFATEFLEYEDGLAYCVLCGMNV

SEQ ID NO: 22016 - protein, 85 aa, unidentified
  REGION 1..85: note = Description of Unknown:hvTR_Q98252 target sequence
PVFNVGAADVTKSSVLVSTYSKSIFLSEPYNYFVHSQRFIFNIIMSFDTIMKAQTWAMKYNINRLILNFLISINNRRQEYEKRFA

SEQ ID NO: 22017 - protein, 85 aa, unidentified
  REGION 1..85: note = Description of Unknown:hvTR_Q98252 target sequence
AEIKRGIFFLRLAANLFDIHVSSMELFYSAKILNLNFLVVLVIVLNSSADFIMSYMAGKKRALSEDTLDQAIAVIIYDFLLKTRI

SEQ ID NO: 22018 - protein, 85 aa, unidentified
  REGION 1..85: note = Description of Unknown:hvTR_Q98252 target sequence
CEKNALDTIVFFARVYMSIMPEELVAHHARIRAELRRLISIQRSRRKPDYDVDNRAPVPALRPRFFPLRATCTQFFPAPPPRAQG

SEQ ID NO: 22019 - protein, 85 aa, unidentified
  REGION 1..85: note = Description of Unknown:hvTR_Q98252 target sequence
TGLVTPAEPVPATPEHVRRFEAMTGADTRVLIRVNDTNATNPVFFTTHLKIEVEKKKLIIPLKKLFVSNTLKYYSSTAFYVFKFG

SEQ ID NO: 22020 - protein, 85 aa, unidentified
  REGION 1..85: note = Description of Unknown:cds_NC_035460.1_cds_YP_009408038.1_87 target sequence
ASSIVDNNHIFVLKSIGVPSSLRESEDSRFVEVFTCDELEEYIQNNPTCTLFETLRDEEAYSIVRVFFDVDLDGTLDEIDMAAAL

SEQ ID NO: 22021 - protein, 85 aa, unidentified
  REGION 1..85: note = Description of Unknown:cds_NC_035460.1_cds_YP_009408038.1_87 target sequence
KDFILQLTKFVSIFSAKECDANQSTVLKCLRSNFSLTKSTNSEHTSFHIIFPDTYTTMDTLIAMKRPLLEFSRASENPLIRAIDP

SEQ ID NO: 22022 - protein, 85 aa, unidentified
  REGION 1..85: note = Description of Unknown:cds_NC_035460.1_cds_YP_009408038.1_87 target sequence
AIYRRKATLRIVGTRKVANNDKIHIKQPPHNNISDYLFTYVHQHNKSCYFSLARRLEDTMPSALWEPTYITFDDAMEKVSKIIIN

SEQ ID NO: 22023 - protein, 85 aa, unidentified
  REGION 1..85: note = Description of Unknown:cds_NC_035460.1_cds_YP_009408038.1_87 target sequence
DIVNFSNLDENNFTTTPLIIDYMMPCALCKKKSHKHHHQLSLSNGMLKIYKAGNPHSCKVKVITLEGNKLYNVSQLIMDANVIHL

SEQ ID NO: 22024 - protein, 85 aa, unidentified
  REGION 1..85: note = Description of Unknown:cds_NC_035460.1_cds_YP_009408038.1_87 target sequence
TDRGDYIVWIQNSWKFNNGEESLITKLILSMKEYLPSEHGPNLLCPRKRKIIENNLKDMLIEPIETDINPTMLQFKNGVLNIETG

SEQ ID NO: 22025 - protein, 85 aa, unidentified
  REGION 1..85: note = Description of Unknown:cds_NC_035460.1_cds_YP_009408038.1_87 target sequence
EFYTGQNAKEYICTVSTGYNFNSNIFGNEESDEYKELTKVINDIQPQTKENASNRELYERTLSSCLYGSTKQCLTFFYGETATGK

SEQ ID NO: 22026 - protein, 85 aa, unidentified
  REGION 1..85: note = Description of Unknown:cds_NC_035460.1_cds_YP_009408038.1_87 target sequence
STTKRILHSAIGDLFIETGQTILTDAMDKGPNPFIANMHLKRSVFCSELPDFACNGAKKIRADNIKKLTEPCIVGRQCFSNKINN

SEQ ID NO: 22027 - protein, 85 aa, unidentified
  REGION 1..85: note = Description of Unknown:cds_NC_035460.1_cds_YP_009408038.1_87 target sequence
KNHGTIIIDTNYRPVFDRVDNALMRRVALVKFRTHFSQLSNHEAAKNNAAYNEVKLLDENLDMKIQRNYFRHAFLHMLVKWYQKY

SEQ ID NO: 22028 - protein, 85 aa, unidentified
  REGION 1..85: note = Description of Unknown:cds_NC_035460.1_cds_YP_009408038.1_87 target sequence
HVPNMRLYPTPEMVPDFVFHLKINSLIVVSSITHIRHITKLIKLGYIIVNELLVIPVQLFQQKLLAHFNMREYGHDIENFIARHK

SEQ ID NO: 22029 - protein, 84 aa, unidentified
  REGION 1..84: note = Description of Unknown:cds_NC_035460.1_cds_YP_009408038.1_87 target sequence
INSLIVVSSITHIRHITKLIKLGYIIVNELLVIPVQLFQQKLLAHFNMREYGHDIENFIARHKKFVNVTEEYLEYIFIEDITSK

SEQ ID NO: 22030 - protein, 85 aa, unidentified
  REGION 1..85: note = Description of Unknown:cds_NC_035460.1_cds_YP_009408038.1_87 target sequence
SRFVEVFTCDELEEYIQNNPTCTLFETLRDEEAYSIVRVFFDVDLDGTLDEIDMAAALKDFILQLTKFVSIFSAKECDANQSTVL

SEQ ID NO: 22031 - protein, 85 aa, unidentified
  REGION 1..85: note = Description of Unknown:cds_NC_035460.1_cds_YP_009408038.1_87 target sequence
KCLRSNFSLTKSTNSEHTSFHIIFPDTYTTMDTLIAMKRPLLEFSRASENPLIRAIDPAIYRRKATLRIVGTRKVANNDKIHIKQ

SEQ ID NO: 22032 - protein, 85 aa, unidentified
  REGION 1..85: note = Description of Unknown:cds_NC_035460.1_cds_YP_009408038.1_87 target sequence
PPHNNISDYLFTYVHQHNKSCYFSLARRLEDTMPSALWEPTYITFDDAMEKVSKIIINDIVNFSNLDENNFTTTPLIIDYMMPCA

SEQ ID NO: 22033 - protein, 85 aa, unidentified
  REGION 1..85: note = Description of Unknown:cds_NC_035460.1_cds_YP_009408038.1_87 target sequence
LCKKKSHKHHHQLSLSNGMLKIYKAGNPHSCKVKVITLEGNKLYNVSQLIMDANVIHLTDRGDYIVWIQNSWKFNNGEESLITKL

SEQ ID NO: 22034 - protein, 85 aa, unidentified
  REGION 1..85: note = Description of Unknown:cds_NC_035460.1_cds_YP_009408038.1_87 target sequence
ILSMKEYLPSEHGPNLLCPRKRKIIENNLKDMLIEPIETDINPTMLQFKNGVLNIETGEFYTGQNAKEYICTVSTGYNFNSNIFG

SEQ ID NO: 22035 - protein, 85 aa, unidentified
  REGION 1..85: note = Description of Unknown:cds_NC_035460.1_cds_YP_009408038.1_87 target sequence
NEESDEYKELTKVINDIQPQTKENASNRELYERTLSSCLYGSTKQCLTFFYGETATGKSTTKRILHSAIGDLFIETGQTILTDAM

SEQ ID NO: 22036 - protein, 85 aa, unidentified
  REGION 1..85: note = Description of Unknown:cds_NC_035460.1_cds_YP_009408038.1_87 target sequence
DKGPNPFIANMHLKRSVFCSELPDFACNGAKKIRADNIKKLTEPCIVGRQCFSNKINNKNHGTIIIDTNYRPVFDRVDNALMRRV

SEQ ID NO: 22037 - protein, 85 aa, unidentified
  REGION 1..85: note = Description of Unknown:cds_NC_035460.1_cds_YP_009408038.1_87 target sequence
ALVKFRTHFSQLSNHEAAKNNAAYNEVKLLDENLDMKIQRNYFRHAFLHMLVKWYQKYHVPNMRLYPTPEMVPDFVFHLKINSLI

SEQ ID NO: 22038 - protein, 85 aa, unidentified
  REGION 1..85: note = Description of Unknown:cds_NC_030656.1_cds_YP_009268801.1_86 target sequence
ATQVENNIIFVLKKLAVTKSCRESEDERYVEAFTCEELEAYIKQHPTCSLFETLRNEEEFSVVRLFLDIDVSYPMDEQEYVLALK

SEQ ID NO: 22039 - protein, 85 aa, unidentified
  REGION 1..85: note = Description of Unknown:cds_NC_030656.1_cds_YP_009268801.1_86 target sequence
ELITAYTKFVTSFVSVHCSVKNTDKIKKCMMTNFSITLSNDTDKTSSHIIFLDVYTTMDTLIAMKKPLLKFIKSSENPLIRSIDP

SEQ ID NO: 22040 - protein, 85 aa, unidentified
  REGION 1..85: note = Description of Unknown:cds_NC_030656.1_cds_YP_009268801.1_86 target sequence
AIYRKSTTLRVVDTRKTKTNNYVHQRRPPHTKISDYLFTYVEMSEKTCYFTIDAEKTDNAAIEKIWEPNFISFSDAMKRVKKAIV

SEQ ID NO: 22041 - protein, 85 aa, unidentified
  REGION 1..85: note = Description of Unknown:cds_NC_030656.1_cds_YP_009268801.1_86 target sequence
NEIVNIDEITDSNFVSVPLIIDYVSPCAICKKKSHKHTHHLSVRDDTLRIYKSGNPYSCKVKVISLEGNRLFSAAQHIFNANVVQ

SEQ ID NO: 22042 - protein, 85 aa, unidentified
  REGION 1..85: note = Description of Unknown:cds_NC_030656.1_cds_YP_009268801.1_86 target sequence
MNERGDHIVWLKNSWRYNDESLLTKLILSMRDNLLEYNIDILCPRKRKIIESNLRDMIVDTVETDLYFDKLPFNNGVLDIATNKF

SEQ ID NO: 22043 - protein, 85 aa, unidentified
  REGION 1..85: note = Description of Unknown:cds_NC_030656.1_cds_YP_009268801.1_86 target sequence
YTGEQAKPFMCTVSTGYNFKEDVIKCTDQVKEVQKELYSIIDDIQPKTAENLENREIYERVLSSCLCGMTKQCLVFFYGETATGK

SEQ ID NO: 22044 - protein, 85 aa, unidentified
  REGION 1..85: note = Description of Unknown:cds_NC_030656.1_cds_YP_009268801.1_86 target sequence
STTKKLLKSVVGSMFVETGQTILTDVMDKGPNPFVASMHLKRAVFCSELPDFACNGAKRIRADNIKKLTEPCIVGRLCFSNKINN

SEQ ID NO: 22045 - protein, 85 aa, unidentified
  REGION 1..85: note = Description of Unknown:cds_NC_030656.1_cds_YP_009268801.1_86 target sequence
KNHATIIIDTNYKPVFDRVDNALMRRIILVKFRTHFSTVAGRKAAENNSSYDKVKLLDEELETKIHQNYFRTAFLNILIGWYQKY

SEQ ID NO: 22046 - protein, 85 aa, unidentified
  REGION 1..85: note = Description of Unknown:cds_NC_030656.1_cds_YP_009268801.1_86 target sequence
HCPILKLEPTPHAVPDFAFHIKVNSLIIASAMSHMVHIEHFAKLGYSILDGEIGLTASLFQQRLGKHFNSKISIHDIESFVNRNK

SEQ ID NO: 22047 - protein, 84 aa, unidentified
  REGION 1..84: note = Description of Unknown:cds_NC_030656.1_cds_YP_009268801.1_86 target sequence
VNSLIIASAMSHMVHIEHFAKLGYSILDGEIGLTASLFQQRLGKHFNSKISIHDIESFVNRNKKFNSIGEEYVAFIFIEDLPNK

SEQ ID NO: 22048 - protein, 85 aa, unidentified
  REGION 1..85: note = Description of Unknown:cds_NC_030656.1_cds_YP_009268801.1_86 target sequence
RYVEAFTCEELEAYIKQHPTCSLFETLRNEEEFSVVRLFLDIDVSYPMDEQEYVLALKELITAYTKFVTSFVSVHCSVKNTDKIK

SEQ ID NO: 22049 - protein, 85 aa, unidentified
  REGION 1..85: note = Description of Unknown:cds_NC_030656.1_cds_YP_009268801.1_86 target sequence
KCMMTNFSITLSNDTDKTSSHIIFLDVYTTMDTLIAMKKPLLKFIKSSENPLIRSIDPAIYRKSTTLRVVDTRKTKTNNYVHQRR

SEQ ID NO: 22050 - protein, 85 aa, unidentified
  REGION 1..85: note = Description of Unknown:cds_NC_030656.1_cds_YP_009268801.1_86 target sequence
PPHTKISDYLFTYVEMSEKTCYFTIDAEKTDNAAIEKIWEPNFISFSDAMKRVKKAIVNEIVNIDEITDSNFVSVPLIIDYVSPC

SEQ ID NO: 22051 - protein, 85 aa, unidentified
  REGION 1..85: note = Description of Unknown:cds_NC_030656.1_cds_YP_009268801.1_86 target sequence
AICKKKSHKHTHHLSVRDDTLRIYKSGNPYSCKVKVISLEGNRLFSAAQHIFNANVVQMNERGDHIVWLKNSWRYNDESLLTKLI

SEQ ID NO: 22052 - protein, 85 aa, unidentified
  REGION 1..85: note = Description of Unknown:cds_NC_030656.1_cds_YP_009268801.1_86 target sequence
LSMRDNLLEYNIDILCPRKRKIIESNLRDMIVDTVETDLYFDKLPFNNGVLDIATNKFYTGEQAKPFMCTVSTGYNFKEDVIKCT

SEQ ID NO: 22053 - protein, 85 aa, unidentified
  REGION 1..85: note = Description of Unknown:cds_NC_030656.1_cds_YP_009268801.1_86 target sequence
DQVKEVQKELYSIIDDIQPKTAENLENREIYERVLSSCLCGMTKQCLVFFYGETATGKSTTKKLLKSVVGSMFVETGQTILTDVM

SEQ ID NO: 22054 - protein, 85 aa, unidentified
  REGION 1..85: note = Description of Unknown:cds_NC_030656.1_cds_YP_009268801.1_86 target sequence
DKGPNPFVASMHLKRAVFCSELPDFACNGAKRIRADNIKKLTEPCIVGRLCFSNKINNKNHATIIIDTNYKPVFDRVDNALMRRI

SEQ ID NO: 22055 - protein, 85 aa, unidentified
  REGION 1..85: note = Description of Unknown:cds_NC_030656.1_cds_YP_009268801.1_86 target sequence
ILVKFRTHFSTVAGRKAAENNSSYDKVKLLDEELETKIHQNYFRTAFLNILIGWYQKYHCPILKLEPTPHAVPDFAFHIKVNSLI

SEQ ID NO: 22056 - protein, 85 aa, unidentified
  REGION 1..85: note = Description of Unknown:cds_NZ_WFIY01000004.1_cds_WP_155863573.1_1494 target sequence
VVIVNKILIITLVLLYIVSIISIIPITSAVQGFKTTNISVGSFPTAMAYDSNNGYVYVVDSGSGQVSVINSSTVIATISVGTDPT

SEQ ID NO: 22057 - protein, 85 aa, unidentified
  REGION 1..85: note = Description of Unknown:cds_NZ_WFIY01000004.1_cds_WP_155863573.1_1494 target sequence
AIVYDKQNGLIYVANTLSNSISIINGTEVIATVTVGGEIGYSPVALLCVNGLIYVANLNSYKAGVGIVSVINGTKVVCNIQVECH

SEQ ID NO: 22058 - protein, 85 aa, unidentified
  REGION 1..85: note = Description of Unknown:cds_NZ_WFIY01000004.1_cds_WP_155863573.1_1494 target sequence
PVCLVYDPSNGYIYVSDNGFSTVSVIKGEKVIATISVGQAPRQIIYDPYNGLVYVLNLESNSTSVINGTSVICTISVPYPVAITY

SEQ ID NO: 22059 - protein, 85 aa, unidentified
  REGION 1..85: note = Description of Unknown:cds_NZ_WFIY01000004.1_cds_WP_155863573.1_1494 target sequence
SPSYVYIASLCNNTVYMVSGTKVVGKITVGQYPVFITYDSYNGLVYVANLGSNSLSVINSSRVIYQIPTGNSPRFILVTPSAVYV

SEQ ID NO: 22060 - protein, 85 aa, unidentified
  REGION 1..85: note = Description of Unknown:cds_NZ_WFIY01000004.1_cds_WP_155863573.1_1494 target sequence
ADSGSNEVTEISVCKIVYYLTFKETGLPVGKSWTVCINGTNETSTSNEITFILPPGTYFYKVYSAYYIPSPSQGSITLSSNTTLQ

SEQ ID NO: 22061 - protein, 85 aa, unidentified
  REGION 1..85: note = Description of Unknown:cds_NZ_WFIY01000004.1_cds_WP_155863573.1_1494 target sequence
ISFTPVKFNLTFEETGLVSGTKWAVCVNGTISTSTSSRICFLLPYGYYEYKVLNVTGYKVTPTMGYINLTSNTTIKVTFYAILYN

SEQ ID NO: 22062 - protein, 85 aa, unidentified
  REGION 1..85: note = Description of Unknown:cds_NZ_WFIY01000004.1_cds_WP_155863573.1_1494 target sequence
ITFKETGLPKGVSWTVCIDNENHTTNACYITITLPMGVYEYKIFSPHYMPNVTQGIINLTMNEVINIKFTVMNYTLTIIESGLPS

SEQ ID NO: 22063 - protein, 85 aa, unidentified
  REGION 1..85: note = Description of Unknown:cds_NZ_WFIY01000004.1_cds_WP_155863573.1_1494 target sequence
GYEWTVNINGSNYTTTMNEINITLPYGEYMVKVYSKYYIPITEEEFVNLSKNTELKFTFVPENFTITFEETGLPSGTTWSVCIDG

SEQ ID NO: 22064 - protein, 85 aa, unidentified
  REGION 1..85: note = Description of Unknown:cds_NZ_WFIY01000004.1_cds_WP_155863573.1_1494 target sequence
RNYTTASSSLTITLPYGTYEYRIFTTTNGYSPNVTQGTLTLTQAVKISITYKQITTTTSTTTTTTPPSTTVTSPSLSTSFVVGIA

SEQ ID NO: 22065 - protein, 84 aa, unidentified
  REGION 1..84: note = Description of Unknown:cds_NZ_WFIY01000004.1_cds_WP_155863573.1_1494 target sequence
YEYRIFTTTNGYSPNVTQGTLTLTQAVKISITYKQITTTTSTTTTTTPPSTTVTSPSLSTSFVVGIAIVVIIIIAAAIILLRRK

SEQ ID NO: 22066 - protein, 85 aa, unidentified
  REGION 1..85: note = Description of Unknown:cds_NZ_WFIY01000004.1_cds_WP_155863573.1_1494 target sequence
SAVQGFKTTNISVGSFPTAMAYDSNNGYVYVVDSGSGQVSVINSSTVIATISVGTDPTAIVYDKQNGLIYVANTLSNSISIINGT

SEQ ID NO: 22067 - protein, 85 aa, unidentified
  REGION 1..85: note = Description of Unknown:cds_NZ_WFIY01000004.1_cds_WP_155863573.1_1494 target sequence
EVIATVTVGGEIGYSPVALLCVNGLIYVANLNSYKAGVGIVSVINGTKVVCNIQVECHPVCLVYDPSNGYIYVSDNGFSTVSVIK

SEQ ID NO: 22068 - protein, 85 aa, unidentified
  REGION 1..85: note = Description of Unknown:cds_NZ_WFIY01000004.1_cds_WP_155863573.1_1494 target sequence
GEKVIATISVGQAPRQIIYDPYNGLVYVLNLESNSTSVINGTSVICTISVPYPVAITYSPSYVYIASLCNNTVYMVSGTKVVGKI

SEQ ID NO: 22069 - protein, 85 aa, unidentified
  REGION 1..85: note = Description of Unknown:cds_NZ_WFIY01000004.1_cds_WP_155863573.1_1494 target sequence
TVGQYPVFITYDSYNGLVYVANLGSNSLSVINSSRVIYQIPTGNSPRFILVTPSAVYVADSGSNEVTEISVCKIVYYLTFKETGL

SEQ ID NO: 22070 - protein, 85 aa, unidentified
  REGION 1..85: note = Description of Unknown:cds_NZ_WFIY01000004.1_cds_WP_155863573.1_1494 target sequence
PVGKSWTVCINGTNETSTSNEITFILPPGTYFYKVYSAYYIPSPSQGSITLSSNTTLQISFTPVKFNLTFEETGLVSGTKWAVCV

SEQ ID NO: 22071 - protein, 85 aa, unidentified
  REGION 1..85: note = Description of Unknown:cds_NZ_WFIY01000004.1_cds_WP_155863573.1_1494 target sequence
NGTISTSTSSRICFLLPYGYYEYKVLNVTGYKVTPTMGYINLTSNTTIKVTFYAILYNITFKETGLPKGVSWTVCIDNENHTTNA

SEQ ID NO: 22072 - protein, 85 aa, unidentified
  REGION 1..85: note = Description of Unknown:cds_NZ_WFIY01000004.1_cds_WP_155863573.1_1494 target sequence
CYITITLPMGVYEYKIFSPHYMPNVTQGIINLTMNEVINIKFTVMNYTLTIIESGLPSGYEWTVNINGSNYTTTMNEINITLPYG

SEQ ID NO: 22073 - protein, 85 aa, unidentified
  REGION 1..85: note = Description of Unknown:cds_NZ_WFIY01000004.1_cds_WP_155863573.1_1494 target sequence
EYMVKVYSKYYIPITEEEFVNLSKNTELKFTFVPENFTITFEETGLPSGTTWSVCIDGRNYTTASSSLTITLPYGTYEYRIFTTT

SEQ ID NO: 22074 - protein, 85 aa, unidentified
  REGION 1..85: note = Description of Unknown:cds_NC_010495.1_cds_YP_001742075.1_38 target sequence
LLGEDDDLSFCLRDGDVVNVYCQPSGAIGDLIGAILKPITKIFSFLTPKVSTPKKDASSKTSPNTSLKAQTNIARNGEARPDNFG

SEQ ID NO: 22075 - protein, 85 aa, unidentified
  REGION 1..85: note = Description of Unknown:cds_NC_010495.1_cds_YP_001742075.1_38 target sequence
QVRSFPDLLQESLFEYVNNIKYATEFMNFGLGKYDVSSVRYSESNLGSLAGASYTIYQPGEIIPVVYEPYAFDDVDGQELYGPNE

SEQ ID NO: 22076 - protein, 85 aa, unidentified
  REGION 1..85: note = Description of Unknown:cds_NC_010495.1_cds_YP_001742075.1_38 target sequence
LNTDPPPVVIETATTTTVTEMEYVNGQFLAKIPKNNEFDYFIDLTLPHDVTFGINVSFPTVGGVTVTRDITLSGRLISATETDDG

SEQ ID NO: 22077 - protein, 85 aa, unidentified
  REGION 1..85: note = Description of Unknown:cds_NC_010495.1_cds_YP_001742075.1_38 target sequence
GVPPENYWYTFIITNIDYSGNQLVSSLDGVTINNNYFTISDNQAIVSGPYFSPIEGDQLWVHLQHQTNDGNDFSVLIEWWKIDDD

SEQ ID NO: 22078 - protein, 85 aa, unidentified
  REGION 1..85: note = Description of Unknown:cds_NC_010495.1_cds_YP_001742075.1_38 target sequence
NAQIPGTYQSMNYYQDVDRNDTFYYTIKLTPSAGTGRYAIQMRRTNNSSDTSILQLEEIHSIVTRTNVSYPDDTVVKVVVRATEN

SEQ ID NO: 22079 - protein, 85 aa, unidentified
  REGION 1..85: note = Description of Unknown:cds_NC_010495.1_cds_YP_001742075.1_38 target sequence
ATGSRDRKYNALITRHTIGYNRDTGTVRYTLAPSRSFADAVLHNWLITAGNPENTIDIVKLYEIADSLPDERLGWFDYTFDDEDK

SEQ ID NO: 22080 - protein, 85 aa, unidentified
  REGION 1..85: note = Description of Unknown:cds_NC_010495.1_cds_YP_001742075.1_38 target sequence
SIGERLQTICDAARVTAFWDDGVMSFSRDEKREYPATVFNTRNTQSDGYKLSYDISLPGTYDGVNVEYRDPTTNKQANVYYRITD

SEQ ID NO: 22081 - protein, 85 aa, unidentified
  REGION 1..85: note = Description of Unknown:cds_NC_010495.1_cds_YP_001742075.1_38 target sequence
SGVVEGEPTKAKKFDMLYVRNRYQAVDRAIIECRRLIYSRRSMEIKALADGEWVNVGDCIQVVDMYDDVQQTGVIESRNGNVFTT

SEQ ID NO: 22082 - protein, 85 aa, unidentified
  REGION 1..85: note = Description of Unknown:cds_NC_010495.1_cds_YP_001742075.1_38 target sequence
SEQLTAGDNLYVVITSSDGSVSDRLPATVTGLHTFTCNLPSDFKLNIWDGTNVQSESRYVLSTEKELDTTLWVVSQKNPGSDGSV

SEQ ID NO: 22083 - protein, 84 aa, unidentified
  REGION 1..84: note = Description of Unknown:cds_NC_010495.1_cds_YP_001742075.1_38 target sequence
GSVSDRLPATVTGLHTFTCNLPSDFKLNIWDGTNVQSESRYVLSTEKELDTTLWVVSQKNPGSDGSVTLTMSEYSDDMYDYRIE

SEQ ID NO: 22084 - protein, 85 aa, unidentified
  REGION 1..85: note = Description of Unknown:cds_NC_010495.1_cds_YP_001742075.1_38 target sequence
IGDLIGAILKPITKIFSFLTPKVSTPKKDASSKTSPNTSLKAQTNIARNGEARPDNFGQVRSFPDLLQESLFEYVNNIKYATEFM

SEQ ID NO: 22085 - protein, 85 aa, unidentified
  REGION 1..85: note = Description of Unknown:cds_NC_010495.1_cds_YP_001742075.1_38 target sequence
NFGLGKYDVSSVRYSESNLGSLAGASYTIYQPGEIIPVVYEPYAFDDVDGQELYGPNELNTDPPPVVIETATTTTVTEMEYVNGQ

SEQ ID NO: 22086 - protein, 85 aa, unidentified
  REGION 1..85: note = Description of Unknown:cds_NC_010495.1_cds_YP_001742075.1_38 target sequence
FLAKIPKNNEFDYFIDLTLPHDVTFGINVSFPTVGGVTVTRDITLSGRLISATETDDGGVPPENYWYTFIITNIDYSGNQLVSSL

SEQ ID NO: 22087 - protein, 85 aa, unidentified
  REGION 1..85: note = Description of Unknown:cds_NC_010495.1_cds_YP_001742075.1_38 target sequence
DGVTINNNYFTISDNQAIVSGPYFSPIEGDQLWVHLQHQTNDGNDFSVLIEWWKIDDDNAQIPGTYQSMNYYQDVDRNDTFYYTI

SEQ ID NO: 22088 - protein, 85 aa, unidentified
  REGION 1..85: note = Description of Unknown:cds_NC_010495.1_cds_YP_001742075.1_38 target sequence
KLTPSAGTGRYAIQMRRTNNSSDTSILQLEEIHSIVTRTNVSYPDDTVVKVVVRATENATGSRDRKYNALITRHTIGYNRDTGTV

SEQ ID NO: 22089 - protein, 85 aa, unidentified
  REGION 1..85: note = Description of Unknown:cds_NC_010495.1_cds_YP_001742075.1_38 target sequence
RYTLAPSRSFADAVLHNWLITAGNPENTIDIVKLYEIADSLPDERLGWFDYTFDDEDKSIGERLQTICDAARVTAFWDDGVMSFS

SEQ ID NO: 22090 - protein, 85 aa, unidentified
  REGION 1..85: note = Description of Unknown:cds_NC_010495.1_cds_YP_001742075.1_38 target sequence
RDEKREYPATVFNTRNTQSDGYKLSYDISLPGTYDGVNVEYRDPTTNKQANVYYRITDSGVVEGEPTKAKKFDMLYVRNRYQAVD

SEQ ID NO: 22091 - protein, 85 aa, unidentified
  REGION 1..85: note = Description of Unknown:cds_NC_010495.1_cds_YP_001742075.1_38 target sequence
RAIIECRRLIYSRRSMEIKALADGEWVNVGDCIQVVDMYDDVQQTGVIESRNGNVFTTSEQLTAGDNLYVVITSSDGSVSDRLPA

SEQ ID NO: 22092 - protein, 85 aa, unidentified
  REGION 1..85: note = Description of Unknown:cds_NZ_WFIY01000004.1_cds_WP_155863045.1_940 target sequence
IGCFYILDFSYDVEEGKPVIYIWAIDKEGNRVAVLEKNFRPYFYAILDDTVDPDKVTEDIKRLSISQSPITSVKLEERKYYGNPV

SEQ ID NO: 22093 - protein, 85 aa, unidentified
  REGION 1..85: note = Description of Unknown:cds_NZ_WFIY01000004.1_cds_WP_155863045.1_940 target sequence
KVLRIETVIPAYVRTYRDKVAKIKGVKEVVEADIRFYMRYSIDHDLKPFHWFKAEVEEIQDPKLRVKKVYELKKIIQIYEDKPPE

SEQ ID NO: 22094 - protein, 85 aa, unidentified
  REGION 1..85: note = Description of Unknown:cds_NZ_WFIY01000004.1_cds_WP_155863045.1_940 target sequence
LRVMAFDIEVYNKYGSPNPRRDPVIIIGVWTSNGGKQFVMKDDDLEIIREFAKFVLDYDPDIILGYNSNGFDWPYLLERVNSRGV

SEQ ID NO: 22095 - protein, 85 aa, unidentified
  REGION 1..85: note = Description of Unknown:cds_NZ_WFIY01000004.1_cds_WP_155863045.1_940 target sequence
KLDIGRKVNSEPSQGTYGHYSVVGRLNVDLLGFASSIAEVKVKSLDNIADYLGVVKKTERVNLEWYQIPEYWSDPSKRDILLRYN

SEQ ID NO: 22096 - protein, 85 aa, unidentified
  REGION 1..85: note = Description of Unknown:cds_NZ_WFIY01000004.1_cds_WP_155863045.1_940 target sequence
MDDVRSTYLLKDVFLPFGEQLTMITGLPLDQLSMASVGYRVEWLLMREAYKFSEIIPNRVEREYESYKGGLVISPAPGIHEDVYV

SEQ ID NO: 22097 - protein, 85 aa, unidentified
  REGION 1..85: note = Description of Unknown:cds_NZ_WFIY01000004.1_cds_WP_155863045.1_940 target sequence
LDFSSMYPSIMIKYNIGPDTLVKGECEDCWVAPEVGHKFRKSPDGFYKRILQKLVEERKAVKSKIPIEKDEYERRRLNERQRALK

SEQ ID NO: 22098 - protein, 85 aa, unidentified
  REGION 1..85: note = Description of Unknown:cds_NZ_WFIY01000004.1_cds_WP_155863045.1_940 target sequence
VMANAFYGYMGWLGARWYSKEGAEAVTAWGREIISSVAKLVEERGFKVIYGDTDSVFIKGSGNVDSLINEIMNKFGLEIKIDKIY

SEQ ID NO: 22099 - protein, 85 aa, unidentified
  REGION 1..85: note = Description of Unknown:cds_NZ_WFIY01000004.1_cds_WP_155863045.1_940 target sequence
KKIFFTENKKRYAGITEDGKIDIVGFEAVRGDWCDLAKDLQRRVIEKILTSGVDEAVKLVRDVIMKIRRKEVPIQDLVIWKSLDK

SEQ ID NO: 22100 - protein, 85 aa, unidentified
  REGION 1..85: note = Description of Unknown:cds_NZ_WFIY01000004.1_cds_WP_155863045.1_940 target sequence
SLEEYEVDAPHVTAAKKAMKAGYVIFKGGKIGYVIVKGSGKISERAEPYFMVNDINRIDIDYYIDKQIVPSAMRILEQFGIKENT

SEQ ID NO: 22101 - protein, 84 aa, unidentified
  REGION 1..84: note = Description of Unknown:cds_NZ_WFIY01000004.1_cds_WP_155863045.1_940 target sequence
KKAMKAGYVIFKGGKIGYVIVKGSGKISERAEPYFMVNDINRIDIDYYIDKQIVPSAMRILEQFGIKENTLKNTSFDILNFFKK

SEQ ID NO: 22102 - protein, 85 aa, unidentified
  REGION 1..85: note = Description of Unknown:cds_NZ_WFIY01000004.1_cds_WP_155863045.1_940 target sequence
EGNRVAVLEKNFRPYFYAILDDTVDPDKVTEDIKRLSISQSPITSVKLEERKYYGNPVKVLRIETVIPAYVRTYRDKVAKIKGVK

SEQ ID NO: 22103 - protein, 85 aa, unidentified
  REGION 1..85: note = Description of Unknown:cds_NZ_WFIY01000004.1_cds_WP_155863045.1_940 target sequence
EVVEADIRFYMRYSIDHDLKPFHWFKAEVEEIQDPKLRVKKVYELKKIIQIYEDKPPELRVMAFDIEVYNKYGSPNPRRDPVIII

SEQ ID NO: 22104 - protein, 85 aa, unidentified
  REGION 1..85: note = Description of Unknown:cds_NZ_WFIY01000004.1_cds_WP_155863045.1_940 target sequence
GVWTSNGGKQFVMKDDDLEIIREFAKFVLDYDPDIILGYNSNGFDWPYLLERVNSRGVKLDIGRKVNSEPSQGTYGHYSVVGRLN

SEQ ID NO: 22105 - protein, 85 aa, unidentified
  REGION 1..85: note = Description of Unknown:cds_NZ_WFIY01000004.1_cds_WP_155863045.1_940 target sequence
VDLLGFASSIAEVKVKSLDNIADYLGVVKKTERVNLEWYQIPEYWSDPSKRDILLRYNMDDVRSTYLLKDVFLPFGEQLTMITGL

SEQ ID NO: 22106 - protein, 85 aa, unidentified
  REGION 1..85: note = Description of Unknown:cds_NZ_WFIY01000004.1_cds_WP_155863045.1_940 target sequence
PLDQLSMASVGYRVEWLLMREAYKFSEIIPNRVEREYESYKGGLVISPAPGIHEDVYVLDFSSMYPSIMIKYNIGPDTLVKGECE

SEQ ID NO: 22107 - protein, 85 aa, unidentified
  REGION 1..85: note = Description of Unknown:cds_NZ_WFIY01000004.1_cds_WP_155863045.1_940 target sequence
DCWVAPEVGHKFRKSPDGFYKRILQKLVEERKAVKSKIPIEKDEYERRRLNERQRALKVMANAFYGYMGWLGARWYSKEGAEAVT

SEQ ID NO: 22108 - protein, 85 aa, unidentified
  REGION 1..85: note = Description of Unknown:cds_NZ_WFIY01000004.1_cds_WP_155863045.1_940 target sequence
AWGREIISSVAKLVEERGFKVIYGDTDSVFIKGSGNVDSLINEIMNKFGLEIKIDKIYKKIFFTENKKRYAGITEDGKIDIVGFE

SEQ ID NO: 22109 - protein, 85 aa, unidentified
  REGION 1..85: note = Description of Unknown:cds_NZ_WFIY01000004.1_cds_WP_155863045.1_940 target sequence
AVRGDWCDLAKDLQRRVIEKILTSGVDEAVKLVRDVIMKIRRKEVPIQDLVIWKSLDKSLEEYEVDAPHVTAAKKAMKAGYVIFK

SEQ ID NO: 22110 - protein, 85 aa, unidentified
  REGION 1..85: note = Description of Unknown:cds_NZ_WFIY01000004.1_cds_WP_155863765.1_1640 target sequence
QIDSYDVFIEFDFKGLQYHGIEKIKLSTEDKVILDAEGVKVTKVSINGKSVDFLADDKTVTISTGNFSGIIEVEFEGKVRDDLVG

SEQ ID NO: 22111 - protein, 85 aa, unidentified
  REGION 1..85: note = Description of Unknown:cds_NZ_WFIY01000004.1_cds_WP_155863765.1_1640 target sequence
MYIAPYDNSYIFTTQFESSHARKFIPCVDNPSYKAEFKFTVKVDKDLDVISNMPPQKIYYEGDKKIIEFLKTPKMSTYLIYMGVG

SEQ ID NO: 22112 - protein, 85 aa, unidentified
  REGION 1..85: note = Description of Unknown:cds_NZ_WFIY01000004.1_cds_WP_155863765.1_1640 target sequence
KFEEYYDYSSQPIVIVATVPGKISKAKIPADFARKFIKFYEDYYGIKYQLPKAHFIAIPEFAFGAMENWGAITFRETALLADENS

SEQ ID NO: 22113 - protein, 85 aa, unidentified
  REGION 1..85: note = Description of Unknown:cds_NZ_WFIY01000004.1_cds_WP_155863765.1_1640 target sequence
SIRQLRRVAEVIAHELAHQWFGDLVTLKWWNDLWLNESFATFMSYKAVNWLHPDWDYWGEFLYSETAGAMEKDSLHITHPIEVEV

SEQ ID NO: 22114 - protein, 85 aa, unidentified
  REGION 1..85: note = Description of Unknown:cds_NZ_WFIY01000004.1_cds_WP_155863765.1_1640 target sequence
KKPEEIEQLFDDISYGKGASILRMIESYMGEEEFRKGISNYLNKFSFSNAEGRDLWNSLEEASGKPISKIMPSWIVQEGYPLITV

SEQ ID NO: 22115 - protein, 85 aa, unidentified
  REGION 1..85: note = Description of Unknown:cds_NZ_WFIY01000004.1_cds_WP_155863765.1_1640 target sequence
KVKDNIIKFEQRRFMLDGSTDDKIYMVPLTLEVNGNKKISLLLDSKEKEYNAGEKVNSIKVNLNRAGFYRVYYDDLKILGSMNHL

SEQ ID NO: 22116 - protein, 85 aa, unidentified
  REGION 1..85: note = Description of Unknown:cds_NZ_WFIY01000004.1_cds_WP_155863765.1_1640 target sequence
EKFGLINDYFNFLLAGIIPFEEYEKIVQSMMNEESYLPVLELASQLFMLYAINPKKYSNLALQFHESQEKIWKTKTDALGKLTYS

SEQ ID NO: 22117 - protein, 85 aa, unidentified
  REGION 1..85: note = Description of Unknown:cds_NZ_WFIY01000004.1_cds_WP_155863765.1_1640 target sequence
KIIENLVQMDYNFALELSKEMTNFSSIDPNKKDAVAMAYAIVNEDSVFDEILDKYRKEKFDEEKMTYLKAMLSFKKPYLVTNTLS

SEQ ID NO: 22118 - protein, 85 aa, unidentified
  REGION 1..85: note = Description of Unknown:cds_NZ_WFIY01000004.1_cds_WP_155863765.1_1640 target sequence
LSLTGEIKKQDIVRVLPIVAYNVEAKEAVWSWLKTYMDNIRKYYQGTGILGRVLSDVLPILGIGREKEVEEYFNKHPMPEAEKGI

SEQ ID NO: 22119 - protein, 84 aa, unidentified
  REGION 1..84: note = Description of Unknown:cds_NZ_WFIY01000004.1_cds_WP_155863765.1_1640 target sequence
LPIVAYNVEAKEAVWSWLKTYMDNIRKYYQGTGILGRVLSDVLPILGIGREKEVEEYFNKHPMPEAEKGIKQGIEKLKIFSRLA

SEQ ID NO: 22120 - protein, 85 aa, unidentified
  REGION 1..85: note = Description of Unknown:cds_NZ_WFIY01000004.1_cds_WP_155863765.1_1640 target sequence
TEDKVILDAEGVKVTKVSINGKSVDFLADDKTVTISTGNFSGIIEVEFEGKVRDDLVGMYIAPYDNSYIFTTQFESSHARKFIPC

SEQ ID NO: 22121 - protein, 85 aa, unidentified
  REGION 1..85: note = Description of Unknown:cds_NZ_WFIY01000004.1_cds_WP_155863765.1_1640 target sequence
VDNPSYKAEFKFTVKVDKDLDVISNMPPQKIYYEGDKKIIEFLKTPKMSTYLIYMGVGKFEEYYDYSSQPIVIVATVPGKISKAK

SEQ ID NO: 22122 - protein, 85 aa, unidentified
  REGION 1..85: note = Description of Unknown:cds_NZ_WFIY01000004.1_cds_WP_155863765.1_1640 target sequence
IPADFARKFIKFYEDYYGIKYQLPKAHFIAIPEFAFGAMENWGAITFRETALLADENSSIRQLRRVAEVIAHELAHQWFGDLVTL

SEQ ID NO: 22123 - protein, 85 aa, unidentified
  REGION 1..85: note = Description of Unknown:cds_NZ_WFIY01000004.1_cds_WP_155863765.1_1640 target sequence
KWWNDLWLNESFATFMSYKAVNWLHPDWDYWGEFLYSETAGAMEKDSLHITHPIEVEVKKPEEIEQLFDDISYGKGASILRMIES

SEQ ID NO: 22124 - protein, 85 aa, unidentified
  REGION 1..85: note = Description of Unknown:cds_NZ_WFIY01000004.1_cds_WP_155863765.1_1640 target sequence
YMGEEEFRKGISNYLNKFSFSNAEGRDLWNSLEEASGKPISKIMPSWIVQEGYPLITVKVKDNIIKFEQRRFMLDGSTDDKIYMV

SEQ ID NO: 22125 - protein, 85 aa, unidentified
  REGION 1..85: note = Description of Unknown:cds_NZ_WFIY01000004.1_cds_WP_155863765.1_1640 target sequence
PLTLEVNGNKKISLLLDSKEKEYNAGEKVNSIKVNLNRAGFYRVYYDDLKILGSMNHLEKFGLINDYFNFLLAGIIPFEEYEKIV

SEQ ID NO: 22126 - protein, 85 aa, unidentified
  REGION 1..85: note = Description of Unknown:cds_NZ_WFIY01000004.1_cds_WP_155863765.1_1640 target sequence
QSMMNEESYLPVLELASQLFMLYAINPKKYSNLALQFHESQEKIWKTKTDALGKLTYSKIIENLVQMDYNFALELSKEMTNFSSI

SEQ ID NO: 22127 - protein, 85 aa, unidentified
  REGION 1..85: note = Description of Unknown:cds_NZ_WFIY01000004.1_cds_WP_155863765.1_1640 target sequence
DPNKKDAVAMAYAIVNEDSVFDEILDKYRKEKFDEEKMTYLKAMLSFKKPYLVTNTLSLSLTGEIKKQDIVRVLPIVAYNVEAKE

SEQ ID NO: 22128 - protein, 85 aa, unidentified
  REGION 1..85: note = Description of Unknown:cds_NC_040409.1_cds_YP_009551535.1_4 target sequence
ASLIYRQLLTNSYSVSLSDEIKEIGSEKTQNTTINPGPFAQTGYAPVNWGPGETNDSTVVEPILDGPYQPTTFNPPVDYWMLLNP

SEQ ID NO: 22129 - protein, 85 aa, unidentified
  REGION 1..85: note = Description of Unknown:cds_NC_040409.1_cds_YP_009551535.1_4 target sequence
TNVGVVVEGTNNTNRWLATILIEPNVTSVERQYTIFGKSENITVENTDAEKWKFVDVIKTTVNGTYTQYAPLLSSTKLYAVMKHD

SEQ ID NO: 22130 - protein, 85 aa, unidentified
  REGION 1..85: note = Description of Unknown:cds_NC_040409.1_cds_YP_009551535.1_4 target sequence
GKIYTYNGSTPNATTGYYSTTNYNSVNMTSFVDFYIIPRSNEAQCTEYINNGLPPIQNTRNVMAVSINAREIPIQRTQPNEDLLV

SEQ ID NO: 22131 - protein, 85 aa, unidentified
  REGION 1..85: note = Description of Unknown:cds_NC_040409.1_cds_YP_009551535.1_4 target sequence
SNASLWKEMKYNRDITIKFKFGNSIVKTGGLGYKWSEISFKPMNYQYTYKRDGEDVTAHTTCSVNGMNDFNYNGGTLPTDFVVTR

SEQ ID NO: 22132 - protein, 85 aa, unidentified
  REGION 1..85: note = Description of Unknown:cds_NC_040409.1_cds_YP_009551535.1_4 target sequence
YEVLKENSFVYVDYWDDSQAFRNMVYVRSLVADLNNVTCTGGTYNFSLPVGQWPVMQGGAIILSPAGVTLSTQFTDFVSLNSLRF

SEQ ID NO: 22133 - protein, 85 aa, unidentified
  REGION 1..85: note = Description of Unknown:cds_NC_040409.1_cds_YP_009551535.1_4 target sequence
RFRIAVTEPYFSITRTRVSKLYGLPAANPNNGKEYYETTGRFSLISLVPSNDSYQTPIMNSVTVRQDLERQLGELREEFNALSQE

SEQ ID NO: 22134 - protein, 85 aa, unidentified
  REGION 1..85: note = Description of Unknown:cds_NC_040409.1_cds_YP_009551535.1_4 target sequence
IAVSQLVDLALLPLDMFSMFSGIKSTIDAAKSMATSVMKKFKTSGLASSVSSLTESLSDAASSVSRVSSMRSISSSASAWTEVST

SEQ ID NO: 22135 - protein, 85 aa, unidentified
  REGION 1..85: note = Description of Unknown:cds_NC_040409.1_cds_YP_009551535.1_4 target sequence
QVSDVSNAVSNISTQTSTISKRLRLKEIATQTQGMNFDDISAAVLKTKLDKSIQISPTTLPSIITEASEKFIPNRVYRILNNDDV

SEQ ID NO: 22136 - protein, 85 aa, unidentified
  REGION 1..85: note = Description of Unknown:cds_NC_040409.1_cds_YP_009551535.1_4 target sequence
FETSTTGVYRAYKASTLKEIPFDVQKFADLVTDSPVISAIIDFKTLKNLHDNYGITKQQAYNLLRSDPRVLREFINQGNPIIKNR

SEQ ID NO: 22137 - protein, 84 aa, unidentified
  REGION 1..84: note = Description of Unknown:cds_NC_040409.1_cds_YP_009551535.1_4 target sequence
YKASTLKEIPFDVQKFADLVTDSPVISAIIDFKTLKNLHDNYGITKQQAYNLLRSDPRVLREFINQGNPIIKNRIEQLIMQCRL

SEQ ID NO: 22138 - protein, 85 aa, unidentified
  REGION 1..85: note = Description of Unknown:cds_NC_040409.1_cds_YP_009551535.1_4 target sequence
KTQNTTINPGPFAQTGYAPVNWGPGETNDSTVVEPILDGPYQPTTFNPPVDYWMLLNPTNVGVVVEGTNNTNRWLATILIEPNVT

SEQ ID NO: 22139 - protein, 85 aa, unidentified
  REGION 1..85: note = Description of Unknown:cds_NC_040409.1_cds_YP_009551535.1_4 target sequence
SVERQYTIFGKSENITVENTDAEKWKFVDVIKTTVNGTYTQYAPLLSSTKLYAVMKHDGKIYTYNGSTPNATTGYYSTTNYNSVN

SEQ ID NO: 22140 - protein, 85 aa, unidentified
  REGION 1..85: note = Description of Unknown:cds_NC_040409.1_cds_YP_009551535.1_4 target sequence
MTSFVDFYIIPRSNEAQCTEYINNGLPPIQNTRNVMAVSINAREIPIQRTQPNEDLLVSNASLWKEMKYNRDITIKFKFGNSIVK

SEQ ID NO: 22141 - protein, 85 aa, unidentified
  REGION 1..85: note = Description of Unknown:cds_NC_040409.1_cds_YP_009551535.1_4 target sequence
TGGLGYKWSEISFKPMNYQYTYKRDGEDVTAHTTCSVNGMNDFNYNGGTLPTDFVVTRYEVLKENSFVYVDYWDDSQAFRNMVYV

SEQ ID NO: 22142 - protein, 85 aa, unidentified
  REGION 1..85: note = Description of Unknown:cds_NC_040409.1_cds_YP_009551535.1_4 target sequence
RSLVADLNNVTCTGGTYNFSLPVGQWPVMQGGAIILSPAGVTLSTQFTDFVSLNSLRFRFRIAVTEPYFSITRTRVSKLYGLPAA

SEQ ID NO: 22143 - protein, 85 aa, unidentified
  REGION 1..85: note = Description of Unknown:cds_NC_040409.1_cds_YP_009551535.1_4 target sequence
NPNNGKEYYETTGRFSLISLVPSNDSYQTPIMNSVTVRQDLERQLGELREEFNALSQEIAVSQLVDLALLPLDMFSMFSGIKSTI

SEQ ID NO: 22144 - protein, 85 aa, unidentified
  REGION 1..85: note = Description of Unknown:cds_NC_040409.1_cds_YP_009551535.1_4 target sequence
DAAKSMATSVMKKFKTSGLASSVSSLTESLSDAASSVSRVSSMRSISSSASAWTEVSTQVSDVSNAVSNISTQTSTISKRLRLKE

SEQ ID NO: 22145 - protein, 85 aa, unidentified
  REGION 1..85: note = Description of Unknown:cds_NC_040409.1_cds_YP_009551535.1_4 target sequence
IATQTQGMNFDDISAAVLKTKLDKSIQISPTTLPSIITEASEKFIPNRVYRILNNDDVFETSTTGVYRAYKASTLKEIPFDVQKF

SEQ ID NO: 22146 - protein, 85 aa, unidentified
  REGION 1..85: note = Description of Unknown:cds_NC_011510.2_cds_YP_002302230.1_4 target sequence
ASLIYRQLLTNSYTVDLSDEIQEIGSTKSQNVTINPGPFAQTGYAPVNWGPGEINDSTTVEPLLDGPYQPTTFNPPVDYWMLLAP

SEQ ID NO: 22147 - protein, 85 aa, unidentified
  REGION 1..85: note = Description of Unknown:cds_NC_011510.2_cds_YP_002302230.1_4 target sequence
TTPGVIVEGTNNTDRWLATILIEPNVQSENRTYTIFGIQEQLTVSNTSQDQWKFIDVVKTTANGSIGQYGPLLSSPKLYAVMKHN

SEQ ID NO: 22148 - protein, 85 aa, unidentified
  REGION 1..85: note = Description of Unknown:cds_NC_011510.2_cds_YP_002302230.1_4 target sequence
EKLYTYEGQTPNARTAHYSTTNYDSVNMTAFCDFYIIPRSEESKCTEYINNGLPPIQNTRNVVPLSLTARDVIHYRAQANEDIVI

SEQ ID NO: 22149 - protein, 85 aa, unidentified
  REGION 1..85: note = Description of Unknown:cds_NC_011510.2_cds_YP_002302230.1_4 target sequence
SKTSLWKEMQYNRDITIRFKFANTIIKSGGLGYKWSEISFKPANYQYTYTRDGEEVTAHTTCSVNGVNDFSFNGGYLPTDFVVSK

SEQ ID NO: 22150 - protein, 85 aa, unidentified
  REGION 1..85: note = Description of Unknown:cds_NC_011510.2_cds_YP_002302230.1_4 target sequence
FEVIKENSYVYIDYWDDSQAFRNVVYVRSLAANLNSVMCTGGSYNFSLPVGQWPVLTGGAVSLHSAGVTLSTQFTDFVSLNSLRF

SEQ ID NO: 22151 - protein, 85 aa, unidentified
  REGION 1..85: note = Description of Unknown:cds_NC_011510.2_cds_YP_002302230.1_4 target sequence
RFRLAVEEPHFKLTRTRLDRLYGLPAADPNNGKEYYEIAGRFSLISLVPSNDDYQTPIANSVTVRQDLERQLGELREEFNALSQE

SEQ ID NO: 22152 - protein, 85 aa, unidentified
  REGION 1..85: note = Description of Unknown:cds_NC_011510.2_cds_YP_002302230.1_4 target sequence
IAMSQLIDLALLPLDMFSMFSGIKSTIDAAKSMATNVMKKFKKSGLANSVSTLTDSLSDAASSISRGSSIRSIGSSASAWTDVST

SEQ ID NO: 22153 - protein, 85 aa, unidentified
  REGION 1..85: note = Description of Unknown:cds_NC_011510.2_cds_YP_002302230.1_4 target sequence
QITDISSSVSSVSTQTSTISRRLRLKEMATQTEGMNFDDISAAVLKTKIDKSTQISPNTIPDIVTEASEKFIPNRAYRVINNDDV

SEQ ID NO: 22154 - protein, 85 aa, unidentified
  REGION 1..85: note = Description of Unknown:cds_NC_011510.2_cds_YP_002302230.1_4 target sequence
FEAGIDGKFFAYKVDTFEEIPFDVQKFADLVTDSPVISAIIDFKTLKNLNDNYGITKQQAFNLLRSDPRVLREFINQDNPIIRNR

SEQ ID NO: 22155 - protein, 84 aa, unidentified
  REGION 1..84: note = Description of Unknown:cds_NC_011510.2_cds_YP_002302230.1_4 target sequence
YKVDTFEEIPFDVQKFADLVTDSPVISAIIDFKTLKNLNDNYGITKQQAFNLLRSDPRVLREFINQDNPIIRNRIEQLIMQCRL

SEQ ID NO: 22156 - protein, 85 aa, unidentified
  REGION 1..85: note = Description of Unknown:cds_NC_011510.2_cds_YP_002302230.1_4 target sequence
KSQNVTINPGPFAQTGYAPVNWGPGEINDSTTVEPLLDGPYQPTTFNPPVDYWMLLAPTTPGVIVEGTNNTDRWLATILIEPNVQ

SEQ ID NO: 22157 - protein, 85 aa, unidentified
  REGION 1..85: note = Description of Unknown:cds_NC_011510.2_cds_YP_002302230.1_4 target sequence
SENRTYTIFGIQEQLTVSNTSQDQWKFIDVVKTTANGSIGQYGPLLSSPKLYAVMKHNEKLYTYEGQTPNARTAHYSTTNYDSVN

SEQ ID NO: 22158 - protein, 85 aa, unidentified
  REGION 1..85: note = Description of Unknown:cds_NC_011510.2_cds_YP_002302230.1_4 target sequence
MTAFCDFYIIPRSEESKCTEYINNGLPPIQNTRNVVPLSLTARDVIHYRAQANEDIVISKTSLWKEMQYNRDITIRFKFANTIIK

SEQ ID NO: 22159 - protein, 85 aa, unidentified
  REGION 1..85: note = Description of Unknown:cds_NC_011510.2_cds_YP_002302230.1_4 target sequence
SGGLGYKWSEISFKPANYQYTYTRDGEEVTAHTTCSVNGVNDFSFNGGYLPTDFVVSKFEVIKENSYVYIDYWDDSQAFRNVVYV

SEQ ID NO: 22160 - protein, 85 aa, unidentified
  REGION 1..85: note = Description of Unknown:cds_NC_011510.2_cds_YP_002302230.1_4 target sequence
RSLAANLNSVMCTGGSYNFSLPVGQWPVLTGGAVSLHSAGVTLSTQFTDFVSLNSLRFRFRLAVEEPHFKLTRTRLDRLYGLPAA

SEQ ID NO: 22161 - protein, 85 aa, unidentified
  REGION 1..85: note = Description of Unknown:cds_NC_011510.2_cds_YP_002302230.1_4 target sequence
DPNNGKEYYEIAGRFSLISLVPSNDDYQTPIANSVTVRQDLERQLGELREEFNALSQEIAMSQLIDLALLPLDMFSMFSGIKSTI

SEQ ID NO: 22162 - protein, 85 aa, unidentified
  REGION 1..85: note = Description of Unknown:cds_NC_011510.2_cds_YP_002302230.1_4 target sequence
DAAKSMATNVMKKFKKSGLANSVSTLTDSLSDAASSISRGSSIRSIGSSASAWTDVSTQITDISSSVSSVSTQTSTISRRLRLKE

SEQ ID NO: 22163 - protein, 85 aa, unidentified
  REGION 1..85: note = Description of Unknown:cds_NC_011510.2_cds_YP_002302230.1_4 target sequence
MATQTEGMNFDDISAAVLKTKIDKSTQISPNTIPDIVTEASEKFIPNRAYRVINNDDVFEAGIDGKFFAYKVDTFEEIPFDVQKF

SEQ ID NO: 22164 - protein, 85 aa, unidentified
  REGION 1..85: note = Description of Unknown:hvTR_P08393 target sequence
EPRPGASTRRPEGRPQREPAPDVWVFPCDRDLPDSSDSEAETEVGGRGDADHHDDDSASEADSTDTELFETGLLGPQGVDGGAVS

SEQ ID NO: 22165 - protein, 85 aa, unidentified
  REGION 1..85: note = Description of Unknown:hvTR_P08393 target sequence
GGSPPREEDPGSCGGAPPREDGGSDEGDVCAVCTDEIAPHLRCDTFPCMHRFCIPCMKTWMQLRNTCPLCNAKLVYLIVGVTPSG

SEQ ID NO: 22166 - protein, 85 aa, unidentified
  REGION 1..85: note = Description of Unknown:hvTR_P08393 target sequence
SFSTIPIVNDPQTRMEAEEAVRAGTAVDFIWTGNQRFAPRYLTLGGHTVRALSPTHPEPTTDEDDDDLDDADYVPPAPRRTPRAP

SEQ ID NO: 22167 - protein, 85 aa, unidentified
  REGION 1..85: note = Description of Unknown:hvTR_P08393 target sequence
PRRGAAAPPVTGGASHAAPQPAAARTAPPSAPIGPHGSSNTNTTTNSSGGGGSRQSRAAAPRGASGPSGGVGVGVGVVEAEAGRP

SEQ ID NO: 22168 - protein, 85 aa, unidentified
  REGION 1..85: note = Description of Unknown:hvTR_P08393 target sequence
RGRTGPLVNRPAPLANNRDPIVISDSPPASPHRPPAAPMPGSAPRPGPPASAAASGPARPRAAVAPCVRAPPPGPGPRAPAPGAE

SEQ ID NO: 22169 - protein, 85 aa, unidentified
  REGION 1..85: note = Description of Unknown:hvTR_P08393 target sequence
PAARPADARRVPQSHSSLAQAANQEQSLCRARATVARGSGGPGVEGGHGPSRGAAPSGAAPLPSAASVEQEAAVRPRKRRGSGQE

SEQ ID NO: 22170 - protein, 85 aa, unidentified
  REGION 1..85: note = Description of Unknown:hvTR_P08393 target sequence
NPSPQSTRPPLAPAGAKRAATHPPSDSGPGGRGQGGPGTPLTSSAASASSSSASSSSAPTPAGAASSAAGAASSSASASSGGAVG

SEQ ID NO: 22171 - protein, 85 aa, unidentified
  REGION 1..85: note = Description of Unknown:hvTR_P08393 target sequence
ALGGRQEETSLGPRAASGPRGPRKCARKTRHAETSGAVPAGGLTRYLPISGVSSVVALSPYVNKTITGDCLPILDMETGNIGAYV

SEQ ID NO: 22172 - protein, 85 aa, unidentified
  REGION 1..85: note = Description of Unknown:hvTR_P08393 target sequence
VLVDQTGNMATRLRAAVPGWSRRTLLPETAGNHVMPPEYPTAPASEWNSLWMTPVGNMLFDQGTLVGALDFRSLRSRHPWSGEQG

SEQ ID NO: 22173 - protein, 84 aa, unidentified
  REGION 1..84: note = Description of Unknown:hvTR_P08393 target sequence
TRLRAAVPGWSRRTLLPETAGNHVMPPEYPTAPASEWNSLWMTPVGNMLFDQGTLVGALDFRSLRSRHPWSGEQGASTRDEGKQ

SEQ ID NO: 22174 - protein, 85 aa, unidentified
  REGION 1..85: note = Description of Unknown:hvTR_P08393 target sequence
CDRDLPDSSDSEAETEVGGRGDADHHDDDSASEADSTDTELFETGLLGPQGVDGGAVSGGSPPREEDPGSCGGAPPREDGGSDEG

SEQ ID NO: 22175 - protein, 85 aa, unidentified
  REGION 1..85: note = Description of Unknown:hvTR_P08393 target sequence
DVCAVCTDEIAPHLRCDTFPCMHRFCIPCMKTWMQLRNTCPLCNAKLVYLIVGVTPSGSFSTIPIVNDPQTRMEAEEAVRAGTAV

SEQ ID NO: 22176 - protein, 85 aa, unidentified
  REGION 1..85: note = Description of Unknown:hvTR_P08393 target sequence
DFIWTGNQRFAPRYLTLGGHTVRALSPTHPEPTTDEDDDDLDDADYVPPAPRRTPRAPPRRGAAAPPVTGGASHAAPQPAAARTA

SEQ ID NO: 22177 - protein, 85 aa, unidentified
  REGION 1..85: note = Description of Unknown:hvTR_P08393 target sequence
PPSAPIGPHGSSNTNTTTNSSGGGGSRQSRAAAPRGASGPSGGVGVGVGVVEAEAGRPRGRTGPLVNRPAPLANNRDPIVISDSP

SEQ ID NO: 22178 - protein, 85 aa, unidentified
  REGION 1..85: note = Description of Unknown:hvTR_P08393 target sequence
PASPHRPPAAPMPGSAPRPGPPASAAASGPARPRAAVAPCVRAPPPGPGPRAPAPGAEPAARPADARRVPQSHSSLAQAANQEQS

SEQ ID NO: 22179 - protein, 85 aa, unidentified
  REGION 1..85: note = Description of Unknown:hvTR_P08393 target sequence
LCRARATVARGSGGPGVEGGHGPSRGAAPSGAAPLPSAASVEQEAAVRPRKRRGSGQENPSPQSTRPPLAPAGAKRAATHPPSDS

SEQ ID NO: 22180 - protein, 85 aa, unidentified
  REGION 1..85: note = Description of Unknown:hvTR_P08393 target sequence
GPGGRGQGGPGTPLTSSAASASSSSASSSSAPTPAGAASSAAGAASSSASASSGGAVGALGGRQEETSLGPRAASGPRGPRKCAR

SEQ ID NO: 22181 - protein, 85 aa, unidentified
  REGION 1..85: note = Description of Unknown:hvTR_P08393 target sequence
KTRHAETSGAVPAGGLTRYLPISGVSSVVALSPYVNKTITGDCLPILDMETGNIGAYVVLVDQTGNMATRLRAAVPGWSRRTLLP

SEQ ID NO: 22182 - protein, 85 aa, unidentified
  REGION 1..85: note = Description of Unknown:hvTR_P52363 target sequence
IDSISEETLIVKSYTVNHCAKNVPVFINSYDLTAEVAKNEDVRLARQVQISLEKIDEVIESIFSASGPSVENVKDQAKFALCRLL

SEQ ID NO: 22183 - protein, 85 aa, unidentified
  REGION 1..85: note = Description of Unknown:hvTR_P52363 target sequence
LGPVSIPCYCEEWDVNFYLTKCSYNCEGPVLYIYKNASQCCESTYRFSIMTNYHSTHIFRGLLSLQEWNSHLSNILCTCSNVTGD

SEQ ID NO: 22184 - protein, 85 aa, unidentified
  REGION 1..85: note = Description of Unknown:hvTR_P52363 target sequence
KYTATIFPNNASIYLEYYPYFLCYLCKHLSIIDIEQCTNELIAFLGPKTSQRIIIHYKLLFGFRSKPMNFTVSLLEQVFTLEIQK

SEQ ID NO: 22185 - protein, 85 aa, unidentified
  REGION 1..85: note = Description of Unknown:hvTR_P52363 target sequence
LYYSVSKHNSTTADFFNVITAKFAEDKYFVLRTFKLSAQITPGIQSFCSLKFKLQTLYLNLKIMKNTKLSISNSFYHGKTLYTLD

SEQ ID NO: 22186 - protein, 85 aa, unidentified
  REGION 1..85: note = Description of Unknown:hvTR_P52363 target sequence
EKQLVWRNLLLIYYGYNLKDNVKQTQEESLLSMHYIRILERLSLKSFREINQQFSFEIPSYQEKTLQFIPGGNDFAEITSVTHGE

SEQ ID NO: 22187 - protein, 85 aa, unidentified
  REGION 1..85: note = Description of Unknown:hvTR_P52363 target sequence
TTVNAFNTNRVMNVKAALSGEIHCVLHRIPKSMTHSFVMYKRTFKEPSLTVSTFISNDDFTTSSLNINIRGPYCDFLYALGVYRL

SEQ ID NO: 22188 - protein, 85 aa, unidentified
  REGION 1..85: note = Description of Unknown:hvTR_P52363 target sequence
HVNIQDFFLPAFVCNSNNSMDLHGLENQGIVRKRKKKVYWITNFPCMISNSEKVNVGWFKAGTGIIPKVSGTDLKNVLLKELISI

SEQ ID NO: 22189 - protein, 85 aa, unidentified
  REGION 1..85: note = Description of Unknown:hvTR_P52363 target sequence
GEIPNITFDMDLHALLTLLEKRNMHQVPFLIKQFFMFLRLGLLVGYGRKQERKVHHIMLFLIQKGFFDFSKNSVANSKIKHACAL

SEQ ID NO: 22190 - protein, 85 aa, unidentified
  REGION 1..85: note = Description of Unknown:hvTR_P52363 target sequence
VGSRLANNVPKILSKQKKMKLDHLGRNANALTVLRFIVENGYYKRKTIFRKLLKYLATTSFNAHVQTESNRLLNLMHNDSKTNFS

SEQ ID NO: 22191 - protein, 84 aa, unidentified
  REGION 1..84: note = Description of Unknown:hvTR_P52363 target sequence
KILSKQKKMKLDHLGRNANALTVLRFIVENGYYKRKTIFRKLLKYLATTSFNAHVQTESNRLLNLMHNDSKTNFSSLERLYTLR

SEQ ID NO: 22192 - protein, 85 aa, unidentified
  REGION 1..85: note = Description of Unknown:hvTR_P52363 target sequence
NSYDLTAEVAKNEDVRLARQVQISLEKIDEVIESIFSASGPSVENVKDQAKFALCRLLLGPVSIPCYCEEWDVNFYLTKCSYNCE

SEQ ID NO: 22193 - protein, 85 aa, unidentified
  REGION 1..85: note = Description of Unknown:hvTR_P52363 target sequence
GPVLYIYKNASQCCESTYRFSIMTNYHSTHIFRGLLSLQEWNSHLSNILCTCSNVTGDKYTATIFPNNASIYLEYYPYFLCYLCK

SEQ ID NO: 22194 - protein, 85 aa, unidentified
  REGION 1..85: note = Description of Unknown:hvTR_P52363 target sequence
HLSIIDIEQCTNELIAFLGPKTSQRIIIHYKLLFGFRSKPMNFTVSLLEQVFTLEIQKLYYSVSKHNSTTADFFNVITAKFAEDK

SEQ ID NO: 22195 - protein, 85 aa, unidentified
  REGION 1..85: note = Description of Unknown:hvTR_P52363 target sequence
YFVLRTFKLSAQITPGIQSFCSLKFKLQTLYLNLKIMKNTKLSISNSFYHGKTLYTLDEKQLVWRNLLLIYYGYNLKDNVKQTQE

SEQ ID NO: 22196 - protein, 85 aa, unidentified
  REGION 1..85: note = Description of Unknown:hvTR_P52363 target sequence
ESLLSMHYIRILERLSLKSFREINQQFSFEIPSYQEKTLQFIPGGNDFAEITSVTHGETTVNAFNTNRVMNVKAALSGEIHCVLH

SEQ ID NO: 22197 - protein, 85 aa, unidentified
  REGION 1..85: note = Description of Unknown:hvTR_P52363 target sequence
RIPKSMTHSFVMYKRTFKEPSLTVSTFISNDDFTTSSLNINIRGPYCDFLYALGVYRLHVNIQDFFLPAFVCNSNNSMDLHGLEN

SEQ ID NO: 22198 - protein, 85 aa, unidentified
  REGION 1..85: note = Description of Unknown:hvTR_P52363 target sequence
QGIVRKRKKKVYWITNFPCMISNSEKVNVGWFKAGTGIIPKVSGTDLKNVLLKELISIGEIPNITFDMDLHALLTLLEKRNMHQV

SEQ ID NO: 22199 - protein, 85 aa, unidentified
  REGION 1..85: note = Description of Unknown:hvTR_P52363 target sequence
PFLIKQFFMFLRLGLLVGYGRKQERKVHHIMLFLIQKGFFDFSKNSVANSKIKHACALVGSRLANNVPKILSKQKKMKLDHLGRN

SEQ ID NO: 22200 - protein, 85 aa, unidentified
  REGION 1..85: note = Description of Unknown:cds_NC_024711.1_cds_YP_009052497.1_16 target sequence
INCIAYDVEVLRNFFSVTFVSINSYLKVFKDCVNADNKAIPLVQKLSVEEIKARLKTVEKYKFYITDINDSQLLSMIGYINKTRC

SEQ ID NO: 22201 - protein, 85 aa, unidentified
  REGION 1..85: note = Description of Unknown:cds_NC_024711.1_cds_YP_009052497.1_16 target sequence
YKDSNGNIIRTDLYGFNNFNYDNLMIAALLSFYMRTNSTKELINKLYETSKTIISSQDDKDKFKTDFYLNSLRKYKLPFTGIDVM

SEQ ID NO: 22202 - protein, 85 aa, unidentified
  REGION 1..85: note = Description of Unknown:cds_NC_024711.1_cds_YP_009052497.1_16 target sequence
RIFALNKASVVVDSKTGERKPVPKGLKQTSINLQWYELLEYELPDINEKEAELYDEIPSLKGMSISQLNKLVDKWDRFILDEYIE

SEQ ID NO: 22203 - protein, 85 aa, unidentified
  REGION 1..85: note = Description of Unknown:cds_NC_024711.1_cds_YP_009052497.1_16 target sequence
PMMYYNLNDVFIVAEIVRLYPEEIKSRYAISKAYDVDVLNSSRSKTADILFEKFYSKFSGLAPEQWKGKKTERTAMSFKKVIFPF

SEQ ID NO: 22204 - protein, 85 aa, unidentified
  REGION 1..85: note = Description of Unknown:cds_NC_024711.1_cds_YP_009052497.1_16 target sequence
IKFKTKPMQDFLDECLKTTIYRVNKDAFSKEVKIGNVTYTVATGGLHSQDNPVELWSSGRELFPSSTGGQHDVLGNDDYVYIHAD

SEQ ID NO: 22205 - protein, 85 aa, unidentified
  REGION 1..85: note = Description of Unknown:cds_NC_024711.1_cds_YP_009052497.1_16 target sequence
INSMYPSIIAAHKVAPAHLDTNAFCNLIGWLKNKRVEVKHSDEDTVDGIDRDTLALVLKIVINSVYGKLGFENGNLYDRLAVLKT

SEQ ID NO: 22206 - protein, 85 aa, unidentified
  REGION 1..85: note = Description of Unknown:cds_NC_024711.1_cds_YP_009052497.1_16 target sequence
TINGQLMMLMLVEELELNNIHVLSANTDGIVIKLYKRDIDVYNRIKDEWEQTTKLKFDTDYYHCLVSRDINNYLSQFRVIKNGIH

SEQ ID NO: 22207 - protein, 85 aa, unidentified
  REGION 1..85: note = Description of Unknown:cds_NC_024711.1_cds_YP_009052497.1_16 target sequence
KLKLESKGALNPMMYSLDLTKGYSMPIVAQAIENYFLKNKPVMDTLQEATNILDFCLTQNVGRQFHVEETKIENGQVTHVVCQRY

SEQ ID NO: 22208 - protein, 85 aa, unidentified
  REGION 1..85: note = Description of Unknown:cds_NC_024711.1_cds_YP_009052497.1_16 target sequence
VRFYVSNRGYIIEKVHNDNGSRSRMAAGSVVTVINSLDDKDISLRDINFKFYYQEAMKIINPIKLKISPKGKGKSKIKKYSGMYN

SEQ ID NO: 22209 - protein, 84 aa, unidentified
  REGION 1..84: note = Description of Unknown:cds_NC_024711.1_cds_YP_009052497.1_16 target sequence
IIEKVHNDNGSRSRMAAGSVVTVINSLDDKDISLRDINFKFYYQEAMKIINPIKLKISPKGKGKSKIKKYSGMYNPIFNEDDFG

SEQ ID NO: 22210 - protein, 85 aa, unidentified
  REGION 1..85: note = Description of Unknown:cds_NC_024711.1_cds_YP_009052497.1_16 target sequence
VFKDCVNADNKAIPLVQKLSVEEIKARLKTVEKYKFYITDINDSQLLSMIGYINKTRCYKDSNGNIIRTDLYGFNNFNYDNLMIA

SEQ ID NO: 22211 - protein, 85 aa, unidentified
  REGION 1..85: note = Description of Unknown:cds_NC_024711.1_cds_YP_009052497.1_16 target sequence
ALLSFYMRTNSTKELINKLYETSKTIISSQDDKDKFKTDFYLNSLRKYKLPFTGIDVMRIFALNKASVVVDSKTGERKPVPKGLK

SEQ ID NO: 22212 - protein, 85 aa, unidentified
  REGION 1..85: note = Description of Unknown:cds_NC_024711.1_cds_YP_009052497.1_16 target sequence
QTSINLQWYELLEYELPDINEKEAELYDEIPSLKGMSISQLNKLVDKWDRFILDEYIEPMMYYNLNDVFIVAEIVRLYPEEIKSR

SEQ ID NO: 22213 - protein, 85 aa, unidentified
  REGION 1..85: note = Description of Unknown:cds_NC_024711.1_cds_YP_009052497.1_16 target sequence
YAISKAYDVDVLNSSRSKTADILFEKFYSKFSGLAPEQWKGKKTERTAMSFKKVIFPFIKFKTKPMQDFLDECLKTTIYRVNKDA

SEQ ID NO: 22214 - protein, 85 aa, unidentified
  REGION 1..85: note = Description of Unknown:cds_NC_024711.1_cds_YP_009052497.1_16 target sequence
FSKEVKIGNVTYTVATGGLHSQDNPVELWSSGRELFPSSTGGQHDVLGNDDYVYIHADINSMYPSIIAAHKVAPAHLDTNAFCNL

SEQ ID NO: 22215 - protein, 85 aa, unidentified
  REGION 1..85: note = Description of Unknown:cds_NC_024711.1_cds_YP_009052497.1_16 target sequence
IGWLKNKRVEVKHSDEDTVDGIDRDTLALVLKIVINSVYGKLGFENGNLYDRLAVLKTTINGQLMMLMLVEELELNNIHVLSANT

SEQ ID NO: 22216 - protein, 85 aa, unidentified
  REGION 1..85: note = Description of Unknown:cds_NC_024711.1_cds_YP_009052497.1_16 target sequence
DGIVIKLYKRDIDVYNRIKDEWEQTTKLKFDTDYYHCLVSRDINNYLSQFRVIKNGIHKLKLESKGALNPMMYSLDLTKGYSMPI

SEQ ID NO: 22217 - protein, 85 aa, unidentified
  REGION 1..85: note = Description of Unknown:cds_NC_024711.1_cds_YP_009052497.1_16 target sequence
VAQAIENYFLKNKPVMDTLQEATNILDFCLTQNVGRQFHVEETKIENGQVTHVVCQRYVRFYVSNRGYIIEKVHNDNGSRSRMAA

SEQ ID NO: 22218 - protein, 85 aa, unidentified
  REGION 1..85: note = Description of Unknown:cds_NZ_WFIY01000004.1_cds_WP_155864014.1_1942 target sequence
RINEKIVNTIRLSFIASSILVGFIILYPMINDISLFSSNSIIFIVTESLIIYALAMSIKPCLKSIGIALVLSNLLIPSLLQQTFS

SEQ ID NO: 22219 - protein, 85 aa, unidentified
  REGION 1..85: note = Description of Unknown:cds_NZ_WFIY01000004.1_cds_WP_155864014.1_1942 target sequence
SMLSNISISIFFYITFIILTLIMLLIALLFGGTKLQIIYLIITAFILLPILQYSIFNIRCYSCIFKCLPYSILFYNHMFLFYTVS

SEQ ID NO: 22220 - protein, 85 aa, unidentified
  REGION 1..85: note = Description of Unknown:cds_NZ_WFIY01000004.1_cds_WP_155864014.1_1942 target sequence
GILGFVLSASKKAERLVFDAVNNVALPYFLSALLPLIFLLLILNNVSTLKEIIYYYIVNHFATYLILVMIAVSVFGSIIFRGQRD

SEQ ID NO: 22221 - protein, 85 aa, unidentified
  REGION 1..85: note = Description of Unknown:cds_NZ_WFIY01000004.1_cds_WP_155864014.1_1942 target sequence
TEFAIVISLASLGLAWFSFIYSPYYTLVFLILGASVIPISLPNPQLIENKLFSAINSNSYNKAEKYLDTLLKLNYTYTKIFCDAA

SEQ ID NO: 22222 - protein, 85 aa, unidentified
  REGION 1..85: note = Description of Unknown:cds_NZ_WFIY01000004.1_cds_WP_155864014.1_1942 target sequence
GKFECNSMSWIYSKFAGKIIYNNCNNLSNVVNCIISKNIIPSDANVLLDVLVLKDKDSAEKFASYLLTKNLPQPIKEKAKLTLAS

SEQ ID NO: 22223 - protein, 85 aa, unidentified
  REGION 1..85: note = Description of Unknown:cds_NZ_WFIY01000004.1_cds_WP_155864014.1_1942 target sequence
IMGIASTTNPKQLPPLESWDPNIWIGSNLYGYKITKVLGSGGSSYVLVGERNSQQYAIKVAKISKSNVNDILNVFGNISKESSNL

SEQ ID NO: 22224 - protein, 85 aa, unidentified
  REGION 1..85: note = Description of Unknown:cds_NZ_WFIY01000004.1_cds_WP_155864014.1_1942 target sequence
QSISEKSPNIVRIFGFFADLNSIMDIVNGKSEVYYFTPPAIVMELMEGGTVEDLLKNKAIVLSNYWKKVVALISLNIANALKIVH

SEQ ID NO: 22225 - protein, 85 aa, unidentified
  REGION 1..85: note = Description of Unknown:cds_NZ_WFIY01000004.1_cds_WP_155864014.1_1942 target sequence
QEGYVHLDVKPSNIFFNKYPGKTAEEIYENIRNGVISVKLGDLGSARKIGERVLEYTPQYCSIDQVEAMLTNKGADVRMDVYALG

SEQ ID NO: 22226 - protein, 85 aa, unidentified
  REGION 1..85: note = Description of Unknown:cds_NZ_WFIY01000004.1_cds_WP_155864014.1_1942 target sequence
ATIYKMLTQTQFNPPKVSELMDKAVQAYVKNQPYAIYLEEARKELEIFHQRFSLPAEYAEFDPLIKTMTSPDILKRPNIDYVIME

SEQ ID NO: 22227 - protein, 84 aa, unidentified
  REGION 1..84: note = Description of Unknown:cds_NZ_WFIY01000004.1_cds_WP_155864014.1_1942 target sequence
TQFNPPKVSELMDKAVQAYVKNQPYAIYLEEARKELEIFHQRFSLPAEYAEFDPLIKTMTSPDILKRPNIDYVIMELNKLNITS

SEQ ID NO: 22228 - protein, 85 aa, unidentified
  REGION 1..85: note = Description of Unknown:cds_NZ_WFIY01000004.1_cds_WP_155864014.1_1942 target sequence
PMINDISLFSSNSIIFIVTESLIIYALAMSIKPCLKSIGIALVLSNLLIPSLLQQTFSSMLSNISISIFFYITFIILTLIMLLIA

SEQ ID NO: 22229 - protein, 85 aa, unidentified
  REGION 1..85: note = Description of Unknown:cds_NZ_WFIY01000004.1_cds_WP_155864014.1_1942 target sequence
LLFGGTKLQIIYLIITAFILLPILQYSIFNIRCYSCIFKCLPYSILFYNHMFLFYTVSGILGFVLSASKKAERLVFDAVNNVALP

SEQ ID NO: 22230 - protein, 85 aa, unidentified
  REGION 1..85: note = Description of Unknown:cds_NZ_WFIY01000004.1_cds_WP_155864014.1_1942 target sequence
YFLSALLPLIFLLLILNNVSTLKEIIYYYIVNHFATYLILVMIAVSVFGSIIFRGQRDTEFAIVISLASLGLAWFSFIYSPYYTL

SEQ ID NO: 22231 - protein, 85 aa, unidentified
  REGION 1..85: note = Description of Unknown:cds_NZ_WFIY01000004.1_cds_WP_155864014.1_1942 target sequence
VFLILGASVIPISLPNPQLIENKLFSAINSNSYNKAEKYLDTLLKLNYTYTKIFCDAAGKFECNSMSWIYSKFAGKIIYNNCNNL

SEQ ID NO: 22232 - protein, 85 aa, unidentified
  REGION 1..85: note = Description of Unknown:cds_NZ_WFIY01000004.1_cds_WP_155864014.1_1942 target sequence
SNVVNCIISKNIIPSDANVLLDVLVLKDKDSAEKFASYLLTKNLPQPIKEKAKLTLASIMGIASTTNPKQLPPLESWDPNIWIGS

SEQ ID NO: 22233 - protein, 85 aa, unidentified
  REGION 1..85: note = Description of Unknown:cds_NZ_WFIY01000004.1_cds_WP_155864014.1_1942 target sequence
NLYGYKITKVLGSGGSSYVLVGERNSQQYAIKVAKISKSNVNDILNVFGNISKESSNLQSISEKSPNIVRIFGFFADLNSIMDIV

SEQ ID NO: 22234 - protein, 85 aa, unidentified
  REGION 1..85: note = Description of Unknown:cds_NZ_WFIY01000004.1_cds_WP_155864014.1_1942 target sequence
NGKSEVYYFTPPAIVMELMEGGTVEDLLKNKAIVLSNYWKKVVALISLNIANALKIVHQEGYVHLDVKPSNIFFNKYPGKTAEEI

SEQ ID NO: 22235 - protein, 85 aa, unidentified
  REGION 1..85: note = Description of Unknown:cds_NZ_WFIY01000004.1_cds_WP_155864014.1_1942 target sequence
YENIRNGVISVKLGDLGSARKIGERVLEYTPQYCSIDQVEAMLTNKGADVRMDVYALGATIYKMLTQTQFNPPKVSELMDKAVQA

SEQ ID NO: 22236 - protein, 85 aa, unidentified
  REGION 1..85: note = Description of Unknown:hvTR_P24437 target sequence
QHTGNCETLIVNSCFGSTCARSIPVFIDSCDLTAEVSRDEETRLARSMPVVLEKIESIIEKIFQTSGPNIVHDKDRAKIALCRLL

SEQ ID NO: 22237 - protein, 85 aa, unidentified
  REGION 1..85: note = Description of Unknown:hvTR_P24437 target sequence
LGPVAVPCFCEEWDTNDYLSKSGCKCIGPILYIHTSRCRCSDIPVFKFSIMKDYYASHVFRGLLSLKEWNTHLPNVLCTCELSMS

SEQ ID NO: 22238 - protein, 85 aa, unidentified
  REGION 1..85: note = Description of Unknown:hvTR_P24437 target sequence
DRYVATVYPKQNSIYLEYYPYFLCYLCRHLTVIEIEQCTNDLISLLGPKVAQRVIIHFKLLFGFRHKPHIGTVDSWFWENFFMLE

SEQ ID NO: 22239 - protein, 85 aa, unidentified
  REGION 1..85: note = Description of Unknown:hvTR_P24437 target sequence
LHKLWLTVVKHNRVTTDFFNVVYEKIQNYKQYAIKTLRMSSKAVPAIQRLCLAKFKQQLLYLNIKVTVKKNKREMCLNGFVYGKT

SEQ ID NO: 22240 - protein, 85 aa, unidentified
  REGION 1..85: note = Description of Unknown:hvTR_P24437 target sequence
LYVVESSQLIFRNLLLLYYDYSLPDECKTNEENVLTAHYIRVISRLSFKRSRSALPPGVRPDFIFVAQQPKRKELPNVPGGIDFA

SEQ ID NO: 22241 - protein, 85 aa, unidentified
  REGION 1..85: note = Description of Unknown:hvTR_P24437 target sequence
EITSVRHGAVTLNAFNTNKVMNLKATISKRANFVYHRIPKTMTHSFVMYKHTFKEPAFTVSTFVSNDDLDMSSLNINIRGPYCDF

SEQ ID NO: 22242 - protein, 85 aa, unidentified
  REGION 1..85: note = Description of Unknown:hvTR_P24437 target sequence
LYALGVYKMHVSIRDLFLPAFVCNSNNSVDLQGLENQDVVRNRKKKVYWITNFPCMISNANKVNVGWFKAGTGIIPRVSGEDLQN

SEQ ID NO: 22243 - protein, 85 aa, unidentified
  REGION 1..85: note = Description of Unknown:hvTR_P24437 target sequence
VLLQELNNVREIPGLVFDMDLHQLLVLLEQRNLHQIPFLVKQFLIFLRLGLLMGYGHSRRNKVHDIMLHLISNGLFDFNKNSVAN

SEQ ID NO: 22244 - protein, 85 aa, unidentified
  REGION 1..85: note = Description of Unknown:hvTR_P24437 target sequence
TKIKHGCALVGTRLANNVPKIIARQKKMKLDHMGRNANSLAVLRFIVKSGEQKNKTVFIKLLEYLAETSTAINTRNEVARLLQTL

SEQ ID NO: 22245 - protein, 84 aa, unidentified
  REGION 1..84: note = Description of Unknown:hvTR_P24437 target sequence
ALVGTRLANNVPKIIARQKKMKLDHMGRNANSLAVLRFIVKSGEQKNKTVFIKLLEYLAETSTAINTRNEVARLLQTLTAKVKT

SEQ ID NO: 22246 - protein, 85 aa, unidentified
  REGION 1..85: note = Description of Unknown:hvTR_P24437 target sequence
DSCDLTAEVSRDEETRLARSMPVVLEKIESIIEKIFQTSGPNIVHDKDRAKIALCRLLLGPVAVPCFCEEWDTNDYLSKSGCKCI

SEQ ID NO: 22247 - protein, 85 aa, unidentified
  REGION 1..85: note = Description of Unknown:hvTR_P24437 target sequence
GPILYIHTSRCRCSDIPVFKFSIMKDYYASHVFRGLLSLKEWNTHLPNVLCTCELSMSDRYVATVYPKQNSIYLEYYPYFLCYLC

SEQ ID NO: 22248 - protein, 85 aa, unidentified
  REGION 1..85: note = Description of Unknown:hvTR_P24437 target sequence
RHLTVIEIEQCTNDLISLLGPKVAQRVIIHFKLLFGFRHKPHIGTVDSWFWENFFMLELHKLWLTVVKHNRVTTDFFNVVYEKIQ

SEQ ID NO: 22249 - protein, 85 aa, unidentified
  REGION 1..85: note = Description of Unknown:hvTR_P24437 target sequence
NYKQYAIKTLRMSSKAVPAIQRLCLAKFKQQLLYLNIKVTVKKNKREMCLNGFVYGKTLYVVESSQLIFRNLLLLYYDYSLPDEC

SEQ ID NO: 22250 - protein, 85 aa, unidentified
  REGION 1..85: note = Description of Unknown:hvTR_P24437 target sequence
KTNEENVLTAHYIRVISRLSFKRSRSALPPGVRPDFIFVAQQPKRKELPNVPGGIDFAEITSVRHGAVTLNAFNTNKVMNLKATI

SEQ ID NO: 22251 - protein, 85 aa, unidentified
  REGION 1..85: note = Description of Unknown:hvTR_P24437 target sequence
SKRANFVYHRIPKTMTHSFVMYKHTFKEPAFTVSTFVSNDDLDMSSLNINIRGPYCDFLYALGVYKMHVSIRDLFLPAFVCNSNN

SEQ ID NO: 22252 - protein, 85 aa, unidentified
  REGION 1..85: note = Description of Unknown:hvTR_P24437 target sequence
SVDLQGLENQDVVRNRKKKVYWITNFPCMISNANKVNVGWFKAGTGIIPRVSGEDLQNVLLQELNNVREIPGLVFDMDLHQLLVL

SEQ ID NO: 22253 - protein, 85 aa, unidentified
  REGION 1..85: note = Description of Unknown:hvTR_P24437 target sequence
LEQRNLHQIPFLVKQFLIFLRLGLLMGYGHSRRNKVHDIMLHLISNGLFDFNKNSVANTKIKHGCALVGTRLANNVPKIIARQKK

SEQ ID NO: 22254 - protein, 85 aa, unidentified
  REGION 1..85: note = Description of Unknown:hvTR_Q9QJ25 target sequence
QHTGNCETLIVNSCFGSTCARSIPVFIDSCDLTAEVSRDEETRLARSVPVVLEKIESIIEKIFQTSGPNIVHDKDRAKIALCRLL

SEQ ID NO: 22255 - protein, 85 aa, unidentified
  REGION 1..85: note = Description of Unknown:hvTR_Q9QJ25 target sequence
LGPVAVPCFCEEWDTNDYLSKSGCKCLGPILYIHTSRCRCSDIPVFKFSIMKDYYASHVFRGLLSLKEWNTHLPNVLCTCELSMS

SEQ ID NO: 22256 - protein, 85 aa, unidentified
  REGION 1..85: note = Description of Unknown:hvTR_Q9QJ25 target sequence
DRYVATVFPKQNSIYLEYYPYFLCYLCRYLTVIEIEQCTNDLISLLGPKVAQRVIIHFKLLFGFRHKPHMGTVDSWFWENFFMLE

SEQ ID NO: 22257 - protein, 85 aa, unidentified
  REGION 1..85: note = Description of Unknown:hvTR_Q9QJ25 target sequence
LHKLWLTVVKHNRVTTDFFNVVYEKIQNYKQYAIKTLRMSSKAVPAIQRFCLAKFKQQLLYLNIKVTVKKNKRELCLNGFVYGKT

SEQ ID NO: 22258 - protein, 85 aa, unidentified
  REGION 1..85: note = Description of Unknown:hvTR_Q9QJ25 target sequence
LYVVESSQLIFRNLLLLYYDYSLPDECKTKEENVLTTHYIRVISRLSFKQSRSAVPPGVKPDFTFVAQLPKRKELPNVPGGIDFA

SEQ ID NO: 22259 - protein, 85 aa, unidentified
  REGION 1..85: note = Description of Unknown:hvTR_Q9QJ25 target sequence
EITSVRHGAVILNAFNTNKVMNLKATISKRANFVYHRIPKTMTHSFVMYKHTFKEPAFTVSTFVSNDDLDMSSLNINIRGPYCDF

SEQ ID NO: 22260 - protein, 85 aa, unidentified
  REGION 1..85: note = Description of Unknown:hvTR_Q9QJ25 target sequence
LYALGVYKMHVSIQDLFLPAFVCNSNNSVDLQGLEDQDVVRNRKKKVYWITNFPCMISNANKVNVGWFKAGTGIIPRVSGKDLQN

SEQ ID NO: 22261 - protein, 85 aa, unidentified
  REGION 1..85: note = Description of Unknown:hvTR_Q9QJ25 target sequence
VLLQELNNVREIPGLVFDMDLHQLLVLLEQRNLHQIPFLVKQFLIFLRLGLLMGYGNSRRNKVHDIMLHLISNGLFDFNKNSVAN

SEQ ID NO: 22262 - protein, 85 aa, unidentified
  REGION 1..85: note = Description of Unknown:hvTR_Q9QJ25 target sequence
TKIKHGCALVGTRLANNVPKIIARQKKMKLDHMGRNANSLAVLRFIVKSGEHKNKTVFIKLLEYLAETSTAINTRNEVARLLLTL

SEQ ID NO: 22263 - protein, 84 aa, unidentified
  REGION 1..84: note = Description of Unknown:hvTR_Q9QJ25 target sequence
ALVGTRLANNVPKIIARQKKMKLDHMGRNANSLAVLRFIVKSGEHKNKTVFIKLLEYLAETSTAINTRNEVARLLLTLTTNMKT

SEQ ID NO: 22264 - protein, 85 aa, unidentified
  REGION 1..85: note = Description of Unknown:hvTR_Q9QJ25 target sequence
DSCDLTAEVSRDEETRLARSVPVVLEKIESIIEKIFQTSGPNIVHDKDRAKIALCRLLLGPVAVPCFCEEWDTNDYLSKSGCKCL

SEQ ID NO: 22265 - protein, 85 aa, unidentified
  REGION 1..85: note = Description of Unknown:hvTR_Q9QJ25 target sequence
GPILYIHTSRCRCSDIPVFKFSIMKDYYASHVFRGLLSLKEWNTHLPNVLCTCELSMSDRYVATVFPKQNSIYLEYYPYFLCYLC

SEQ ID NO: 22266 - protein, 85 aa, unidentified
  REGION 1..85: note = Description of Unknown:hvTR_Q9QJ25 target sequence
RYLTVIEIEQCTNDLISLLGPKVAQRVIIHFKLLFGFRHKPHMGTVDSWFWENFFMLELHKLWLTVVKHNRVTTDFFNVVYEKIQ

SEQ ID NO: 22267 - protein, 85 aa, unidentified
  REGION 1..85: note = Description of Unknown:hvTR_Q9QJ25 target sequence
NYKQYAIKTLRMSSKAVPAIQRFCLAKFKQQLLYLNIKVTVKKNKRELCLNGFVYGKTLYVVESSQLIFRNLLLLYYDYSLPDEC

SEQ ID NO: 22268 - protein, 85 aa, unidentified
  REGION 1..85: note = Description of Unknown:hvTR_Q9QJ25 target sequence
KTKEENVLTTHYIRVISRLSFKQSRSAVPPGVKPDFTFVAQLPKRKELPNVPGGIDFAEITSVRHGAVILNAFNTNKVMNLKATI

SEQ ID NO: 22269 - protein, 85 aa, unidentified
  REGION 1..85: note = Description of Unknown:hvTR_Q9QJ25 target sequence
SKRANFVYHRIPKTMTHSFVMYKHTFKEPAFTVSTFVSNDDLDMSSLNINIRGPYCDFLYALGVYKMHVSIQDLFLPAFVCNSNN

SEQ ID NO: 22270 - protein, 85 aa, unidentified
  REGION 1..85: note = Description of Unknown:hvTR_Q9QJ25 target sequence
SVDLQGLEDQDVVRNRKKKVYWITNFPCMISNANKVNVGWFKAGTGIIPRVSGKDLQNVLLQELNNVREIPGLVFDMDLHQLLVL

SEQ ID NO: 22271 - protein, 85 aa, unidentified
  REGION 1..85: note = Description of Unknown:hvTR_Q9QJ25 target sequence
LEQRNLHQIPFLVKQFLIFLRLGLLMGYGNSRRNKVHDIMLHLISNGLFDFNKNSVANTKIKHGCALVGTRLANNVPKIIARQKK

SEQ ID NO: 22272 - protein, 85 aa, unidentified
  REGION 1..85: note = Description of Unknown:hvTR_Q69567.3 target sequence
IHVFACDKFDGLVKKVASESRNLLLDLRANMNNDIIKAVKDIFSKATVTLDCQKLNQGATMLMMMAHNKEMSNPDISSKDFCEKI

SEQ ID NO: 22273 - protein, 85 aa, unidentified
  REGION 1..85: note = Description of Unknown:hvTR_Q69567.3 target sequence
NTLKQTLLEGKNEIVETNAKNMQILQTFAIKQMNQIFMDGCDKAFLKLNVNCKNLITAAKNLANTILQSIVICSNEFSWQHLKLL

SEQ ID NO: 22274 - protein, 85 aa, unidentified
  REGION 1..85: note = Description of Unknown:hvTR_Q69567.3 target sequence
RRGFKVTMLNMITQACECLESDYDDTGLIKPLTPLQIMDGYINMNKNRQSSICDGNTDPSDSMILDLADFDDHGRYSEESSIESI

SEQ ID NO: 22275 - protein, 85 aa, unidentified
  REGION 1..85: note = Description of Unknown:hvTR_Q69567.3 target sequence
HEDDDNKMYPCTPSPEVPGKSKYVGTFTENSRQSGDEQTNPNCVGTASVTDLGGPDNLNSISGLQSCKNMLLERLLDTQCDSVVE

SEQ ID NO: 22276 - protein, 85 aa, unidentified
  REGION 1..85: note = Description of Unknown:hvTR_Q69567.3 target sequence
GTEQDGSYGNTLISEMMMFGYETDHSAPYESESDNNDEIDYIANSDSAARTNNIHMNSTDENTPFSNSICSPPEVTPSKKNVKPK

SEQ ID NO: 22277 - protein, 85 aa, unidentified
  REGION 1..85: note = Description of Unknown:hvTR_Q69567.3 target sequence
SMTPGSKPKKRVAKRKHVSSKSPKNKKIKTDQLPKAADVIVISSESEDEEDGDNIIGNSILIKAIKSESDSESSSESNDCTSEHK

SEQ ID NO: 22278 - protein, 85 aa, unidentified
  REGION 1..85: note = Description of Unknown:hvTR_Q69567.3 target sequence
QLHLSDYDEVTNNGHCPSYGFPTPVFTIPIRSMQGTGGIKSKFIPKKNWIWYMKKTHQVDNCPIHNSENVDAKDDSDGTEAKHCF

SEQ ID NO: 22279 - protein, 85 aa, unidentified
  REGION 1..85: note = Description of Unknown:hvTR_Q69567.3 target sequence
MNHFVPIKTDDEDYDKNNVSYIYNKIQNSKIDSGDIIPTKKLIIDMVMDNFMDLNDIIKQGITKHCQDLCNKYNVVTPTTCEDDL

SEQ ID NO: 22280 - protein, 85 aa, unidentified
  REGION 1..85: note = Description of Unknown:hvTR_Q69567.3 target sequence
NMTNSQTFATTATQVFDPPVTGNNSSILNIINDTTSQNDENRCTEGTSNSNEKCTNISDCNSDGTEAFKLDGYPSDYDPFVENAQ

SEQ ID NO: 22281 - protein, 85 aa, unidentified
  REGION 1..85: note = Description of Unknown:hvTR_Q69567.3 target sequence
RANMNNDIIKAVKDIFSKATVTLDCQKLNQGATMLMMMAHNKEMSNPDISSKDFCEKINTLKQTLLEGKNEIVETNAKNMQILQT

SEQ ID NO: 22282 - protein, 85 aa, unidentified
  REGION 1..85: note = Description of Unknown:hvTR_Q69567.3 target sequence
FAIKQMNQIFMDGCDKAFLKLNVNCKNLITAAKNLANTILQSIVICSNEFSWQHLKLLRRGFKVTMLNMITQACECLESDYDDTG

SEQ ID NO: 22283 - protein, 85 aa, unidentified
  REGION 1..85: note = Description of Unknown:hvTR_Q69567.3 target sequence
LIKPLTPLQIMDGYINMNKNRQSSICDGNTDPSDSMILDLADFDDHGRYSEESSIESIHEDDDNKMYPCTPSPEVPGKSKYVGTF

SEQ ID NO: 22284 - protein, 85 aa, unidentified
  REGION 1..85: note = Description of Unknown:hvTR_Q69567.3 target sequence
TENSRQSGDEQTNPNCVGTASVTDLGGPDNLNSISGLQSCKNMLLERLLDTQCDSVVEGTEQDGSYGNTLISEMMMFGYETDHSA

SEQ ID NO: 22285 - protein, 85 aa, unidentified
  REGION 1..85: note = Description of Unknown:hvTR_Q69567.3 target sequence
PYESESDNNDEIDYIANSDSAARTNNIHMNSTDENTPFSNSICSPPEVTPSKKNVKPKSMTPGSKPKKRVAKRKHVSSKSPKNKK

SEQ ID NO: 22286 - protein, 85 aa, unidentified
  REGION 1..85: note = Description of Unknown:hvTR_Q69567.3 target sequence
IKTDQLPKAADVIVISSESEDEEDGDNIIGNSILIKAIKSESDSESSSESNDCTSEHKQLHLSDYDEVTNNGHCPSYGFPTPVFT

SEQ ID NO: 22287 - protein, 85 aa, unidentified
  REGION 1..85: note = Description of Unknown:hvTR_Q69567.3 target sequence
IPIRSMQGTGGIKSKFIPKKNWIWYMKKTHQVDNCPIHNSENVDAKDDSDGTEAKHCFMNHFVPIKTDDEDYDKNNVSYIYNKIQ

SEQ ID NO: 22288 - protein, 85 aa, unidentified
  REGION 1..85: note = Description of Unknown:hvTR_Q69567.3 target sequence
NSKIDSGDIIPTKKLIIDMVMDNFMDLNDIIKQGITKHCQDLCNKYNVVTPTTCEDDLNMTNSQTFATTATQVFDPPVTGNNSSI

SEQ ID NO: 22289 - protein, 85 aa, unidentified
  REGION 1..85: note = Description of Unknown:cds_NZ_WFIY01000004.1_cds_WP_155863073.1_982 target sequence
LATSSSAEEPRKRELILKVVEARQKDVGRGKVRIDLDLLSQIDVSPGDVVEIEGQRKTAAIAWPLSADDYTGEKDIIRMDGITRK

SEQ ID NO: 22290 - protein, 85 aa, unidentified
  REGION 1..85: note = Description of Unknown:cds_NZ_WFIY01000004.1_cds_WP_155863073.1_982 target sequence
NAGVSIGDKVIVRKATVKPATSVKLAPSNFSITVDPGFVAYVKKKLKEFPLVEGDTVLIPVLGQAIPFTVIQVRPAGIVMVTDET

SEQ ID NO: 22291 - protein, 85 aa, unidentified
  REGION 1..85: note = Description of Unknown:cds_NZ_WFIY01000004.1_cds_WP_155863073.1_982 target sequence
SINISDKPVEQTRYPRVTYEDIGGLKNIIQKVRELVELPLRHPELFKRLGIEPPKGVLLYGPPGTGKTLLAKAVANETDAYFTSI

SEQ ID NO: 22292 - protein, 85 aa, unidentified
  REGION 1..85: note = Description of Unknown:cds_NZ_WFIY01000004.1_cds_WP_155863073.1_982 target sequence
NGPEIMSKFYGESEQRLREIFEDAKKHAPAIIFIDEIDAIAPKRDEVIGEVERRVVAQLLTLMDGLESRGNVIVIAATNRPNAVD

SEQ ID NO: 22293 - protein, 85 aa, unidentified
  REGION 1..85: note = Description of Unknown:cds_NZ_WFIY01000004.1_cds_WP_155863073.1_982 target sequence
PALRRPGRFDREIEIPLPDKQGRLEILQIHTRNMPLAKDVDLEKLAEVTHGYTGADLAALVREAAMNALRRYLPKIDITLDKIPP

SEQ ID NO: 22294 - protein, 85 aa, unidentified
  REGION 1..85: note = Description of Unknown:cds_NZ_WFIY01000004.1_cds_WP_155863073.1_982 target sequence
EILESMEVKMEDFMNALKEIVPSGMREIYIEVPEVRWDDIGGLGDIKEELREVAEYPLKFQEYYEMTGIEPPKGILLFGPPGTGK

SEQ ID NO: 22295 - protein, 85 aa, unidentified
  REGION 1..85: note = Description of Unknown:cds_NZ_WFIY01000004.1_cds_WP_155863073.1_982 target sequence
TMLAKAVATESGANFIAVRGPEVLSKWVGESERAIREIFRKARMYAPTVIFFDEIDAIAPMRGMSPDTGVTERIVNQLLAEMDGI

SEQ ID NO: 22296 - protein, 85 aa, unidentified
  REGION 1..85: note = Description of Unknown:cds_NZ_WFIY01000004.1_cds_WP_155863073.1_982 target sequence
EKLDNVVIIAATNRPDILDPALLRPGRFEKLIYVPPPDKQARYEILRVHTKKVVLGEDVNLEEIAEKTDGYTGADLAALVREAAM

SEQ ID NO: 22297 - protein, 85 aa, unidentified
  REGION 1..85: note = Description of Unknown:cds_NZ_WFIY01000004.1_cds_WP_155863073.1_982 target sequence
IAIREGMKTCIDKINNLCPPTDTDCRDAKMKECMKGSSVKIEMRHFEEALKKVKPSVSQDMIQFYQSWLEKARQQLPRQVLKPST

SEQ ID NO: 22298 - protein, 84 aa, unidentified
  REGION 1..84: note = Description of Unknown:cds_NZ_WFIY01000004.1_cds_WP_155863073.1_982 target sequence
REGMKTCIDKINNLCPPTDTDCRDAKMKECMKGSSVKIEMRHFEEALKKVKPSVSQDMIQFYQSWLEKARQQLPRQVLKPSTYT

SEQ ID NO: 22299 - protein, 85 aa, unidentified
  REGION 1..85: note = Description of Unknown:cds_NZ_WFIY01000004.1_cds_WP_155863073.1_982 target sequence
GRGKVRIDLDLLSQIDVSPGDVVEIEGQRKTAAIAWPLSADDYTGEKDIIRMDGITRKNAGVSIGDKVIVRKATVKPATSVKLAP

SEQ ID NO: 22300 - protein, 85 aa, unidentified
  REGION 1..85: note = Description of Unknown:cds_NZ_WFIY01000004.1_cds_WP_155863073.1_982 target sequence
SNFSITVDPGFVAYVKKKLKEFPLVEGDTVLIPVLGQAIPFTVIQVRPAGIVMVTDETSINISDKPVEQTRYPRVTYEDIGGLKN

SEQ ID NO: 22301 - protein, 85 aa, unidentified
  REGION 1..85: note = Description of Unknown:cds_NZ_WFIY01000004.1_cds_WP_155863073.1_982 target sequence
IIQKVRELVELPLRHPELFKRLGIEPPKGVLLYGPPGTGKTLLAKAVANETDAYFTSINGPEIMSKFYGESEQRLREIFEDAKKH

SEQ ID NO: 22302 - protein, 85 aa, unidentified
  REGION 1..85: note = Description of Unknown:cds_NZ_WFIY01000004.1_cds_WP_155863073.1_982 target sequence
APAIIFIDEIDAIAPKRDEVIGEVERRVVAQLLTLMDGLESRGNVIVIAATNRPNAVDPALRRPGRFDREIEIPLPDKQGRLEIL

SEQ ID NO: 22303 - protein, 85 aa, unidentified
  REGION 1..85: note = Description of Unknown:cds_NZ_WFIY01000004.1_cds_WP_155863073.1_982 target sequence
QIHTRNMPLAKDVDLEKLAEVTHGYTGADLAALVREAAMNALRRYLPKIDITLDKIPPEILESMEVKMEDFMNALKEIVPSGMRE

SEQ ID NO: 22304 - protein, 85 aa, unidentified
  REGION 1..85: note = Description of Unknown:cds_NZ_WFIY01000004.1_cds_WP_155863073.1_982 target sequence
IYIEVPEVRWDDIGGLGDIKEELREVAEYPLKFQEYYEMTGIEPPKGILLFGPPGTGKTMLAKAVATESGANFIAVRGPEVLSKW

SEQ ID NO: 22305 - protein, 85 aa, unidentified
  REGION 1..85: note = Description of Unknown:cds_NZ_WFIY01000004.1_cds_WP_155863073.1_982 target sequence
VGESERAIREIFRKARMYAPTVIFFDEIDAIAPMRGMSPDTGVTERIVNQLLAEMDGIEKLDNVVIIAATNRPDILDPALLRPGR

SEQ ID NO: 22306 - protein, 85 aa, unidentified
  REGION 1..85: note = Description of Unknown:cds_NZ_WFIY01000004.1_cds_WP_155863073.1_982 target sequence
FEKLIYVPPPDKQARYEILRVHTKKVVLGEDVNLEEIAEKTDGYTGADLAALVREAAMIAIREGMKTCIDKINNLCPPTDTDCRD

SEQ ID NO: 22307 - protein, 85 aa, unidentified
  REGION 1..85: note = Description of Unknown:cds_NZ_WFIY01000004.1_cds_WP_155862399.1_136 target sequence
NRKLVIVLWIIGILIAILLSSQSSNYLNYNENTTIPPSYPAAKAQELLSEYFHGGNVNNSIDVVLINSTPQEVYKAVKIINEING

SEQ ID NO: 22308 - protein, 85 aa, unidentified
  REGION 1..85: note = Description of Unknown:cds_NZ_WFIY01000004.1_cds_WP_155862399.1_136 target sequence
VCKTESIINAYLAYDEILGKEINYTGYNIIEENKGNISPQELKEEISQYLHIPLYYACLFNISPQNLLIKNETAFFLITPPSQFI

SEQ ID NO: 22309 - protein, 85 aa, unidentified
  REGION 1..85: note = Description of Unknown:cds_NZ_WFIY01000004.1_cds_WP_155862399.1_136 target sequence
STYEAKNVSVIFVYTKYCPNYNFKNGTYPDGEISCQIQSKLSKCGFNNFYLTGPAPLVQELSSSESQRQVITFALVFIALLLITG

SEQ ID NO: 22310 - protein, 85 aa, unidentified
  REGION 1..85: note = Description of Unknown:cds_NZ_WFIY01000004.1_cds_WP_155862399.1_136 target sequence
IYFRSILAPIITLSIIALSVIFGMAIVTLVGKFYHPVDFQVIEPMISVLLGIGTDYSVFLLSRFKEELSKGRNKEEAMEISVKTS

SEQ ID NO: 22311 - protein, 85 aa, unidentified
  REGION 1..85: note = Description of Unknown:cds_NZ_WFIY01000004.1_cds_WP_155862399.1_136 target sequence
GKAILISGSAVTLVFLSLSFIPYLHTWGLTIGFSVPITVLIAVSLLPIIYGKIGSKIFWPSHLSFSENKSLGNIARITMKKPKTT

SEQ ID NO: 22312 - protein, 85 aa, unidentified
  REGION 1..85: note = Description of Unknown:cds_NZ_WFIY01000004.1_cds_WP_155862399.1_136 target sequence
LAISVIIGLLALAFILSVPLSLDFTSGLPNIPAVKGLKILENAFGQSFVNPVLIVFNESSTVMNSTYVNTSLLIQIAKIEENISK

SEQ ID NO: 22313 - protein, 85 aa, unidentified
  REGION 1..85: note = Description of Unknown:cds_NZ_WFIY01000004.1_cds_WP_155862399.1_136 target sequence
LSGVKQLIGPVPCNFNGTITPEILHQIRENLGTNNKTLLVTVIMNYGTYTQQAQKLVLTIQKIVKPYHGYVGGTTASVIDALDYL

SEQ ID NO: 22314 - protein, 85 aa, unidentified
  REGION 1..85: note = Description of Unknown:cds_NZ_WFIY01000004.1_cds_WP_155862399.1_136 target sequence
LPYYEMLIIILPIILIISLTAFLRSIKISIGAVGTILLSITLSLAIIYLLFRSADGILFFIPITIFVLMTGLGNDYSIFILTRVK

SEQ ID NO: 22315 - protein, 85 aa, unidentified
  REGION 1..85: note = Description of Unknown:cds_NZ_WFIY01000004.1_cds_WP_155862399.1_136 target sequence
EEIEKERSIESIVKAISISAGAVTALGVILAASFGVLAIDPIKPIAELGIGIAIAALLDTFIIRIFIYPAILKIALKLNETIKRK

SEQ ID NO: 22316 - protein, 84 aa, unidentified
  REGION 1..84: note = Description of Unknown:cds_NZ_WFIY01000004.1_cds_WP_155862399.1_136 target sequence
EIEKERSIESIVKAISISAGAVTALGVILAASFGVLAIDPIKPIAELGIGIAIAALLDTFIIRIFIYPAILKIALKLNETIKRK

SEQ ID NO: 22317 - protein, 85 aa, unidentified
  REGION 1..85: note = Description of Unknown:cds_NZ_WFIY01000004.1_cds_WP_155862399.1_136 target sequence
NYNENTTIPPSYPAAKAQELLSEYFHGGNVNNSIDVVLINSTPQEVYKAVKIINEINGVCKTESIINAYLAYDEILGKEINYTGY

SEQ ID NO: 22318 - protein, 85 aa, unidentified
  REGION 1..85: note = Description of Unknown:cds_NZ_WFIY01000004.1_cds_WP_155862399.1_136 target sequence
NIIEENKGNISPQELKEEISQYLHIPLYYACLFNISPQNLLIKNETAFFLITPPSQFISTYEAKNVSVIFVYTKYCPNYNFKNGT

SEQ ID NO: 22319 - protein, 85 aa, unidentified
  REGION 1..85: note = Description of Unknown:cds_NZ_WFIY01000004.1_cds_WP_155862399.1_136 target sequence
YPDGEISCQIQSKLSKCGFNNFYLTGPAPLVQELSSSESQRQVITFALVFIALLLITGIYFRSILAPIITLSIIALSVIFGMAIV

SEQ ID NO: 22320 - protein, 85 aa, unidentified
  REGION 1..85: note = Description of Unknown:cds_NZ_WFIY01000004.1_cds_WP_155862399.1_136 target sequence
TLVGKFYHPVDFQVIEPMISVLLGIGTDYSVFLLSRFKEELSKGRNKEEAMEISVKTSGKAILISGSAVTLVFLSLSFIPYLHTW

SEQ ID NO: 22321 - protein, 85 aa, unidentified
  REGION 1..85: note = Description of Unknown:cds_NZ_WFIY01000004.1_cds_WP_155862399.1_136 target sequence
GLTIGFSVPITVLIAVSLLPIIYGKIGSKIFWPSHLSFSENKSLGNIARITMKKPKTTLAISVIIGLLALAFILSVPLSLDFTSG

SEQ ID NO: 22322 - protein, 85 aa, unidentified
  REGION 1..85: note = Description of Unknown:cds_NZ_WFIY01000004.1_cds_WP_155862399.1_136 target sequence
LPNIPAVKGLKILENAFGQSFVNPVLIVFNESSTVMNSTYVNTSLLIQIAKIEENISKLSGVKQLIGPVPCNFNGTITPEILHQI

SEQ ID NO: 22323 - protein, 85 aa, unidentified
  REGION 1..85: note = Description of Unknown:cds_NZ_WFIY01000004.1_cds_WP_155862399.1_136 target sequence
RENLGTNNKTLLVTVIMNYGTYTQQAQKLVLTIQKIVKPYHGYVGGTTASVIDALDYLLPYYEMLIIILPIILIISLTAFLRSIK

SEQ ID NO: 22324 - protein, 85 aa, unidentified
  REGION 1..85: note = Description of Unknown:cds_NZ_WFIY01000004.1_cds_WP_155862399.1_136 target sequence
ISIGAVGTILLSITLSLAIIYLLFRSADGILFFIPITIFVLMTGLGNDYSIFILTRVKEEIEKERSIESIVKAISISAGAVTALG

SEQ ID NO: 22325 - protein, 85 aa, unidentified
  REGION 1..85: note = Description of Unknown:cds_NZ_WFIY01000004.1_cds_WP_155862487.1_243 target sequence
IELAGGKGANLGELVSFDIRVPPGFVITSKAYSYFIAYNNLESKIKSILEEKDSATASEEIKQLIISSQVPPDLENAILSSYDEL

SEQ ID NO: 22326 - protein, 85 aa, unidentified
  REGION 1..85: note = Description of Unknown:cds_NZ_WFIY01000004.1_cds_WP_155862487.1_243 target sequence
AKKVGKEVLVAVRSSATAEDIENASFAGQQDTYLNVSRSELIQKVKEVWASLFNERAIEYRKTKGIDSTKVEMAVVVQKMVNSRS

SEQ ID NO: 22327 - protein, 85 aa, unidentified
  REGION 1..85: note = Description of Unknown:cds_NZ_WFIY01000004.1_cds_WP_155862487.1_243 target sequence
AGVMFTLHPATGDSRYIVIESSWGLGEAVVGGKVTPDEIVIEKSTLRIVEKRVSHKILKYVYNPQKKANEEVDLSNSPEADKISI

SEQ ID NO: 22328 - protein, 85 aa, unidentified
  REGION 1..85: note = Description of Unknown:cds_NZ_WFIY01000004.1_cds_WP_155862487.1_243 target sequence
SDEEAIELAKLALKIEEHYKRPMDIEWAIDADLKFPDNVFIVQARPETFWSSKKATKEEKEEVTSVENRKVLVKGLAASPGIASG

SEQ ID NO: 22329 - protein, 85 aa, unidentified
  REGION 1..85: note = Description of Unknown:cds_NZ_WFIY01000004.1_cds_WP_155862487.1_243 target sequence
IARVILDVKEAGNFKKGDILVTRMTDPDWVPIMKIASAIVTDEGGITSHAAIVSRELGIPAIVGTKEATKVIKDGQEITVDATRG

SEQ ID NO: 22330 - protein, 85 aa, unidentified
  REGION 1..85: note = Description of Unknown:cds_NZ_WFIY01000004.1_cds_WP_155862487.1_243 target sequence
IVYEGKIVEEVEEQKPQVTQGISGISRDTLMSLYPITATKIYMNLGQPDIIDKYVDLPFDGIGLMRIEFIVSEWIKYHPLYLIKI

SEQ ID NO: 22331 - protein, 85 aa, unidentified
  REGION 1..85: note = Description of Unknown:cds_NZ_WFIY01000004.1_cds_WP_155862487.1_243 target sequence
GKPEEFVNKLADGVARVATAIYPRPVVVRFSDFKTNEYRRLIGGEEFEPEERNPMLGWRGVSRYVSPQYEPAFRLEVRAIRKVRE

SEQ ID NO: 22332 - protein, 85 aa, unidentified
  REGION 1..85: note = Description of Unknown:cds_NZ_WFIY01000004.1_cds_WP_155862487.1_243 target sequence
EMGLKNVWVMFPFVRTEWELKKALKIMEEEGLQRSKDFKVWIMAEVPSVIVLADVFAKIIDGFSIGSNDLAQLTLGVDRDSEILG

SEQ ID NO: 22333 - protein, 84 aa, unidentified
  REGION 1..84: note = Description of Unknown:cds_NZ_WFIY01000004.1_cds_WP_155862487.1_243 target sequence
GRMGYYDERDPAVLRSMKKLIRIAHKYGATVSICGQAPSVYPEVAEFLVRAGIDSISVNPDAVISTRRNVASIEQKIMLEKLRK

SEQ ID NO: 22334 - protein, 85 aa, unidentified
  REGION 1..85: note = Description of Unknown:cds_NZ_WFIY01000004.1_cds_WP_155862487.1_243 target sequence
TSKAYSYFIAYNNLESKIKSILEEKDSATASEEIKQLIISSQVPPDLENAILSSYDELAKKVGKEVLVAVRSSATAEDIENASFA

SEQ ID NO: 22335 - protein, 85 aa, unidentified
  REGION 1..85: note = Description of Unknown:cds_NZ_WFIY01000004.1_cds_WP_155862487.1_243 target sequence
GQQDTYLNVSRSELIQKVKEVWASLFNERAIEYRKTKGIDSTKVEMAVVVQKMVNSRSAGVMFTLHPATGDSRYIVIESSWGLGE

SEQ ID NO: 22336 - protein, 85 aa, unidentified
  REGION 1..85: note = Description of Unknown:cds_NZ_WFIY01000004.1_cds_WP_155862487.1_243 target sequence
AVVGGKVTPDEIVIEKSTLRIVEKRVSHKILKYVYNPQKKANEEVDLSNSPEADKISISDEEAIELAKLALKIEEHYKRPMDIEW

SEQ ID NO: 22337 - protein, 85 aa, unidentified
  REGION 1..85: note = Description of Unknown:cds_NZ_WFIY01000004.1_cds_WP_155862487.1_243 target sequence
AIDADLKFPDNVFIVQARPETFWSSKKATKEEKEEVTSVENRKVLVKGLAASPGIASGIARVILDVKEAGNFKKGDILVTRMTDP

SEQ ID NO: 22338 - protein, 85 aa, unidentified
  REGION 1..85: note = Description of Unknown:cds_NZ_WFIY01000004.1_cds_WP_155862487.1_243 target sequence
DWVPIMKIASAIVTDEGGITSHAAIVSRELGIPAIVGTKEATKVIKDGQEITVDATRGIVYEGKIVEEVEEQKPQVTQGISGISR

SEQ ID NO: 22339 - protein, 85 aa, unidentified
  REGION 1..85: note = Description of Unknown:cds_NZ_WFIY01000004.1_cds_WP_155862487.1_243 target sequence
DTLMSLYPITATKIYMNLGQPDIIDKYVDLPFDGIGLMRIEFIVSEWIKYHPLYLIKIGKPEEFVNKLADGVARVATAIYPRPVV

SEQ ID NO: 22340 - protein, 85 aa, unidentified
  REGION 1..85: note = Description of Unknown:cds_NZ_WFIY01000004.1_cds_WP_155862487.1_243 target sequence
VRFSDFKTNEYRRLIGGEEFEPEERNPMLGWRGVSRYVSPQYEPAFRLEVRAIRKVREEMGLKNVWVMFPFVRTEWELKKALKIM

SEQ ID NO: 22341 - protein, 85 aa, unidentified
  REGION 1..85: note = Description of Unknown:cds_NZ_WFIY01000004.1_cds_WP_155862487.1_243 target sequence
EEEGLQRSKDFKVWIMAEVPSVIVLADVFAKIIDGFSIGSNDLAQLTLGVDRDSEILGRMGYYDERDPAVLRSMKKLIRIAHKYG

SEQ ID NO: 22342 - protein, 85 aa, unidentified
  REGION 1..85: note = Description of Unknown:cds_NC_035460.1_cds_YP_009408000.1_49 target sequence
MFVIKRNGKKENVMFDKITSRIQKLCYGLSSFVDAIQITMKVVQGLYSGITTVELDNLASEISATMTTKHPDYAVLAARIAISNL

SEQ ID NO: 22343 - protein, 85 aa, unidentified
  REGION 1..85: note = Description of Unknown:cds_NC_035460.1_cds_YP_009408000.1_49 target sequence
HKETKKNFSDVIIDLYNYINPYTNKHAPMVSETVYNIVMENKDILNSSIIYDRDFSYNYFGFKTLEKSYLFKINNKIVERPQHMI

SEQ ID NO: 22344 - protein, 85 aa, unidentified
  REGION 1..85: note = Description of Unknown:cds_NC_035460.1_cds_YP_009408000.1_49 target sequence
MRVSLGIHGNDIDAVLETYNLLSEKWFTHASPTLFNSGTAKPQMSSCFILTIREDSIEGIYDTLKQCALISKTAGGIGLAISNIR

SEQ ID NO: 22345 - protein, 85 aa, unidentified
  REGION 1..85: note = Description of Unknown:cds_NC_035460.1_cds_YP_009408000.1_49 target sequence
ATGSYISGNGTSNGIVPMLRVFNNTSRYVDQGGNKRPGAIAIYLEPWHADIFAFLDLRKNTGNEELRTKDLFLALWICDLFMERV

SEQ ID NO: 22346 - protein, 85 aa, unidentified
  REGION 1..85: note = Description of Unknown:cds_NC_035460.1_cds_YP_009408000.1_49 target sequence
KNDEHWSLMCPSECPGLVDVWGKEFNNLYIHYENNKKYKTQISARKLWKAIIESQIETGTPYMLYKDACNKKSNQQHLGTIKSSN

SEQ ID NO: 22347 - protein, 85 aa, unidentified
  REGION 1..85: note = Description of Unknown:cds_NC_035460.1_cds_YP_009408000.1_49 target sequence
LCTEIVEYTSSDEIAVCNLASIALNRFVKNKQFDFIKLKEITKIIVNNLNKIIDNNYYPLKEAKYSNLRHRPIGIGVQGLADTFI

SEQ ID NO: 22348 - protein, 85 aa, unidentified
  REGION 1..85: note = Description of Unknown:cds_NC_035460.1_cds_YP_009408000.1_49 target sequence
LMRYPFESDKAQLLNKQIFETIYYAALEASCELAKKYGTYDTYINSPISNGILQYDMWNVTPTDMWNWDELKLKIAQHGVRNSLL

SEQ ID NO: 22349 - protein, 85 aa, unidentified
  REGION 1..85: note = Description of Unknown:cds_NC_035460.1_cds_YP_009408000.1_49 target sequence
IAPMPTATTAQILGNNESIEPYTNNIYTRRVLSGEFQIVNSHLLKDLCELNLWNDDLKNKLILHNGSVQDLDVPENIKQLYKTVW

SEQ ID NO: 22350 - protein, 84 aa, unidentified
  REGION 1..84: note = Description of Unknown:cds_NC_035460.1_cds_YP_009408000.1_49 target sequence
TVWEIPQKTILKMSADRGAFIDQSQSLNIHIAEPTYSKLTSMHFYGWSLGLKTGMYYLRTKPASQPIQFTVCYRDNKDCTSCGS

SEQ ID NO: 22351 - protein, 85 aa, unidentified
  REGION 1..85: note = Description of Unknown:cds_NC_035460.1_cds_YP_009408000.1_49 target sequence
GLSSFVDAIQITMKVVQGLYSGITTVELDNLASEISATMTTKHPDYAVLAARIAISNLHKETKKNFSDVIIDLYNYINPYTNKHA

SEQ ID NO: 22352 - protein, 85 aa, unidentified
  REGION 1..85: note = Description of Unknown:cds_NC_035460.1_cds_YP_009408000.1_49 target sequence
PMVSETVYNIVMENKDILNSSIIYDRDFSYNYFGFKTLEKSYLFKINNKIVERPQHMIMRVSLGIHGNDIDAVLETYNLLSEKWF

SEQ ID NO: 22353 - protein, 85 aa, unidentified
  REGION 1..85: note = Description of Unknown:cds_NC_035460.1_cds_YP_009408000.1_49 target sequence
THASPTLFNSGTAKPQMSSCFILTIREDSIEGIYDTLKQCALISKTAGGIGLAISNIRATGSYISGNGTSNGIVPMLRVFNNTSR

SEQ ID NO: 22354 - protein, 85 aa, unidentified
  REGION 1..85: note = Description of Unknown:cds_NC_035460.1_cds_YP_009408000.1_49 target sequence
YVDQGGNKRPGAIAIYLEPWHADIFAFLDLRKNTGNEELRTKDLFLALWICDLFMERVKNDEHWSLMCPSECPGLVDVWGKEFNN

SEQ ID NO: 22355 - protein, 85 aa, unidentified
  REGION 1..85: note = Description of Unknown:cds_NC_035460.1_cds_YP_009408000.1_49 target sequence
LYIHYENNKKYKTQISARKLWKAIIESQIETGTPYMLYKDACNKKSNQQHLGTIKSSNLCTEIVEYTSSDEIAVCNLASIALNRF

SEQ ID NO: 22356 - protein, 85 aa, unidentified
  REGION 1..85: note = Description of Unknown:cds_NC_035460.1_cds_YP_009408000.1_49 target sequence
VKNKQFDFIKLKEITKIIVNNLNKIIDNNYYPLKEAKYSNLRHRPIGIGVQGLADTFILMRYPFESDKAQLLNKQIFETIYYAAL

SEQ ID NO: 22357 - protein, 85 aa, unidentified
  REGION 1..85: note = Description of Unknown:cds_NC_035460.1_cds_YP_009408000.1_49 target sequence
EASCELAKKYGTYDTYINSPISNGILQYDMWNVTPTDMWNWDELKLKIAQHGVRNSLLIAPMPTATTAQILGNNESIEPYTNNIY

SEQ ID NO: 22358 - protein, 85 aa, unidentified
  REGION 1..85: note = Description of Unknown:cds_NC_035460.1_cds_YP_009408000.1_49 target sequence
TRRVLSGEFQIVNSHLLKDLCELNLWNDDLKNKLILHNGSVQDLDVPENIKQLYKTVWEIPQKTILKMSADRGAFIDQSQSLNIH

SEQ ID NO: 22359 - protein, 85 aa, unidentified
  REGION 1..85: note = Description of Unknown:cds_NZ_WFIY01000004.1_cds_WP_155862576.1_347 target sequence
QSTKTLTRILGHTNIIDAFIVSAVALVSILIRSLSTQYPLSVNGFDSWYLFYNALLIAQAHGNWYAVPPDAHAWFPWGFFIELDN

SEQ ID NO: 22360 - protein, 85 aa, unidentified
  REGION 1..85: note = Description of Unknown:cds_NZ_WFIY01000004.1_cds_WP_155862576.1_347 target sequence
TIGLPFIVALLSLPFYSTYGANAVYTVTLFLYVALAGLGVAAAYVAVSGLTKSRIGGFVAAAIIAVSPALTVKNIVGGLPKTSWG

SEQ ID NO: 22361 - protein, 85 aa, unidentified
  REGION 1..85: note = Description of Unknown:cds_NZ_WFIY01000004.1_cds_WP_155862576.1_347 target sequence
GVFVLFSIYLLNYAIEKKKPIYGAFAGVPLFLAEVSWGGSTYIDLSLLAGAFLLILLNRNNEETAKAYTLMAIVTAFLTSWAPNS

SEQ ID NO: 22362 - protein, 85 aa, unidentified
  REGION 1..85: note = Description of Unknown:cds_NZ_WFIY01000004.1_cds_WP_155862576.1_347 target sequence
IGFLSGLAHGLSLLIIGALLFLDLHLKNILPKEISDSRALLITASAVFIFVVAIVGLSFLGVTPIPSRYYAIVNPFYQVTVPIDK

SEQ ID NO: 22363 - protein, 85 aa, unidentified
  REGION 1..85: note = Description of Unknown:cds_NZ_WFIY01000004.1_cds_WP_155862576.1_347 target sequence
TVAEYIPQPITSMITDFGIALFLSIIGMYYLIRESNLAGLWLLVLGVISIYGTSEQPYLFNYTAYMIAPLAGAGVFYIVNKTKEY

SEQ ID NO: 22364 - protein, 85 aa, unidentified
  REGION 1..85: note = Description of Unknown:cds_NZ_WFIY01000004.1_cds_WP_155862576.1_347 target sequence
KAKAIPIFVLSLVGISLVADASAATIMSNTPNEIVTSASPYPIINYAWVSALDWINQKTCPHAFILSWWDYGYWEEVVGNRSVID

SEQ ID NO: 22365 - protein, 85 aa, unidentified
  REGION 1..85: note = Description of Unknown:cds_NZ_WFIY01000004.1_cds_WP_155862576.1_347 target sequence
ENNTLNGTQIKLMAEMFLNNETFAATVLEKDFHLYPYGNPNYTIPVYIIAYDAVTLVNSSSGEEWYIGYPSDLGGEFLGYTTSLG

SEQ ID NO: 22366 - protein, 85 aa, unidentified
  REGION 1..85: note = Description of Unknown:cds_NZ_WFIY01000004.1_cds_WP_155862576.1_347 target sequence
DIGKAMGAMTVIAGYPINEYLNTSLITSEISCLNSTLGRIAKYDPSVANELNELSSIIGQAYPLAWTSKAYNSLIVNMFAEALEG

SEQ ID NO: 22367 - protein, 84 aa, unidentified
  REGION 1..84: note = Description of Unknown:cds_NZ_WFIY01000004.1_cds_WP_155862576.1_347 target sequence
FAEALEGTGYPVIAPFSSKLEFTMSGLQTTPGTPFPEIHMIYFQPVYVALFPWVRGPNYETYIMVMIYQFVQPGTIIPECVYYG

SEQ ID NO: 22368 - protein, 85 aa, unidentified
  REGION 1..85: note = Description of Unknown:cds_NZ_WFIY01000004.1_cds_WP_155862576.1_347 target sequence
SILIRSLSTQYPLSVNGFDSWYLFYNALLIAQAHGNWYAVPPDAHAWFPWGFFIELDNTIGLPFIVALLSLPFYSTYGANAVYTV

SEQ ID NO: 22369 - protein, 85 aa, unidentified
  REGION 1..85: note = Description of Unknown:cds_NZ_WFIY01000004.1_cds_WP_155862576.1_347 target sequence
TLFLYVALAGLGVAAAYVAVSGLTKSRIGGFVAAAIIAVSPALTVKNIVGGLPKTSWGGVFVLFSIYLLNYAIEKKKPIYGAFAG

SEQ ID NO: 22370 - protein, 85 aa, unidentified
  REGION 1..85: note = Description of Unknown:cds_NZ_WFIY01000004.1_cds_WP_155862576.1_347 target sequence
VPLFLAEVSWGGSTYIDLSLLAGAFLLILLNRNNEETAKAYTLMAIVTAFLTSWAPNSIGFLSGLAHGLSLLIIGALLFLDLHLK

SEQ ID NO: 22371 - protein, 85 aa, unidentified
  REGION 1..85: note = Description of Unknown:cds_NZ_WFIY01000004.1_cds_WP_155862576.1_347 target sequence
NILPKEISDSRALLITASAVFIFVVAIVGLSFLGVTPIPSRYYAIVNPFYQVTVPIDKTVAEYIPQPITSMITDFGIALFLSIIG

SEQ ID NO: 22372 - protein, 85 aa, unidentified
  REGION 1..85: note = Description of Unknown:cds_NZ_WFIY01000004.1_cds_WP_155862576.1_347 target sequence
MYYLIRESNLAGLWLLVLGVISIYGTSEQPYLFNYTAYMIAPLAGAGVFYIVNKTKEYKAKAIPIFVLSLVGISLVADASAATIM

SEQ ID NO: 22373 - protein, 85 aa, unidentified
  REGION 1..85: note = Description of Unknown:cds_NZ_WFIY01000004.1_cds_WP_155862576.1_347 target sequence
SNTPNEIVTSASPYPIINYAWVSALDWINQKTCPHAFILSWWDYGYWEEVVGNRSVIDENNTLNGTQIKLMAEMFLNNETFAATV

SEQ ID NO: 22374 - protein, 85 aa, unidentified
  REGION 1..85: note = Description of Unknown:cds_NZ_WFIY01000004.1_cds_WP_155862576.1_347 target sequence
LEKDFHLYPYGNPNYTIPVYIIAYDAVTLVNSSSGEEWYIGYPSDLGGEFLGYTTSLGDIGKAMGAMTVIAGYPINEYLNTSLIT

SEQ ID NO: 22375 - protein, 85 aa, unidentified
  REGION 1..85: note = Description of Unknown:cds_NZ_WFIY01000004.1_cds_WP_155862576.1_347 target sequence
SEISCLNSTLGRIAKYDPSVANELNELSSIIGQAYPLAWTSKAYNSLIVNMFAEALEGTGYPVIAPFSSKLEFTMSGLQTTPGTP

SEQ ID NO: 22376 - protein, 85 aa, unidentified
  REGION 1..85: note = Description of Unknown:cds_NZ_WFIY01000004.1_cds_WP_155864156.1_2110 target sequence
VEKKVSNKRSKGISIVIAFIFITIIIFSVLIPFIIIRSTTPNYSNISAVSASALSSERELQVQEVESGDPSISAFQGSQGQVYLC

SEQ ID NO: 22377 - protein, 85 aa, unidentified
  REGION 1..85: note = Description of Unknown:cds_NZ_WFIY01000004.1_cds_WP_155864156.1_2110 target sequence
FHYKHGLTPITIIGVYYFCQNTGKWVSAYPRPFTVTGNERIYLFTPIEYTGLIEIVTSLGNIFYTPVSTIGASASTNIYCIIQTT

SEQ ID NO: 22378 - protein, 85 aa, unidentified
  REGION 1..85: note = Description of Unknown:cds_NZ_WFIY01000004.1_cds_WP_155864156.1_2110 target sequence
STPSYVITPCGKTIILPNGTEIITPCFTLPKLAKSNSCYKLPKCTKLILPCGKVCNLPNGGILHLNNNLLKQKYINSAYFPFSSF

SEQ ID NO: 22379 - protein, 85 aa, unidentified
  REGION 1..85: note = Description of Unknown:cds_NZ_WFIY01000004.1_cds_WP_155864156.1_2110 target sequence
LTGYQSDNDNIGPLPVGQRNPELNTQTIVQWFIASGNLAPICIYICGLAPSTVQENTVYISKYAPTGGYITWTGDAGLIVGAGKI

SEQ ID NO: 22380 - protein, 85 aa, unidentified
  REGION 1..85: note = Description of Unknown:cds_NZ_WFIY01000004.1_cds_WP_155864156.1_2110 target sequence
GLVDPPPPSPKPSGPQSPPYYVAFTVHLANGSWATIVDTTPIPVVGKENGQPASPLTLAVGVFNSKTGTLCLYINGTLVSKATVN

SEQ ID NO: 22381 - protein, 85 aa, unidentified
  REGION 1..85: note = Description of Unknown:cds_NZ_WFIY01000004.1_cds_WP_155864156.1_2110 target sequence
CKKLCVNPLSYFDVGSAYNGGGNPWLCELPGFPGDMYTGGNNLYSFNGALGPTIIYNTSLTPYQIKSLFIGCIPSPDNIVILWSQ

SEQ ID NO: 22382 - protein, 85 aa, unidentified
  REGION 1..85: note = Description of Unknown:cds_NZ_WFIY01000004.1_cds_WP_155864156.1_2110 target sequence
NSAEYVHICTSTWTVTPCYKYCSNPPGGPPGKCPYGEYDYEVFNLANLCQFNGFWGLAGAIPTSFAPFSDVVLWGGASPIVLNPS

SEQ ID NO: 22383 - protein, 85 aa, unidentified
  REGION 1..85: note = Description of Unknown:cds_NZ_WFIY01000004.1_cds_WP_155864156.1_2110 target sequence
ALVHCNVNITVRYSACLIPTTPGGYTFSVNFTDPLPGATVERNVQTVTYANEWATVYINGQKVFEGEFVNNQLHVLYSNIPCYQQ

SEQ ID NO: 22384 - protein, 84 aa, unidentified
  REGION 1..84: note = Description of Unknown:cds_NZ_WFIY01000004.1_cds_WP_155864156.1_2110 target sequence
YSNIPCYQQKNIPMFGCYLKSPVNITVIFTFNMYEGSANNQPVGPVGPQSSCNYPVVYFNIMWLPPGAQWLTYIPITQLEPYQV

SEQ ID NO: 22385 - protein, 85 aa, unidentified
  REGION 1..85: note = Description of Unknown:cds_NZ_WFIY01000004.1_cds_WP_155864156.1_2110 target sequence
SVLIPFIIIRSTTPNYSNISAVSASALSSERELQVQEVESGDPSISAFQGSQGQVYLCFHYKHGLTPITIIGVYYFCQNTGKWVS

SEQ ID NO: 22386 - protein, 85 aa, unidentified
  REGION 1..85: note = Description of Unknown:cds_NZ_WFIY01000004.1_cds_WP_155864156.1_2110 target sequence
AYPRPFTVTGNERIYLFTPIEYTGLIEIVTSLGNIFYTPVSTIGASASTNIYCIIQTTSTPSYVITPCGKTIILPNGTEIITPCF

SEQ ID NO: 22387 - protein, 85 aa, unidentified
  REGION 1..85: note = Description of Unknown:cds_NZ_WFIY01000004.1_cds_WP_155864156.1_2110 target sequence
TLPKLAKSNSCYKLPKCTKLILPCGKVCNLPNGGILHLNNNLLKQKYINSAYFPFSSFLTGYQSDNDNIGPLPVGQRNPELNTQT

SEQ ID NO: 22388 - protein, 85 aa, unidentified
  REGION 1..85: note = Description of Unknown:cds_NZ_WFIY01000004.1_cds_WP_155864156.1_2110 target sequence
IVQWFIASGNLAPICIYICGLAPSTVQENTVYISKYAPTGGYITWTGDAGLIVGAGKIGLVDPPPPSPKPSGPQSPPYYVAFTVH

SEQ ID NO: 22389 - protein, 85 aa, unidentified
  REGION 1..85: note = Description of Unknown:cds_NZ_WFIY01000004.1_cds_WP_155864156.1_2110 target sequence
LANGSWATIVDTTPIPVVGKENGQPASPLTLAVGVFNSKTGTLCLYINGTLVSKATVNCKKLCVNPLSYFDVGSAYNGGGNPWLC

SEQ ID NO: 22390 - protein, 85 aa, unidentified
  REGION 1..85: note = Description of Unknown:cds_NZ_WFIY01000004.1_cds_WP_155864156.1_2110 target sequence
ELPGFPGDMYTGGNNLYSFNGALGPTIIYNTSLTPYQIKSLFIGCIPSPDNIVILWSQNSAEYVHICTSTWTVTPCYKYCSNPPG

SEQ ID NO: 22391 - protein, 85 aa, unidentified
  REGION 1..85: note = Description of Unknown:cds_NZ_WFIY01000004.1_cds_WP_155864156.1_2110 target sequence
GPPGKCPYGEYDYEVFNLANLCQFNGFWGLAGAIPTSFAPFSDVVLWGGASPIVLNPSALVHCNVNITVRYSACLIPTTPGGYTF

SEQ ID NO: 22392 - protein, 85 aa, unidentified
  REGION 1..85: note = Description of Unknown:cds_NZ_WFIY01000004.1_cds_WP_155864156.1_2110 target sequence
SVNFTDPLPGATVERNVQTVTYANEWATVYINGQKVFEGEFVNNQLHVLYSNIPCYQQKNIPMFGCYLKSPVNITVIFTFNMYEG

SEQ ID NO: 22393 - protein, 85 aa, unidentified
  REGION 1..85: note = Description of Unknown:cds_NZ_WFIY01000004.1_cds_WP_155863912.1_1824 target sequence
LLLDSSIFSRAIITFDISSLKKFMTTDEKEVVVGNLTSMSGEILSYLNPKPIKAATKLPDGSYYKIIGKKYGMTYAEVPAGLTFE

SEQ ID NO: 22394 - protein, 85 aa, unidentified
  REGION 1..85: note = Description of Unknown:cds_NZ_WFIY01000004.1_cds_WP_155863912.1_1824 target sequence
ELIERLKLENLFPAIFPLYLKGTIGGFISTNGSGFGSYKYGFVKYKIPVYELKDKDTAVVGLVNYSELIELDQESPFAWSAVIFP

SEQ ID NO: 22395 - protein, 85 aa, unidentified
  REGION 1..85: note = Description of Unknown:cds_NZ_WFIY01000004.1_cds_WP_155863912.1_1824 target sequence
TENIVKYYVPSFYSSVTGKGKVVSLEKVINDIYSGVKSILKRDYIPVCLRASEYSILIQSPIESKLGYIINYNSPSKFYVICGNI

SEQ ID NO: 22396 - protein, 85 aa, unidentified
  REGION 1..85: note = Description of Unknown:cds_NZ_WFIY01000004.1_cds_WP_155863912.1_1824 target sequence
KRDNLDKLFDFLKKNPSVYPFPSLQEYKEIHKFILSKYKKEIKVPKNLEKIKSQYLDAVQCVNCGLCLDKCLAYNTTKNIIYSPV

SEQ ID NO: 22397 - protein, 85 aa, unidentified
  REGION 1..85: note = Description of Unknown:cds_NZ_WFIY01000004.1_cds_WP_155863912.1_1824 target sequence
GKINRLLTGVTDFEYCFGCKNEDDYCPVGIKISELTEVLPQLSRYKDKISIPIDRVPSRLKELEARLDSKYKSYPVYLLFVGCAA

SEQ ID NO: 22398 - protein, 85 aa, unidentified
  REGION 1..85: note = Description of Unknown:cds_NZ_WFIY01000004.1_cds_WP_155863912.1_1824 target sequence
KYDPLGLEGFMNFLLEKGEELKDFSPRVKLLDNECCGFDKYITGDIEGAKSDVSKIVDIKNKLGAQKVYFLCPEGLYVYNSLSGE

SEQ ID NO: 22399 - protein, 85 aa, unidentified
  REGION 1..85: note = Description of Unknown:cds_NZ_WFIY01000004.1_cds_WP_155863912.1_1824 target sequence
KGILAYEVIKPYVKEKVYLGCWAKKLGFEGEEHECAGLLFTSYKGAQLPLFKKNIITICPFSTWKFSTQSVYSLFKKGENLKAED

SEQ ID NO: 22400 - protein, 85 aa, unidentified
  REGION 1..85: note = Description of Unknown:cds_NZ_WFIY01000004.1_cds_WP_155863912.1_1824 target sequence
KTIFEFSDQLFTDYVISSLKNGVLASVDDIADKTINWIMGGKNYFILLIIPIIRKRFSSLLVSSLSENKELVNSLKTLSENKLLM

SEQ ID NO: 22401 - protein, 84 aa, unidentified
  REGION 1..84: note = Description of Unknown:cds_NZ_WFIY01000004.1_cds_WP_155863912.1_1824 target sequence
LKTLSENKLLMEDKIRKVVDIVNSYNFTELVSDLIVKISNSPRLEYEAKKIIESEDYKKALEEVIKKVIVDRVLEDIIQEVIYS

SEQ ID NO: 22402 - protein, 85 aa, unidentified
  REGION 1..85: note = Description of Unknown:cds_NZ_WFIY01000004.1_cds_WP_155863912.1_1824 target sequence
EKEVVVGNLTSMSGEILSYLNPKPIKAATKLPDGSYYKIIGKKYGMTYAEVPAGLTFEELIERLKLENLFPAIFPLYLKGTIGGF

SEQ ID NO: 22403 - protein, 85 aa, unidentified
  REGION 1..85: note = Description of Unknown:cds_NZ_WFIY01000004.1_cds_WP_155863912.1_1824 target sequence
ISTNGSGFGSYKYGFVKYKIPVYELKDKDTAVVGLVNYSELIELDQESPFAWSAVIFPTENIVKYYVPSFYSSVTGKGKVVSLEK

SEQ ID NO: 22404 - protein, 85 aa, unidentified
  REGION 1..85: note = Description of Unknown:cds_NZ_WFIY01000004.1_cds_WP_155863912.1_1824 target sequence
VINDIYSGVKSILKRDYIPVCLRASEYSILIQSPIESKLGYIINYNSPSKFYVICGNIKRDNLDKLFDFLKKNPSVYPFPSLQEY

SEQ ID NO: 22405 - protein, 85 aa, unidentified
  REGION 1..85: note = Description of Unknown:cds_NZ_WFIY01000004.1_cds_WP_155863912.1_1824 target sequence
KEIHKFILSKYKKEIKVPKNLEKIKSQYLDAVQCVNCGLCLDKCLAYNTTKNIIYSPVGKINRLLTGVTDFEYCFGCKNEDDYCP

SEQ ID NO: 22406 - protein, 85 aa, unidentified
  REGION 1..85: note = Description of Unknown:cds_NZ_WFIY01000004.1_cds_WP_155863912.1_1824 target sequence
VGIKISELTEVLPQLSRYKDKISIPIDRVPSRLKELEARLDSKYKSYPVYLLFVGCAAKYDPLGLEGFMNFLLEKGEELKDFSPR

SEQ ID NO: 22407 - protein, 85 aa, unidentified
  REGION 1..85: note = Description of Unknown:cds_NZ_WFIY01000004.1_cds_WP_155863912.1_1824 target sequence
VKLLDNECCGFDKYITGDIEGAKSDVSKIVDIKNKLGAQKVYFLCPEGLYVYNSLSGEKGILAYEVIKPYVKEKVYLGCWAKKLG

SEQ ID NO: 22408 - protein, 85 aa, unidentified
  REGION 1..85: note = Description of Unknown:cds_NZ_WFIY01000004.1_cds_WP_155863912.1_1824 target sequence
FEGEEHECAGLLFTSYKGAQLPLFKKNIITICPFSTWKFSTQSVYSLFKKGENLKAEDKTIFEFSDQLFTDYVISSLKNGVLASV

SEQ ID NO: 22409 - protein, 85 aa, unidentified
  REGION 1..85: note = Description of Unknown:cds_NZ_WFIY01000004.1_cds_WP_155863912.1_1824 target sequence
DDIADKTINWIMGGKNYFILLIIPIIRKRFSSLLVSSLSENKELVNSLKTLSENKLLMEDKIRKVVDIVNSYNFTELVSDLIVKI

SEQ ID NO: 22410 - protein, 85 aa, unidentified
  REGION 1..85: note = Description of Unknown:hvTR_F5HFD2 target sequence
AALEGPLLLPPSASLTTSPQTTCYQATWESQLEIFCCLATNSHLQAELTLEGLDKMMQPEPTFFACRAIRRLLLGERLHPFIHQE

SEQ ID NO: 22411 - protein, 85 aa, unidentified
  REGION 1..85: note = Description of Unknown:hvTR_F5HFD2 target sequence
GTLLGKVGRRYSGEGLIIDGGGVFTRGQIDTDNYLPAVGSWELTDDCDKPCEFRELRSLYLPALLTCTICYKAMFRIVCRYLEFW

SEQ ID NO: 22412 - protein, 85 aa, unidentified
  REGION 1..85: note = Description of Unknown:hvTR_F5HFD2 target sequence
EFEQCFHAFLAVLPHSLQPTIYQNYFALLESLKHLSFSIMPPASPDAQLHFLKFNISSFMATWGWHGELVSLRRAIAHNVERLPT

SEQ ID NO: 22413 - protein, 85 aa, unidentified
  REGION 1..85: note = Description of Unknown:hvTR_F5HFD2 target sequence
VLKNLSKQSKHQDVKVNGRDLVGFQLALNQLVSRLHVKIQRKDPGPKPYRVVVSTPDCTYYLVYPGTPAIYRLVMCMAVADCIGH

SEQ ID NO: 22414 - protein, 85 aa, unidentified
  REGION 1..85: note = Description of Unknown:hvTR_F5HFD2 target sequence
SCSGLHPCANFLGTHETPRLLAATLSRIRYAPKDRRAAMKGNLQACFQRYAATDARTLGSSTVSDMLEPTKHVSLENFKITIFNT

SEQ ID NO: 22415 - protein, 85 aa, unidentified
  REGION 1..85: note = Description of Unknown:hvTR_F5HFD2 target sequence
NMVINTKISCHVPNTLQKTILNIPRLTNNFVIRKYSVKEPSFTISVFFSDNMCQGTAININISGDMLHFLFAMGTLKCFLPIRHI

SEQ ID NO: 22416 - protein, 85 aa, unidentified
  REGION 1..85: note = Description of Unknown:hvTR_F5HFD2 target sequence
FPVSIANWNSTLDLHGLENQYMVRMGRKNVFWTTNFPSVVSSKDGLNVSWFKAATATISKVYGQPLVEQIRHELAPILTDQHARI

SEQ ID NO: 22417 - protein, 85 aa, unidentified
  REGION 1..85: note = Description of Unknown:hvTR_F5HFD2 target sequence
DGNKNRIFSLLEHRNRSQIQTLHKRFLECLVECCSFLRLDVACIRRAAARGLFDFSKKIISHTKSKHECAVLGYKKCNLIPKIYA

SEQ ID NO: 22418 - protein, 84 aa, unidentified
  REGION 1..84: note = Description of Unknown:hvTR_F5HFD2 target sequence
GYKKCNLIPKIYARNKKTRLDELGRNANFISFVATTGHRFAALKPQIVRHAIRKLGLHWRHRTAASNEQTPPADPRVRCVRPLV

SEQ ID NO: 22419 - protein, 85 aa, unidentified
  REGION 1..85: note = Description of Unknown:hvTR_F5HFD2 target sequence
WESQLEIFCCLATNSHLQAELTLEGLDKMMQPEPTFFACRAIRRLLLGERLHPFIHQEGTLLGKVGRRYSGEGLIIDGGGVFTRG

SEQ ID NO: 22420 - protein, 85 aa, unidentified
  REGION 1..85: note = Description of Unknown:hvTR_F5HFD2 target sequence
QIDTDNYLPAVGSWELTDDCDKPCEFRELRSLYLPALLTCTICYKAMFRIVCRYLEFWEFEQCFHAFLAVLPHSLQPTIYQNYFA

SEQ ID NO: 22421 - protein, 85 aa, unidentified
  REGION 1..85: note = Description of Unknown:hvTR_F5HFD2 target sequence
LLESLKHLSFSIMPPASPDAQLHFLKFNISSFMATWGWHGELVSLRRAIAHNVERLPTVLKNLSKQSKHQDVKVNGRDLVGFQLA

SEQ ID NO: 22422 - protein, 85 aa, unidentified
  REGION 1..85: note = Description of Unknown:hvTR_F5HFD2 target sequence
LNQLVSRLHVKIQRKDPGPKPYRVVVSTPDCTYYLVYPGTPAIYRLVMCMAVADCIGHSCSGLHPCANFLGTHETPRLLAATLSR

SEQ ID NO: 22423 - protein, 85 aa, unidentified
  REGION 1..85: note = Description of Unknown:hvTR_F5HFD2 target sequence
IRYAPKDRRAAMKGNLQACFQRYAATDARTLGSSTVSDMLEPTKHVSLENFKITIFNTNMVINTKISCHVPNTLQKTILNIPRLT

SEQ ID NO: 22424 - protein, 85 aa, unidentified
  REGION 1..85: note = Description of Unknown:hvTR_F5HFD2 target sequence
NNFVIRKYSVKEPSFTISVFFSDNMCQGTAININISGDMLHFLFAMGTLKCFLPIRHIFPVSIANWNSTLDLHGLENQYMVRMGR

SEQ ID NO: 22425 - protein, 85 aa, unidentified
  REGION 1..85: note = Description of Unknown:hvTR_F5HFD2 target sequence
KNVFWTTNFPSVVSSKDGLNVSWFKAATATISKVYGQPLVEQIRHELAPILTDQHARIDGNKNRIFSLLEHRNRSQIQTLHKRFL

SEQ ID NO: 22426 - protein, 85 aa, unidentified
  REGION 1..85: note = Description of Unknown:hvTR_F5HFD2 target sequence
ECLVECCSFLRLDVACIRRAAARGLFDFSKKIISHTKSKHECAVLGYKKCNLIPKIYARNKKTRLDELGRNANFISFVATTGHRF

SEQ ID NO: 22427 - protein, 85 aa, unidentified
  REGION 1..85: note = Description of Unknown:cds_NC_024711.1_cds_YP_009052554.1_77 target sequence
ADGKYPFLEYIEEPDKEKKYKKASDCGWYDPHNNFLIGDSGGFLLNIRPGKFVNTELFNEAARTYQATGKYTQFKVDSIPHRQFR

SEQ ID NO: 22428 - protein, 85 aa, unidentified
  REGION 1..85: note = Description of Unknown:cds_NC_024711.1_cds_YP_009052554.1_77 target sequence
RRECDRRRNGFSAPCWQNPDGSIEDVWITGGHYNFLNYTRMERTDESSVIVTEHGATAKKIYSFPSFIDAQFWTWQIIEFCRRNG

SEQ ID NO: 22429 - protein, 85 aa, unidentified
  REGION 1..85: note = Description of Unknown:cds_NC_024711.1_cds_YP_009052554.1_77 target sequence
LHLIIDKTRRGGFSYIMAADSSNEVNLSKHKVVIHVAADNKYLIKQGGLSDFAVNNLKFFEEKTPFKRGIYSPTTDSFKLGYRMK

SEQ ID NO: 22430 - protein, 85 aa, unidentified
  REGION 1..85: note = Description of Unknown:cds_NC_024711.1_cds_YP_009052554.1_77 target sequence
NGVEADDSWSSSLLSVSANNNPDCAIGKDAVTIKVEELSTMQNFDEFMNVTEPTMTVGTRTTGTLMAWGTATAANMQIFEQNFYN

SEQ ID NO: 22431 - protein, 85 aa, unidentified
  REGION 1..85: note = Description of Unknown:cds_NC_024711.1_cds_YP_009052554.1_77 target sequence
PRAFGFMAFENVFDNDARNEVCGFFKSYAWGLEGEIDGVKGFDEDGNSNLRIGLKLAARERIEKKKTAKTFAEYLNYLGQRALFP

SEQ ID NO: 22432 - protein, 85 aa, unidentified
  REGION 1..85: note = Description of Unknown:cds_NC_024711.1_cds_YP_009052554.1_77 target sequence
AESFSSASENIFSSEALNKFEDKLRVDNSYKFYTDGELFEDGTKKIYFKSNARIRIENPDMKTYDYIQGVPRRGNEDPHGCIRVW

SEQ ID NO: 22433 - protein, 85 aa, unidentified
  REGION 1..85: note = Description of Unknown:cds_NC_024711.1_cds_YP_009052554.1_77 target sequence
FAPEYEETYIGDRLIRSILPGTYVAVYDPVGIDKDKKEITDRHSHNSIFVIEMPRERNGFKPKLCAAYYGRTERLEEADEKFYRL

SEQ ID NO: 22434 - protein, 85 aa, unidentified
  REGION 1..85: note = Description of Unknown:cds_NC_024711.1_cds_YP_009052554.1_77 target sequence
CKWYNCIGTGLVEINRGETVSNFRKWKATKYLGYEPLYVWDSAVKEKVSTSYGYNIGSGPKKLDGLRLLKEFLYEVIGKNEFGED

SEQ ID NO: 22435 - protein, 84 aa, unidentified
  REGION 1..84: note = Description of Unknown:cds_NC_024711.1_cds_YP_009052554.1_77 target sequence
FLYEVIGKNEFGEDIYVFERFLDYQTILELKKFNAEGNFDRISSLILLGIYWKSIDIKGKRELASRKKVTEDNDKTDIFNRQWF

SEQ ID NO: 22436 - protein, 85 aa, unidentified
  REGION 1..85: note = Description of Unknown:cds_NC_024711.1_cds_YP_009052554.1_77 target sequence
WYDPHNNFLIGDSGGFLLNIRPGKFVNTELFNEAARTYQATGKYTQFKVDSIPHRQFRRRECDRRRNGFSAPCWQNPDGSIEDVW

SEQ ID NO: 22437 - protein, 85 aa, unidentified
  REGION 1..85: note = Description of Unknown:cds_NC_024711.1_cds_YP_009052554.1_77 target sequence
ITGGHYNFLNYTRMERTDESSVIVTEHGATAKKIYSFPSFIDAQFWTWQIIEFCRRNGLHLIIDKTRRGGFSYIMAADSSNEVNL

SEQ ID NO: 22438 - protein, 85 aa, unidentified
  REGION 1..85: note = Description of Unknown:cds_NC_024711.1_cds_YP_009052554.1_77 target sequence
SKHKVVIHVAADNKYLIKQGGLSDFAVNNLKFFEEKTPFKRGIYSPTTDSFKLGYRMKNGVEADDSWSSSLLSVSANNNPDCAIG

SEQ ID NO: 22439 - protein, 85 aa, unidentified
  REGION 1..85: note = Description of Unknown:cds_NC_024711.1_cds_YP_009052554.1_77 target sequence
KDAVTIKVEELSTMQNFDEFMNVTEPTMTVGTRTTGTLMAWGTATAANMQIFEQNFYNPRAFGFMAFENVFDNDARNEVCGFFKS

SEQ ID NO: 22440 - protein, 85 aa, unidentified
  REGION 1..85: note = Description of Unknown:cds_NC_024711.1_cds_YP_009052554.1_77 target sequence
YAWGLEGEIDGVKGFDEDGNSNLRIGLKLAARERIEKKKTAKTFAEYLNYLGQRALFPAESFSSASENIFSSEALNKFEDKLRVD

SEQ ID NO: 22441 - protein, 85 aa, unidentified
  REGION 1..85: note = Description of Unknown:cds_NC_024711.1_cds_YP_009052554.1_77 target sequence
NSYKFYTDGELFEDGTKKIYFKSNARIRIENPDMKTYDYIQGVPRRGNEDPHGCIRVWFAPEYEETYIGDRLIRSILPGTYVAVY

SEQ ID NO: 22442 - protein, 85 aa, unidentified
  REGION 1..85: note = Description of Unknown:cds_NC_024711.1_cds_YP_009052554.1_77 target sequence
DPVGIDKDKKEITDRHSHNSIFVIEMPRERNGFKPKLCAAYYGRTERLEEADEKFYRLCKWYNCIGTGLVEINRGETVSNFRKWK

SEQ ID NO: 22443 - protein, 85 aa, unidentified
  REGION 1..85: note = Description of Unknown:cds_NC_024711.1_cds_YP_009052554.1_77 target sequence
ATKYLGYEPLYVWDSAVKEKVSTSYGYNIGSGPKKLDGLRLLKEFLYEVIGKNEFGEDIYVFERFLDYQTILELKKFNAEGNFDR

SEQ ID NO: 22444 - protein, 85 aa, unidentified
  REGION 1..85: note = Description of Unknown:cds_NZ_WFIY01000004.1_cds_WP_155863355.1_1327 target sequence
SKEEGEKLRIKKEEELKVVGMHCATCVSTVSKSIKSVKGVKDANVNLASGIARVEIENARLKDIVEAIKKAGYDVVTQKISFKVD

SEQ ID NO: 22445 - protein, 85 aa, unidentified
  REGION 1..85: note = Description of Unknown:cds_NZ_WFIY01000004.1_cds_WP_155863355.1_1327 target sequence
INPEDARKIEEKVEEIKGVIKASVNPTNGYVIVEFNPYSITSDELAEEIYKKTGHKVTKVKSEVTNKSEVKEMLERLIIAWIFTI

SEQ ID NO: 22446 - protein, 85 aa, unidentified
  REGION 1..85: note = Description of Unknown:cds_NZ_WFIY01000004.1_cds_WP_155863355.1_1327 target sequence
PTLYFQYSGLLFIAFLTSIPVQFYAGLRYHLGAYRALKNKTANMDTLVSLSTNVAWFYSVYALIVHQQVFFDVASLLISFILIGK

SEQ ID NO: 22447 - protein, 85 aa, unidentified
  REGION 1..85: note = Description of Unknown:cds_NZ_WFIY01000004.1_cds_WP_155863355.1_1327 target sequence
TLEAYLKERISVQITSLKEVKATLADGRIVKASELKVGDEIIVKSGEVIPADGIVDEGSGEVNESIVNGESLPVKKKKGDAVIGG

SEQ ID NO: 22448 - protein, 85 aa, unidentified
  REGION 1..85: note = Description of Unknown:cds_NZ_WFIY01000004.1_cds_WP_155863355.1_1327 target sequence
STLISGYLKVYVTRAGERTYISQVVEAVNQAQTARLPIQNLVDKVASIFTPLIIGISAIVFVVWRFILGYSTEESLLFSVATLAS

SEQ ID NO: 22449 - protein, 85 aa, unidentified
  REGION 1..85: note = Description of Unknown:cds_NZ_WFIY01000004.1_cds_WP_155863355.1_1327 target sequence
ACPCPFGLATPLAVLTSVNRLAKKGIIVRNGESLETLKKVDTFIFDKTGTITEGKISVRAEGDKDAISYASALEKMSNHTVAKAI

SEQ ID NO: 22450 - protein, 85 aa, unidentified
  REGION 1..85: note = Description of Unknown:cds_NZ_WFIY01000004.1_cds_WP_155863355.1_1327 target sequence
SSISNGSFEVKDFTEFPGSGVYGKVNGHDVIVGKREFVLQNCEGEGKGDVLVCVDGKVSASFYLEDKIREDAVKVIEHLKRMGKR

SEQ ID NO: 22451 - protein, 85 aa, unidentified
  REGION 1..85: note = Description of Unknown:cds_NZ_WFIY01000004.1_cds_WP_155863355.1_1327 target sequence
IIIATGDTSENAEKVGKELGVEVIKGLSADEKAELVKSEVNKGRIVAFIGDGVNDAIALKEANVGIAISSGTDIAKYAGDIIIPK

SEQ ID NO: 22452 - protein, 84 aa, unidentified
  REGION 1..84: note = Description of Unknown:cds_NZ_WFIY01000004.1_cds_WP_155863355.1_1327 target sequence
TDIAKYAGDIIIPKVGDLLTLLEYSKLTVRKIKENLAWAFGYNSILVPIAAGILYPTLYLPPEYAALAMSMDSVAVSLWSLVKI

SEQ ID NO: 22453 - protein, 85 aa, unidentified
  REGION 1..85: note = Description of Unknown:cds_NZ_WFIY01000004.1_cds_WP_155863355.1_1327 target sequence
STVSKSIKSVKGVKDANVNLASGIARVEIENARLKDIVEAIKKAGYDVVTQKISFKVDINPEDARKIEEKVEEIKGVIKASVNPT

SEQ ID NO: 22454 - protein, 85 aa, unidentified
  REGION 1..85: note = Description of Unknown:cds_NZ_WFIY01000004.1_cds_WP_155863355.1_1327 target sequence
NGYVIVEFNPYSITSDELAEEIYKKTGHKVTKVKSEVTNKSEVKEMLERLIIAWIFTIPTLYFQYSGLLFIAFLTSIPVQFYAGL

SEQ ID NO: 22455 - protein, 85 aa, unidentified
  REGION 1..85: note = Description of Unknown:cds_NZ_WFIY01000004.1_cds_WP_155863355.1_1327 target sequence
RYHLGAYRALKNKTANMDTLVSLSTNVAWFYSVYALIVHQQVFFDVASLLISFILIGKTLEAYLKERISVQITSLKEVKATLADG

SEQ ID NO: 22456 - protein, 85 aa, unidentified
  REGION 1..85: note = Description of Unknown:cds_NZ_WFIY01000004.1_cds_WP_155863355.1_1327 target sequence
RIVKASELKVGDEIIVKSGEVIPADGIVDEGSGEVNESIVNGESLPVKKKKGDAVIGGSTLISGYLKVYVTRAGERTYISQVVEA

SEQ ID NO: 22457 - protein, 85 aa, unidentified
  REGION 1..85: note = Description of Unknown:cds_NZ_WFIY01000004.1_cds_WP_155863355.1_1327 target sequence
VNQAQTARLPIQNLVDKVASIFTPLIIGISAIVFVVWRFILGYSTEESLLFSVATLASACPCPFGLATPLAVLTSVNRLAKKGII

SEQ ID NO: 22458 - protein, 85 aa, unidentified
  REGION 1..85: note = Description of Unknown:cds_NZ_WFIY01000004.1_cds_WP_155863355.1_1327 target sequence
VRNGESLETLKKVDTFIFDKTGTITEGKISVRAEGDKDAISYASALEKMSNHTVAKAISSISNGSFEVKDFTEFPGSGVYGKVNG

SEQ ID NO: 22459 - protein, 85 aa, unidentified
  REGION 1..85: note = Description of Unknown:cds_NZ_WFIY01000004.1_cds_WP_155863355.1_1327 target sequence
HDVIVGKREFVLQNCEGEGKGDVLVCVDGKVSASFYLEDKIREDAVKVIEHLKRMGKRIIIATGDTSENAEKVGKELGVEVIKGL

SEQ ID NO: 22460 - protein, 85 aa, unidentified
  REGION 1..85: note = Description of Unknown:cds_NZ_WFIY01000004.1_cds_WP_155863355.1_1327 target sequence
SADEKAELVKSEVNKGRIVAFIGDGVNDAIALKEANVGIAISSGTDIAKYAGDIIIPKVGDLLTLLEYSKLTVRKIKENLAWAFG

SEQ ID NO: 22461 - protein, 85 aa, unidentified
  REGION 1..85: note = Description of Unknown:cds_NZ_WFIY01000004.1_cds_WP_155863019.1_901 target sequence
STPIKLKVSEARQRDVGRKIARLSENLMTKLKIDAGDYLEIIGPSGSSLIQAMPAYDINDDEIRIDGYIRKAIGASIGDEVEIRK

SEQ ID NO: 22462 - protein, 85 aa, unidentified
  REGION 1..85: note = Description of Unknown:cds_NZ_WFIY01000004.1_cds_WP_155863019.1_901 target sequence
ATVNKATKIVLAPTQPIRFDQSFVEYVKDQLMYKPLVKGETIPIPIYTGVIELVVVNTQPSNYVFVSSETQLDIKEEPVKAETTY

SEQ ID NO: 22463 - protein, 85 aa, unidentified
  REGION 1..85: note = Description of Unknown:cds_NZ_WFIY01000004.1_cds_WP_155863019.1_901 target sequence
AKVTWEDIGDLEDVKERIREIVELPMKHPELFQRLGIEPPKGILLYGPPGVGKTLLARALANEIGAYFISINGPEIMSKFYGESE

SEQ ID NO: 22464 - protein, 85 aa, unidentified
  REGION 1..85: note = Description of Unknown:cds_NZ_WFIY01000004.1_cds_WP_155863019.1_901 target sequence
ERLRQIFDEANKNAPSIIFIDEIDAIAPKREEVTGEVEKRVVAQLLTLMDGIKGRGKIIVIGATNRPDAIDPALRRPGRFDREIE

SEQ ID NO: 22465 - protein, 85 aa, unidentified
  REGION 1..85: note = Description of Unknown:cds_NZ_WFIY01000004.1_cds_WP_155863019.1_901 target sequence
IRPPDTKARKEILQVHTRSMPLSDDVNLDDIAEMTNGYTGADLAALAKEAAMVALRRFLATTKVNLDQGQIPAELLKELKVTMND

SEQ ID NO: 22466 - protein, 85 aa, unidentified
  REGION 1..85: note = Description of Unknown:cds_NZ_WFIY01000004.1_cds_WP_155863019.1_901 target sequence
FLEAMKSIQPTLLREVYVEVPKVRWSDIGGLEDVKQQLREAIEWQIKFPDVFTKSGIRAPKGVLLFGPPGTGKTMLAKAVATESG

SEQ ID NO: 22467 - protein, 85 aa, unidentified
  REGION 1..85: note = Description of Unknown:cds_NZ_WFIY01000004.1_cds_WP_155863019.1_901 target sequence
ANFIAVRGPEVLSKWVGESEKAIREIFRRARQTAPTVIFFDEIDSIAPMRGFAHDSGVTERIVNQLLAEMDGITPLNKVVVIAAT

SEQ ID NO: 22468 - protein, 85 aa, unidentified
  REGION 1..85: note = Description of Unknown:cds_NZ_WFIY01000004.1_cds_WP_155863019.1_901 target sequence
NRPDILDPALLRPGRFDRLIYVPPPDKKARLEILKVHTRNVPLADDVNLETLAEKTEGYTGADLEAVVREATMLMLRQVSATCEQ

SEQ ID NO: 22469 - protein, 84 aa, unidentified
  REGION 1..84: note = Description of Unknown:cds_NZ_WFIY01000004.1_cds_WP_155863019.1_901 target sequence
ATMLMLRQVSATCEQKSREVCTKDGKFVEECYNKEMRNCMNNFNSKVSMKEFEEALKIVSPSITKADIERYERLAKELKRSAVV

SEQ ID NO: 22470 - protein, 85 aa, unidentified
  REGION 1..85: note = Description of Unknown:cds_NZ_WFIY01000004.1_cds_WP_155863019.1_901 target sequence
MTKLKIDAGDYLEIIGPSGSSLIQAMPAYDINDDEIRIDGYIRKAIGASIGDEVEIRKATVNKATKIVLAPTQPIRFDQSFVEYV

SEQ ID NO: 22471 - protein, 85 aa, unidentified
  REGION 1..85: note = Description of Unknown:cds_NZ_WFIY01000004.1_cds_WP_155863019.1_901 target sequence
KDQLMYKPLVKGETIPIPIYTGVIELVVVNTQPSNYVFVSSETQLDIKEEPVKAETTYAKVTWEDIGDLEDVKERIREIVELPMK

SEQ ID NO: 22472 - protein, 85 aa, unidentified
  REGION 1..85: note = Description of Unknown:cds_NZ_WFIY01000004.1_cds_WP_155863019.1_901 target sequence
HPELFQRLGIEPPKGILLYGPPGVGKTLLARALANEIGAYFISINGPEIMSKFYGESEERLRQIFDEANKNAPSIIFIDEIDAIA

SEQ ID NO: 22473 - protein, 85 aa, unidentified
  REGION 1..85: note = Description of Unknown:cds_NZ_WFIY01000004.1_cds_WP_155863019.1_901 target sequence
PKREEVTGEVEKRVVAQLLTLMDGIKGRGKIIVIGATNRPDAIDPALRRPGRFDREIEIRPPDTKARKEILQVHTRSMPLSDDVN

SEQ ID NO: 22474 - protein, 85 aa, unidentified
  REGION 1..85: note = Description of Unknown:cds_NZ_WFIY01000004.1_cds_WP_155863019.1_901 target sequence
LDDIAEMTNGYTGADLAALAKEAAMVALRRFLATTKVNLDQGQIPAELLKELKVTMNDFLEAMKSIQPTLLREVYVEVPKVRWSD

SEQ ID NO: 22475 - protein, 85 aa, unidentified
  REGION 1..85: note = Description of Unknown:cds_NZ_WFIY01000004.1_cds_WP_155863019.1_901 target sequence
IGGLEDVKQQLREAIEWQIKFPDVFTKSGIRAPKGVLLFGPPGTGKTMLAKAVATESGANFIAVRGPEVLSKWVGESEKAIREIF

SEQ ID NO: 22476 - protein, 85 aa, unidentified
  REGION 1..85: note = Description of Unknown:cds_NZ_WFIY01000004.1_cds_WP_155863019.1_901 target sequence
RRARQTAPTVIFFDEIDSIAPMRGFAHDSGVTERIVNQLLAEMDGITPLNKVVVIAATNRPDILDPALLRPGRFDRLIYVPPPDK

SEQ ID NO: 22477 - protein, 85 aa, unidentified
  REGION 1..85: note = Description of Unknown:cds_NZ_WFIY01000004.1_cds_WP_155863019.1_901 target sequence
KARLEILKVHTRNVPLADDVNLETLAEKTEGYTGADLEAVVREATMLMLRQVSATCEQKSREVCTKDGKFVEECYNKEMRNCMNN

SEQ ID NO: 22478 - protein, 85 aa, unidentified
  REGION 1..85: note = Description of Unknown:cds_NZ_WFIY01000004.1_cds_WP_155864324.1_2328 target sequence
SYVGKPVKRLYDDKFVTGKSTYVDDIRMPALYAGFVRSTYPHAYIKRIDISDALKVNGIVAVFTSKEINPLLKGGIRPWPTYIDL

SEQ ID NO: 22479 - protein, 85 aa, unidentified
  REGION 1..85: note = Description of Unknown:cds_NZ_WFIY01000004.1_cds_WP_155864324.1_2328 target sequence
KSFRYIERKAFPENKVKYLGEPIAIVIGQDKYSVRDAIDKVVVDYEPLKPVTSMEEAEKDQIIVHDELKTNISYKIPFKAGEIDK

SEQ ID NO: 22480 - protein, 85 aa, unidentified
  REGION 1..85: note = Description of Unknown:cds_NZ_WFIY01000004.1_cds_WP_155864324.1_2328 target sequence
AFNEADKIVKVEAINERLIPNPMEPRGIIARYEGGTLSIWYSTQVPHYMRLEFSRIFGIPESKIKVSMPDVGGAFGSKVHLTPED

SEQ ID NO: 22481 - protein, 85 aa, unidentified
  REGION 1..85: note = Description of Unknown:cds_NZ_WFIY01000004.1_cds_WP_155864324.1_2328 target sequence
LAVVASSIILGRPVRWTATRSEEMLASEARHNVFTGEVAVKKDGTVLGIKGKLLLDLGAYMTVTAGLQPLIIPMMIPGPYKIRNL

SEQ ID NO: 22482 - protein, 85 aa, unidentified
  REGION 1..85: note = Description of Unknown:cds_NZ_WFIY01000004.1_cds_WP_155864324.1_2328 target sequence
DLESVAVYTNTPPITMYRGASRPEATYIIERIMSTVADELGLDDVTIRERNLVTELPYTNPFGLRYDSGDYIGLLKEGVKKLGYY

SEQ ID NO: 22483 - protein, 85 aa, unidentified
  REGION 1..85: note = Description of Unknown:cds_NZ_WFIY01000004.1_cds_WP_155864324.1_2328 target sequence
ELKKWAEEERKKGHRVGVGLAFYLEICSFGPWEYAEIRVDERGDVLVITGTTPHGQGTETAIAQLVADTFQIDINRVRVIWGDTD

SEQ ID NO: 22484 - protein, 85 aa, unidentified
  REGION 1..85: note = Description of Unknown:cds_NZ_WFIY01000004.1_cds_WP_155864324.1_2328 target sequence
TVAASMGTYGSRSITIGGSAAMKVAEKILDKMKRIAASTWNVDVQEVQYEKGEFRLKSDPSKRMSWDDVANLAYRSHDPGLVEKL

SEQ ID NO: 22485 - protein, 85 aa, unidentified
  REGION 1..85: note = Description of Unknown:cds_NZ_WFIY01000004.1_cds_WP_155864324.1_2328 target sequence
MYENDVTFPYGVHIAVVEVDDTGIARVLEYRAYDDIGKVINPALAEGQIHGGGLQAVGQALYEQALLNDNGQLIVTYADYYIPTV

SEQ ID NO: 22486 - protein, 84 aa, unidentified
  REGION 1..84: note = Description of Unknown:cds_NZ_WFIY01000004.1_cds_WP_155864324.1_2328 target sequence
NGQLIVTYADYYIPTVVEAPKFTSIFAENYHPSNYPTGSKGVGEAALIVGPAAIIRALEDAVGARFTKTPTTPEEILRTIMSKR

SEQ ID NO: 22487 - protein, 85 aa, unidentified
  REGION 1..85: note = Description of Unknown:cds_NZ_WFIY01000004.1_cds_WP_155864324.1_2328 target sequence
MPALYAGFVRSTYPHAYIKRIDISDALKVNGIVAVFTSKEINPLLKGGIRPWPTYIDLKSFRYIERKAFPENKVKYLGEPIAIVI

SEQ ID NO: 22488 - protein, 85 aa, unidentified
  REGION 1..85: note = Description of Unknown:cds_NZ_WFIY01000004.1_cds_WP_155864324.1_2328 target sequence
GQDKYSVRDAIDKVVVDYEPLKPVTSMEEAEKDQIIVHDELKTNISYKIPFKAGEIDKAFNEADKIVKVEAINERLIPNPMEPRG

SEQ ID NO: 22489 - protein, 85 aa, unidentified
  REGION 1..85: note = Description of Unknown:cds_NZ_WFIY01000004.1_cds_WP_155864324.1_2328 target sequence
IIARYEGGTLSIWYSTQVPHYMRLEFSRIFGIPESKIKVSMPDVGGAFGSKVHLTPEDLAVVASSIILGRPVRWTATRSEEMLAS

SEQ ID NO: 22490 - protein, 85 aa, unidentified
  REGION 1..85: note = Description of Unknown:cds_NZ_WFIY01000004.1_cds_WP_155864324.1_2328 target sequence
EARHNVFTGEVAVKKDGTVLGIKGKLLLDLGAYMTVTAGLQPLIIPMMIPGPYKIRNLDLESVAVYTNTPPITMYRGASRPEATY

SEQ ID NO: 22491 - protein, 85 aa, unidentified
  REGION 1..85: note = Description of Unknown:cds_NZ_WFIY01000004.1_cds_WP_155864324.1_2328 target sequence
IIERIMSTVADELGLDDVTIRERNLVTELPYTNPFGLRYDSGDYIGLLKEGVKKLGYYELKKWAEEERKKGHRVGVGLAFYLEIC

SEQ ID NO: 22492 - protein, 85 aa, unidentified
  REGION 1..85: note = Description of Unknown:cds_NZ_WFIY01000004.1_cds_WP_155864324.1_2328 target sequence
SFGPWEYAEIRVDERGDVLVITGTTPHGQGTETAIAQLVADTFQIDINRVRVIWGDTDTVAASMGTYGSRSITIGGSAAMKVAEK

SEQ ID NO: 22493 - protein, 85 aa, unidentified
  REGION 1..85: note = Description of Unknown:cds_NZ_WFIY01000004.1_cds_WP_155864324.1_2328 target sequence
ILDKMKRIAASTWNVDVQEVQYEKGEFRLKSDPSKRMSWDDVANLAYRSHDPGLVEKLMYENDVTFPYGVHIAVVEVDDTGIARV

SEQ ID NO: 22494 - protein, 85 aa, unidentified
  REGION 1..85: note = Description of Unknown:cds_NZ_WFIY01000004.1_cds_WP_155864324.1_2328 target sequence
LEYRAYDDIGKVINPALAEGQIHGGGLQAVGQALYEQALLNDNGQLIVTYADYYIPTVVEAPKFTSIFAENYHPSNYPTGSKGVG

SEQ ID NO: 22495 - protein, 85 aa, unidentified
  REGION 1..85: note = Description of Unknown:cds_NC_016144.1_cds_YP_004928135.1_1 target sequence
NRYLGHGTRTSRENTNLSELHGILSLGLNVDHTIVRKKSIPLFEIGNSDQVCNWIIQIIEAGVDLQDVADSFLTMLCVNHAYQGD

SEQ ID NO: 22496 - protein, 85 aa, unidentified
  REGION 1..85: note = Description of Unknown:cds_NC_016144.1_cds_YP_004928135.1_1 target sequence
PNLFLESPAAHYLKGHGIHFEIQHRDNVDHITDLLGVGSRDKSLRKTLSALEFEPDGSTTAGMFLSFASLFLPKLVVGERACLEK

SEQ ID NO: 22497 - protein, 85 aa, unidentified
  REGION 1..85: note = Description of Unknown:cds_NC_016144.1_cds_YP_004928135.1_1 target sequence
VQRQIQIHAEQGLIQYPTQWQSVGHMMVVFRLIRVNFVLKFLLVHQGMHMMAGHDANDAIIANSISQTRFSGLLIVKTVLEHILQ

SEQ ID NO: 22498 - protein, 85 aa, unidentified
  REGION 1..85: note = Description of Unknown:cds_NC_016144.1_cds_YP_004928135.1_1 target sequence
KTEAGVQLHPLARTSKVKGELLAFKSALEALASHREYAPFARLLNLSGVNNLEHGLYPQLSAIALGVATAHGSTLAGVNVSEQYQ

SEQ ID NO: 22499 - protein, 85 aa, unidentified
  REGION 1..85: note = Description of Unknown:cds_NC_016144.1_cds_YP_004928135.1_1 target sequence
QLREAATEAEKQLQQHSEMRELETLGLDEQERKILATFHSRKNEINIQQTSSILAIRKERLRKLTEALNEEKNKNALDDEDESEE

SEQ ID NO: 22500 - protein, 85 aa, unidentified
  REGION 1..85: note = Description of Unknown:cds_NC_016144.1_cds_YP_004928135.1_1 target sequence
DDWSPENRGIRSNKGSTKESSSYTASRTEEDRNNYNSKDDHLSGKEQMSTQQESGADDLDLFDLDDDGDTNSQDPNNRQKQSDTQ

SEQ ID NO: 22501 - protein, 85 aa, unidentified
  REGION 1..85: note = Description of Unknown:cds_NC_016144.1_cds_YP_004928135.1_1 target sequence
QTQESSDRSDYSRRPAYDWPPGDRPHTTQATDEHTDLLNKDHRRNQVKPGRRGNDPRTLPLISFDDNEGEILDDKSDLPAPDTHS

SEQ ID NO: 22502 - protein, 85 aa, unidentified
  REGION 1..85: note = Description of Unknown:cds_NC_016144.1_cds_YP_004928135.1_1 target sequence
DPDTEESEEEHPDEELLPPAPKYNTKTSEQEPGDWKQPTSPLSTIPEEEGGHEANNDNSESDLIDQMYQHIFETEGAYAAINYYY

SEQ ID NO: 22503 - protein, 84 aa, unidentified
  REGION 1..84: note = Description of Unknown:cds_NC_016144.1_cds_YP_004928135.1_1 target sequence
HIFETEGAYAAINYYYKTTGRPVTFTSNNNHDYTFPQDIEGLFPPWEGKENQKVAEILTNSLHETGQEWADMSAKERYLFLINN

SEQ ID NO: 22504 - protein, 85 aa, unidentified
  REGION 1..85: note = Description of Unknown:cds_NC_016144.1_cds_YP_004928135.1_1 target sequence
LNVDHTIVRKKSIPLFEIGNSDQVCNWIIQIIEAGVDLQDVADSFLTMLCVNHAYQGDPNLFLESPAAHYLKGHGIHFEIQHRDN

SEQ ID NO: 22505 - protein, 85 aa, unidentified
  REGION 1..85: note = Description of Unknown:cds_NC_016144.1_cds_YP_004928135.1_1 target sequence
VDHITDLLGVGSRDKSLRKTLSALEFEPDGSTTAGMFLSFASLFLPKLVVGERACLEKVQRQIQIHAEQGLIQYPTQWQSVGHMM

SEQ ID NO: 22506 - protein, 85 aa, unidentified
  REGION 1..85: note = Description of Unknown:cds_NC_016144.1_cds_YP_004928135.1_1 target sequence
VVFRLIRVNFVLKFLLVHQGMHMMAGHDANDAIIANSISQTRFSGLLIVKTVLEHILQKTEAGVQLHPLARTSKVKGELLAFKSA

SEQ ID NO: 22507 - protein, 85 aa, unidentified
  REGION 1..85: note = Description of Unknown:cds_NC_016144.1_cds_YP_004928135.1_1 target sequence
LEALASHREYAPFARLLNLSGVNNLEHGLYPQLSAIALGVATAHGSTLAGVNVSEQYQQLREAATEAEKQLQQHSEMRELETLGL

SEQ ID NO: 22508 - protein, 85 aa, unidentified
  REGION 1..85: note = Description of Unknown:cds_NC_016144.1_cds_YP_004928135.1_1 target sequence
DEQERKILATFHSRKNEINIQQTSSILAIRKERLRKLTEALNEEKNKNALDDEDESEEDDWSPENRGIRSNKGSTKESSSYTASR

SEQ ID NO: 22509 - protein, 85 aa, unidentified
  REGION 1..85: note = Description of Unknown:cds_NC_016144.1_cds_YP_004928135.1_1 target sequence
TEEDRNNYNSKDDHLSGKEQMSTQQESGADDLDLFDLDDDGDTNSQDPNNRQKQSDTQQTQESSDRSDYSRRPAYDWPPGDRPHT

SEQ ID NO: 22510 - protein, 85 aa, unidentified
  REGION 1..85: note = Description of Unknown:cds_NC_016144.1_cds_YP_004928135.1_1 target sequence
TQATDEHTDLLNKDHRRNQVKPGRRGNDPRTLPLISFDDNEGEILDDKSDLPAPDTHSDPDTEESEEEHPDEELLPPAPKYNTKT

SEQ ID NO: 22511 - protein, 85 aa, unidentified
  REGION 1..85: note = Description of Unknown:cds_NC_016144.1_cds_YP_004928135.1_1 target sequence
SEQEPGDWKQPTSPLSTIPEEEGGHEANNDNSESDLIDQMYQHIFETEGAYAAINYYYKTTGRPVTFTSNNNHDYTFPQDIEGLF

SEQ ID NO: 22512 - protein, 85 aa, unidentified
  REGION 1..85: note = Description of Unknown:cds_NZ_WFIY01000004.1_cds_WP_155864317.1_2316 target sequence
LKQIRPLYLLLYLTPLIFDIILLYTYLDNGIIYWLDSNYPFSPLILLRKILFYYWNDPFFSGAPLGYSQDSLFMGIIIFLLYNIF

SEQ ID NO: 22513 - protein, 85 aa, unidentified
  REGION 1..85: note = Description of Unknown:cds_NZ_WFIY01000004.1_cds_WP_155864317.1_2316 target sequence
HFSLELSEFIYLLPFIYLSQVGFVKLLNIIFEILEKRYSSYFTLIAGLLGGFIYSWGFYSYMPPILGVNYPFFIFYMLFPLVLYF

SEQ ID NO: 22514 - protein, 85 aa, unidentified
  REGION 1..85: note = Description of Unknown:cds_NZ_WFIY01000004.1_cds_WP_155864317.1_2316 target sequence
SIKYIFKEKVISFSLIILYLILASGTQFTTFTYLLWSIVLYLFTVVPIWLLSRKPSFVQFTVKNLVIALIVIVAGLEQLYQTYNA

SEQ ID NO: 22515 - protein, 85 aa, unidentified
  REGION 1..85: note = Description of Unknown:cds_NZ_WFIY01000004.1_cds_WP_155864317.1_2316 target sequence
SIGAYQVGVHGELLGKPIVISETEAQYKNFPLSSFISLYSPEKYEIIGVLIFVLIFATILFIKGKTGKFFAPLLFLLLIIGGSST

SEQ ID NO: 22516 - protein, 85 aa, unidentified
  REGION 1..85: note = Description of Unknown:cds_NZ_WFIY01000004.1_cds_WP_155864317.1_2316 target sequence
GIINVLPLYSLHSTPIGFIAIGLMYSIQYIFSGFPVSFVSSLIIGYTLLYILEYLGKRRNYIKILFILILLLSSSYIYSFRAGEV

SEQ ID NO: 22517 - protein, 85 aa, unidentified
  REGION 1..85: note = Description of Unknown:cds_NZ_WFIY01000004.1_cds_WP_155864317.1_2316 target sequence
HPEIRAFNLPVNATNIFYPPPELVSVGNYLSVHDEFYNVIEFPMQYAAGMYDDNGTKAVWYTIYPLSDYIMGQVIKSPANSASYP

SEQ ID NO: 22518 - protein, 85 aa, unidentified
  REGION 1..85: note = Description of Unknown:cds_NZ_WFIY01000004.1_cds_WP_155864317.1_2316 target sequence
IYKYFPAFNITNITNYFVLLGAKYIVLNKQEYPGPGVPLGYAGGYPWNYTKFIEALARTPNITLVMENSYYNVYMINLNVSLLYP

SEQ ID NO: 22519 - protein, 85 aa, unidentified
  REGION 1..85: note = Description of Unknown:cds_NZ_WFIY01000004.1_cds_WP_155864317.1_2316 target sequence
SEGLAENLSSDQLFFLYANNMLKAQKQSVIYGLGAINITNISGVHIRVVNDYCNEVYEIQVNASRPFYLVFDEGYSPLWEVTING

SEQ ID NO: 22520 - protein, 84 aa, unidentified
  REGION 1..84: note = Description of Unknown:cds_NZ_WFIY01000004.1_cds_WP_155864317.1_2316 target sequence
LVFDEGYSPLWEVTINGEINTHHYIANGYANAWLMPAGNYVATLKLSILQTVHITYLLVFLGFIILVLIYVLQRFKIFRYFKND

SEQ ID NO: 22521 - protein, 85 aa, unidentified
  REGION 1..85: note = Description of Unknown:cds_NZ_WFIY01000004.1_cds_WP_155864317.1_2316 target sequence
DNGIIYWLDSNYPFSPLILLRKILFYYWNDPFFSGAPLGYSQDSLFMGIIIFLLYNIFHFSLELSEFIYLLPFIYLSQVGFVKLL

SEQ ID NO: 22522 - protein, 85 aa, unidentified
  REGION 1..85: note = Description of Unknown:cds_NZ_WFIY01000004.1_cds_WP_155864317.1_2316 target sequence
NIIFEILEKRYSSYFTLIAGLLGGFIYSWGFYSYMPPILGVNYPFFIFYMLFPLVLYFSIKYIFKEKVISFSLIILYLILASGTQ

SEQ ID NO: 22523 - protein, 85 aa, unidentified
  REGION 1..85: note = Description of Unknown:cds_NZ_WFIY01000004.1_cds_WP_155864317.1_2316 target sequence
FTTFTYLLWSIVLYLFTVVPIWLLSRKPSFVQFTVKNLVIALIVIVAGLEQLYQTYNASIGAYQVGVHGELLGKPIVISETEAQY

SEQ ID NO: 22524 - protein, 85 aa, unidentified
  REGION 1..85: note = Description of Unknown:cds_NZ_WFIY01000004.1_cds_WP_155864317.1_2316 target sequence
KNFPLSSFISLYSPEKYEIIGVLIFVLIFATILFIKGKTGKFFAPLLFLLLIIGGSSTGIINVLPLYSLHSTPIGFIAIGLMYSI

SEQ ID NO: 22525 - protein, 85 aa, unidentified
  REGION 1..85: note = Description of Unknown:cds_NZ_WFIY01000004.1_cds_WP_155864317.1_2316 target sequence
QYIFSGFPVSFVSSLIIGYTLLYILEYLGKRRNYIKILFILILLLSSSYIYSFRAGEVHPEIRAFNLPVNATNIFYPPPELVSVG

SEQ ID NO: 22526 - protein, 85 aa, unidentified
  REGION 1..85: note = Description of Unknown:cds_NZ_WFIY01000004.1_cds_WP_155864317.1_2316 target sequence
NYLSVHDEFYNVIEFPMQYAAGMYDDNGTKAVWYTIYPLSDYIMGQVIKSPANSASYPIYKYFPAFNITNITNYFVLLGAKYIVL

SEQ ID NO: 22527 - protein, 85 aa, unidentified
  REGION 1..85: note = Description of Unknown:cds_NZ_WFIY01000004.1_cds_WP_155864317.1_2316 target sequence
NKQEYPGPGVPLGYAGGYPWNYTKFIEALARTPNITLVMENSYYNVYMINLNVSLLYPSEGLAENLSSDQLFFLYANNMLKAQKQ

SEQ ID NO: 22528 - protein, 85 aa, unidentified
  REGION 1..85: note = Description of Unknown:cds_NZ_WFIY01000004.1_cds_WP_155864317.1_2316 target sequence
SVIYGLGAINITNISGVHIRVVNDYCNEVYEIQVNASRPFYLVFDEGYSPLWEVTINGEINTHHYIANGYANAWLMPAGNYVATL

SEQ ID NO: 22529 - protein, 85 aa, unidentified
  REGION 1..85: note = Description of Unknown:cds_NZ_WFIY01000004.1_cds_WP_155863428.1_1408 target sequence
SSASSPYYFTFDWTKPVLIEPIVRIKPELGIQVTFDFNTNRATDAYASGGMFRGFEIFMRNKPGPDVIMLSSRECGICGEHHQYI

SEQ ID NO: 22530 - protein, 85 aa, unidentified
  REGION 1..85: note = Description of Unknown:cds_NZ_WFIY01000004.1_cds_WP_155863428.1_1408 target sequence
ERIAQEMAQGGNAPPPLGLEGIVLGIDAAMTYDATVHLSALGGPDWSSLFFKIAGYFPKEIYEIAQQTPLSKVAQYSEAFPMGAP

SEQ ID NO: 22531 - protein, 85 aa, unidentified
  REGION 1..85: note = Description of Unknown:cds_NZ_WFIY01000004.1_cds_WP_155863428.1_1408 target sequence
SELEMAGVKLKTVADIMDALVPIVGAYFLEGAYSWRILHEAELLYYLRIPHPITMVPGGIGVPPTIENLQRYFQRMVDGTAWLMK

SEQ ID NO: 22532 - protein, 85 aa, unidentified
  REGION 1..85: note = Description of Unknown:cds_NZ_WFIY01000004.1_cds_WP_155863428.1_1408 target sequence
QMAAYEYLDLFLADYDNVFGIQALYDKLNGTLGFAEEGNRPGNFVCYGQSDVSEAPVVTPSSTPVAPYDATYENMGDWGRARVVK

SEQ ID NO: 22533 - protein, 85 aa, unidentified
  REGION 1..85: note = Description of Unknown:cds_NZ_WFIY01000004.1_cds_WP_155863428.1_1408 target sequence
PGLVIQQSSTSPPTLVTNDLIDINLGIREFVESSWYNPWVKDGTFASEVPSEVAGITEDPIGNPVSYYHPWRKWTMPNPQPRPIP

SEQ ID NO: 22534 - protein, 85 aa, unidentified
  REGION 1..85: note = Description of Unknown:cds_NZ_WFIY01000004.1_cds_WP_155863428.1_1408 target sequence
MAYPTPYSWVVSPRFVPYQNHKPISNLYYNAEADPQAVMYAQVLQPQAPTPIYTSEYPTAGLGAKYNSNEMSVTFYLPTVQSPRI

SEQ ID NO: 22535 - protein, 85 aa, unidentified
  REGION 1..85: note = Description of Unknown:cds_NZ_WFIY01000004.1_cds_WP_155863428.1_1408 target sequence
SLPPEFQQGKEIEFKYIAPYKLSGGKIVTNAIERMRARAFAAGLDGMGMWIAWYTALKWLREGKTEVSSMPPSSWTYKKNTNQNV

SEQ ID NO: 22536 - protein, 85 aa, unidentified
  REGION 1..85: note = Description of Unknown:cds_NZ_WFIY01000004.1_cds_WP_155863428.1_1408 target sequence
AIGVGMKEAPRGAQFHSEVFATGTGVSVPTINPQQMQPTTVNAGPRVKLTYDDGIQTIKPASPTHGAGTFEEAIMGNPDYNIPGT

SEQ ID NO: 22537 - protein, 84 aa, unidentified
  REGION 1..84: note = Description of Unknown:cds_NZ_WFIY01000004.1_cds_WP_155863428.1_1408 target sequence
GTFEEAIMGNPDYNIPGTPRLTIIPTEQWDGFEFAQTLRSFDPCFVCGIHVITPDGRVRFQTLGAPVDLSNVIRTFYKFAMQLR

SEQ ID NO: 22538 - protein, 85 aa, unidentified
  REGION 1..85: note = Description of Unknown:cds_NZ_WFIY01000004.1_cds_WP_155863428.1_1408 target sequence
ELGIQVTFDFNTNRATDAYASGGMFRGFEIFMRNKPGPDVIMLSSRECGICGEHHQYIERIAQEMAQGGNAPPPLGLEGIVLGID

SEQ ID NO: 22539 - protein, 85 aa, unidentified
  REGION 1..85: note = Description of Unknown:cds_NZ_WFIY01000004.1_cds_WP_155863428.1_1408 target sequence
AAMTYDATVHLSALGGPDWSSLFFKIAGYFPKEIYEIAQQTPLSKVAQYSEAFPMGAPSELEMAGVKLKTVADIMDALVPIVGAY

SEQ ID NO: 22540 - protein, 85 aa, unidentified
  REGION 1..85: note = Description of Unknown:cds_NZ_WFIY01000004.1_cds_WP_155863428.1_1408 target sequence
FLEGAYSWRILHEAELLYYLRIPHPITMVPGGIGVPPTIENLQRYFQRMVDGTAWLMKQMAAYEYLDLFLADYDNVFGIQALYDK

SEQ ID NO: 22541 - protein, 85 aa, unidentified
  REGION 1..85: note = Description of Unknown:cds_NZ_WFIY01000004.1_cds_WP_155863428.1_1408 target sequence
LNGTLGFAEEGNRPGNFVCYGQSDVSEAPVVTPSSTPVAPYDATYENMGDWGRARVVKPGLVIQQSSTSPPTLVTNDLIDINLGI

SEQ ID NO: 22542 - protein, 85 aa, unidentified
  REGION 1..85: note = Description of Unknown:cds_NZ_WFIY01000004.1_cds_WP_155863428.1_1408 target sequence
REFVESSWYNPWVKDGTFASEVPSEVAGITEDPIGNPVSYYHPWRKWTMPNPQPRPIPMAYPTPYSWVVSPRFVPYQNHKPISNL

SEQ ID NO: 22543 - protein, 85 aa, unidentified
  REGION 1..85: note = Description of Unknown:cds_NZ_WFIY01000004.1_cds_WP_155863428.1_1408 target sequence
YYNAEADPQAVMYAQVLQPQAPTPIYTSEYPTAGLGAKYNSNEMSVTFYLPTVQSPRISLPPEFQQGKEIEFKYIAPYKLSGGKI

SEQ ID NO: 22544 - protein, 85 aa, unidentified
  REGION 1..85: note = Description of Unknown:cds_NZ_WFIY01000004.1_cds_WP_155863428.1_1408 target sequence
VTNAIERMRARAFAAGLDGMGMWIAWYTALKWLREGKTEVSSMPPSSWTYKKNTNQNVAIGVGMKEAPRGAQFHSEVFATGTGVS

SEQ ID NO: 22545 - protein, 85 aa, unidentified
  REGION 1..85: note = Description of Unknown:cds_NZ_WFIY01000004.1_cds_WP_155863428.1_1408 target sequence
VPTINPQQMQPTTVNAGPRVKLTYDDGIQTIKPASPTHGAGTFEEAIMGNPDYNIPGTPRLTIIPTEQWDGFEFAQTLRSFDPCF

SEQ ID NO: 22546 - protein, 85 aa, unidentified
  REGION 1..85: note = Description of Unknown:cds_NZ_WFIY01000004.1_cds_WP_155863480.1_1435 target sequence
KAYRILVSGIVQGVGFRPFIYRIAVKSNVYGYVKNLGGSEVEIKIIGREENIGKFFSLLFSKIPPPAKIEKILIEEDNVQDIHEF

SEQ ID NO: 22547 - protein, 85 aa, unidentified
  REGION 1..85: note = Description of Unknown:cds_NZ_WFIY01000004.1_cds_WP_155863480.1_1435 target sequence
KILPSGNVVNEPSQIPPDLSICDDCLREILDPKDRRYKYPFNSCAYCGPRYSMLYKIPYDRENTAMRDFPLCDKCKAEYEDPENE

SEQ ID NO: 22548 - protein, 85 aa, unidentified
  REGION 1..85: note = Description of Unknown:cds_NZ_WFIY01000004.1_cds_WP_155863480.1_1435 target sequence
RRFDAQGISCPICGPKVFLSTSDGEIIQDKDPIATAAKLIEEGYILAIKGIGGFHIAANPFDDDVVIKLRERKNRPQQPFALMAL

SEQ ID NO: 22549 - protein, 85 aa, unidentified
  REGION 1..85: note = Description of Unknown:cds_NZ_WFIY01000004.1_cds_WP_155863480.1_1435 target sequence
SVDVIKKYAEVSQLEEELLKSLERPIVLLRKKEDSEISKYVSPYLDREGFFLYYTGLHYLLLDNLKEKISIMTSGNKHGLPMCTD

SEQ ID NO: 22550 - protein, 85 aa, unidentified
  REGION 1..85: note = Description of Unknown:cds_NZ_WFIY01000004.1_cds_WP_155863480.1_1435 target sequence
EECVKTKLKGVVDYILYHNRKIVNRVDDSVIRISSGRIMFLRRSRGYAPTWIRIKRKLRKVTVAVGAELQNVGAVAFDDKVILTQ

SEQ ID NO: 22551 - protein, 85 aa, unidentified
  REGION 1..85: note = Description of Unknown:cds_NZ_WFIY01000004.1_cds_WP_155863480.1_1435 target sequence
YIGDTDELNTLEELEKYIKFFLNTYHLTPEVIVADKNPAYQSTRLASKLSEEYSAELVQVQHHLAHGLSAMAEYGLNDAVGIIID

SEQ ID NO: 22552 - protein, 85 aa, unidentified
  REGION 1..85: note = Description of Unknown:cds_NZ_WFIY01000004.1_cds_WP_155863480.1_1435 target sequence
GIGYGDDGNGWGGEVINIKDHGEKYSREYHLKYVPYTGGDINSLKPDRMLALFLSTFMNWNEIQNYVKLSDTELKVLEYQTRKNR

SEQ ID NO: 22553 - protein, 85 aa, unidentified
  REGION 1..85: note = Description of Unknown:cds_NZ_WFIY01000004.1_cds_WP_155863480.1_1435 target sequence
LFTSSTGRFLDSISALLDICHYRTYEGEPAIKLEAFARNGKLLDFEFPIINNEIDTTAAFKWIIENGIQDKPSIAYTIQYELGKA

SEQ ID NO: 22554 - protein, 84 aa, unidentified
  REGION 1..84: note = Description of Unknown:cds_NZ_WFIY01000004.1_cds_WP_155863480.1_1435 target sequence
ENGIQDKPSIAYTIQYELGKALVRAALKLNPEKIVVSGGASVNEYILKGMIENSEGVEILTQSKVPPGDGGIALGQVYYISEEK

SEQ ID NO: 22555 - protein, 85 aa, unidentified
  REGION 1..85: note = Description of Unknown:cds_NZ_WFIY01000004.1_cds_WP_155863480.1_1435 target sequence
NVYGYVKNLGGSEVEIKIIGREENIGKFFSLLFSKIPPPAKIEKILIEEDNVQDIHEFKILPSGNVVNEPSQIPPDLSICDDCLR

SEQ ID NO: 22556 - protein, 85 aa, unidentified
  REGION 1..85: note = Description of Unknown:cds_NZ_WFIY01000004.1_cds_WP_155863480.1_1435 target sequence
EILDPKDRRYKYPFNSCAYCGPRYSMLYKIPYDRENTAMRDFPLCDKCKAEYEDPENERRFDAQGISCPICGPKVFLSTSDGEII

SEQ ID NO: 22557 - protein, 85 aa, unidentified
  REGION 1..85: note = Description of Unknown:cds_NZ_WFIY01000004.1_cds_WP_155863480.1_1435 target sequence
QDKDPIATAAKLIEEGYILAIKGIGGFHIAANPFDDDVVIKLRERKNRPQQPFALMALSVDVIKKYAEVSQLEEELLKSLERPIV

SEQ ID NO: 22558 - protein, 85 aa, unidentified
  REGION 1..85: note = Description of Unknown:cds_NZ_WFIY01000004.1_cds_WP_155863480.1_1435 target sequence
LLRKKEDSEISKYVSPYLDREGFFLYYTGLHYLLLDNLKEKISIMTSGNKHGLPMCTDEECVKTKLKGVVDYILYHNRKIVNRVD

SEQ ID NO: 22559 - protein, 85 aa, unidentified
  REGION 1..85: note = Description of Unknown:cds_NZ_WFIY01000004.1_cds_WP_155863480.1_1435 target sequence
DSVIRISSGRIMFLRRSRGYAPTWIRIKRKLRKVTVAVGAELQNVGAVAFDDKVILTQYIGDTDELNTLEELEKYIKFFLNTYHL

SEQ ID NO: 22560 - protein, 85 aa, unidentified
  REGION 1..85: note = Description of Unknown:cds_NZ_WFIY01000004.1_cds_WP_155863480.1_1435 target sequence
TPEVIVADKNPAYQSTRLASKLSEEYSAELVQVQHHLAHGLSAMAEYGLNDAVGIIIDGIGYGDDGNGWGGEVINIKDHGEKYSR

SEQ ID NO: 22561 - protein, 85 aa, unidentified
  REGION 1..85: note = Description of Unknown:cds_NZ_WFIY01000004.1_cds_WP_155863480.1_1435 target sequence
EYHLKYVPYTGGDINSLKPDRMLALFLSTFMNWNEIQNYVKLSDTELKVLEYQTRKNRLFTSSTGRFLDSISALLDICHYRTYEG

SEQ ID NO: 22562 - protein, 85 aa, unidentified
  REGION 1..85: note = Description of Unknown:cds_NZ_WFIY01000004.1_cds_WP_155863480.1_1435 target sequence
EPAIKLEAFARNGKLLDFEFPIINNEIDTTAAFKWIIENGIQDKPSIAYTIQYELGKALVRAALKLNPEKIVVSGGASVNEYILK

SEQ ID NO: 22563 - protein, 85 aa, unidentified
  REGION 1..85: note = Description of Unknown:hvTR_Q6SW73 target sequence
ELHSRGRHDAPSLSSLSERERRARRARRFCLDYEPVPRKFRRERSPTSPSTRNGAAASEYHLAEDTVGAASHHHRPCVPARRPRY

SEQ ID NO: 22564 - protein, 85 aa, unidentified
  REGION 1..85: note = Description of Unknown:hvTR_Q6SW73 target sequence
SKDDDTEGDPDHYPPPLPPSSRHALGGTGGHIIMGTAGFRGGHRASSSFKRRVAASASVPLNPHYGKSYDNDDGEPHHHGGDSTH

SEQ ID NO: 22565 - protein, 85 aa, unidentified
  REGION 1..85: note = Description of Unknown:hvTR_Q6SW73 target sequence
LRRRVPSCPTTFGSSHPSSANNHHGSSAGPQQQQMLALIDDELDAMDEDELQQLSRLIEKKKRARLQRGAASSGTSPSSTSPVYD

SEQ ID NO: 22566 - protein, 85 aa, unidentified
  REGION 1..85: note = Description of Unknown:hvTR_Q6SW73 target sequence
LQRYTAESLRLAPYPADLKVPTAFPQDHQPRGRILLSHDELMHTDYLLHIRQQFDWLEEPLLRKLVVEKIFAVYNAPNLHTLLAI

SEQ ID NO: 22567 - protein, 85 aa, unidentified
  REGION 1..85: note = Description of Unknown:hvTR_Q6SW73 target sequence
IDETLSYMKYHHLHGLPVNPHDPYLETVGGMRQLLFNKLNNLDLGCILDHQDGWGDHCSTLKRLVKKPGQMSAWLRDDVCDLQKR

SEQ ID NO: 22568 - protein, 85 aa, unidentified
  REGION 1..85: note = Description of Unknown:hvTR_Q6SW73 target sequence
PPETFSQPMHRAMAYVCSFSRVAVSLRRRALQVTGTPQFFDQFDTNNAMGTYRCGAVSDLILGALQCHECQNEMCELRIQRALAP

SEQ ID NO: 22569 - protein, 85 aa, unidentified
  REGION 1..85: note = Description of Unknown:hvTR_Q6SW73 target sequence
YRFMIAYCPFDEQSLLDLTVFAGTTTTTASNHATAGGQQRGGDQIHPTDEQCASMESRTDPATLTAYDKKDREGSHRHPSPMIAA

SEQ ID NO: 22570 - protein, 85 aa, unidentified
  REGION 1..85: note = Description of Unknown:hvTR_Q6SW73 target sequence
AAPPAQPPSQPQQHYSEGELEEDEDSDDASSQDLVRATDRHGDTVVYKTTAVPPSPPAPLAGVRSHRGELNLMTPSPSHGGSPPQ

SEQ ID NO: 22571 - protein, 84 aa, unidentified
  REGION 1..84: note = Description of Unknown:hvTR_Q6SW73 target sequence
VRSHRGELNLMTPSPSHGGSPPQVPHKQPIIPVQSANGNHSTTATQQQQPPPPPPVPQEDDSVVMRCQTPDYEDMLCYSDDMDD

SEQ ID NO: 22572 - protein, 85 aa, unidentified
  REGION 1..85: note = Description of Unknown:hvTR_Q6SW73 target sequence
RFCLDYEPVPRKFRRERSPTSPSTRNGAAASEYHLAEDTVGAASHHHRPCVPARRPRYSKDDDTEGDPDHYPPPLPPSSRHALGG

SEQ ID NO: 22573 - protein, 85 aa, unidentified
  REGION 1..85: note = Description of Unknown:hvTR_Q6SW73 target sequence
TGGHIIMGTAGFRGGHRASSSFKRRVAASASVPLNPHYGKSYDNDDGEPHHHGGDSTHLRRRVPSCPTTFGSSHPSSANNHHGSS

SEQ ID NO: 22574 - protein, 85 aa, unidentified
  REGION 1..85: note = Description of Unknown:hvTR_Q6SW73 target sequence
AGPQQQQMLALIDDELDAMDEDELQQLSRLIEKKKRARLQRGAASSGTSPSSTSPVYDLQRYTAESLRLAPYPADLKVPTAFPQD

SEQ ID NO: 22575 - protein, 85 aa, unidentified
  REGION 1..85: note = Description of Unknown:hvTR_Q6SW73 target sequence
HQPRGRILLSHDELMHTDYLLHIRQQFDWLEEPLLRKLVVEKIFAVYNAPNLHTLLAIIDETLSYMKYHHLHGLPVNPHDPYLET

SEQ ID NO: 22576 - protein, 85 aa, unidentified
  REGION 1..85: note = Description of Unknown:hvTR_Q6SW73 target sequence
VGGMRQLLFNKLNNLDLGCILDHQDGWGDHCSTLKRLVKKPGQMSAWLRDDVCDLQKRPPETFSQPMHRAMAYVCSFSRVAVSLR

SEQ ID NO: 22577 - protein, 85 aa, unidentified
  REGION 1..85: note = Description of Unknown:hvTR_Q6SW73 target sequence
RRALQVTGTPQFFDQFDTNNAMGTYRCGAVSDLILGALQCHECQNEMCELRIQRALAPYRFMIAYCPFDEQSLLDLTVFAGTTTT

SEQ ID NO: 22578 - protein, 85 aa, unidentified
  REGION 1..85: note = Description of Unknown:hvTR_Q6SW73 target sequence
TASNHATAGGQQRGGDQIHPTDEQCASMESRTDPATLTAYDKKDREGSHRHPSPMIAAAAPPAQPPSQPQQHYSEGELEEDEDSD

SEQ ID NO: 22579 - protein, 85 aa, unidentified
  REGION 1..85: note = Description of Unknown:hvTR_Q6SW73 target sequence
DASSQDLVRATDRHGDTVVYKTTAVPPSPPAPLAGVRSHRGELNLMTPSPSHGGSPPQVPHKQPIIPVQSANGNHSTTATQQQQP

SEQ ID NO: 22580 - protein, 85 aa, unidentified
  REGION 1..85: note = Description of Unknown:cds_NZ_WFIY01000004.1_cds_WP_155863725.1_1590 target sequence
EVLDKLTEGLKLFSANVAHVHTETALEPELGSKVDDLQIDERLKNSLKNIGITRLYKFQEKALEEIESRKNVLIISGTGTGKTEA

SEQ ID NO: 22581 - protein, 85 aa, unidentified
  REGION 1..85: note = Description of Unknown:cds_NZ_WFIY01000004.1_cds_WP_155863725.1_1590 target sequence
FLIPILDLALKGEKSVIVYPTKALARDQLSRILRLTRNLPISVGIIDGDTPKIERDRLYANPPDILLTNPDMIHVGLSLSPNFRR

SEQ ID NO: 22582 - protein, 85 aa, unidentified
  REGION 1..85: note = Description of Unknown:cds_NZ_WFIY01000004.1_cds_WP_155863725.1_1590 target sequence
LIRSVKHFVFDEIHVYEGVLGSHLRMIIDRLKEFTNDIHVVASSATIDASPFMFQELFDEPGEIIEGTRRRRGMAIHILVDSKGM

SEQ ID NO: 22583 - protein, 85 aa, unidentified
  REGION 1..85: note = Description of Unknown:cds_NZ_WFIY01000004.1_cds_WP_155863725.1_1590 target sequence
SRWTLAAYLAALLIKNGLRTLVFTDSQQMAEVTAKIADRFGVNMQVHRAGILPSERIKIEEDLKNGKIMGVVATPTLELGIDIGD

SEQ ID NO: 22584 - protein, 85 aa, unidentified
  REGION 1..85: note = Description of Unknown:cds_NZ_WFIY01000004.1_cds_WP_155863725.1_1590 target sequence
LDVVIMAENPPSYSKYIQRAGRAGRRNRIGYIITILGDDPIDSYFLRKPEEFFNRKLTPLPFDTTNLEVIKVHAASYLLEKGMIK

SEQ ID NO: 22585 - protein, 85 aa, unidentified
  REGION 1..85: note = Description of Unknown:cds_NZ_WFIY01000004.1_cds_WP_155863725.1_1590 target sequence
LGSLPPLWVKALKELDKEGKVKIVNDVAYATKQTKIFVINSSLRSTGPIIKIYDREKKIGERELPVALYDIYPNAVYLVSKKNYI

SEQ ID NO: 22586 - protein, 85 aa, unidentified
  REGION 1..85: note = Description of Unknown:cds_NZ_WFIY01000004.1_cds_WP_155863725.1_1590 target sequence
VKDVDLNTLVARVERVDKDLPYYTKPLYDVDMVNFTEIESRKVYGLPVKYGEIEVRISVHGYIIHDFYSKKENRGKEIEYDVPLT

SEQ ID NO: 22587 - protein, 85 aa, unidentified
  REGION 1..85: note = Description of Unknown:cds_NZ_WFIY01000004.1_cds_WP_155863725.1_1590 target sequence
YTYKTKGLIIKHPILDDFSLIDGMEAYHATEHVLISAGRVVAGASLTDLSGISYPSGHVIIYDSVVGGSGVAKLLYDRLEDAYEV

SEQ ID NO: 22588 - protein, 84 aa, unidentified
  REGION 1..84: note = Description of Unknown:cds_NZ_WFIY01000004.1_cds_WP_155863725.1_1590 target sequence
IYDSVVGGSGVAKLLYDRLEDAYEVALDIVGKCDCEDGCPKCVYSPYCGNNNKMLSRKKSFRLISEVIKGKAASCDNMWGDSIS

SEQ ID NO: 22589 - protein, 85 aa, unidentified
  REGION 1..85: note = Description of Unknown:cds_NZ_WFIY01000004.1_cds_WP_155863725.1_1590 target sequence
PELGSKVDDLQIDERLKNSLKNIGITRLYKFQEKALEEIESRKNVLIISGTGTGKTEAFLIPILDLALKGEKSVIVYPTKALARD

SEQ ID NO: 22590 - protein, 85 aa, unidentified
  REGION 1..85: note = Description of Unknown:cds_NZ_WFIY01000004.1_cds_WP_155863725.1_1590 target sequence
QLSRILRLTRNLPISVGIIDGDTPKIERDRLYANPPDILLTNPDMIHVGLSLSPNFRRLIRSVKHFVFDEIHVYEGVLGSHLRMI

SEQ ID NO: 22591 - protein, 85 aa, unidentified
  REGION 1..85: note = Description of Unknown:cds_NZ_WFIY01000004.1_cds_WP_155863725.1_1590 target sequence
IDRLKEFTNDIHVVASSATIDASPFMFQELFDEPGEIIEGTRRRRGMAIHILVDSKGMSRWTLAAYLAALLIKNGLRTLVFTDSQ

SEQ ID NO: 22592 - protein, 85 aa, unidentified
  REGION 1..85: note = Description of Unknown:cds_NZ_WFIY01000004.1_cds_WP_155863725.1_1590 target sequence
QMAEVTAKIADRFGVNMQVHRAGILPSERIKIEEDLKNGKIMGVVATPTLELGIDIGDLDVVIMAENPPSYSKYIQRAGRAGRRN

SEQ ID NO: 22593 - protein, 85 aa, unidentified
  REGION 1..85: note = Description of Unknown:cds_NZ_WFIY01000004.1_cds_WP_155863725.1_1590 target sequence
RIGYIITILGDDPIDSYFLRKPEEFFNRKLTPLPFDTTNLEVIKVHAASYLLEKGMIKLGSLPPLWVKALKELDKEGKVKIVNDV

SEQ ID NO: 22594 - protein, 85 aa, unidentified
  REGION 1..85: note = Description of Unknown:cds_NZ_WFIY01000004.1_cds_WP_155863725.1_1590 target sequence
AYATKQTKIFVINSSLRSTGPIIKIYDREKKIGERELPVALYDIYPNAVYLVSKKNYIVKDVDLNTLVARVERVDKDLPYYTKPL

SEQ ID NO: 22595 - protein, 85 aa, unidentified
  REGION 1..85: note = Description of Unknown:cds_NZ_WFIY01000004.1_cds_WP_155863725.1_1590 target sequence
YDVDMVNFTEIESRKVYGLPVKYGEIEVRISVHGYIIHDFYSKKENRGKEIEYDVPLTYTYKTKGLIIKHPILDDFSLIDGMEAY

SEQ ID NO: 22596 - protein, 85 aa, unidentified
  REGION 1..85: note = Description of Unknown:cds_NZ_WFIY01000004.1_cds_WP_155863725.1_1590 target sequence
HATEHVLISAGRVVAGASLTDLSGISYPSGHVIIYDSVVGGSGVAKLLYDRLEDAYEVALDIVGKCDCEDGCPKCVYSPYCGNNN

SEQ ID NO: 22597 - protein, 85 aa, unidentified
  REGION 1..85: note = Description of Unknown:hvTR_B8XCM7 target sequence
DPRPIRTWMMHNTSEVEADYHKILTAGLSVQQGIVRQRIIPVYQISNLEEVCQLIIQAFEAGVDFQDSADSFLLMLCLHHAYQGD

SEQ ID NO: 22598 - protein, 85 aa, unidentified
  REGION 1..85: note = Description of Unknown:hvTR_B8XCM7 target sequence
YKQFLESNAVKYLEGHGFRFEMKKKEGVKRLEELLPAASSGKNIKRTLAAMPEEETTEANAGQFLSFASLFLPKLVVGEKACLEK

SEQ ID NO: 22599 - protein, 85 aa, unidentified
  REGION 1..85: note = Description of Unknown:hvTR_B8XCM7 target sequence
VQRQIQVHAEQGLIQYPTSWQSVGHMMVIFRLMRTNFLIKFLLIHQGMHMVAGHDANDAVIANSVAQARFSGLLIVKTVLDHILQ

SEQ ID NO: 22600 - protein, 85 aa, unidentified
  REGION 1..85: note = Description of Unknown:hvTR_B8XCM7 target sequence
KTEHGVRLHPLARTAKVKNEVSSFKAALASLAQHGEYAPFARLLNLSGVNNLEHGLFPQLSAIALGVATAHGSTLAGVNVGEQYQ

SEQ ID NO: 22601 - protein, 85 aa, unidentified
  REGION 1..85: note = Description of Unknown:hvTR_B8XCM7 target sequence
QLREAATEAEKQLQKYAESRELDHLGLDDQEKKILKDFHQKKNEISFQQTTAMVTLRKERLAKLTEAITSTSILKTGRRYDDDND

SEQ ID NO: 22602 - protein, 85 aa, unidentified
  REGION 1..85: note = Description of Unknown:hvTR_B8XCM7 target sequence
IPFPGPINDNENSGQNDDDPTDSQDTTIPDVIIDPNDGGYNNYSDYANDAASAPDDLVLFDLEDEDDADNPAQNTPEKNDRPATT

SEQ ID NO: 22603 - protein, 85 aa, unidentified
  REGION 1..85: note = Description of Unknown:hvTR_B8XCM7 target sequence
KLRNGQDQDGNQGETASPRVAPNQYRDKPMPQVQDRSENHDQTLQTQSRVLTPISEEADPSDHNDGDNESIPPLESDDEGSTDTT

SEQ ID NO: 22604 - protein, 85 aa, unidentified
  REGION 1..85: note = Description of Unknown:hvTR_B8XCM7 target sequence
AAETKPATAPPAPVYRSISVDDSVPSENIPAQSNQTNNEDNVRNNAQSEQSIAEMYQHILKTQGPFDAILYYHMMKEEPIIFSTS

SEQ ID NO: 22605 - protein, 84 aa, unidentified
  REGION 1..84: note = Description of Unknown:hvTR_B8XCM7 target sequence
LKTQGPFDAILYYHMMKEEPIIFSTSDGKEYTYPDSLEDEYPPWLSEKEAMNEDNRFITMDGQQFYWPVMNHRNKFMAILQHHR

SEQ ID NO: 22606 - protein, 85 aa, unidentified
  REGION 1..85: note = Description of Unknown:hvTR_B8XCM7 target sequence
LSVQQGIVRQRIIPVYQISNLEEVCQLIIQAFEAGVDFQDSADSFLLMLCLHHAYQGDYKQFLESNAVKYLEGHGFRFEMKKKEG

SEQ ID NO: 22607 - protein, 85 aa, unidentified
  REGION 1..85: note = Description of Unknown:hvTR_B8XCM7 target sequence
VKRLEELLPAASSGKNIKRTLAAMPEEETTEANAGQFLSFASLFLPKLVVGEKACLEKVQRQIQVHAEQGLIQYPTSWQSVGHMM

SEQ ID NO: 22608 - protein, 85 aa, unidentified
  REGION 1..85: note = Description of Unknown:hvTR_B8XCM7 target sequence
VIFRLMRTNFLIKFLLIHQGMHMVAGHDANDAVIANSVAQARFSGLLIVKTVLDHILQKTEHGVRLHPLARTAKVKNEVSSFKAA

SEQ ID NO: 22609 - protein, 85 aa, unidentified
  REGION 1..85: note = Description of Unknown:hvTR_B8XCM7 target sequence
LASLAQHGEYAPFARLLNLSGVNNLEHGLFPQLSAIALGVATAHGSTLAGVNVGEQYQQLREAATEAEKQLQKYAESRELDHLGL

SEQ ID NO: 22610 - protein, 85 aa, unidentified
  REGION 1..85: note = Description of Unknown:hvTR_B8XCM7 target sequence
DDQEKKILKDFHQKKNEISFQQTTAMVTLRKERLAKLTEAITSTSILKTGRRYDDDNDIPFPGPINDNENSGQNDDDPTDSQDTT

SEQ ID NO: 22611 - protein, 85 aa, unidentified
  REGION 1..85: note = Description of Unknown:hvTR_B8XCM7 target sequence
IPDVIIDPNDGGYNNYSDYANDAASAPDDLVLFDLEDEDDADNPAQNTPEKNDRPATTKLRNGQDQDGNQGETASPRVAPNQYRD

SEQ ID NO: 22612 - protein, 85 aa, unidentified
  REGION 1..85: note = Description of Unknown:hvTR_B8XCM7 target sequence
KPMPQVQDRSENHDQTLQTQSRVLTPISEEADPSDHNDGDNESIPPLESDDEGSTDTTAAETKPATAPPAPVYRSISVDDSVPSE

SEQ ID NO: 22613 - protein, 85 aa, unidentified
  REGION 1..85: note = Description of Unknown:hvTR_B8XCM7 target sequence
NIPAQSNQTNNEDNVRNNAQSEQSIAEMYQHILKTQGPFDAILYYHMMKEEPIIFSTSDGKEYTYPDSLEDEYPPWLSEKEAMNE

SEQ ID NO: 22614 - protein, 85 aa, unidentified
  REGION 1..85: note = Description of Unknown:hvTR_A0A2Z2FMG9 target sequence
DSRPQKVWMTPSLTESDMDYHKILTAGLSVQQGIVRQRVIPVYQVNNLEEICQLIIQAFEAGVDFQESADSFLLMLCLHHAYQGD

SEQ ID NO: 22615 - protein, 85 aa, unidentified
  REGION 1..85: note = Description of Unknown:hvTR_A0A2Z2FMG9 target sequence
HKLFLESGAVKYLEGHGFRFEVKKRDGVKRLEELLPAVSSGKNIKRTLAAMPEEETTEANAGQFLSFASLFLPKLVVGEKACLEK

SEQ ID NO: 22616 - protein, 85 aa, unidentified
  REGION 1..85: note = Description of Unknown:hvTR_A0A2Z2FMG9 target sequence
VQRQIQVHAEQGLIQYPTAWQSVGHMMVIFRLMRTNFLIKFLLIHQGMHMVAGHDANDAVISNSVAQARFSGLLIVKTVLDHILQ

SEQ ID NO: 22617 - protein, 85 aa, unidentified
  REGION 1..85: note = Description of Unknown:hvTR_A0A2Z2FMG9 target sequence
KTERGVRLHPLARTAKVKNEVNSFKAALSSLAKHGEYAPFARLLNLSGVNNLEHGLFPQLSAIALGVATAHGSTLAGVNVGEQYQ

SEQ ID NO: 22618 - protein, 85 aa, unidentified
  REGION 1..85: note = Description of Unknown:hvTR_A0A2Z2FMG9 target sequence
QLREAATEAEKQLQQYAESRELDHLGLDDQEKKILMNFHQKKNEISFQQTNAMVTLRKERLAKLTEAITAASLPKTSGPYDDDDD

SEQ ID NO: 22619 - protein, 85 aa, unidentified
  REGION 1..85: note = Description of Unknown:hvTR_A0A2Z2FMG9 target sequence
IPFPGPINDDDNPGHQDDDPTDSQDTTIPDVVVDPDDGSYGEYQSYSENGMNAPDDLVLFDLDEDDEDTKPVPNRLTKGGQQKNS

SEQ ID NO: 22620 - protein, 85 aa, unidentified
  REGION 1..85: note = Description of Unknown:hvTR_A0A2Z2FMG9 target sequence
QKGQHTEGRQTQSRPTQNVPGPRRTIHHASAPLTDNDRGNEPSGSTSPRMLTPINEEADPLDDADDETSSLPPLESDDEEQDRDE

SEQ ID NO: 22621 - protein, 85 aa, unidentified
  REGION 1..85: note = Description of Unknown:hvTR_A0A2Z2FMG9 target sequence
TSNRTPTVAPPAPVYRDHSEKKELPQDEQQDQDHTQEARNQDSDNTQPEHSFEEMYRHILRSQGPFDAVLYYHMMKDEPVVFSTS

SEQ ID NO: 22622 - protein, 84 aa, unidentified
  REGION 1..84: note = Description of Unknown:hvTR_A0A2Z2FMG9 target sequence
LRSQGPFDAVLYYHMMKDEPVVFSTSDGKEYTYPDSLEEEYPPWLTEKEAMNEENRFVTLDGQQFYWPVMNHKNKFMAILQHHQ

SEQ ID NO: 22623 - protein, 85 aa, unidentified
  REGION 1..85: note = Description of Unknown:hvTR_A0A2Z2FMG9 target sequence
LSVQQGIVRQRVIPVYQVNNLEEICQLIIQAFEAGVDFQESADSFLLMLCLHHAYQGDHKLFLESGAVKYLEGHGFRFEVKKRDG

SEQ ID NO: 22624 - protein, 85 aa, unidentified
  REGION 1..85: note = Description of Unknown:hvTR_A0A2Z2FMG9 target sequence
VKRLEELLPAVSSGKNIKRTLAAMPEEETTEANAGQFLSFASLFLPKLVVGEKACLEKVQRQIQVHAEQGLIQYPTAWQSVGHMM

SEQ ID NO: 22625 - protein, 85 aa, unidentified
  REGION 1..85: note = Description of Unknown:hvTR_A0A2Z2FMG9 target sequence
VIFRLMRTNFLIKFLLIHQGMHMVAGHDANDAVISNSVAQARFSGLLIVKTVLDHILQKTERGVRLHPLARTAKVKNEVNSFKAA

SEQ ID NO: 22626 - protein, 85 aa, unidentified
  REGION 1..85: note = Description of Unknown:hvTR_A0A2Z2FMG9 target sequence
LSSLAKHGEYAPFARLLNLSGVNNLEHGLFPQLSAIALGVATAHGSTLAGVNVGEQYQQLREAATEAEKQLQQYAESRELDHLGL

SEQ ID NO: 22627 - protein, 85 aa, unidentified
  REGION 1..85: note = Description of Unknown:hvTR_A0A2Z2FMG9 target sequence
DDQEKKILMNFHQKKNEISFQQTNAMVTLRKERLAKLTEAITAASLPKTSGPYDDDDDIPFPGPINDDDNPGHQDDDPTDSQDTT

SEQ ID NO: 22628 - protein, 85 aa, unidentified
  REGION 1..85: note = Description of Unknown:hvTR_A0A2Z2FMG9 target sequence
IPDVVVDPDDGSYGEYQSYSENGMNAPDDLVLFDLDEDDEDTKPVPNRLTKGGQQKNSQKGQHTEGRQTQSRPTQNVPGPRRTIH

SEQ ID NO: 22629 - protein, 85 aa, unidentified
  REGION 1..85: note = Description of Unknown:hvTR_A0A2Z2FMG9 target sequence
HASAPLTDNDRGNEPSGSTSPRMLTPINEEADPLDDADDETSSLPPLESDDEEQDRDETSNRTPTVAPPAPVYRDHSEKKELPQD

SEQ ID NO: 22630 - protein, 85 aa, unidentified
  REGION 1..85: note = Description of Unknown:hvTR_A0A2Z2FMG9 target sequence
EQQDQDHTQEARNQDSDNTQPEHSFEEMYRHILRSQGPFDAVLYYHMMKDEPVVFSTSDGKEYTYPDSLEEEYPPWLTEKEAMNE

SEQ ID NO: 22631 - protein, 85 aa, unidentified
  REGION 1..85: note = Description of Unknown:hvTR_Q8JPY1 target sequence
DRGTRRIWVSQNQGDTDLDYHKILTAGLTVQQGIVRQKIISVYLVDNLEAMCQLVIQAFEAGIDFQENADSFLLMLCLHHAYQGD

SEQ ID NO: 22632 - protein, 85 aa, unidentified
  REGION 1..85: note = Description of Unknown:hvTR_Q8JPY1 target sequence
YKLFLESNAVQYLEGHGFKFELRKKDGVNRLEELLPAATSGKNIRRTLAALPEEETTEANAGQFLSFASLFLPKLVVGEKACLEK

SEQ ID NO: 22633 - protein, 85 aa, unidentified
  REGION 1..85: note = Description of Unknown:hvTR_Q8JPY1 target sequence
VQRQIQVHAEQGLIQYPTAWQSVGHMMVIFRLMRTNFLIKYLLIHQGMHMVAGHDANDAVIANSVAQARFSGLLIVKTVLDHILQ

SEQ ID NO: 22634 - protein, 85 aa, unidentified
  REGION 1..85: note = Description of Unknown:hvTR_Q8JPY1 target sequence
KTDQGVRLHPLARTAKVRNEVNAFKAALSSLAKHGEYAPFARLLNLSGVNNLEHGLYPQLSAIALGVATAHGSTLAGVNVGEQYQ

SEQ ID NO: 22635 - protein, 85 aa, unidentified
  REGION 1..85: note = Description of Unknown:hvTR_Q8JPY1 target sequence
QLREAATEAEKQLQQYAESRELDSLGLDDQERRILMNFHQKKNEISFQQTNAMVTLRKERLAKLTEAITLASRPNLGSRQDDGNE

SEQ ID NO: 22636 - protein, 85 aa, unidentified
  REGION 1..85: note = Description of Unknown:hvTR_Q8JPY1 target sequence
IPFPGPISNNPDQDHLEDDPRDSRDTIIPNGAIDPEDGDFENYNGYHDDEVGTAGDLVLFDLDDHEDDNKAFEPQDSSPQSQREI

SEQ ID NO: 22637 - protein, 85 aa, unidentified
  REGION 1..85: note = Description of Unknown:hvTR_Q8JPY1 target sequence
ERERLIHPPPGNNKDDNRASDNNQQSADSEEQGGQYNWHRGPERTTANRRLSPVHEEDTLMDQGDDDPSSLPPLESDDDDASSSQ

SEQ ID NO: 22638 - protein, 85 aa, unidentified
  REGION 1..85: note = Description of Unknown:hvTR_Q8JPY1 target sequence
QDPDYTAVAPPAPVYRSAEAHEPPHKSSNEPAETSQLNEDPDIGQSKSMQKLEETYHHLLRTQGPFEAINYYHMMKDEPVIFSTD

SEQ ID NO: 22639 - protein, 84 aa, unidentified
  REGION 1..84: note = Description of Unknown:hvTR_Q8JPY1 target sequence
LRTQGPFEAINYYHMMKDEPVIFSTDDGKEYTYPDSLEEAYPPWLTEKERLDKENRYIYINNQQFFWPVMSPRDKFLAILQHHQ

SEQ ID NO: 22640 - protein, 85 aa, unidentified
  REGION 1..85: note = Description of Unknown:hvTR_Q8JPY1 target sequence
LTVQQGIVRQKIISVYLVDNLEAMCQLVIQAFEAGIDFQENADSFLLMLCLHHAYQGDYKLFLESNAVQYLEGHGFKFELRKKDG

SEQ ID NO: 22641 - protein, 85 aa, unidentified
  REGION 1..85: note = Description of Unknown:hvTR_Q8JPY1 target sequence
VNRLEELLPAATSGKNIRRTLAALPEEETTEANAGQFLSFASLFLPKLVVGEKACLEKVQRQIQVHAEQGLIQYPTAWQSVGHMM

SEQ ID NO: 22642 - protein, 85 aa, unidentified
  REGION 1..85: note = Description of Unknown:hvTR_Q8JPY1 target sequence
VIFRLMRTNFLIKYLLIHQGMHMVAGHDANDAVIANSVAQARFSGLLIVKTVLDHILQKTDQGVRLHPLARTAKVRNEVNAFKAA

SEQ ID NO: 22643 - protein, 85 aa, unidentified
  REGION 1..85: note = Description of Unknown:hvTR_Q8JPY1 target sequence
LSSLAKHGEYAPFARLLNLSGVNNLEHGLYPQLSAIALGVATAHGSTLAGVNVGEQYQQLREAATEAEKQLQQYAESRELDSLGL

SEQ ID NO: 22644 - protein, 85 aa, unidentified
  REGION 1..85: note = Description of Unknown:hvTR_Q8JPY1 target sequence
DDQERRILMNFHQKKNEISFQQTNAMVTLRKERLAKLTEAITLASRPNLGSRQDDGNEIPFPGPISNNPDQDHLEDDPRDSRDTI

SEQ ID NO: 22645 - protein, 85 aa, unidentified
  REGION 1..85: note = Description of Unknown:hvTR_Q8JPY1 target sequence
IPNGAIDPEDGDFENYNGYHDDEVGTAGDLVLFDLDDHEDDNKAFEPQDSSPQSQREIERERLIHPPPGNNKDDNRASDNNQQSA

SEQ ID NO: 22646 - protein, 85 aa, unidentified
  REGION 1..85: note = Description of Unknown:hvTR_Q8JPY1 target sequence
DSEEQGGQYNWHRGPERTTANRRLSPVHEEDTLMDQGDDDPSSLPPLESDDDDASSSQQDPDYTAVAPPAPVYRSAEAHEPPHKS

SEQ ID NO: 22647 - protein, 85 aa, unidentified
  REGION 1..85: note = Description of Unknown:hvTR_Q8JPY1 target sequence
SNEPAETSQLNEDPDIGQSKSMQKLEETYHHLLRTQGPFEAINYYHMMKDEPVIFSTDDGKEYTYPDSLEEAYPPWLTEKERLDK

SEQ ID NO: 22648 - protein, 85 aa, unidentified
  REGION 1..85: note = Description of Unknown:hvTR_P18272 target sequence
DSRPQKIWMAPSLTESDMDYHKILTAGLSVQQGIVRQRVIPVYQVNNLEEICQLIIQAFEAGVDFQESADSFLLMLCLHHAYQGD

SEQ ID NO: 22649 - protein, 85 aa, unidentified
  REGION 1..85: note = Description of Unknown:hvTR_P18272 target sequence
YKLFLESGAVKYLEGHGFRFEVKKRDGVKRLEELLPAVSSGKNIKRTLAAMPEEETTEANAGQFLSFASLFLPKLVVGEKACLRK

SEQ ID NO: 22650 - protein, 85 aa, unidentified; identical to SEQ ID NO: 22616
  REGION 1..85: note = Description of Unknown:hvTR_P18272 target sequence

SEQ ID NO: 22651 - protein, 85 aa, unidentified
  REGION 1..85: note = Description of Unknown:hvTR_P18272 target sequence
KTERGVRLHPLARTAKVKNEVNSLKAALSSLAKHGEYAPFARLLNLSGVNNLEHGLFPQLSAIALGVATAHGSTLAGVNVGEQYQ

SEQ ID NO: 22652 - protein, 85 aa, unidentified
  REGION 1..85: note = Description of Unknown:hvTR_P18272 target sequence
QLREAATEAEKQLQQYAESRELDHLGLDDQEKKILMNFHQKKNEISFQQTNAMVTLRKERLAKLTEAITAASLPKTSGHYDDDDD

SEQ ID NO: 22653 - protein, 85 aa, unidentified
  REGION 1..85: note = Description of Unknown:hvTR_P18272 target sequence
IPFPGPINDDDNPGHQDDDPTDSQDTTIPDVVVDPDDGSYGEYQSYSENGMNAPDDLVLFDLDEDDEDTKPVPNRSTKGGQQKNS

SEQ ID NO: 22654 - protein, 85 aa, unidentified
  REGION 1..85: note = Description of Unknown:hvTR_P18272 target sequence
QKGQHIEGRQTQSRPIQNVPGPHRTIHHASAPLTDNDRRNEPSGSTSPRMLTPINEEADPLDDADDETSSLPPLESDDEEQDRDG

SEQ ID NO: 22655 - protein, 85 aa, unidentified
  REGION 1..85: note = Description of Unknown:hvTR_P18272 target sequence
TSNRTPTVAPPAPVYRDHSEKKELPQDEQQDQDHTQEARNQDSDNTQSEHSFEEMYRHILRSQGPFDAVLYYHMMKDEPVVFSTS

SEQ ID NO: 22656 - protein, 84 aa, unidentified; identical to SEQ ID NO: 22622
  REGION 1..84: note = Description of Unknown:hvTR_P18272 target sequence

SEQ ID NO: 22657 - protein, 85 aa, unidentified
  REGION 1..85: note = Description of Unknown:hvTR_P18272 target sequence
LSVQQGIVRQRVIPVYQVNNLEEICQLIIQAFEAGVDFQESADSFLLMLCLHHAYQGDYKLFLESGAVKYLEGHGFRFEVKKRDG

SEQ ID NO: 22658 - protein, 85 aa, unidentified
  REGION 1..85: note = Description of Unknown:hvTR_P18272 target sequence
VKRLEELLPAVSSGKNIKRTLAAMPEEETTEANAGQFLSFASLFLPKLVVGEKACLRKVQRQIQVHAEQGLIQYPTAWQSVGHMM

SEQ ID NO: 22659 - protein, 85 aa, unidentified
  REGION 1..85: note = Description of Unknown:hvTR_P18272 target sequence
VIFRLMRTNFLIKFLLIHQGMHMVAGHDANDAVISNSVAQARFSGLLIVKTVLDHILQKTERGVRLHPLARTAKVKNEVNSLKAA

SEQ ID NO: 22660 - protein, 85 aa, unidentified; identical to SEQ ID NO: 22626
  REGION 1..85: note = Description of Unknown:hvTR_P18272 target sequence

SEQ ID NO: 22661 - protein, 85 aa, unidentified
  REGION 1..85: note = Description of Unknown:hvTR_P18272 target sequence
DDQEKKILMNFHQKKNEISFQQTNAMVTLRKERLAKLTEAITAASLPKTSGHYDDDDDIPFPGPINDDDNPGHQDDDPTDSQDTT

SEQ ID NO: 22662 - protein, 85 aa, unidentified
  REGION 1..85: note = Description of Unknown:hvTR_P18272 target sequence
IPDVVVDPDDGSYGEYQSYSENGMNAPDDLVLFDLDEDDEDTKPVPNRSTKGGQQKNSQKGQHIEGRQTQSRPIQNVPGPHRTIH

SEQ ID NO: 22663 - protein, 85 aa, unidentified
  REGION 1..85: note = Description of Unknown:hvTR_P18272 target sequence
HASAPLTDNDRRNEPSGSTSPRMLTPINEEADPLDDADDETSSLPPLESDDEEQDRDGTSNRTPTVAPPAPVYRDHSEKKELPQD

SEQ ID NO: 22664 - protein, 85 aa, unidentified
  REGION 1..85: note = Description of Unknown:hvTR_P18272 target sequence
EQQDQDHTQEARNQDSDNTQSEHSFEEMYRHILRSQGPFDAVLYYHMMKDEPVVFSTSDGKEYTYPDSLEEEYPPWLTEKEAMNE

SEQ ID NO: 22665 - protein, 85 aa, unidentified
  REGION 1..85: note = Description of Unknown:cds_NC_002549.1_cds_NP_066243.1_1 target sequence
YKLFLESGAVKYLEGHGFRFEVKKRDGVKRLEELLPAVSSGKNIKRTLAAMPEEETTEANAGQFLSFASLFLPKLVVGEKACLEK

SEQ ID NO: 22666 - protein, 85 aa, unidentified; identical to SEQ ID NO: 22617
  REGION 1..85: note = Description of Unknown:cds_NC_002549.1_cds_NP_066243.1_1 target sequence

SEQ ID NO: 22667 - protein, 85 aa, unidentified; identical to SEQ ID NO: 22624
  REGION 1..85: note = Description of Unknown:cds_NC_002549.1_cds_NP_066243.1_1 target sequence

SEQ ID NO: 22668 - protein, 85 aa, unidentified; identical to SEQ ID NO: 22625
  REGION 1..85: note = Description of Unknown:cds_NC_002549.1_cds_NP_066243.1_1 target sequence

SEQ ID NO: 22669 - protein, 85 aa, unidentified
  REGION 1..85: note = Description of Unknown:cds_NC_030656.1_cds_YP_009268745.1_30 target sequence
LNIAAIKRDVAEAKCQNVKLSCVFRNLKSNEIDEFIKKGFHPSKLSRKNYSSVVQNTPLKLYLFKPQHVNPLDLLMVLQYQTNPT

SEQ ID NO: 22670 - protein, 85 aa, unidentified
  REGION 1..85: note = Description of Unknown:cds_NC_030656.1_cds_YP_009268745.1_30 target sequence
IYANHIQYHQSYILQHGSFELVSRCVPHMILTDNDVRYISEKYPEQSDILLATVSYKSIRRLSYLFTEEIARDMILNDDIIADAL

SEQ ID NO: 22671 - protein, 85 aa, unidentified
  REGION 1..85: note = Description of Unknown:cds_NC_030656.1_cds_YP_009268745.1_30 target sequence
YEHQLFSEEFLWDMHFSYGIVPANKGIDSVSPKDLKTILAGVTTPKSAINLISVLPKSILMSTPIKTYILSCIVDGEKLEHYISY

SEQ ID NO: 22672 - protein, 85 aa, unidentified
  REGION 1..85: note = Description of Unknown:cds_NC_030656.1_cds_YP_009268745.1_30 target sequence
AKEFLKDHVQDVGIYVNIIFPENGIDLNSYPNELSRIQLSNVCKFIDCYTVSIDFIINVLIEKEYYDLLGLIIEKIDTSVMDETL

SEQ ID NO: 22673 - protein, 85 aa, unidentified
  REGION 1..85: note = Description of Unknown:cds_NC_030656.1_cds_YP_009268745.1_30 target sequence
CVNIVKHSINPIKVRHIPVHSLAVATECAKKKYVDLVDFLDCLDLTTLLSVAEQTLFTTYAFETNWLNDNFELLALYVHQYGFCA

SEQ ID NO: 22674 - protein, 85 aa, unidentified
  REGION 1..85: note = Description of Unknown:cds_NC_030656.1_cds_YP_009268745.1_30 target sequence
YRMKKLLFEYPLQSDTVNLLLNLMFIGSKESLFSDKVINSLEYFMCSTELGNFKPLTLKTVNVTISLYDNQANHETYPSVYSNDL

SEQ ID NO: 22675 - protein, 85 aa, unidentified
  REGION 1..85: note = Description of Unknown:cds_NC_030656.1_cds_YP_009268745.1_30 target sequence
KNALQTIIIPNLQSLLFRDVSTVKMAKGICLQYYLDVNWLTDEERLCKQISDIATFATYGLFYIPDCAPNWVPASQLAKCEPMEQ

SEQ ID NO: 22676 - protein, 85 aa, unidentified
  REGION 1..85: note = Description of Unknown:cds_NC_030656.1_cds_YP_009268745.1_30 target sequence
PTVLKGDIDALVLNKLTKFINLGMETTKQYKLLEPMSNDQAALNSLLVTIVSYLVIGSVRYVGVNNIQRFVTKIISQYCEVLKSD

SEQ ID NO: 22677 - protein, 84 aa, unidentified
  REGION 1..84: note = Description of Unknown:cds_NC_030656.1_cds_YP_009268745.1_30 target sequence
RYVGVNNIQRFVTKIISQYCEVLKSDESVYESVTEVVQELTELKKSIRHISDVIDIKLKKIVNTVELGATLVRVFYNNHNNKFT

SEQ ID NO: 22678 - protein, 85 aa, unidentified
  REGION 1..85: note = Description of Unknown:cds_NC_030656.1_cds_YP_009268745.1_30 target sequence
KSNEIDEFIKKGFHPSKLSRKNYSSVVQNTPLKLYLFKPQHVNPLDLLMVLQYQTNPTIYANHIQYHQSYILQHGSFELVSRCVP

SEQ ID NO: 22679 - protein, 85 aa, unidentified
  REGION 1..85: note = Description of Unknown:cds_NC_030656.1_cds_YP_009268745.1_30 target sequence
HMILTDNDVRYISEKYPEQSDILLATVSYKSIRRLSYLFTEEIARDMILNDDIIADALYEHQLFSEEFLWDMHFSYGIVPANKGI

SEQ ID NO: 22680 - protein, 85 aa, unidentified
  REGION 1..85: note = Description of Unknown:cds_NC_030656.1_cds_YP_009268745.1_30 target sequence
DSVSPKDLKTILAGVTTPKSAINLISVLPKSILMSTPIKTYILSCIVDGEKLEHYISYAKEFLKDHVQDVGIYVNIIFPENGIDL

SEQ ID NO: 22681 - protein, 85 aa, unidentified
  REGION 1..85: note = Description of Unknown:cds_NC_030656.1_cds_YP_009268745.1_30 target sequence
NSYPNELSRIQLSNVCKFIDCYTVSIDFIINVLIEKEYYDLLGLIIEKIDTSVMDETLCVNIVKHSINPIKVRHIPVHSLAVATE

SEQ ID NO: 22682 - protein, 85 aa, unidentified
  REGION 1..85: note = Description of Unknown:cds_NC_030656.1_cds_YP_009268745.1_30 target sequence
CAKKKYVDLVDFLDCLDLTTLLSVAEQTLFTTYAFETNWLNDNFELLALYVHQYGFCAYRMKKLLFEYPLQSDTVNLLLNLMFIG

SEQ ID NO: 22683 - protein, 85 aa, unidentified
  REGION 1..85: note = Description of Unknown:cds_NC_030656.1_cds_YP_009268745.1_30 target sequence
SKESLFSDKVINSLEYFMCSTELGNFKPLTLKTVNVTISLYDNQANHETYPSVYSNDLKNALQTIIIPNLQSLLFRDVSTVKMAK

SEQ ID NO: 22684 - protein, 85 aa, unidentified
  REGION 1..85: note = Description of Unknown:cds_NC_030656.1_cds_YP_009268745.1_30 target sequence
GICLQYYLDVNWLTDEERLCKQISDIATFATYGLFYIPDCAPNWVPASQLAKCEPMEQPTVLKGDIDALVLNKLTKFINLGMETT

SEQ ID NO: 22685 - protein, 85 aa, unidentified
  REGION 1..85: note = Description of Unknown:cds_NC_030656.1_cds_YP_009268745.1_30 target sequence
KQYKLLEPMSNDQAALNSLLVTIVSYLVIGSVRYVGVNNIQRFVTKIISQYCEVLKSDESVYESVTEVVQELTELKKSIRHISDV

SEQ ID NO: 22686 - protein, 85 aa, unidentified
  REGION 1..85: note = Description of Unknown:cds_NC_039345.1_cds_YP_009513274.1_1 target sequence
EVRNSRQWTTQSASDSSVDYHSILTAGLSMPQSIVRQRVIPVFQISNLEDICQMIIQAFEAGVDFQDSADSFLLMLCLHHAYQGD

SEQ ID NO: 22687 - protein, 85 aa, unidentified
  REGION 1..85: note = Description of Unknown:cds_NC_039345.1_cds_YP_009513274.1_1 target sequence
YKLFLESGAVKYLEGHGFRFEPRKKDGVKRLEELLPAVTNGKNIRRTLAAMPEGETTEANAGQFLSFASLFLPKLVVGEKACLEK

SEQ ID NO: 22688 - protein, 85 aa, unidentified
  REGION 1..85: note = Description of Unknown:cds_NC_039345.1_cds_YP_009513274.1_1 target sequence
VQRQIQVHAEQGLIQYPTSWQSVGHMMVIFRLMRTNFLIKFLLIHQGMHMIAGHDANDAVIANSVAQARFSGLLIVKTVLDHILQ

SEQ ID NO: 22689 - protein, 85 aa, unidentified
  REGION 1..85: note = Description of Unknown:cds_NC_039345.1_cds_YP_009513274.1_1 target sequence
KTDRGVRLHPLARTAKVRNEVHSFKAALNSLAQHGEYAPFARLLNLSGVNNLEHGLYPQLSAIALGVATAHGSTLAGVNVGEQYQ

SEQ ID NO: 22690 - protein, 85 aa, unidentified
  REGION 1..85: note = Description of Unknown:cds_NC_039345.1_cds_YP_009513274.1_1 target sequence
QLREAATEAEKQLQQYAETRELDHLGLDTKEKEILMNFHQRKNEISFQQTNAMVSLRKERLAKLTEAIAAASAQRERGYYDDDNE

SEQ ID NO: 22691 - protein, 85 aa, unidentified
  REGION 1..85: note = Description of Unknown:cds_NC_039345.1_cds_YP_009513274.1_1 target sequence
IPFPGPINDNDDQDQHVDDPTDTQDTTIPDIVVDPDDGGYRGYQIRQDDDMDAPDDLVLFDLDDNEQGPPSENARPGFTVERGPR

SEQ ID NO: 22692 - protein, 85 aa, unidentified
  REGION 1..85: note = Description of Unknown:cds_NC_039345.1_cds_YP_009513274.1_1 target sequence
SSGQQKSTEQHQPPPSSDLQAPTYNHHSREHHADQGTRSHELRSVQESDLLASIPEEHHPADHTDDKASLSLPPDSESDGESSPD

SEQ ID NO: 22693 - protein, 85 aa, unidentified
  REGION 1..85: note = Description of Unknown:cds_NC_039345.1_cds_YP_009513274.1_1 target sequence
TDEADRTTAPPAPVYKNHKDAGPATVGETNEETDFDDNINNQSESPLNDHGIERMYRHILETQGPFDAILYYHMMKDEPVTFSTS

SEQ ID NO: 22694 - protein, 84 aa, unidentified
  REGION 1..84: note = Description of Unknown:cds_NC_039345.1_cds_YP_009513274.1_1 target sequence
LETQGPFDAILYYHMMKDEPVTFSTSDGKEYIYPDSLENEYPPWLSEKEATQSESRFINIDGQQFYWPVMNYRDKFMAILQHHS

SEQ ID NO: 22695 - protein, 85 aa, unidentified
  REGION 1..85: note = Description of Unknown:cds_NC_039345.1_cds_YP_009513274.1_1 target sequence
LSMPQSIVRQRVIPVFQISNLEDICQMIIQAFEAGVDFQDSADSFLLMLCLHHAYQGDYKLFLESGAVKYLEGHGFRFEPRKKDG

SEQ ID NO: 22696 - protein, 85 aa, unidentified
  REGION 1..85: note = Description of Unknown:cds_NC_039345.1_cds_YP_009513274.1_1 target sequence
VKRLEELLPAVTNGKNIRRTLAAMPEGETTEANAGQFLSFASLFLPKLVVGEKACLEKVQRQIQVHAEQGLIQYPTSWQSVGHMM

SEQ ID NO: 22697 - protein, 85 aa, unidentified
  REGION 1..85: note = Description of Unknown:cds_NC_039345.1_cds_YP_009513274.1_1 target sequence
VIFRLMRTNFLIKFLLIHQGMHMIAGHDANDAVIANSVAQARFSGLLIVKTVLDHILQKTDRGVRLHPLARTAKVRNEVHSFKAA

SEQ ID NO: 22698 - protein, 85 aa, unidentified
  REGION 1..85: note = Description of Unknown:cds_NC_039345.1_cds_YP_009513274.1_1 target sequence
LNSLAQHGEYAPFARLLNLSGVNNLEHGLYPQLSAIALGVATAHGSTLAGVNVGEQYQQLREAATEAEKQLQQYAETRELDHLGL

SEQ ID NO: 22699 - protein, 85 aa, unidentified
  REGION 1..85: note = Description of Unknown:cds_NC_039345.1_cds_YP_009513274.1_1 target sequence
DTKEKEILMNFHQRKNEISFQQTNAMVSLRKERLAKLTEAIAAASAQRERGYYDDDNEIPFPGPINDNDDQDQHVDDPTDTQDTT

SEQ ID NO: 22700 - protein, 85 aa, unidentified
  REGION 1..85: note = Description of Unknown:cds_NC_039345.1_cds_YP_009513274.1_1 target sequence
IPDIVVDPDDGGYRGYQIRQDDDMDAPDDLVLFDLDDNEQGPPSENARPGFTVERGPRSSGQQKSTEQHQPPPSSDLQAPTYNHH

SEQ ID NO: 22701 - protein, 85 aa, unidentified
  REGION 1..85: note = Description of Unknown:cds_NC_039345.1_cds_YP_009513274.1_1 target sequence
SREHHADQGTRSHELRSVQESDLLASIPEEHHPADHTDDKASLSLPPDSESDGESSPDTDEADRTTAPPAPVYKNHKDAGPATVG

SEQ ID NO: 22702 - protein, 85 aa, unidentified
  REGION 1..85: note = Description of Unknown:cds_NC_039345.1_cds_YP_009513274.1_1 target sequence
ETNEETDFDDNINNQSESPLNDHGIERMYRHILETQGPFDAILYYHMMKDEPVTFSTSDGKEYIYPDSLENEYPPWLSEKEATQS

SEQ ID NO: 22703 - protein, 85 aa, unidentified
  REGION 1..85: note = Description of Unknown:hvTR_Q5XX08 target sequence
DKRVRGSWALGGQSEVDLDYHKILTAGLSVQQGIVRQRVIPVYVVSDLEGICQHIIQAFEAGVDFQDNADSFLLLLCLHHAYQGD

SEQ ID NO: 22704 - protein, 85 aa, unidentified
  REGION 1..85: note = Description of Unknown:hvTR_Q5XX08 target sequence
HRLFLKSDAVQYLEGHGFRFEVREKENVHRLDELLPNVTGGKNLRRTLAAMPEEETTEANAGQFLSFASLFLPKLVVGEKACLEK

SEQ ID NO: 22705 - protein, 85 aa, unidentified
  REGION 1..85: note = Description of Unknown:hvTR_Q5XX08 target sequence
VQRQIQVHAEQGLIQYPTSWQSVGHMMVIFRLMRTNFLIKFLLIHQGMHMVAGHDANDTVISNSVAQARFSGLLIVKTVLDHILQ

SEQ ID NO: 22706 - protein, 85 aa, unidentified
  REGION 1..85: note = Description of Unknown:hvTR_Q5XX08 target sequence
KTDLGVRLHPLARTAKVKNEVSSFKAALGSLAKHGEYAPFARLLNLSGVNNLEHGLYPQLSAIALGVATAHGSTLAGVNVGEQYQ

SEQ ID NO: 22707 - protein, 85 aa, unidentified
  REGION 1..85: note = Description of Unknown:hvTR_Q5XX08 target sequence
QLREAATEAEKQLQQYAETRELDNLGLDEQEKKILMSFHQKKNEISFQQTNAMVTLRKERLAKLTEAITTASKIKVGDRYPDDND

SEQ ID NO: 22708 - protein, 85 aa, unidentified
  REGION 1..85: note = Description of Unknown:hvTR_Q5XX08 target sequence
IPFPGPIYDETHPNPSDDNPDDSRDTTIPGGVVDPYDDESNNYPDYEDSAEGTTGDLDLFNLDDDDDDSQPGPPDRGQSKERAAR

SEQ ID NO: 22709 - protein, 85 aa, unidentified
  REGION 1..85: note = Description of Unknown:hvTR_Q5XX08 target sequence
THGLQDPTLDGAKKVPELTPGSHQPGNLHITKPGSNTNQPQGNMSSTLQSMTPIQEESEPDDQKDDDDESLTSLDSEGDEDVESV

SEQ ID NO: 22710 - protein, 85 aa, unidentified
  REGION 1..85: note = Description of Unknown:hvTR_Q5XX08 target sequence
SGENNPTVAPPAPVYKDTGVDTNQQNGPSNAVDGQGSESEALPINPEKGSALEETYYHLLKTQGPFEAINYYHLMSDEPIAFSTE

SEQ ID NO: 22711 - protein, 84 aa, unidentified
  REGION 1..84: note = Description of Unknown:hvTR_Q5XX08 target sequence
LLKTQGPFEAINYYHLMSDEPIAFSTESGKEYIFPDSLEEAYPPWLSEKEALEKENRYLVIDGQQFLWPVMSLQDKFLAVLQHD

SEQ ID NO: 22712 - protein, 85 aa, unidentified
  REGION 1..85: note = Description of Unknown:hvTR_Q5XX08 target sequence
LSVQQGIVRQRVIPVYVVSDLEGICQHIIQAFEAGVDFQDNADSFLLLLCLHHAYQGDHRLFLKSDAVQYLEGHGFRFEVREKEN

SEQ ID NO: 22713 - protein, 85 aa, unidentified
  REGION 1..85: note = Description of Unknown:hvTR_Q5XX08 target sequence
VHRLDELLPNVTGGKNLRRTLAAMPEEETTEANAGQFLSFASLFLPKLVVGEKACLEKVQRQIQVHAEQGLIQYPTSWQSVGHMM

SEQ ID NO: 22714 - protein, 85 aa, unidentified
  REGION 1..85: note = Description of Unknown:hvTR_Q5XX08 target sequence
VIFRLMRTNFLIKFLLIHQGMHMVAGHDANDTVISNSVAQARFSGLLIVKTVLDHILQKTDLGVRLHPLARTAKVKNEVSSFKAA

SEQ ID NO: 22715 - protein, 85 aa, unidentified
  REGION 1..85: note = Description of Unknown:hvTR_Q5XX08 target sequence
LGSLAKHGEYAPFARLLNLSGVNNLEHGLYPQLSAIALGVATAHGSTLAGVNVGEQYQQLREAATEAEKQLQQYAETRELDNLGL

SEQ ID NO: 22716 - protein, 85 aa, unidentified
  REGION 1..85: note = Description of Unknown:hvTR_Q5XX08 target sequence
DEQEKKILMSFHQKKNEISFQQTNAMVTLRKERLAKLTEAITTASKIKVGDRYPDDNDIPFPGPIYDETHPNPSDDNPDDSRDTT

SEQ ID NO: 22717 - protein, 85 aa, unidentified
  REGION 1..85: note = Description of Unknown:hvTR_Q5XX08 target sequence
IPGGVVDPYDDESNNYPDYEDSAEGTTGDLDLFNLDDDDDDSQPGPPDRGQSKERAARTHGLQDPTLDGAKKVPELTPGSHQPGN

SEQ ID NO: 22718 - protein, 85 aa, unidentified
  REGION 1..85: note = Description of Unknown:hvTR_Q5XX08 target sequence
LHITKPGSNTNQPQGNMSSTLQSMTPIQEESEPDDQKDDDDESLTSLDSEGDEDVESVSGENNPTVAPPAPVYKDTGVDTNQQNG

SEQ ID NO: 22719 - protein, 85 aa, unidentified
  REGION 1..85: note = Description of Unknown:hvTR_Q5XX08 target sequence
PSNAVDGQGSESEALPINPEKGSALEETYYHLLKTQGPFEAINYYHLMSDEPIAFSTESGKEYIFPDSLEEAYPPWLSEKEALEK

SEQ ID NO: 22720 - protein, 85 aa, unidentified
  REGION 1..85: note = Description of Unknown:cds_NC_025351.1_cds_YP_009094082.1_2 target sequence
DKLQLIEDGLSTINFIQENKEKLQHSYGRSSIREPPTSVRVEEWEKFIRKIASGPEQVQGGGSETEITGDNGDRGNFTNPDQGGG

SEQ ID NO: 22721 - protein, 85 aa, unidentified
  REGION 1..85: note = Description of Unknown:cds_NC_025351.1_cds_YP_009094082.1_2 target sequence
VTGQFEERYQKWGSQDSELQLDPMVVHDFFYDERRENPDNGKYDRSSKKRDNIREGTRQDKYNNQSTDELLSCLQPSSKNDVIKN

SEQ ID NO: 22722 - protein, 85 aa, unidentified
  REGION 1..85: note = Description of Unknown:cds_NC_025351.1_cds_YP_009094082.1_2 target sequence
ESTSVSNLHVTGNKLNPDAKPFEPTSQSKEHPTTTQHNKNDHQTDDDYKNRRSSENNVISDHATTMEDNNNFIPATKRKNALSEP

SEQ ID NO: 22723 - protein, 85 aa, unidentified
  REGION 1..85: note = Description of Unknown:cds_NC_025351.1_cds_YP_009094082.1_2 target sequence
IYVQVLPSNTEGFSGKDYPLLKDNSVKKRAEPVILETANHPAGSADQDTNQIEENMQFNLPKLLTEDTDDEPEDNNDSMPLEEDI

SEQ ID NO: 22724 - protein, 85 aa, unidentified
  REGION 1..85: note = Description of Unknown:cds_NC_025351.1_cds_YP_009094082.1_2 target sequence
REIGSMLKDGTKDIKTRMNEIDDAIKKINKKSKNRSLDLESDGKDQGRRDPSVDLGIKKRKEGLKAAMQKTKEQLSIKVEREIGL

SEQ ID NO: 22725 - protein, 85 aa, unidentified
  REGION 1..85: note = Description of Unknown:cds_NC_025351.1_cds_YP_009094082.1_2 target sequence
NDRICQNSKMSTEKKLIYAGMEMEYGQTSTGSGGPQGSKDGTSDDVQVDEDYDEGEDYEAMPSDRFYTTLSGEQKDRFDLDANQM

SEQ ID NO: 22726 - protein, 85 aa, unidentified
  REGION 1..85: note = Description of Unknown:cds_NC_025351.1_cds_YP_009094082.1_2 target sequence
SQYDLEAQVDELTRMNLILYSRLETTNKLLIDILDLAKEMPKLVRKVDNLERQMGNLNMLTSTLEGHLSSVMIMIPGKDKSEKEI

SEQ ID NO: 22727 - protein, 85 aa, unidentified
  REGION 1..85: note = Description of Unknown:cds_NC_025351.1_cds_YP_009094082.1_2 target sequence
PKNPDLRPILGRSNTSLTDVIDLDHYPDKGSKGIKPSGSGDRQYIGSLESKFSINDEYNFAPYPIRDELLLPGLRDDKTNASSFI

SEQ ID NO: 22728 - protein, 84 aa, unidentified
  REGION 1..84: note = Description of Unknown:cds_NC_025351.1_cds_YP_009094082.1_2 target sequence
YNFAPYPIRDELLLPGLRDDKTNASSFIPDDTDRSPMVLKIIIRQNIHDEEVKDELLSILEQHNTVEELNEIWNTVNDYLDGNI

SEQ ID NO: 22729 - protein, 85 aa, unidentified
  REGION 1..85: note = Description of Unknown:cds_NC_025351.1_cds_YP_009094082.1_2 target sequence
GRSSIREPPTSVRVEEWEKFIRKIASGPEQVQGGGSETEITGDNGDRGNFTNPDQGGGVTGQFEERYQKWGSQDSELQLDPMVVH

SEQ ID NO: 22730 - protein, 85 aa, unidentified
  REGION 1..85: note = Description of Unknown:cds_NC_025351.1_cds_YP_009094082.1_2 target sequence
DFFYDERRENPDNGKYDRSSKKRDNIREGTRQDKYNNQSTDELLSCLQPSSKNDVIKNESTSVSNLHVTGNKLNPDAKPFEPTSQ

SEQ ID NO: 22731 - protein, 85 aa, unidentified
  REGION 1..85: note = Description of Unknown:cds_NC_025351.1_cds_YP_009094082.1_2 target sequence
SKEHPTTTQHNKNDHQTDDDYKNRRSSENNVISDHATTMEDNNNFIPATKRKNALSEPIYVQVLPSNTEGFSGKDYPLLKDNSVK

SEQ ID NO: 22732 - protein, 85 aa, unidentified
  REGION 1..85: note = Description of Unknown:cds_NC_025351.1_cds_YP_009094082.1_2 target sequence
KRAEPVILETANHPAGSADQDTNQIEENMQFNLPKLLTEDTDDEPEDNNDSMPLEEDIREIGSMLKDGTKDIKTRMNEIDDAIKK

SEQ ID NO: 22733 - protein, 85 aa, unidentified
  REGION 1..85: note = Description of Unknown:cds_NC_025351.1_cds_YP_009094082.1_2 target sequence
INKKSKNRSLDLESDGKDQGRRDPSVDLGIKKRKEGLKAAMQKTKEQLSIKVEREIGLNDRICQNSKMSTEKKLIYAGMEMEYGQ

SEQ ID NO: 22734 - protein, 85 aa, unidentified
  REGION 1..85: note = Description of Unknown:cds_NC_025351.1_cds_YP_009094082.1_2 target sequence
TSTGSGGPQGSKDGTSDDVQVDEDYDEGEDYEAMPSDRFYTTLSGEQKDRFDLDANQMSQYDLEAQVDELTRMNLILYSRLETTN

SEQ ID NO: 22735 - protein, 85 aa, unidentified
  REGION 1..85: note = Description of Unknown:cds_NC_025351.1_cds_YP_009094082.1_2 target sequence
KLLIDILDLAKEMPKLVRKVDNLERQMGNLNMLTSTLEGHLSSVMIMIPGKDKSEKEIPKNPDLRPILGRSNTSLTDVIDLDHYP

SEQ ID NO: 22736 - protein, 85 aa, unidentified
  REGION 1..85: note = Description of Unknown:cds_NC_025351.1_cds_YP_009094082.1_2 target sequence
DKGSKGIKPSGSGDRQYIGSLESKFSINDEYNFAPYPIRDELLLPGLRDDKTNASSFIPDDTDRSPMVLKIIIRQNIHDEEVKDE

SEQ ID NO: 22737 - protein, 85 aa, unidentified
  REGION 1..85: note = Description of Unknown:cds_NC_029316.1_cds_YP_009230297.1_44 target sequence
LKKLVSSLILFSFLFLLLLSLNSTAVSYQIQITVNAPSSLAGSDIILFAPLPPSANIQSQYYVINQCGYYVDSYLFSTYPPYLVY

SEQ ID NO: 22738 - protein, 85 aa, unidentified
  REGION 1..85: note = Description of Unknown:cds_NC_029316.1_cds_YP_009230297.1_44 target sequence
YIAGLNNESLLLTYGTGVTSEYVTCNVFSNLFTFYILNTTLWNATNVQADGLLTMGNNSHLYFQPSISRYISSSVVFMYNILPSS

SEQ ID NO: 22739 - protein, 85 aa, unidentified
  REGION 1..85: note = Description of Unknown:cds_NC_029316.1_cds_YP_009230297.1_44 target sequence
VSTNNFYEIANVKPGTGVFFDYLQTSQKVKIPSYYIFSGKYETIFTNCILSNNFDVEQSGFVKVNSAELYTKLTCFVKISEEGKC

SEQ ID NO: 22740 - protein, 85 aa, unidentified
  REGION 1..85: note = Description of Unknown:cds_NC_029316.1_cds_YP_009230297.1_44 target sequence
TIVCGTVIQGSPSEKPCCNISTNLIAVYYCKPSCSQCIEGKASVIFTPSLIEGNCFYAYENGKMVNLGKVVCDVVVSSKPKVFVA

SEQ ID NO: 22741 - protein, 85 aa, unidentified
  REGION 1..85: note = Description of Unknown:cds_NC_029316.1_cds_YP_009230297.1_44 target sequence
YCAFNTSCVRIFGVPVGSKVIVSYSNGTSECIYVSNKVNNVGIAEDNLVIGYGSGISDILIYPPCSNIKYDAKIGFTDFVRAYYV

SEQ ID NO: 22742 - protein, 85 aa, unidentified
  REGION 1..85: note = Description of Unknown:cds_NC_029316.1_cds_YP_009230297.1_44 target sequence
NICNGKAYLCVNGTVLTSLGNVTFPADVIIGVQGVGNTQYLLVQVVTDHGVTQFISASPYTIYNVVPYIHYVTYSNTPLIISKIG

SEQ ID NO: 22743 - protein, 85 aa, unidentified
  REGION 1..85: note = Description of Unknown:cds_NC_029316.1_cds_YP_009230297.1_44 target sequence
VTLATGLYDEISGIIKTSVTSPFQACSAIINGITSPGLVVCYSHGKLSCYHVSNSSSSLILKGMDGDSVTLVYQNVQEQFIVSSC

SEQ ID NO: 22744 - protein, 85 aa, unidentified
  REGION 1..85: note = Description of Unknown:cds_NC_029316.1_cds_YP_009230297.1_44 target sequence
FYPLNIPANTPFVLAISPTSRTVTIDANGIQTSQPYVNKLVNLNSTKVNSSTSLTPPPIKNPFSISINSNQLMDIIIYYIGGGIA

SEQ ID NO: 22745 - protein, 84 aa, unidentified
  REGION 1..84: note = Description of Unknown:cds_NC_029316.1_cds_YP_009230297.1_44 target sequence
PIKNPFSISINSNQLMDIIIYYIGGGIAIYLINRNYNITGVLWYGLMIWSLLSIAISLIFGFYALLPGAVFGFALAYVAKYLNR

SEQ ID NO: 22746 - protein, 85 aa, unidentified
  REGION 1..85: note = Description of Unknown:cds_NC_029316.1_cds_YP_009230297.1_44 target sequence
YQIQITVNAPSSLAGSDIILFAPLPPSANIQSQYYVINQCGYYVDSYLFSTYPPYLVYYIAGLNNESLLLTYGTGVTSEYVTCNV

SEQ ID NO: 22747 - protein, 85 aa, unidentified
  REGION 1..85: note = Description of Unknown:cds_NC_029316.1_cds_YP_009230297.1_44 target sequence
FSNLFTFYILNTTLWNATNVQADGLLTMGNNSHLYFQPSISRYISSSVVFMYNILPSSVSTNNFYEIANVKPGTGVFFDYLQTSQ

SEQ ID NO: 22748 - protein, 85 aa, unidentified
  REGION 1..85: note = Description of Unknown:cds_NC_029316.1_cds_YP_009230297.1_44 target sequence
KVKIPSYYIFSGKYETIFTNCILSNNFDVEQSGFVKVNSAELYTKLTCFVKISEEGKCTIVCGTVIQGSPSEKPCCNISTNLIAV

SEQ ID NO: 22749 - protein, 85 aa, unidentified
  REGION 1..85: note = Description of Unknown:cds_NC_029316.1_cds_YP_009230297.1_44 target sequence
YYCKPSCSQCIEGKASVIFTPSLIEGNCFYAYENGKMVNLGKVVCDVVVSSKPKVFVAYCAFNTSCVRIFGVPVGSKVIVSYSNG

SEQ ID NO: 22750 - protein, 85 aa, unidentified
  REGION 1..85: note = Description of Unknown:cds_NC_029316.1_cds_YP_009230297.1_44 target sequence
TSECIYVSNKVNNVGIAEDNLVIGYGSGISDILIYPPCSNIKYDAKIGFTDFVRAYYVNICNGKAYLCVNGTVLTSLGNVTFPAD

SEQ ID NO: 22751 - protein, 85 aa, unidentified
  REGION 1..85: note = Description of Unknown:cds_NC_029316.1_cds_YP_009230297.1_44 target sequence
VIIGVQGVGNTQYLLVQVVTDHGVTQFISASPYTIYNVVPYIHYVTYSNTPLIISKIGVTLATGLYDEISGIIKTSVTSPFQACS

SEQ ID NO: 22752 - protein, 85 aa, unidentified
  REGION 1..85: note = Description of Unknown:cds_NC_029316.1_cds_YP_009230297.1_44 target sequence
AIINGITSPGLVVCYSHGKLSCYHVSNSSSSLILKGMDGDSVTLVYQNVQEQFIVSSCFYPLNIPANTPFVLAISPTSRTVTIDA

SEQ ID NO: 22753 - protein, 85 aa, unidentified
  REGION 1..85: note = Description of Unknown:cds_NC_029316.1_cds_YP_009230297.1_44 target sequence
NGIQTSQPYVNKLVNLNSTKVNSSTSLTPPPIKNPFSISINSNQLMDIIIYYIGGGIAIYLINRNYNITGVLWYGLMIWSLLSIA

SEQ ID NO: 22754 - protein, 85 aa, unidentified
  REGION 1..85: note = Description of Unknown:cds_NZ_WFIY01000004.1_cds_WP_155862916.1_767 target sequence
LAKYKTTEQVLSLMKDIERVRNIGIIAHVDHGKTTTSDTLLAAAGIISPKVAGEALALDYLSVEQQRGITVKAANVSLYHEVDGK

SEQ ID NO: 22755 - protein, 85 aa, unidentified
  REGION 1..85: note = Description of Unknown:cds_NZ_WFIY01000004.1_cds_WP_155862916.1_767 target sequence
GYVINLIDTPGHVDFSGRVTRSLRVLDGSIVVVDAVEGVMTQTETVLRQSLEERVRPILFINKIDRLVKELKLGPQEMMQKLLDI

SEQ ID NO: 22756 - protein, 85 aa, unidentified
  REGION 1..85: note = Description of Unknown:cds_NZ_WFIY01000004.1_cds_WP_155862916.1_767 target sequence
IKSVNDLIDMYAEPEFKDKWMVNPTQGTVVFGSAKDKWGFTLPIAQKKGINMKNVIDAYTSSDKNKINELASQVPIHEALLDAVI

SEQ ID NO: 22757 - protein, 85 aa, unidentified
  REGION 1..85: note = Description of Unknown:cds_NZ_WFIY01000004.1_cds_WP_155862916.1_767 target sequence
KFVPNPRDAQKYRIPKIWKGDMDNDLVKSMLNADPNGPIVMMINDMKVDPHAGLVATGRVFSGTLRSGEEVWLVNAKSPQKILQV

SEQ ID NO: 22758 - protein, 85 aa, unidentified
  REGION 1..85: note = Description of Unknown:cds_NZ_WFIY01000004.1_cds_WP_155862916.1_767 target sequence
SIYMGQLRELADEIPAGNIAAVLGLDKARAGETLVDINYKNLQGSFESLHYVSEPVVTIAVEPKNPKDLTKMIDALRKLTIEDPN

SEQ ID NO: 22759 - protein, 85 aa, unidentified
  REGION 1..85: note = Description of Unknown:cds_NZ_WFIY01000004.1_cds_WP_155862916.1_767 target sequence
LVVKINEETGEYLLSGMGFLHLEVSLQLLKDNYGIEVNTSPPIVVYRESIRAKSQVFEGKSPNKHNKFYISVEPLNEQTIELIAN

SEQ ID NO: 22760 - protein, 85 aa, unidentified
  REGION 1..85: note = Description of Unknown:cds_NZ_WFIY01000004.1_cds_WP_155862916.1_767 target sequence
GTIREDMDSKEMAKILRDQADWDYDEAKRIIAVDENVNLFVDMTSGIQHLREIMDTLLQGFRLAMREGPLAHEPIRGLKVVLHDA

SEQ ID NO: 22761 - protein, 85 aa, unidentified
  REGION 1..85: note = Description of Unknown:cds_NZ_WFIY01000004.1_cds_WP_155862916.1_767 target sequence
VVHEDPAHRGPAQIYPAVRNAIFAGFLTSRPTLLEPLQKLDIRVPMDLVGNVTAVLTRKRGKILNMTQVGNVARILAEIPVADSY

SEQ ID NO: 22762 - protein, 84 aa, unidentified
  REGION 1..84: note = Description of Unknown:cds_NZ_WFIY01000004.1_cds_WP_155862916.1_767 target sequence
RKRGKILNMTQVGNVARILAEIPVADSYELASDLRGATGGRAFWGTEFSRWAPVPDSLLMDVIMKIRERKGLPKQIPKPEDFLS

SEQ ID NO: 22763 - protein, 85 aa, unidentified
  REGION 1..85: note = Description of Unknown:cds_NZ_WFIY01000004.1_cds_WP_155862916.1_767 target sequence
HVDHGKTTTSDTLLAAAGIISPKVAGEALALDYLSVEQQRGITVKAANVSLYHEVDGKGYVINLIDTPGHVDFSGRVTRSLRVLD

SEQ ID NO: 22764 - protein, 85 aa, unidentified
  REGION 1..85: note = Description of Unknown:cds_NZ_WFIY01000004.1_cds_WP_155862916.1_767 target sequence
GSIVVVDAVEGVMTQTETVLRQSLEERVRPILFINKIDRLVKELKLGPQEMMQKLLDIIKSVNDLIDMYAEPEFKDKWMVNPTQG

SEQ ID NO: 22765 - protein, 85 aa, unidentified
  REGION 1..85: note = Description of Unknown:cds_NZ_WFIY01000004.1_cds_WP_155862916.1_767 target sequence
TVVFGSAKDKWGFTLPIAQKKGINMKNVIDAYTSSDKNKINELASQVPIHEALLDAVIKFVPNPRDAQKYRIPKIWKGDMDNDLV

SEQ ID NO: 22766 - protein, 85 aa, unidentified
  REGION 1..85: note = Description of Unknown:cds_NZ_WFIY01000004.1_cds_WP_155862916.1_767 target sequence
KSMLNADPNGPIVMMINDMKVDPHAGLVATGRVFSGTLRSGEEVWLVNAKSPQKILQVSIYMGQLRELADEIPAGNIAAVLGLDK

SEQ ID NO: 22767 - protein, 85 aa, unidentified
  REGION 1..85: note = Description of Unknown:cds_NZ_WFIY01000004.1_cds_WP_155862916.1_767 target sequence
ARAGETLVDINYKNLQGSFESLHYVSEPVVTIAVEPKNPKDLTKMIDALRKLTIEDPNLVVKINEETGEYLLSGMGFLHLEVSLQ

SEQ ID NO: 22768 - protein, 85 aa, unidentified
  REGION 1..85: note = Description of Unknown:cds_NZ_WFIY01000004.1_cds_WP_155862916.1_767 target sequence
LLKDNYGIEVNTSPPIVVYRESIRAKSQVFEGKSPNKHNKFYISVEPLNEQTIELIANGTIREDMDSKEMAKILRDQADWDYDEA

SEQ ID NO: 22769 - protein, 85 aa, unidentified
  REGION 1..85: note = Description of Unknown:cds_NZ_WFIY01000004.1_cds_WP_155862916.1_767 target sequence
KRIIAVDENVNLFVDMTSGIQHLREIMDTLLQGFRLAMREGPLAHEPIRGLKVVLHDAVVHEDPAHRGPAQIYPAVRNAIFAGFL

SEQ ID NO: 22770 - protein, 85 aa, unidentified
  REGION 1..85: note = Description of Unknown:cds_NZ_WFIY01000004.1_cds_WP_155862916.1_767 target sequence
TSRPTLLEPLQKLDIRVPMDLVGNVTAVLTRKRGKILNMTQVGNVARILAEIPVADSYELASDLRGATGGRAFWGTEFSRWAPVP

SEQ ID NO: 22771 - protein, 85 aa, unidentified
  REGION 1..85: note = Description of Unknown:cds_NZ_WFIY01000004.1_cds_WP_155863146.1_1071 target sequence
KFNNLLQNFYDAKNGYYRHLAIILGKNYLDNTIELIKTYLQVNSNPRIAYAFHPWVNGSKDRLATLKDIIKTNEIVDIDYSSSEK

SEQ ID NO: 22772 - protein, 85 aa, unidentified
  REGION 1..85: note = Description of Unknown:cds_NZ_WFIY01000004.1_cds_WP_155863146.1_1071 target sequence
YLGESFDLTILDAVDDFRPNYISRLVDLTRGGGLVIIYSDDISDINKLYKFSLTRNGIVKNLFENRFIKIAINSRGIILVKDNEI

SEQ ID NO: 22773 - protein, 85 aa, unidentified
  REGION 1..85: note = Description of Unknown:cds_NZ_WFIY01000004.1_cds_WP_155863146.1_1071 target sequence
KFKPFSSSEVSKPHKKSYDKTIPKSLYDLCLTDDQVKLIREFDFVLEKGKRILIVTAPRGRGKSAGVGLALSFYVKRTLSKPTNV

SEQ ID NO: 22774 - protein, 85 aa, unidentified
  REGION 1..85: note = Description of Unknown:cds_NZ_WFIY01000004.1_cds_WP_155863146.1_1071 target sequence
IITSPSYYSSQAIIQFLEEGLRALKIRYKKKISKEGKIMKISAGEVNIKWTSPDLAKDESGDLIIVDEAAALGIENLEYIRNSWD

SEQ ID NO: 22775 - protein, 85 aa, unidentified
  REGION 1..85: note = Description of Unknown:cds_NZ_WFIY01000004.1_cds_WP_155863146.1_1071 target sequence
KIVFISTIHGYEGSGKAFMKYINSLDNSQIIKLDYPIRYAKGDPVEKFIYNVMLLDAEPEVYNNTQFMEITQEELFSNEELLRQI

SEQ ID NO: 22776 - protein, 85 aa, unidentified
  REGION 1..85: note = Description of Unknown:cds_NZ_WFIY01000004.1_cds_WP_155863146.1_1071 target sequence
YGILVSAHYRNSPDDLMFLGDMAFQRIFTIGYNAVAEIVEEGNLDETTAEHILNGEENEGNLIPHRIIKYMRIRNFGKLKGWRIM

SEQ ID NO: 22777 - protein, 85 aa, unidentified
  REGION 1..85: note = Description of Unknown:cds_NZ_WFIY01000004.1_cds_WP_155863146.1_1071 target sequence
RIAVTPELQNQGLGTKLLSNVEKIALKNNIDWIGSSFVADYKVLNFWIKNGFKPIYLASRKNEGLGGYSIIVMKALTASAEKFLV

SEQ ID NO: 22778 - protein, 85 aa, unidentified
  REGION 1..85: note = Description of Unknown:cds_NZ_WFIY01000004.1_cds_WP_155863146.1_1071 target sequence
ELGKLLKDKILRTSHQVYFNVNPRILAKILTNIEFKKEIEIDNTYVSKIYAYLNGKIPYNSASEAIHAIAEKYFYDLSFKLDEEE

SEQ ID NO: 22779 - protein, 84 aa, unidentified
  REGION 1..84: note = Description of Unknown:cds_NZ_WFIY01000004.1_cds_WP_155863146.1_1071 target sequence
KIPYNSASEAIHAIAEKYFYDLSFKLDEEEVSAIIARTFQGKSWSHTAKMLGVNNQEAENLLRRGIEKIVKKYYGQKEKDYIEL

SEQ ID NO: 22780 - protein, 85 aa, unidentified
  REGION 1..85: note = Description of Unknown:cds_NZ_WFIY01000004.1_cds_WP_155863146.1_1071 target sequence
YLDNTIELIKTYLQVNSNPRIAYAFHPWVNGSKDRLATLKDIIKTNEIVDIDYSSSEKYLGESFDLTILDAVDDFRPNYISRLVD

SEQ ID NO: 22781 - protein, 85 aa, unidentified
  REGION 1..85: note = Description of Unknown:cds_NZ_WFIY01000004.1_cds_WP_155863146.1_1071 target sequence
LTRGGGLVIIYSDDISDINKLYKFSLTRNGIVKNLFENRFIKIAINSRGIILVKDNEIKFKPFSSSEVSKPHKKSYDKTIPKSLY

SEQ ID NO: 22782 - protein, 85 aa, unidentified
  REGION 1..85: note = Description of Unknown:cds_NZ_WFIY01000004.1_cds_WP_155863146.1_1071 target sequence
DLCLTDDQVKLIREFDFVLEKGKRILIVTAPRGRGKSAGVGLALSFYVKRTLSKPTNVIITSPSYYSSQAIIQFLEEGLRALKIR

SEQ ID NO: 22783 - protein, 85 aa, unidentified
  REGION 1..85: note = Description of Unknown:cds_NZ_WFIY01000004.1_cds_WP_155863146.1_1071 target sequence
YKKKISKEGKIMKISAGEVNIKWTSPDLAKDESGDLIIVDEAAALGIENLEYIRNSWDKIVFISTIHGYEGSGKAFMKYINSLDN

SEQ ID NO: 22784 - protein, 85 aa, unidentified
  REGION 1..85: note = Description of Unknown:cds_NZ_WFIY01000004.1_cds_WP_155863146.1_1071 target sequence
SQIIKLDYPIRYAKGDPVEKFIYNVMLLDAEPEVYNNTQFMEITQEELFSNEELLRQIYGILVSAHYRNSPDDLMFLGDMAFQRI

SEQ ID NO: 22785 - protein, 85 aa, unidentified
  REGION 1..85: note = Description of Unknown:cds_NZ_WFIY01000004.1_cds_WP_155863146.1_1071 target sequence
FTIGYNAVAEIVEEGNLDETTAEHILNGEENEGNLIPHRIIKYMRIRNFGKLKGWRIMRIAVTPELQNQGLGTKLLSNVEKIALK

SEQ ID NO: 22786 - protein, 85 aa, unidentified
  REGION 1..85: note = Description of Unknown:cds_NZ_WFIY01000004.1_cds_WP_155863146.1_1071 target sequence
NNIDWIGSSFVADYKVLNFWIKNGFKPIYLASRKNEGLGGYSIIVMKALTASAEKFLVELGKLLKDKILRTSHQVYFNVNPRILA

SEQ ID NO: 22787 - protein, 85 aa, unidentified
  REGION 1..85: note = Description of Unknown:cds_NZ_WFIY01000004.1_cds_WP_155863146.1_1071 target sequence
KILTNIEFKKEIEIDNTYVSKIYAYLNGKIPYNSASEAIHAIAEKYFYDLSFKLDEEEVSAIIARTFQGKSWSHTAKMLGVNNQE

SEQ ID NO: 22788 - protein, 85 aa, unidentified
  REGION 1..85: note = Description of Unknown:cds_NZ_WFIY01000004.1_cds_WP_155864096.1_2042 target sequence
LDRIGKNYVLKEHEIHYPENYDFKILHYTYYLEIYPEESRIKGKAVVKFLGKDLFLHARHFQINKVKLDGKEVSYSYDGEKISIQ

SEQ ID NO: 22789 - protein, 85 aa, unidentified
  REGION 1..85: note = Description of Unknown:cds_NZ_WFIY01000004.1_cds_WP_155864096.1_2042 target sequence
GEGKEAEIEYETKPVLGLVFKKLKDYIEVATTGEVDQARNWIPILDDPQVKTTTEFYIKVRKPYIALSNGRLIDKQVDGDFITFH

SEQ ID NO: 22790 - protein, 85 aa, unidentified
  REGION 1..85: note = Description of Unknown:cds_NZ_WFIY01000004.1_cds_WP_155864096.1_2042 target sequence
WLMDKPHSPYLNSIAVGVFSKEEDEWEGIKLENYLPKGYEEFFWNLSSVKKAIEFFSSYTGVKYPYCRYAQVVLFSMNGGMEYIT

SEQ ID NO: 22791 - protein, 85 aa, unidentified
  REGION 1..85: note = Description of Unknown:cds_NZ_WFIY01000004.1_cds_WP_155864096.1_2042 target sequence
STHLTWRVIHDKIAEKNYSSENLIAHELAHQWFGDLITTKDWPNIWLNEGFASYFEALYVEHEKGREEFLYNLYNKWKGYEEEKE

SEQ ID NO: 22792 - protein, 85 aa, unidentified
  REGION 1..85: note = Description of Unknown:cds_NZ_WFIY01000004.1_cds_WP_155864096.1_2042 target sequence
KYTRPIVCRYYKWGDELFDRHTYNKGALFLHKLRNFLGDETFRKGIKEYLERFKYRSVDTEDFKKVMEEVSGKDLTFLFDQFVYS

SEQ ID NO: 22793 - protein, 85 aa, unidentified
  REGION 1..85: note = Description of Unknown:cds_NZ_WFIY01000004.1_cds_WP_155864096.1_2042 target sequence
AFNPSVEVTSIDGGVRIKNEVEVDVKIGSEIRKVKPGESILSGEYVCVDPNFTSLAEVEDKQGEEALIKESKDEELICRIRAVNS

SEQ ID NO: 22794 - protein, 85 aa, unidentified
  REGION 1..85: note = Description of Unknown:cds_NZ_WFIY01000004.1_cds_WP_155864096.1_2042 target sequence
LSRFSDFKAIQALKERLENDFWGVSYESAISLGKIKNDDALNALMLSHENPKVMLGIAKALGEFKFNQRAKNFLLEVMDKAESYQ

SEQ ID NO: 22795 - protein, 85 aa, unidentified
  REGION 1..85: note = Description of Unknown:cds_NZ_WFIY01000004.1_cds_WP_155864096.1_2042 target sequence
VRAEAIISLGKIGFTDVKEKIISHFEDESYADIVPSAVIEALSYFGDDESFRFVIDRGLKNEKETIRAAVARNLWRFGDKSREYL

SEQ ID NO: 22796 - protein, 84 aa, unidentified
  REGION 1..84: note = Description of Unknown:cds_NZ_WFIY01000004.1_cds_WP_155864096.1_2042 target sequence
DRGLKNEKETIRAAVARNLWRFGDKSREYLYYLVKDPSPIVRGATIKSLEELKMKDLLKVIVDNEDEELRNRSNALRVLYKLGQ

SEQ ID NO: 22797 - protein, 85 aa, unidentified
  REGION 1..85: note = Description of Unknown:cds_NZ_WFIY01000004.1_cds_WP_155864096.1_2042 target sequence
YTYYLEIYPEESRIKGKAVVKFLGKDLFLHARHFQINKVKLDGKEVSYSYDGEKISIQGEGKEAEIEYETKPVLGLVFKKLKDYI

SEQ ID NO: 22798 - protein, 85 aa, unidentified
  REGION 1..85: note = Description of Unknown:cds_NZ_WFIY01000004.1_cds_WP_155864096.1_2042 target sequence
EVATTGEVDQARNWIPILDDPQVKTTTEFYIKVRKPYIALSNGRLIDKQVDGDFITFHWLMDKPHSPYLNSIAVGVFSKEEDEWE

SEQ ID NO: 22799 - protein, 85 aa, unidentified
  REGION 1..85: note = Description of Unknown:cds_NZ_WFIY01000004.1_cds_WP_155864096.1_2042 target sequence
GIKLENYLPKGYEEFFWNLSSVKKAIEFFSSYTGVKYPYCRYAQVVLFSMNGGMEYITSTHLTWRVIHDKIAEKNYSSENLIAHE

SEQ ID NO: 22800 - protein, 85 aa, unidentified
  REGION 1..85: note = Description of Unknown:cds_NZ_WFIY01000004.1_cds_WP_155864096.1_2042 target sequence
LAHQWFGDLITTKDWPNIWLNEGFASYFEALYVEHEKGREEFLYNLYNKWKGYEEEKEKYTRPIVCRYYKWGDELFDRHTYNKGA

SEQ ID NO: 22801 - protein, 85 aa, unidentified
  REGION 1..85: note = Description of Unknown:cds_NZ_WFIY01000004.1_cds_WP_155864096.1_2042 target sequence
LFLHKLRNFLGDETFRKGIKEYLERFKYRSVDTEDFKKVMEEVSGKDLTFLFDQFVYSAFNPSVEVTSIDGGVRIKNEVEVDVKI

SEQ ID NO: 22802 - protein, 85 aa, unidentified
  REGION 1..85: note = Description of Unknown:cds_NZ_WFIY01000004.1_cds_WP_155864096.1_2042 target sequence
GSEIRKVKPGESILSGEYVCVDPNFTSLAEVEDKQGEEALIKESKDEELICRIRAVNSLSRFSDFKAIQALKERLENDFWGVSYE

SEQ ID NO: 22803 - protein, 85 aa, unidentified
  REGION 1..85: note = Description of Unknown:cds_NZ_WFIY01000004.1_cds_WP_155864096.1_2042 target sequence
SAISLGKIKNDDALNALMLSHENPKVMLGIAKALGEFKFNQRAKNFLLEVMDKAESYQVRAEAIISLGKIGFTDVKEKIISHFED

SEQ ID NO: 22804 - protein, 85 aa, unidentified
  REGION 1..85: note = Description of Unknown:cds_NZ_WFIY01000004.1_cds_WP_155864096.1_2042 target sequence
ESYADIVPSAVIEALSYFGDDESFRFVIDRGLKNEKETIRAAVARNLWRFGDKSREYLYYLVKDPSPIVRGATIKSLEELKMKDL

SEQ ID NO: 22805 - protein, 85 aa, unidentified
  REGION 1..85: note = Description of Unknown:cds_NC_035460.1_cds_YP_009407987.1_36 target sequence
LSINAIKDSFNDNNSKTITEAFYNLKLNEALRYILINLHPQQLPKKWYTEIVEVCATKLYLFKPQHILFTDLVSILTYQKNISLY

SEQ ID NO: 22806 - protein, 85 aa, unidentified
  REGION 1..85: note = Description of Unknown:cds_NC_035460.1_cds_YP_009407987.1_36 target sequence
ANHINFFKNDILMHCSSEIITKCIEYLILSDDDIRLLKDRFSYKELEYFLTYINEDSILSMNYIFNETLTENIFIKNHYMYECLY

SEQ ID NO: 22807 - protein, 85 aa, unidentified
  REGION 1..85: note = Description of Unknown:cds_NC_035460.1_cds_YP_009407987.1_36 target sequence
DHQTYSVTFLQEMLYKYGIVPNNIGIIDFISKEIVIEILIACKEEKDIIKFIDMLDEDIKTSEVVQNFVIDRVMSSNCANLFKFY

SEQ ID NO: 22808 - protein, 85 aa, unidentified
  REGION 1..85: note = Description of Unknown:cds_NC_035460.1_cds_YP_009407987.1_36 target sequence
ISEYLFDQRDKFGIFQKIFFDIDDDITKYKNISKQYLETICNNIDRYESHLEYIVNYIIQNNYIDLLALIINSIPKSILTEELCI

SEQ ID NO: 22809 - protein, 85 aa, unidentified
  REGION 1..85: note = Description of Unknown:cds_NC_035460.1_cds_YP_009407987.1_36 target sequence
RIVCDSKIKVSVCSLPIHSSLVMTVCKQMKYVDMVEFLDTLDINLLIEKDVELITDYTFTTNWFNKCNELINVYIKKYKFSPLMM

SEQ ID NO: 22810 - protein, 85 aa, unidentified
  REGION 1..85: note = Description of Unknown:cds_NC_035460.1_cds_YP_009407987.1_36 target sequence
KKLMFDYPLTLESSMYLLNTIELQKEISTFYPNIASSFIYLLNNKYKLKQKRILNKNVDIPCKKFNKDYKTILLKPDSKELKSTI

SEQ ID NO: 22811 - protein, 85 aa, unidentified
  REGION 1..85: note = Description of Unknown:cds_NC_035460.1_cds_YP_009407987.1_36 target sequence
LISNIPDLYTCVMEDISKVKTKEGCCIQFKPSTKKIMSDYERIKKQIYDIAKLASYGLYYISNVYLPNWVPIVNVINGKPYTHPT

SEQ ID NO: 22812 - protein, 85 aa, unidentified
  REGION 1..85: note = Description of Unknown:cds_NC_035460.1_cds_YP_009407987.1_36 target sequence
RIEHCVILDISPGDFIEFNYLGQETFNIYNLTEPMSNYHAAINSLISVLFIYIVIGSVKYCKIKLEDFISSIIDSFCTGMKINEI

SEQ ID NO: 22813 - protein, 84 aa, unidentified
  REGION 1..84: note = Description of Unknown:cds_NC_035460.1_cds_YP_009407987.1_36 target sequence
IVIGSVKYCKIKLEDFISSIIDSFCTGMKINEIIYEDITDVCKEINNLKSYASDSSFMFIKKNTLVKTLELCEKVCIAIILDNN

SEQ ID NO: 22814 - protein, 85 aa, unidentified
  REGION 1..85: note = Description of Unknown:cds_NC_035460.1_cds_YP_009407987.1_36 target sequence
NEALRYILINLHPQQLPKKWYTEIVEVCATKLYLFKPQHILFTDLVSILTYQKNISLYANHINFFKNDILMHCSSEIITKCIEYL

SEQ ID NO: 22815 - protein, 85 aa, unidentified
  REGION 1..85: note = Description of Unknown:cds_NC_035460.1_cds_YP_009407987.1_36 target sequence
ILSDDDIRLLKDRFSYKELEYFLTYINEDSILSMNYIFNETLTENIFIKNHYMYECLYDHQTYSVTFLQEMLYKYGIVPNNIGII

SEQ ID NO: 22816 - protein, 85 aa, unidentified
  REGION 1..85: note = Description of Unknown:cds_NC_035460.1_cds_YP_009407987.1_36 target sequence
DFISKEIVIEILIACKEEKDIIKFIDMLDEDIKTSEVVQNFVIDRVMSSNCANLFKFYISEYLFDQRDKFGIFQKIFFDIDDDIT

SEQ ID NO: 22817 - protein, 85 aa, unidentified
  REGION 1..85: note = Description of Unknown:cds_NC_035460.1_cds_YP_009407987.1_36 target sequence
KYKNISKQYLETICNNIDRYESHLEYIVNYIIQNNYIDLLALIINSIPKSILTEELCIRIVCDSKIKVSVCSLPIHSSLVMTVCK

SEQ ID NO: 22818 - protein, 85 aa, unidentified
  REGION 1..85: note = Description of Unknown:cds_NC_035460.1_cds_YP_009407987.1_36 target sequence
QMKYVDMVEFLDTLDINLLIEKDVELITDYTFTTNWFNKCNELINVYIKKYKFSPLMMKKLMFDYPLTLESSMYLLNTIELQKEI

SEQ ID NO: 22819 - protein, 85 aa, unidentified
  REGION 1..85: note = Description of Unknown:cds_NC_035460.1_cds_YP_009407987.1_36 target sequence
STFYPNIASSFIYLLNNKYKLKQKRILNKNVDIPCKKFNKDYKTILLKPDSKELKSTILISNIPDLYTCVMEDISKVKTKEGCCI

SEQ ID NO: 22820 - protein, 85 aa, unidentified
  REGION 1..85: note = Description of Unknown:cds_NC_035460.1_cds_YP_009407987.1_36 target sequence
QFKPSTKKIMSDYERIKKQIYDIAKLASYGLYYISNVYLPNWVPIVNVINGKPYTHPTRIEHCVILDISPGDFIEFNYLGQETFN

SEQ ID NO: 22821 - protein, 85 aa, unidentified
  REGION 1..85: note = Description of Unknown:cds_NC_035460.1_cds_YP_009407987.1_36 target sequence
IYNLTEPMSNYHAAINSLISVLFIYIVIGSVKYCKIKLEDFISSIIDSFCTGMKINEIIYEDITDVCKEINNLKSYASDSSFMFI

SEQ ID NO: 22822 - protein, 85 aa, unidentified
  REGION 1..85: note = Description of Unknown:cds_NC_025804.1_cds_YP_009110699.1_4 target sequence
AYLALPVPEGPDSQSALISAVNGYRPDGVAFDDVHVLDTKRVLRQFDLMTTGIRADDVAKGLLLRDWRRQSVFVLLPQKTSLLEY

SEQ ID NO: 22823 - protein, 85 aa, unidentified
  REGION 1..85: note = Description of Unknown:cds_NC_025804.1_cds_YP_009110699.1_4 target sequence
LLTAPKTSLPDGLTPQLLRKFKAKPHDFKYSDWFSPLVTEHSSVVQSVRYLNSHPVVFTTTVKVIGAPVRLFAPFKYFDISQGIL

SEQ ID NO: 22824 - protein, 85 aa, unidentified
  REGION 1..85: note = Description of Unknown:cds_NC_025804.1_cds_YP_009110699.1_4 target sequence
SDLMILKMNHQLPPLPAFRVMVSMFPSSASGSCVLPPIDEWRNSNTHPVCLLLASMYDSSYKATARYLDRSLITAMLCGQRRVKQ

SEQ ID NO: 22825 - protein, 85 aa, unidentified
  REGION 1..85: note = Description of Unknown:cds_NC_025804.1_cds_YP_009110699.1_4 target sequence
VKYSPLMARAARSVGLSVNVTNPTRQINTSLIDVHTVVIDVRSSLDNRLTPTRLRFCGVPVALTAHMGVAPSEDWLAVRDETGMF

SEQ ID NO: 22826 - protein, 85 aa, unidentified
  REGION 1..85: note = Description of Unknown:cds_NC_025804.1_cds_YP_009110699.1_4 target sequence
VDWFLVLTLFSDRIKGPTGQHVCLNPLSTSVDSVNFVRVHGYVSQHVQSLKPWQYGRLSSFGVAMAKGSFKSTMTRFLTSLTIAG

SEQ ID NO: 22827 - protein, 85 aa, unidentified
  REGION 1..85: note = Description of Unknown:cds_NC_025804.1_cds_YP_009110699.1_4 target sequence
TRLIFPNVIADSDDPGDSLEPTFENQVLAELSSVDADWERKVFTASGTVDTSYLSTVIFPIFLRLFRSELSPHSRTFYDERASSA

SEQ ID NO: 22828 - protein, 85 aa, unidentified
  REGION 1..85: note = Description of Unknown:cds_NC_025804.1_cds_YP_009110699.1_4 target sequence
RTLTFAHADAEFLDAGWVDRIERCYIHYDEERNVLLRSSRVGGSTFQLVLSRCYKMIASPAPSEPVSMLLKALVGGWLSAGPVLS

SEQ ID NO: 22829 - protein, 85 aa, unidentified
  REGION 1..85: note = Description of Unknown:cds_NC_025804.1_cds_YP_009110699.1_4 target sequence
SLSHSASARVLAWYIDDHHWVDHGWCLCDKRKHVTFSFMRGHPDDLAVLDLQDWSKYRATISVLTDPLDFGSSLRVVAARVYWTS

SEQ ID NO: 22830 - protein, 84 aa, unidentified
  REGION 1..84: note = Description of Unknown:cds_NC_025804.1_cds_YP_009110699.1_4 target sequence
LQDWSKYRATISVLTDPLDFGSSLRVVAARVYWTSQKPSVDVFDNRALLTPFQTYHVSLNCACPLGVRFQVKNVGLKLATVSGA

SEQ ID NO: 22831 - protein, 85 aa, unidentified
  REGION 1..85: note = Description of Unknown:cds_NC_025804.1_cds_YP_009110699.1_4 target sequence
GVAFDDVHVLDTKRVLRQFDLMTTGIRADDVAKGLLLRDWRRQSVFVLLPQKTSLLEYLLTAPKTSLPDGLTPQLLRKFKAKPHD

SEQ ID NO: 22832 - protein, 85 aa, unidentified
  REGION 1..85: note = Description of Unknown:cds_NC_025804.1_cds_YP_009110699.1_4 target sequence
FKYSDWFSPLVTEHSSVVQSVRYLNSHPVVFTTTVKVIGAPVRLFAPFKYFDISQGILSDLMILKMNHQLPPLPAFRVMVSMFPS

SEQ ID NO: 22833 - protein, 85 aa, unidentified
  REGION 1..85: note = Description of Unknown:cds_NC_025804.1_cds_YP_009110699.1_4 target sequence
SASGSCVLPPIDEWRNSNTHPVCLLLASMYDSSYKATARYLDRSLITAMLCGQRRVKQVKYSPLMARAARSVGLSVNVTNPTRQI

SEQ ID NO: 22834 - protein, 85 aa, unidentified
  REGION 1..85: note = Description of Unknown:cds_NC_025804.1_cds_YP_009110699.1_4 target sequence
NTSLIDVHTVVIDVRSSLDNRLTPTRLRFCGVPVALTAHMGVAPSEDWLAVRDETGMFVDWFLVLTLFSDRIKGPTGQHVCLNPL

SEQ ID NO: 22835 - protein, 85 aa, unidentified
  REGION 1..85: note = Description of Unknown:cds_NC_025804.1_cds_YP_009110699.1_4 target sequence
STSVDSVNFVRVHGYVSQHVQSLKPWQYGRLSSFGVAMAKGSFKSTMTRFLTSLTIAGTRLIFPNVIADSDDPGDSLEPTFENQV

SEQ ID NO: 22836 - protein, 85 aa, unidentified
  REGION 1..85: note = Description of Unknown:cds_NC_025804.1_cds_YP_009110699.1_4 target sequence
LAELSSVDADWERKVFTASGTVDTSYLSTVIFPIFLRLFRSELSPHSRTFYDERASSARTLTFAHADAEFLDAGWVDRIERCYIH

SEQ ID NO: 22837 - protein, 85 aa, unidentified
  REGION 1..85: note = Description of Unknown:cds_NC_025804.1_cds_YP_009110699.1_4 target sequence
YDEERNVLLRSSRVGGSTFQLVLSRCYKMIASPAPSEPVSMLLKALVGGWLSAGPVLSSLSHSASARVLAWYIDDHHWVDHGWCL

SEQ ID NO: 22838 - protein, 85 aa, unidentified
  REGION 1..85: note = Description of Unknown:cds_NC_025804.1_cds_YP_009110699.1_4 target sequence
CDKRKHVTFSFMRGHPDDLAVLDLQDWSKYRATISVLTDPLDFGSSLRVVAARVYWTSQKPSVDVFDNRALLTPFQTYHVSLNCA

SEQ ID NO: 22839 - protein, 85 aa, unidentified; identical to SEQ ID NO: 22822
  REGION 1..85: note = Description of Unknown:cds_NC_038661.1_cds_YP_009507779.1_4 target sequence

SEQ ID NO: 22840 - protein, 85 aa, unidentified
  REGION 1..85: note = Description of Unknown:cds_NC_038661.1_cds_YP_009507779.1_4 target sequence
LFTAPKSSLPDGLTPQLLRKFKTKPQDFKYSDWFSPLVTEHSSVVQSVRYLNSHPVVFTTTVKVIGAPVRLFAPFKYFDISQGIL

SEQ ID NO: 22841 - protein, 85 aa, unidentified
  REGION 1..85: note = Description of Unknown:cds_NC_038661.1_cds_YP_009507779.1_4 target sequence
SDLMILKMNHQLPPLPAFRVMVSMFPSSASGSCVLPPIDEWRNSNTHPVCLLLASMYDSSYKATARYLDCSLITAMLCGQRRVKQ

SEQ ID NO: 22842 - protein, 85 aa, unidentified
  REGION 1..85: note = Description of Unknown:cds_NC_038661.1_cds_YP_009507779.1_4 target sequence
AKYSPLMARAARSVGLSVNVTNPTRQINTSLIDVHTAVIDVRSSLDNRLTSTRLRFCGVPVALTAHMGVTPSEDWLAVRDETGMF

SEQ ID NO: 22843 - protein, 85 aa, unidentified; identical to SEQ ID NO: 22826
  REGION 1..85: note = Description of Unknown:cds_NC_038661.1_cds_YP_009507779.1_4 target sequence

SEQ ID NO: 22844 - protein, 85 aa, unidentified
  REGION 1..85: note = Description of Unknown:cds_NC_038661.1_cds_YP_009507779.1_4 target sequence
TRLIFPNVIVDSDDPGDSLDPTFENQVLDELSSVDADWERKVFTASGTVDMSYLSTVIFPIFLRLFRSELSPHARTFYDERASAA

SEQ ID NO: 22845 - protein, 85 aa, unidentified
  REGION 1..85: note = Description of Unknown:cds_NC_038661.1_cds_YP_009507779.1_4 target sequence
RTLTFAHADAEFLDAGWVDRIERCYIHYDEERNVLLRSSRVGGSIFQLVLSRCYKMIASPAPSEPVSMLLKALVGGWLSAGPVLS

SEQ ID NO: 22846 - protein, 85 aa, unidentified
  REGION 1..85: note = Description of Unknown:cds_NC_038661.1_cds_YP_009507779.1_4 target sequence
SLSHSASARVLAWYIDDHHWIDHGWCLCDKRKHVTFSFMRGHPDDLAVIDLQDWSKYRATISVLTDPLDFGSSLRVVAARVYWTS

SEQ ID NO: 22847 - protein, 84 aa, unidentified
  REGION 1..84: note = Description of Unknown:cds_NC_038661.1_cds_YP_009507779.1_4 target sequence
LQDWSKYRATISVLTDPLDFGSSLRVVAARVYWTSQKPSVDVFDNRALLTPFQTYHVSLNCACPLGVRLQVKNVGLKLATVSGA

SEQ ID NO: 22848 - protein, 85 aa, unidentified
  REGION 1..85: note = Description of Unknown:cds_NC_038661.1_cds_YP_009507779.1_4 target sequence
GVAFDDVHVLDTKRVLRQFDLMTTGIRADDVAKGLLLRDWRRQSVFVLLPQKTSLLEYLFTAPKSSLPDGLTPQLLRKFKTKPQD

SEQ ID NO: 22849 - protein, 85 aa, unidentified; identical to SEQ ID NO: 22832
  REGION 1..85: note = Description of Unknown:cds_NC_038661.1_cds_YP_009507779.1_4 target sequence

SEQ ID NO: 22850 - protein, 85 aa, unidentified
  REGION 1..85: note = Description of Unknown:cds_NC_038661.1_cds_YP_009507779.1_4 target sequence
SASGSCVLPPIDEWRNSNTHPVCLLLASMYDSSYKATARYLDCSLITAMLCGQRRVKQAKYSPLMARAARSVGLSVNVTNPTRQI

SEQ ID NO: 22851 - protein, 85 aa, unidentified
  REGION 1..85: note = Description of Unknown:cds_NC_038661.1_cds_YP_009507779.1_4 target sequence
NTSLIDVHTAVIDVRSSLDNRLTSTRLRFCGVPVALTAHMGVTPSEDWLAVRDETGMFVDWFLVLTLFSDRIKGPTGQHVCLNPL

SEQ ID NO: 22852 - protein, 85 aa, unidentified
  REGION 1..85: note = Description of Unknown:cds_NC_038661.1_cds_YP_009507779.1_4 target sequence
STSVDSVNFVRVHGYVSQHVQSLKPWQYGRLSSFGVAMAKGSFKSTMTRFLTSLTIAGTRLIFPNVIVDSDDPGDSLDPTFENQV

SEQ ID NO: 22853 - protein, 85 aa, unidentified
  REGION 1..85: note = Description of Unknown:cds_NC_038661.1_cds_YP_009507779.1_4 target sequence
LDELSSVDADWERKVFTASGTVDMSYLSTVIFPIFLRLFRSELSPHARTFYDERASAARTLTFAHADAEFLDAGWVDRIERCYIH

SEQ ID NO: 22854 - protein, 85 aa, unidentified
  REGION 1..85: note = Description of Unknown:cds_NC_038661.1_cds_YP_009507779.1_4 target sequence
YDEERNVLLRSSRVGGSIFQLVLSRCYKMIASPAPSEPVSMLLKALVGGWLSAGPVLSSLSHSASARVLAWYIDDHHWIDHGWCL

SEQ ID NO: 22855 - protein, 85 aa, unidentified
  REGION 1..85: note = Description of Unknown:cds_NC_038661.1_cds_YP_009507779.1_4 target sequence
CDKRKHVTFSFMRGHPDDLAVIDLQDWSKYRATISVLTDPLDFGSSLRVVAARVYWTSQKPSVDVFDNRALLTPFQTYHVSLNCA

SEQ ID NO: 22856 - protein, 85 aa, unidentified
  REGION 1..85: note = Description of Unknown:cds_NZ_WFIY01000004.1_cds_WP_155862630.1_410 target sequence
EGKVVALVGVIVILLIVAAIGFYEYSSTSSSYSSLSSSYSSLSSSYASLNSSYSSLVAQLQKAQQNESTYMKEAENYSKLYMMYK

SEQ ID NO: 22857 - protein, 85 aa, unidentified
  REGION 1..85: note = Description of Unknown:cds_NZ_WFIY01000004.1_cds_WP_155862630.1_410 target sequence
SLYNQNAEGAALDAVLELYDGISIENPNDVLPYLAQNFTAKIEGVPFPGTYNLESFNNTWLADFFSTYETVYFYTTALPTITQIS

SEQ ID NO: 22858 - protein, 85 aa, unidentified
  REGION 1..85: note = Description of Unknown:cds_NZ_WFIY01000004.1_cds_WP_155862630.1_410 target sequence
HNTYEVTDVVQFFVAPTNDPIYLQVFNASNTIIVQEINGKMEITSLTWIGNELPPSAVIAGYPSQHTLESNVVLSEVLSEINGLG

SEQ ID NO: 22859 - protein, 85 aa, unidentified
  REGION 1..85: note = Description of Unknown:cds_NZ_WFIY01000004.1_cds_WP_155862630.1_410 target sequence
GEFNPTTIAQNFAPNAVLEVTGQLPPVFTPGNYTGISKIESFFFTWDSYFIFVAEYSQNLLPNGTAVPPSVSVQLSPSGTMAVVV

SEQ ID NO: 22860 - protein, 85 aa, unidentified
  REGION 1..85: note = Description of Unknown:cds_NZ_WFIY01000004.1_cds_WP_155862630.1_410 target sequence
ANVTPFIGFVNQGEPGFPNIYDIHVNLVTYLQYNSTTASWQIEKQIFNAKMIPILQDTLYYNLNMPLFKVIGEDTVTVNASQGAI

SEQ ID NO: 22861 - protein, 85 aa, unidentified
  REGION 1..85: note = Description of Unknown:cds_NZ_WFIY01000004.1_cds_WP_155862630.1_410 target sequence
LQEGNIVTVIKPGTYAMLPNGSMVSIYNFSLITFSLQAVMPPAQDFFNLTPTYAFAFAINGQISPKYALVNASGSPDPAITIVYA

SEQ ID NO: 22862 - protein, 85 aa, unidentified
  REGION 1..85: note = Description of Unknown:cds_NZ_WFIY01000004.1_cds_WP_155862630.1_410 target sequence
PDTWTSWTWFGGTFNGTAYIGGSYKFADHWIYGNGVIVNNQFFKPVLWIFESSCEPVGMPPTPVSVTPKQVFGLSPIADYTYEVN

SEQ ID NO: 22863 - protein, 85 aa, unidentified
  REGION 1..85: note = Description of Unknown:cds_NZ_WFIY01000004.1_cds_WP_155862630.1_410 target sequence
GITGGVVVAGNILVVIQPGTTITTPSGTTLTTFNFSVVFYAPQNVTAPEPGQVPFLVFAYAINNCVSFHYVASKPFITVIMTPSC

SEQ ID NO: 22864 - protein, 84 aa, unidentified
  REGION 1..84: note = Description of Unknown:cds_NZ_WFIY01000004.1_cds_WP_155862630.1_410 target sequence
PGQVPFLVFAYAINNCVSFHYVASKPFITVIMTPSCGANMWTWGLTKSGTYGYVLHDPILIGKGIVINLTFVRPVPWVLTLPLM

SEQ ID NO: 22865 - protein, 85 aa, unidentified
  REGION 1..85: note = Description of Unknown:cds_NZ_WFIY01000004.1_cds_WP_155862630.1_410 target sequence
TSSSYSSLSSSYSSLSSSYASLNSSYSSLVAQLQKAQQNESTYMKEAENYSKLYMMYKSLYNQNAEGAALDAVLELYDGISIENP

SEQ ID NO: 22866 - protein, 85 aa, unidentified
  REGION 1..85: note = Description of Unknown:cds_NZ_WFIY01000004.1_cds_WP_155862630.1_410 target sequence
NDVLPYLAQNFTAKIEGVPFPGTYNLESFNNTWLADFFSTYETVYFYTTALPTITQISHNTYEVTDVVQFFVAPTNDPIYLQVFN

SEQ ID NO: 22867 - protein, 85 aa, unidentified
  REGION 1..85: note = Description of Unknown:cds_NZ_WFIY01000004.1_cds_WP_155862630.1_410 target sequence
ASNTIIVQEINGKMEITSLTWIGNELPPSAVIAGYPSQHTLESNVVLSEVLSEINGLGGEFNPTTIAQNFAPNAVLEVTGQLPPV

SEQ ID NO: 22868 - protein, 85 aa, unidentified
  REGION 1..85: note = Description of Unknown:cds_NZ_WFIY01000004.1_cds_WP_155862630.1_410 target sequence
FTPGNYTGISKIESFFFTWDSYFIFVAEYSQNLLPNGTAVPPSVSVQLSPSGTMAVVVANVTPFIGFVNQGEPGFPNIYDIHVNL

SEQ ID NO: 22869 - protein, 85 aa, unidentified
  REGION 1..85: note = Description of Unknown:cds_NZ_WFIY01000004.1_cds_WP_155862630.1_410 target sequence
VTYLQYNSTTASWQIEKQIFNAKMIPILQDTLYYNLNMPLFKVIGEDTVTVNASQGAILQEGNIVTVIKPGTYAMLPNGSMVSIY

SEQ ID NO: 22870 - protein, 85 aa, unidentified
  REGION 1..85: note = Description of Unknown:cds_NZ_WFIY01000004.1_cds_WP_155862630.1_410 target sequence
NFSLITFSLQAVMPPAQDFFNLTPTYAFAFAINGQISPKYALVNASGSPDPAITIVYAPDTWTSWTWFGGTFNGTAYIGGSYKFA

SEQ ID NO: 22871 - protein, 85 aa, unidentified
  REGION 1..85: note = Description of Unknown:cds_NZ_WFIY01000004.1_cds_WP_155862630.1_410 target sequence
DHWIYGNGVIVNNQFFKPVLWIFESSCEPVGMPPTPVSVTPKQVFGLSPIADYTYEVNGITGGVVVAGNILVVIQPGTTITTPSG

SEQ ID NO: 22872 - protein, 85 aa, unidentified
  REGION 1..85: note = Description of Unknown:cds_NZ_WFIY01000004.1_cds_WP_155862630.1_410 target sequence
TTLTTFNFSVVFYAPQNVTAPEPGQVPFLVFAYAINNCVSFHYVASKPFITVIMTPSCGANMWTWGLTKSGTYGYVLHDPILIGK

SEQ ID NO: 22873 - protein, 85 aa, unidentified
  REGION 1..85: note = Description of Unknown:cds_NZ_WFIY01000004.1_cds_WP_155864150.1_2104 target sequence
YVGQRVRRKEDLKLITGTGRYVDDINLNGMLYLAILRSNVPHARLKKINIEDALKLPGVVDVITGLKISVENRPNNFPMAINEIL

SEQ ID NO: 22874 - protein, 85 aa, unidentified
  REGION 1..85: note = Description of Unknown:cds_NZ_WFIY01000004.1_cds_WP_155864150.1_2104 target sequence
YAGQPIAAVLAEDRYTAYDALEYISYDYEELPAVVDPEEAVKDEVKAVEGRSNIAYSKVYKGGDAEKAYENSEVKIEEKFVISRV

SEQ ID NO: 22875 - protein, 85 aa, unidentified
  REGION 1..85: note = Description of Unknown:cds_NZ_WFIY01000004.1_cds_WP_155864150.1_2104 target sequence
YPAPMEPRGLVVDFQQDRITVYASTQSPHYMRSYLLSAFPEYDFRVIQADVGGAFGSKLFPYPEDYITVYASIKSRRPVKFVNTR

SEQ ID NO: 22876 - protein, 85 aa, unidentified
  REGION 1..85: note = Description of Unknown:cds_NZ_WFIY01000004.1_cds_WP_155864150.1_2104 target sequence
TEELHSTYHSRGQIHHVKLGANKDGKINALIDDIIIDLGAAWHGFYLADISGTLITGPYDIKNATSTIKGVLTNKVPLDQYRGAG

SEQ ID NO: 22877 - protein, 85 aa, unidentified
  REGION 1..85: note = Description of Unknown:cds_NZ_WFIY01000004.1_cds_WP_155864150.1_2104 target sequence
RPEAAFVYERLMDILADELGIDPIELRKKNAIRETPYVNPFGLKYDSGNYLDLLNKAEEFYREMEKTAEELRKQGKKVGVGLSFY

SEQ ID NO: 22878 - protein, 85 aa, unidentified
  REGION 1..85: note = Description of Unknown:cds_NZ_WFIY01000004.1_cds_WP_155864150.1_2104 target sequence
VEQNNFGPWESASVRLLSNGKVEVIIGAAPHGQGTGTGIAQIVADELQINIDDVNVVWGDTDKISNAFGTYGSRSLTLAGNAALL

SEQ ID NO: 22879 - protein, 85 aa, unidentified
  REGION 1..85: note = Description of Unknown:cds_NZ_WFIY01000004.1_cds_WP_155864150.1_2104 target sequence
AARRLKENIMRLAAAFLKSDPEELQYKDGKVINPKTGKMLSLAEIAKMATSNLGGTWNYKAEPTLEATASFGLDNYTFPYGSHIA

SEQ ID NO: 22880 - protein, 85 aa, unidentified
  REGION 1..85: note = Description of Unknown:cds_NZ_WFIY01000004.1_cds_WP_155864150.1_2104 target sequence
MVEVDETGKVKVLDYVAIDDLGLVVNPMLAEGQVMGGVIQGFGEVVTEEIVYDERGNLLTPSFAEYAIPSAVEAFNVKWLYMEEG

SEQ ID NO: 22881 - protein, 84 aa, unidentified
  REGION 1..84: note = Description of Unknown:cds_NZ_WFIY01000004.1_cds_WP_155864150.1_2104 target sequence
EEIVYDERGNLLTPSFAEYAIPSAVEAFNVKWLYMEEGKSNAPLPAKGIGEGASIGSLPAITRAIERAVGKRITKIPVRMEELI

SEQ ID NO: 22882 - protein, 85 aa, unidentified
  REGION 1..85: note = Description of Unknown:cds_NZ_WFIY01000004.1_cds_WP_155864150.1_2104 target sequence
NGMLYLAILRSNVPHARLKKINIEDALKLPGVVDVITGLKISVENRPNNFPMAINEILYAGQPIAAVLAEDRYTAYDALEYISYD

SEQ ID NO: 22883 - protein, 85 aa, unidentified
  REGION 1..85: note = Description of Unknown:cds_NZ_WFIY01000004.1_cds_WP_155864150.1_2104 target sequence
YEELPAVVDPEEAVKDEVKAVEGRSNIAYSKVYKGGDAEKAYENSEVKIEEKFVISRVYPAPMEPRGLVVDFQQDRITVYASTQS

SEQ ID NO: 22884 - protein, 85 aa, unidentified
  REGION 1..85: note = Description of Unknown:cds_NZ_WFIY01000004.1_cds_WP_155864150.1_2104 target sequence
PHYMRSYLLSAFPEYDFRVIQADVGGAFGSKLFPYPEDYITVYASIKSRRPVKFVNTRTEELHSTYHSRGQIHHVKLGANKDGKI

SEQ ID NO: 22885 - protein, 85 aa, unidentified
  REGION 1..85: note = Description of Unknown:cds_NZ_WFIY01000004.1_cds_WP_155864150.1_2104 target sequence
NALIDDIIIDLGAAWHGFYLADISGTLITGPYDIKNATSTIKGVLTNKVPLDQYRGAGRPEAAFVYERLMDILADELGIDPIELR

SEQ ID NO: 22886 - protein, 85 aa, unidentified
  REGION 1..85: note = Description of Unknown:cds_NZ_WFIY01000004.1_cds_WP_155864150.1_2104 target sequence
KKNAIRETPYVNPFGLKYDSGNYLDLLNKAEEFYREMEKTAEELRKQGKKVGVGLSFYVEQNNFGPWESASVRLLSNGKVEVIIG

SEQ ID NO: 22887 - protein, 85 aa, unidentified
  REGION 1..85: note = Description of Unknown:cds_NZ_WFIY01000004.1_cds_WP_155864150.1_2104 target sequence
AAPHGQGTGTGIAQIVADELQINIDDVNVVWGDTDKISNAFGTYGSRSLTLAGNAALLAARRLKENIMRLAAAFLKSDPEELQYK

SEQ ID NO: 22888 - protein, 85 aa, unidentified
  REGION 1..85: note = Description of Unknown:cds_NZ_WFIY01000004.1_cds_WP_155864150.1_2104 target sequence
DGKVINPKTGKMLSLAEIAKMATSNLGGTWNYKAEPTLEATASFGLDNYTFPYGSHIAMVEVDETGKVKVLDYVAIDDLGLVVNP

SEQ ID NO: 22889 - protein, 85 aa, unidentified
  REGION 1..85: note = Description of Unknown:cds_NZ_WFIY01000004.1_cds_WP_155864150.1_2104 target sequence
MLAEGQVMGGVIQGFGEVVTEEIVYDERGNLLTPSFAEYAIPSAVEAFNVKWLYMEEGKSNAPLPAKGIGEGASIGSLPAITRAI

SEQ ID NO: 22890 - protein, 85 aa, unidentified
  REGION 1..85: note = Description of Unknown:cds_NZ_WFIY01000004.1_cds_WP_155862637.1_418 target sequence
SRVQIIANKELLDDIVTKILKFQNFEPEEPEEPISNERFEDARRKLGIIQEHLNKFQIIMDLAGVTIEPKGKMKTGNWNKIADEV

SEQ ID NO: 22891 - protein, 85 aa, unidentified
  REGION 1..85: note = Description of Unknown:cds_NZ_WFIY01000004.1_cds_WP_155862637.1_418 target sequence
DNEATQEEEKYKELLEEIGKIKSELDLYKAQLNEVLPFKDITVNLSKLYSLKLFDVYLLTILPNQLDKVKFDNALVLTKRINEKT

SEQ ID NO: 22892 - protein, 85 aa, unidentified
  REGION 1..85: note = Description of Unknown:cds_NZ_WFIY01000004.1_cds_WP_155862637.1_418 target sequence
YAVIIIAPKGVLQKDKLEKEIGAKVFETPEGKAPYDVYNELQNKINELTRILEETRAKLKEKLKACGLHIKEIYGKLLTIRDALT

SEQ ID NO: 22893 - protein, 85 aa, unidentified
  REGION 1..85: note = Description of Unknown:cds_NZ_WFIY01000004.1_cds_WP_155862637.1_418 target sequence
IISRARVSEFYVQIEGYAPTKMIKKLKDQLKGEAFITERLPRRYGEKDKPPTLISLPKSIRVIESVVELYGTPSYWEISPIIFLI

SEQ ID NO: 22894 - protein, 85 aa, unidentified
  REGION 1..85: note = Description of Unknown:cds_NZ_WFIY01000004.1_cds_WP_155862637.1_418 target sequence
FTFPILFGLMFPDFGNALVVFLFAIWFYKYGKRKGSENTEKLSLVLIYSSIVAMITGLLAREFFGPVLVGGPREVFNNDSYPVGP

SEQ ID NO: 22895 - protein, 85 aa, unidentified
  REGION 1..85: note = Description of Unknown:cds_NZ_WFIY01000004.1_cds_WP_155862637.1_418 target sequence
LYYAWPVPVSVSDSLKYLIPFGNYSILSIEIENTMILSIFIGALALFVSSLLGVINAIDKKDPEFLFYEKLPLLILYTVPLIIFG

SEQ ID NO: 22896 - protein, 85 aa, unidentified
  REGION 1..85: note = Description of Unknown:cds_NZ_WFIY01000004.1_cds_WP_155862637.1_418 target sequence
YGFVDISDYFGKVECLLGGLLTNIFSFPPNLSTPTYALAYILILWVEIGLIYNWISKVILIKRHEGHVGLGAAIGMGFIEGGFEA

SEQ ID NO: 22897 - protein, 85 aa, unidentified
  REGION 1..85: note = Description of Unknown:cds_NZ_WFIY01000004.1_cds_WP_155862637.1_418 target sequence
GILLLSNTISFIRILVFALAHYYLLYAFSYMGLLVLYSSLPYVAAVIIAGIIIALGNLLAIALEGLIVFIQDMRLHFYEMFSKFY

SEQ ID NO: 22898 - protein, 84 aa, unidentified
  REGION 1..84: note = Description of Unknown:cds_NZ_WFIY01000004.1_cds_WP_155862637.1_418 target sequence
YSSLPYVAAVIIAGIIIALGNLLAIALEGLIVFIQDMRLHFYEMFSKFYEGQGRKFMPVMNYVELEEGEKEIAKEGEVIEVKAV

SEQ ID NO: 22899 - protein, 85 aa, unidentified
  REGION 1..85: note = Description of Unknown:cds_NZ_WFIY01000004.1_cds_WP_155862637.1_418 target sequence
EEPEEPISNERFEDARRKLGIIQEHLNKFQIIMDLAGVTIEPKGKMKTGNWNKIADEVDNEATQEEEKYKELLEEIGKIKSELDL

SEQ ID NO: 22900 - protein, 85 aa, unidentified
  REGION 1..85: note = Description of Unknown:cds_NZ_WFIY01000004.1_cds_WP_155862637.1_418 target sequence
YKAQLNEVLPFKDITVNLSKLYSLKLFDVYLLTILPNQLDKVKFDNALVLTKRINEKTYAVIIIAPKGVLQKDKLEKEIGAKVFE

SEQ ID NO: 22901 - protein, 85 aa, unidentified
  REGION 1..85: note = Description of Unknown:cds_NZ_WFIY01000004.1_cds_WP_155862637.1_418 target sequence
TPEGKAPYDVYNELQNKINELTRILEETRAKLKEKLKACGLHIKEIYGKLLTIRDALTIISRARVSEFYVQIEGYAPTKMIKKLK

SEQ ID NO: 22902 - protein, 85 aa, unidentified
  REGION 1..85: note = Description of Unknown:cds_NZ_WFIY01000004.1_cds_WP_155862637.1_418 target sequence
DQLKGEAFITERLPRRYGEKDKPPTLISLPKSIRVIESVVELYGTPSYWEISPIIFLIFTFPILFGLMFPDFGNALVVFLFAIWF

SEQ ID NO: 22903 - protein, 85 aa, unidentified
  REGION 1..85: note = Description of Unknown:cds_NZ_WFIY01000004.1_cds_WP_155862637.1_418 target sequence
YKYGKRKGSENTEKLSLVLIYSSIVAMITGLLAREFFGPVLVGGPREVFNNDSYPVGPLYYAWPVPVSVSDSLKYLIPFGNYSIL

SEQ ID NO: 22904 - protein, 85 aa, unidentified
  REGION 1..85: note = Description of Unknown:cds_NZ_WFIY01000004.1_cds_WP_155862637.1_418 target sequence
SIEIENTMILSIFIGALALFVSSLLGVINAIDKKDPEFLFYEKLPLLILYTVPLIIFGYGFVDISDYFGKVECLLGGLLTNIFSF

SEQ ID NO: 22905 - protein, 85 aa, unidentified
  REGION 1..85: note = Description of Unknown:cds_NZ_WFIY01000004.1_cds_WP_155862637.1_418 target sequence
PPNLSTPTYALAYILILWVEIGLIYNWISKVILIKRHEGHVGLGAAIGMGFIEGGFEAGILLLSNTISFIRILVFALAHYYLLYA

SEQ ID NO: 22906 - protein, 85 aa, unidentified
  REGION 1..85: note = Description of Unknown:cds_NZ_WFIY01000004.1_cds_WP_155862637.1_418 target sequence
FSYMGLLVLYSSLPYVAAVIIAGIIIALGNLLAIALEGLIVFIQDMRLHFYEMFSKFYEGQGRKFMPVMNYVELEEGEKEIAKEG

SEQ ID NO: 22907 - protein, 85 aa, unidentified
  REGION 1..85: note = Description of Unknown:cds_NZ_WFIY01000004.1_cds_WP_155864485.1_2190 target sequence
LYLGVIRSQYARAKFYVKSSDKVITQEDVMEITNPLPNFFAPKAPKEYPLAYKEAKYVGEPLALVVAKDRYEIEDLIEETYVEYE

SEQ ID NO: 22908 - protein, 85 aa, unidentified
  REGION 1..85: note = Description of Unknown:cds_NZ_WFIY01000004.1_cds_WP_155864485.1_2190 target sequence
PLSPIVDPLKAMEDKELVHEDFGTNIAYDDTFVYGEEPNDYEYLEKTFRINRICPSPIEPNGVIADYSYAENSLTVYANTQVPQV

SEQ ID NO: 22909 - protein, 85 aa, unidentified
  REGION 1..85: note = Description of Unknown:cds_NZ_WFIY01000004.1_cds_WP_155864485.1_2190 target sequence
FRTALSIVFNIPRSKIRIIVPDSGGGFGGKIFLKPLVLASLASIVSKRPVKYIETRTENIMSVQGPDRIYKARILYKGDKLLGMD

SEQ ID NO: 22910 - protein, 85 aa, unidentified
  REGION 1..85: note = Description of Unknown:cds_NZ_WFIY01000004.1_cds_WP_155864485.1_2190 target sequence
VFQIEDFGAYLHMYQPLPILRQIYHLTGAYDMKFLRFKIKGVLTNKPPTGPYRGLGIPPAVLVLENLVSSVARKLGIGQDEIRYK

SEQ ID NO: 22911 - protein, 85 aa, unidentified
  REGION 1..85: note = Description of Unknown:cds_NZ_WFIY01000004.1_cds_WP_155864485.1_2190 target sequence
NFIKSTPFTTITGAIYDSGDYVKSLSILMREIKREGKGLGIAFALEPGSSLAFQTLVGKSRTPYYEGAYVKMDSGGEVTVIVSSN

SEQ ID NO: 22912 - protein, 85 aa, unidentified
  REGION 1..85: note = Description of Unknown:cds_NZ_WFIY01000004.1_cds_WP_155864485.1_2190 target sequence
SMGTGHETSIVQVVSEVLGIPPENVRVVMGDTDGPPGTGFYGSRFSVVTISAVYGALQKLKEKIKELTAKAFNVEKDQVSVEKGI

SEQ ID NO: 22913 - protein, 85 aa, unidentified
  REGION 1..85: note = Description of Unknown:cds_NZ_WFIY01000004.1_cds_WP_155864485.1_2190 target sequence
VKVNGKQYKIGEIANIIYNRAILEGDIGLDASFVLKSPNLNVADEKRRVNFSSTYGINAHAVRIKVEETGEVKILDYVILSDCGN

SEQ ID NO: 22914 - protein, 85 aa, unidentified
  REGION 1..85: note = Description of Unknown:cds_NZ_WFIY01000004.1_cds_WP_155864485.1_2190 target sequence
MINPMIVDGQIMGGTVMGFGASLMEVVKYDENGNPLQINFSDYLIPSTLEVPKLKIIHTITPSPLTPLGTKGVAEGGATVPMAAI

SEQ ID NO: 22915 - protein, 84 aa, unidentified
  REGION 1..84: note = Description of Unknown:cds_NZ_WFIY01000004.1_cds_WP_155864485.1_2190 target sequence
PLQINFSDYLIPSTLEVPKLKIIHTITPSPLTPLGTKGVAEGGATVPMAAIVNAIEDYFNINLDYIEIPITPEFIQGVMEKINH

SEQ ID NO: 22916 - protein, 85 aa, unidentified
  REGION 1..85: note = Description of Unknown:cds_NZ_WFIY01000004.1_cds_WP_155864485.1_2190 target sequence
DVMEITNPLPNFFAPKAPKEYPLAYKEAKYVGEPLALVVAKDRYEIEDLIEETYVEYEPLSPIVDPLKAMEDKELVHEDFGTNIA

SEQ ID NO: 22917 - protein, 85 aa, unidentified
  REGION 1..85: note = Description of Unknown:cds_NZ_WFIY01000004.1_cds_WP_155864485.1_2190 target sequence
YDDTFVYGEEPNDYEYLEKTFRINRICPSPIEPNGVIADYSYAENSLTVYANTQVPQVFRTALSIVFNIPRSKIRIIVPDSGGGF

SEQ ID NO: 22918 - protein, 85 aa, unidentified
  REGION 1..85: note = Description of Unknown:cds_NZ_WFIY01000004.1_cds_WP_155864485.1_2190 target sequence
GGKIFLKPLVLASLASIVSKRPVKYIETRTENIMSVQGPDRIYKARILYKGDKLLGMDVFQIEDFGAYLHMYQPLPILRQIYHLT

SEQ ID NO: 22919 - protein, 85 aa, unidentified
  REGION 1..85: note = Description of Unknown:cds_NZ_WFIY01000004.1_cds_WP_155864485.1_2190 target sequence
GAYDMKFLRFKIKGVLTNKPPTGPYRGLGIPPAVLVLENLVSSVARKLGIGQDEIRYKNFIKSTPFTTITGAIYDSGDYVKSLSI

SEQ ID NO: 22920 - protein, 85 aa, unidentified
  REGION 1..85: note = Description of Unknown:cds_NZ_WFIY01000004.1_cds_WP_155864485.1_2190 target sequence
LMREIKREGKGLGIAFALEPGSSLAFQTLVGKSRTPYYEGAYVKMDSGGEVTVIVSSNSMGTGHETSIVQVVSEVLGIPPENVRV

SEQ ID NO: 22921 - protein, 85 aa, unidentified
  REGION 1..85: note = Description of Unknown:cds_NZ_WFIY01000004.1_cds_WP_155864485.1_2190 target sequence
VMGDTDGPPGTGFYGSRFSVVTISAVYGALQKLKEKIKELTAKAFNVEKDQVSVEKGIVKVNGKQYKIGEIANIIYNRAILEGDI

SEQ ID NO: 22922 - protein, 85 aa, unidentified
  REGION 1..85: note = Description of Unknown:cds_NZ_WFIY01000004.1_cds_WP_155864485.1_2190 target sequence
GLDASFVLKSPNLNVADEKRRVNFSSTYGINAHAVRIKVEETGEVKILDYVILSDCGNMINPMIVDGQIMGGTVMGFGASLMEVV

SEQ ID NO: 22923 - protein, 85 aa, unidentified
  REGION 1..85: note = Description of Unknown:cds_NZ_WFIY01000004.1_cds_WP_155864485.1_2190 target sequence
KYDENGNPLQINFSDYLIPSTLEVPKLKIIHTITPSPLTPLGTKGVAEGGATVPMAAIVNAIEDYFNINLDYIEIPITPEFIQGV

SEQ ID NO: 22924 - protein, 85 aa, unidentified
  REGION 1..85: note = Description of Unknown:cds_NC_035460.1_cds_YP_009408054.1_103 target sequence
RYIVNPQLVLYVGKNQEIQKALYLTPYGILDEKSAIYYFLNTHLKIPNPEVVKRHILLTLKIRQLKGYLCNLLNISNDIIIYSHK

SEQ ID NO: 22925 - protein, 85 aa, unidentified
  REGION 1..85: note = Description of Unknown:cds_NC_035460.1_cds_YP_009408054.1_103 target sequence
NNLEYSYVDNTIFNPFVHTQKKTLIKSDGYLYNIYPGACDFLVIWIANANDTSIPEFGSYEEVDPNIIKFESRLLEGFTNLDLDM

SEQ ID NO: 22926 - protein, 85 aa, unidentified
  REGION 1..85: note = Description of Unknown:cds_NC_035460.1_cds_YP_009408054.1_103 target sequence
VVESKFNNIFKTNLRATGLKKIVKRVQDLDINYKALLFTSDEYFINMTGNNFILTDEKINLSVWDLDKTLAFSSDGDTIMINNVK

SEQ ID NO: 22927 - protein, 85 aa, unidentified
  REGION 1..85: note = Description of Unknown:cds_NC_035460.1_cds_YP_009408054.1_103 target sequence
LFTDLVADLDTQMERIKGDITYKVYLSTPITSRIKLDIETSFIFVETATNNILLSVDKRISIILAKNHISVKVKNYIPNIEKYFT

SEQ ID NO: 22928 - protein, 85 aa, unidentified
  REGION 1..85: note = Description of Unknown:cds_NC_035460.1_cds_YP_009408054.1_103 target sequence
FLVISINNMFNNVQQASDFTKVETVYWSRICQNTKNKHRKPIIIPSLDEDMKKISDNFYKSNSKEVFVNSNGVMFSCLDPLGKYN

SEQ ID NO: 22929 - protein, 85 aa, unidentified
  REGION 1..85: note = Description of Unknown:cds_NC_035460.1_cds_YP_009408054.1_103 target sequence
NIGFLSIFHRLQKICIPCCFLRDQSHTETFSSCVHQKDVEKDIINPYILNFGKVVTKSKISFLPIIFDSFFNNGMKIVFEQDNKR

SEQ ID NO: 22930 - protein, 85 aa, unidentified
  REGION 1..85: note = Description of Unknown:cds_NC_035460.1_cds_YP_009408054.1_103 target sequence
LKKTTGYHVVKCCAGDSIIRLRTISDIINYVNVDKNILIADDIIYYPMNVTDIGNKIYILIQEIVHEIVIVKKKEDRDMIESFLP

SEQ ID NO: 22931 - protein, 85 aa, unidentified
  REGION 1..85: note = Description of Unknown:cds_NC_035460.1_cds_YP_009408054.1_103 target sequence
NEKILKNLYPKETKSKILKSDNGMELTTDGFFIDGKKFNIDLSSKYVTFTKNIQSYNIILKYFNPLFKYVVSESKDRFIKTWILN

SEQ ID NO: 22932 - protein, 84 aa, unidentified
  REGION 1..84: note = Description of Unknown:cds_NC_035460.1_cds_YP_009408054.1_103 target sequence
GKKFNIDLSSKYVTFTKNIQSYNIILKYFNPLFKYVVSESKDRFIKTWILNVMLNLGINTEMQSAQILPLLEKYYPNFGKTILN

SEQ ID NO: 22933 - protein, 85 aa, unidentified
  REGION 1..85: note = Description of Unknown:cds_NC_035460.1_cds_YP_009408054.1_103 target sequence
GILDEKSAIYYFLNTHLKIPNPEVVKRHILLTLKIRQLKGYLCNLLNISNDIIIYSHKNNLEYSYVDNTIFNPFVHTQKKTLIKS

SEQ ID NO: 22934 - protein, 85 aa, unidentified
  REGION 1..85: note = Description of Unknown:cds_NC_035460.1_cds_YP_009408054.1_103 target sequence
DGYLYNIYPGACDFLVIWIANANDTSIPEFGSYEEVDPNIIKFESRLLEGFTNLDLDMVVESKFNNIFKTNLRATGLKKIVKRVQ

SEQ ID NO: 22935 - protein, 85 aa, unidentified
  REGION 1..85: note = Description of Unknown:cds_NC_035460.1_cds_YP_009408054.1_103 target sequence
DLDINYKALLFTSDEYFINMTGNNFILTDEKINLSVWDLDKTLAFSSDGDTIMINNVKLFTDLVADLDTQMERIKGDITYKVYLS

SEQ ID NO: 22936 - protein, 85 aa, unidentified
  REGION 1..85: note = Description of Unknown:cds_NC_035460.1_cds_YP_009408054.1_103 target sequence
TPITSRIKLDIETSFIFVETATNNILLSVDKRISIILAKNHISVKVKNYIPNIEKYFTFLVISINNMFNNVQQASDFTKVETVYW

SEQ ID NO: 22937 - protein, 85 aa, unidentified
  REGION 1..85: note = Description of Unknown:cds_NC_035460.1_cds_YP_009408054.1_103 target sequence
SRICQNTKNKHRKPIIIPSLDEDMKKISDNFYKSNSKEVFVNSNGVMFSCLDPLGKYNNIGFLSIFHRLQKICIPCCFLRDQSHT

SEQ ID NO: 22938 - protein, 85 aa, unidentified
  REGION 1..85: note = Description of Unknown:cds_NC_035460.1_cds_YP_009408054.1_103 target sequence
ETFSSCVHQKDVEKDIINPYILNFGKVVTKSKISFLPIIFDSFFNNGMKIVFEQDNKRLKKTTGYHVVKCCAGDSIIRLRTISDI

SEQ ID NO: 22939 - protein, 85 aa, unidentified
  REGION 1..85: note = Description of Unknown:cds_NC_035460.1_cds_YP_009408054.1_103 target sequence
INYVNVDKNILIADDIIYYPMNVTDIGNKIYILIQEIVHEIVIVKKKEDRDMIESFLPNEKILKNLYPKETKSKILKSDNGMELT

SEQ ID NO: 22940 - protein, 85 aa, unidentified
  REGION 1..85: note = Description of Unknown:cds_NC_035460.1_cds_YP_009408054.1_103 target sequence
TDGFFIDGKKFNIDLSSKYVTFTKNIQSYNIILKYFNPLFKYVVSESKDRFIKTWILNVMLNLGINTEMQSAQILPLLEKYYPNF

SEQ ID NO: 22941 - protein, 85 aa, unidentified
  REGION 1..85: note = Description of Unknown:hvTR_Q9QB84 target sequence
KYTISPQLVIYVGKGQEIKRALYLTPYGILDDKSSIYYFLKTHLNIHNPEIHKRHILLTLKIRQVKGYLSNLLNINDDIIIYSHK

SEQ ID NO: 22942 - protein, 85 aa, unidentified
  REGION 1..85: note = Description of Unknown:hvTR_Q9QB84 target sequence
NNLEFSYVDNTIFNPFTNTQRKTLIRSDGFLYNIYPGACDFLVIWVTNSKDTPMLEFGSYEEVDSNILKFENHLLDVFNSLDLEM

SEQ ID NO: 22943 - protein, 85 aa, unidentified
  REGION 1..85: note = Description of Unknown:hvTR_Q9QB84 target sequence
NIESKFNNIFRTNLKSTGLMTIIKKINESDTSYKSLLYKSDEYFINMTGNHFILTDEKLNLSVWDSDSCLAFSSDGDTIVINNVK

SEQ ID NO: 22944 - protein, 85 aa, unidentified
  REGION 1..85: note = Description of Unknown:hvTR_Q9QB84 target sequence
LFTELVSDINAQMERIKGDVTYKVFLSTPITSRIKLDIETSFVFVETATNNILLSADKKISIILAKNHISIKVKNYIPNIEKYFT

SEQ ID NO: 22945 - protein, 85 aa, unidentified
  REGION 1..85: note = Description of Unknown:hvTR_Q9QB84 target sequence
FLVVAINSMFNSVQRSSDFTKVETVYWSRICQNTNNKNRKPVIVSSLDVDMKKISNCFYKSKSLEVFINSNGVMFSCIDPMGKYN

SEQ ID NO: 22946 - protein, 85 aa, unidentified
  REGION 1..85: note = Description of Unknown:hvTR_Q9QB84 target sequence
SIGFLSIFYKLQKMCIPCCFLKDQSHTDTFSSCVYNKDVSNDIISPYILNFGKVVTKSKISFLPIIFDSFLNEGLRISFEQDNKR

SEQ ID NO: 22947 - protein, 85 aa, unidentified
  REGION 1..85: note = Description of Unknown:hvTR_Q9QB84 target sequence
LKETTGYHVVKSCNGDIIRLRTTSDIIAFVNDKNTILIADDIIYFPMNYFSIGNNIYILVQEIVHEVVLVKKKINKDVISTFSPN

SEQ ID NO: 22948 - protein, 85 aa, unidentified
  REGION 1..85: note = Description of Unknown:hvTR_Q9QB84 target sequence
SIILRELFPKQTKSVTIRSDSGMELTTDGFLIDGVKFNKDLSSKFMTFTKNVTTSDYISKYFSPLFKYVITESKERFIKTWVINI

SEQ ID NO: 22949 - protein, 84 aa, unidentified
  REGION 1..84: note = Description of Unknown:hvTR_Q9QB84 target sequence
GVKFNKDLSSKFMTFTKNVTTSDYISKYFSPLFKYVITESKERFIKTWVINIMLNFESDVNIESSVIISRLEEYYPNHGKKITN

SEQ ID NO: 22950 - protein, 85 aa, unidentified
  REGION 1..85: note = Description of Unknown:hvTR_Q9QB84 target sequence
GILDDKSSIYYFLKTHLNIHNPEIHKRHILLTLKIRQVKGYLSNLLNINDDIIIYSHKNNLEFSYVDNTIFNPFTNTQRKTLIRS

SEQ ID NO: 22951 - protein, 85 aa, unidentified
  REGION 1..85: note = Description of Unknown:hvTR_Q9QB84 target sequence
DGFLYNIYPGACDFLVIWVTNSKDTPMLEFGSYEEVDSNILKFENHLLDVFNSLDLEMNIESKFNNIFRTNLKSTGLMTIIKKIN

SEQ ID NO: 22952 - protein, 85 aa, unidentified
  REGION 1..85: note = Description of Unknown:hvTR_Q9QB84 target sequence
ESDTSYKSLLYKSDEYFINMTGNHFILTDEKLNLSVWDSDSCLAFSSDGDTIVINNVKLFTELVSDINAQMERIKGDVTYKVFLS

SEQ ID NO: 22953 - protein, 85 aa, unidentified
  REGION 1..85: note = Description of Unknown:hvTR_Q9QB84 target sequence
TPITSRIKLDIETSFVFVETATNNILLSADKKISIILAKNHISIKVKNYIPNIEKYFTFLVVAINSMFNSVQRSSDFTKVETVYW

SEQ ID NO: 22954 - protein, 85 aa, unidentified
  REGION 1..85: note = Description of Unknown:hvTR_Q9QB84 target sequence
SRICQNTNNKNRKPVIVSSLDVDMKKISNCFYKSKSLEVFINSNGVMFSCIDPMGKYNSIGFLSIFYKLQKMCIPCCFLKDQSHT

SEQ ID NO: 22955 - protein, 85 aa, unidentified
  REGION 1..85: note = Description of Unknown:hvTR_Q9QB84 target sequence
DTFSSCVYNKDVSNDIISPYILNFGKVVTKSKISFLPIIFDSFLNEGLRISFEQDNKRLKETTGYHVVKSCNGDIIRLRTTSDII

SEQ ID NO: 22956 - protein, 85 aa, unidentified
  REGION 1..85: note = Description of Unknown:hvTR_Q9QB84 target sequence
AFVNDKNTILIADDIIYFPMNYFSIGNNIYILVQEIVHEVVLVKKKINKDVISTFSPNSIILRELFPKQTKSVTIRSDSGMELTT

SEQ ID NO: 22957 - protein, 85 aa, unidentified
  REGION 1..85: note = Description of Unknown:hvTR_Q9QB84 target sequence
DGFLIDGVKFNKDLSSKFMTFTKNVTTSDYISKYFSPLFKYVITESKERFIKTWVINIMLNFESDVNIESSVIISRLEEYYPNHG

SEQ ID NO: 22958 - protein, 85 aa, unidentified
  REGION 1..85: note = Description of Unknown:cds_NZ_WFIY01000004.1_cds_WP_155864320.1_2323 target sequence
GQKLLLSLLLSLLILSVMPNLPNAYNAVTKNSFHPLVDVPAKGNLALANKFQPNGVTLPLGENEPAPMGIADYGIGPNGPYIIRT

SEQ ID NO: 22959 - protein, 85 aa, unidentified
  REGION 1..85: note = Description of Unknown:cds_NZ_WFIY01000004.1_cds_WP_155864320.1_2323 target sequence
NEFLGHIYLKRLLAYSSQANSYWVTFQLNVVLSYQYNGNTYSLWLQDVAVYNTINHSIIFIDNIWNFTSYNANVTCLKGNGHIYS

SEQ ID NO: 22960 - protein, 85 aa, unidentified
  REGION 1..85: note = Description of Unknown:cds_NZ_WFIY01000004.1_cds_WP_155864320.1_2323 target sequence
WGSTTYYAYAACNYPGSPTTLSLPATICLLINVSTNVAGQPVIQFWYDDGYGWINYDTVVVTNVYDASNVYILVDGYQYTGNGLY

SEQ ID NO: 22961 - protein, 85 aa, unidentified
  REGION 1..85: note = Description of Unknown:cds_NZ_WFIY01000004.1_cds_WP_155864320.1_2323 target sequence
YDAELVLAGPPGGYCAYVYNSSVYMMLMYFNGHNLQEVTNAYNFGSDTGETVNNVKVSCYYYIYCGLLLAGLHAGYDTLHGLWNQ

SEQ ID NO: 22962 - protein, 85 aa, unidentified
  REGION 1..85: note = Description of Unknown:cds_NZ_WFIY01000004.1_cds_WP_155864320.1_2323 target sequence
NTVMTLQINPGISQGYFIVYNKSYGYPPPYNNFMPFTNGYINLTLVPMDYAVLIYNSQYQLVGEAEVPATYGFISTGVTQFEVFA

SEQ ID NO: 22963 - protein, 85 aa, unidentified
  REGION 1..85: note = Description of Unknown:cds_NZ_WFIY01000004.1_cds_WP_155864320.1_2323 target sequence
PPSVTMQEGIQKTIYITIDAYGDVNIYVRAPPSITYVVQSPVYIYGVGTVALTLNASSMGLYTICVTVCLIPGLYQTDTISVCVR

SEQ ID NO: 22964 - protein, 85 aa, unidentified
  REGION 1..85: note = Description of Unknown:cds_NZ_WFIY01000004.1_cds_WP_155864320.1_2323 target sequence
QPLYYVTFSYNVIGQQLPQSPSITFEFPNGTITTIPLTSSLTLLLPPGTIYNVQGIIGSGEIRWATENTTSGVIYCSKTLYFIYY

SEQ ID NO: 22965 - protein, 85 aa, unidentified
  REGION 1..85: note = Description of Unknown:cds_NZ_WFIY01000004.1_cds_WP_155864320.1_2323 target sequence
EQYLVTFTYKVQGGTGYGEPTIQYVSFGNIETTYPGTVWADADSHYVYSQTLPGSNSQERWIANSYSGVVTSPGTICVYYYNQYY

SEQ ID NO: 22966 - protein, 84 aa, unidentified
  REGION 1..84: note = Description of Unknown:cds_NZ_WFIY01000004.1_cds_WP_155864320.1_2323 target sequence
YPGTVWADADSHYVYSQTLPGSNSQERWIANSYSGVVTSPGTICVYYYNQYYVTVNSPINVYALVNGVNTRSRLVGTVRGLRCR

SEQ ID NO: 22967 - protein, 85 aa, unidentified
  REGION 1..85: note = Description of Unknown:cds_NZ_WFIY01000004.1_cds_WP_155864320.1_2323 target sequence
VTKNSFHPLVDVPAKGNLALANKFQPNGVTLPLGENEPAPMGIADYGIGPNGPYIIRTNEFLGHIYLKRLLAYSSQANSYWVTFQ

SEQ ID NO: 22968 - protein, 85 aa, unidentified
  REGION 1..85: note = Description of Unknown:cds_NZ_WFIY01000004.1_cds_WP_155864320.1_2323 target sequence
LNVVLSYQYNGNTYSLWLQDVAVYNTINHSIIFIDNIWNFTSYNANVTCLKGNGHIYSWGSTTYYAYAACNYPGSPTTLSLPATI

SEQ ID NO: 22969 - protein, 85 aa, unidentified
  REGION 1..85: note = Description of Unknown:cds_NZ_WFIY01000004.1_cds_WP_155864320.1_2323 target sequence
CLLINVSTNVAGQPVIQFWYDDGYGWINYDTVVVTNVYDASNVYILVDGYQYTGNGLYYDAELVLAGPPGGYCAYVYNSSVYMML

SEQ ID NO: 22970 - protein, 85 aa, unidentified
  REGION 1..85: note = Description of Unknown:cds_NZ_WFIY01000004.1_cds_WP_155864320.1_2323 target sequence
MYFNGHNLQEVTNAYNFGSDTGETVNNVKVSCYYYIYCGLLLAGLHAGYDTLHGLWNQNTVMTLQINPGISQGYFIVYNKSYGYP

SEQ ID NO: 22971 - protein, 85 aa, unidentified
  REGION 1..85: note = Description of Unknown:cds_NZ_WFIY01000004.1_cds_WP_155864320.1_2323 target sequence
PPYNNFMPFTNGYINLTLVPMDYAVLIYNSQYQLVGEAEVPATYGFISTGVTQFEVFAPPSVTMQEGIQKTIYITIDAYGDVNIY

SEQ ID NO: 22972 - protein, 85 aa, unidentified
  REGION 1..85: note = Description of Unknown:cds_NZ_WFIY01000004.1_cds_WP_155864320.1_2323 target sequence
VRAPPSITYVVQSPVYIYGVGTVALTLNASSMGLYTICVTVCLIPGLYQTDTISVCVRQPLYYVTFSYNVIGQQLPQSPSITFEF

SEQ ID NO: 22973 - protein, 85 aa, unidentified
  REGION 1..85: note = Description of Unknown:cds_NZ_WFIY01000004.1_cds_WP_155864320.1_2323 target sequence
PNGTITTIPLTSSLTLLLPPGTIYNVQGIIGSGEIRWATENTTSGVIYCSKTLYFIYYEQYLVTFTYKVQGGTGYGEPTIQYVSF

SEQ ID NO: 22974 - protein, 85 aa, unidentified
  REGION 1..85: note = Description of Unknown:cds_NZ_WFIY01000004.1_cds_WP_155864320.1_2323 target sequence
GNIETTYPGTVWADADSHYVYSQTLPGSNSQERWIANSYSGVVTSPGTICVYYYNQYYVTVNSPINVYALVNGVNTRSRLVGTVR

SEQ ID NO: 22975 - protein, 85 aa, unidentified
  REGION 1..85: note = Description of Unknown:hvTR_A7XCM7 target sequence
KYIISPQLVIYVGKGQEIKRALYLTPYGVLDDKSSIYYFLKTHLNIHNPEIHKRHILLTLKIHQVKGYLLNLLNINDDIIIYSHK

SEQ ID NO: 22976 - protein, 85 aa, unidentified
  REGION 1..85: note = Description of Unknown:hvTR_A7XCM7 target sequence
NNLEFSYVDNTIFNPFTNTQRKTLIRSDGFLYNIYPGACDFLVIWVANSKDTSMIEFGSYEEVDNNILKFENHLLEVFSSLDLEM

SEQ ID NO: 22977 - protein, 85 aa, unidentified
  REGION 1..85: note = Description of Unknown:hvTR_A7XCM7 target sequence
TIESKFNNIFRTNLKTTGLKTIIKKINELDTSYKSILYKSDEYFINITGNHFILTDEKLNLSVWDSDNCLAFSSDGDTIVINNVK

SEQ ID NO: 22978 - protein, 85 aa, unidentified
  REGION 1..85: note = Description of Unknown:hvTR_A7XCM7 target sequence
LFTELVSDVSTQMERIKGDVTYKVFLSTPITSRIKLDIETSFIFVETATNNILLSADKKISIILAKNHISIKVKNYIPNIEKYFT

SEQ ID NO: 22979 - protein, 85 aa, unidentified
  REGION 1..85: note = Description of Unknown:hvTR_A7XCM7 target sequence
FLVVAINSMFNSVQKSSDFTKVETVYWSRICQNTNNKNRKPVIVSSLDEDMKKISNSFYKSEKLEVFINTNGVMFSCIDPMGKYN

SEQ ID NO: 22980 - protein, 85 aa, unidentified
  REGION 1..85: note = Description of Unknown:hvTR_A7XCM7 target sequence
SIGFLSIFYKLQKMCIPCCFLKDQSHTDTFSSCVHNKDVSNDIISPYILNFGKVVTTSKISFLPIIFDTFLNEGLKISFEQDNKR

SEQ ID NO: 22981 - protein, 85 aa, unidentified
  REGION 1..85: note = Description of Unknown:hvTR_A7XCM7 target sequence
LKETTGYHVVKSCNGEIIRLRTTSDIIDFVNKESTILIADDIIYFPMNYISIGNKVYILIQEIVHEVVLVKKNINKDVILTYPPN

SEQ ID NO: 22982 - protein, 85 aa, unidentified
  REGION 1..85: note = Description of Unknown:hvTR_A7XCM7 target sequence
INILKELFPKQTTSLTIRSDSGMELTTDGFLIDGVKFDKELSSKFVTFTKNVTTSDFISKYFSPLFKYAITESKERFIKTWIINI

SEQ ID NO: 22983 - protein, 84 aa, unidentified
  REGION 1..84: note = Description of Unknown:hvTR_A7XCM7 target sequence
IDGVKFDKELSSKFVTFTKNVTTSDFISKYFSPLFKYAITESKERFIKTWIINIMLNFGTDIESSVIIPKLEKYYPNHGKKITN

SEQ ID NO: 22984 - protein, 85 aa, unidentified
  REGION 1..85: note = Description of Unknown:hvTR_A7XCM7 target sequence
GVLDDKSSIYYFLKTHLNIHNPEIHKRHILLTLKIHQVKGYLLNLLNINDDIIIYSHKNNLEFSYVDNTIFNPFTNTQRKTLIRS

SEQ ID NO: 22985 - protein, 85 aa, unidentified
  REGION 1..85: note = Description of Unknown:hvTR_A7XCM7 target sequence
DGFLYNIYPGACDFLVIWVANSKDTSMIEFGSYEEVDNNILKFENHLLEVFSSLDLEMTIESKFNNIFRTNLKTTGLKTIIKKIN

SEQ ID NO: 22986 - protein, 85 aa, unidentified
  REGION 1..85: note = Description of Unknown:hvTR_A7XCM7 target sequence
ELDTSYKSILYKSDEYFINITGNHFILTDEKLNLSVWDSDNCLAFSSDGDTIVINNVKLFTELVSDVSTQMERIKGDVTYKVFLS

SEQ ID NO: 22987 - protein, 85 aa, unidentified
  REGION 1..85: note = Description of Unknown:hvTR_A7XCM7 target sequence
TPITSRIKLDIETSFIFVETATNNILLSADKKISIILAKNHISIKVKNYIPNIEKYFTFLVVAINSMFNSVQKSSDFTKVETVYW

SEQ ID NO: 22988 - protein, 85 aa, unidentified
  REGION 1..85: note = Description of Unknown:hvTR_A7XCM7 target sequence
SRICQNTNNKNRKPVIVSSLDEDMKKISNSFYKSEKLEVFINTNGVMFSCIDPMGKYNSIGFLSIFYKLQKMCIPCCFLKDQSHT

SEQ ID NO: 22989 - protein, 85 aa, unidentified
  REGION 1..85: note = Description of Unknown:hvTR_A7XCM7 target sequence
DTFSSCVHNKDVSNDIISPYILNFGKVVTTSKISFLPIIFDTFLNEGLKISFEQDNKRLKETTGYHVVKSCNGEIIRLRTTSDII

SEQ ID NO: 22990 - protein, 85 aa, unidentified
  REGION 1..85: note = Description of Unknown:hvTR_A7XCM7 target sequence
DFVNKESTILIADDIIYFPMNYISIGNKVYILIQEIVHEVVLVKKNINKDVILTYPPNINILKELFPKQTTSLTIRSDSGMELTT

SEQ ID NO: 22991 - protein, 85 aa, unidentified
  REGION 1..85: note = Description of Unknown:hvTR_A7XCM7 target sequence
DGFLIDGVKFDKELSSKFVTFTKNVTTSDFISKYFSPLFKYAITESKERFIKTWIINIMLNFGTDIESSVIIPKLEKYYPNHGKK

SEQ ID NO: 22992 - protein, 85 aa, unidentified
  REGION 1..85: note = Description of Unknown:hvTR_Q9DHL5 target sequence
TIESKFNNIFRTNLKTTGLKTIIKKINKLDTSYKSILYKSDEYFINITGNHFILTDEKLNLSVWDSDNCLAFSSDGDTIVINNVK

SEQ ID NO: 22993 - protein, 85 aa, unidentified; identical to SEQ ID NO: 22978
  REGION 1..85: note = Description of Unknown:hvTR_Q9DHL5 target sequence

SEQ ID NO: 22994 - protein, 85 aa, unidentified; identical to SEQ ID NO: 22980
  REGION 1..85: note = Description of Unknown:hvTR_Q9DHL5 target sequence

SEQ ID NO: 22995 - protein, 85 aa, unidentified; identical to SEQ ID NO: 22982
  REGION 1..85: note = Description of Unknown:hvTR_Q9DHL5 target sequence

SEQ ID NO: 22996 - protein, 84 aa, unidentified; identical to SEQ ID NO: 22983
  REGION 1..84: note = Description of Unknown:hvTR_Q9DHL5 target sequence

SEQ ID NO: 22997 - protein, 85 aa, unidentified
  REGION 1..85: note = Description of Unknown:hvTR_Q9DHL5 target sequence
KLDTSYKSILYKSDEYFINITGNHFILTDEKLNLSVWDSDNCLAFSSDGDTIVINNVKLFTELVSDVSTQMERIKGDVTYKVFLS

SEQ ID NO: 22998 - protein, 85 aa, unidentified; identical to SEQ ID NO: 22987
  REGION 1..85: note = Description of Unknown:hvTR_Q9DHL5 target sequence

SEQ ID NO: 22999 - protein, 85 aa, unidentified; identical to SEQ ID NO: 22988
  REGION 1..85: note = Description of Unknown:hvTR_Q9DHL5 target sequence

SEQ ID NO: 23000 - protein, 85 aa, unidentified; identical to SEQ ID NO: 22991
  REGION 1..85: note = Description of Unknown:hvTR_Q9DHL5 target sequence

SEQ ID NO: 23001 - protein, 85 aa, unidentified
  REGION 1..85: note = Description of Unknown:cds_NZ_WFIY01000004.1_cds_WP_155862591.1_364 target sequence
LIIKAYLPLPKQTDSEFWTIDKIEHIRHLATTGKPYKILDKRRNSLRILDRIEFKNVEGKIVEKPSASTYFTFSGIEMTTPLYLG

SEQ ID NO: 23002 - protein, 85 aa, unidentified
  REGION 1..85: note = Description of Unknown:cds_NZ_WFIY01000004.1_cds_WP_155862591.1_364 target sequence
DMSYGALSGNPNIAIATAADITGTLAGTGEGGLHPEVAKHKRIFVQWASARFGVDIDVLNAGLGVVIKIGQGAKPGIGGHLPGSK

SEQ ID NO: 23003 - protein, 85 aa, unidentified
  REGION 1..85: note = Description of Unknown:cds_NZ_WFIY01000004.1_cds_WP_155862591.1_364 target sequence
VTKAISMARRIPEGIDAISPAPHHDIYSIEDLGQRIEALKEATGKPVFVKVAATNYIPYITSGVARMGADGIIIDGHGAGTGATP

SEQ ID NO: 23004 - protein, 85 aa, unidentified
  REGION 1..85: note = Description of Unknown:cds_NZ_WFIY01000004.1_cds_WP_155862591.1_364 target sequence
EVIRDNLGIPIELAVASADNVLKKEGLRDKFTIIAAGRISDATDAAKLIALGADIVSVGTAALIAMGCVMVHKCHIGSCPTALTS

SEQ ID NO: 23005 - protein, 85 aa, unidentified
  REGION 1..85: note = Description of Unknown:cds_NZ_WFIY01000004.1_cds_WP_155862591.1_364 target sequence
KIDGTRIFDIEFGVKTLVNFVNGFSLELANILDNLGLSSIQELKGRRDLLYGFGLSRDVLSILGIEGEAEELNPKLGELWNKRRK

SEQ ID NO: 23006 - protein, 85 aa, unidentified
  REGION 1..85: note = Description of Unknown:cds_NZ_WFIY01000004.1_cds_WP_155862591.1_364 target sequence
FHLHELINKGEPTITSMGSTAPPDVEKPARILDWLRSDGAQVTRPPIDPYREDIDTSFLLNKGKVYLSLPVIFNVIGAIKEIAES

SEQ ID NO: 23007 - protein, 85 aa, unidentified
  REGION 1..85: note = Description of Unknown:cds_NZ_WFIY01000004.1_cds_WP_155862591.1_364 target sequence
LSWASYALGSMIFVENTMPKYSEISFSNDGKGKINWSYEIKEGYYLVLKSEDEIDDTLVNKGIPGFIIDEDILNEDLELVVSDVD

SEQ ID NO: 23008 - protein, 85 aa, unidentified
  REGION 1..85: note = Description of Unknown:cds_NZ_WFIY01000004.1_cds_WP_155862591.1_364 target sequence
TKLKEAGVRNKFDIIAKSSKLRDSADVFKLVALGADAVIMPYQILEIAIGEGSKGNLKERAFNLISGMKKEIALMAGAAGVYSVQ

SEQ ID NO: 23009 - protein, 84 aa, unidentified
  REGION 1..84: note = Description of Unknown:cds_NZ_WFIY01000004.1_cds_WP_155862591.1_364 target sequence
LGADAVIMPYQILEIAIGEGSKGNLKERAFNLISGMKKEIALMAGAAGVYSVQSSLTGNRELLRAVNLNSYIARRIRVKQAGSL

SEQ ID NO: 23010 - protein, 85 aa, unidentified
  REGION 1..85: note = Description of Unknown:cds_NZ_WFIY01000004.1_cds_WP_155862591.1_364 target sequence
HLATTGKPYKILDKRRNSLRILDRIEFKNVEGKIVEKPSASTYFTFSGIEMTTPLYLGDMSYGALSGNPNIAIATAADITGTLAG

SEQ ID NO: 23011 - protein, 85 aa, unidentified
  REGION 1..85: note = Description of Unknown:cds_NZ_WFIY01000004.1_cds_WP_155862591.1_364 target sequence
TGEGGLHPEVAKHKRIFVQWASARFGVDIDVLNAGLGVVIKIGQGAKPGIGGHLPGSKVTKAISMARRIPEGIDAISPAPHHDIY

SEQ ID NO: 23012 - protein, 85 aa, unidentified
  REGION 1..85: note = Description of Unknown:cds_NZ_WFIY01000004.1_cds_WP_155862591.1_364 target sequence
SIEDLGQRIEALKEATGKPVFVKVAATNYIPYITSGVARMGADGIIIDGHGAGTGATPEVIRDNLGIPIELAVASADNVLKKEGL

SEQ ID NO: 23013 - protein, 85 aa, unidentified
  REGION 1..85: note = Description of Unknown:cds_NZ_WFIY01000004.1_cds_WP_155862591.1_364 target sequence
RDKFTIIAAGRISDATDAAKLIALGADIVSVGTAALIAMGCVMVHKCHIGSCPTALTSKIDGTRIFDIEFGVKTLVNFVNGFSLE

SEQ ID NO: 23014 - protein, 85 aa, unidentified
  REGION 1..85: note = Description of Unknown:cds_NZ_WFIY01000004.1_cds_WP_155862591.1_364 target sequence
LANILDNLGLSSIQELKGRRDLLYGFGLSRDVLSILGIEGEAEELNPKLGELWNKRRKFHLHELINKGEPTITSMGSTAPPDVEK

SEQ ID NO: 23015 - protein, 85 aa, unidentified
  REGION 1..85: note = Description of Unknown:cds_NZ_WFIY01000004.1_cds_WP_155862591.1_364 target sequence
PARILDWLRSDGAQVTRPPIDPYREDIDTSFLLNKGKVYLSLPVIFNVIGAIKEIAESLSWASYALGSMIFVENTMPKYSEISFS

SEQ ID NO: 23016 - protein, 85 aa, unidentified
  REGION 1..85: note = Description of Unknown:cds_NZ_WFIY01000004.1_cds_WP_155862591.1_364 target sequence
NDGKGKINWSYEIKEGYYLVLKSEDEIDDTLVNKGIPGFIIDEDILNEDLELVVSDVDTKLKEAGVRNKFDIIAKSSKLRDSADV

SEQ ID NO: 23017 - protein, 85 aa, unidentified
  REGION 1..85: note = Description of Unknown:cds_NZ_WFIY01000004.1_cds_WP_155862591.1_364 target sequence
FKLVALGADAVIMPYQILEIAIGEGSKGNLKERAFNLISGMKKEIALMAGAAGVYSVQSSLTGNRELLRAVNLNSYIARRIRVKQ

SEQ ID NO: 23018 - protein, 85 aa, unidentified
  REGION 1..85: note = Description of Unknown:cds_NZ_WFIY01000004.1_cds_WP_170283913.1_2157 target sequence
SESRTKRSGIQALYSFTPFKLLFGKNEYGLILVPIVYNKTYDDKGKIINDMKWNRGIADEFPVPYYKRDFKVMLPREIKPYIFVD

SEQ ID NO: 23019 - protein, 85 aa, unidentified
  REGION 1..85: note = Description of Unknown:cds_NZ_WFIY01000004.1_cds_WP_170283913.1_2157 target sequence
KNPKKSIVYKNKNLLNSNYRINKLDASKPFPLLIKYSYDSLRYGYYCKYGLVLLHSKKTCPLSHLCKLYERGNNGDCKYYDGPKP

SEQ ID NO: 23020 - protein, 85 aa, unidentified
  REGION 1..85: note = Description of Unknown:cds_NZ_WFIY01000004.1_cds_WP_170283913.1_2157 target sequence
YERLYNVFPHIVRRVRREEGIGNRKEVSALIVVDLGKTERILGKIEFSDKLTVTAFSDASIFRAKAADLMYKDFLWVSYKEGIGF

SEQ ID NO: 23021 - protein, 85 aa, unidentified
  REGION 1..85: note = Description of Unknown:cds_NZ_WFIY01000004.1_cds_WP_170283913.1_2157 target sequence
RLNNLNGLIIEFNEDALKDYISWIINNNQAIREWLCIKMLIYFGLEPNKNIILKKFSFSGKGFDAMDRFENIIDKIINNNFKLSC

SEQ ID NO: 23022 - protein, 85 aa, unidentified
  REGION 1..85: note = Description of Unknown:cds_NZ_WFIY01000004.1_cds_WP_170283913.1_2157 target sequence
KDDNLTLFGSFVLIHTLAHVIINNIISALVTPNILSDYMYYINHSIFGDTSASIYIVETIYGGFGYLKTINDMIISGDKTLSSIL

SEQ ID NO: 23023 - protein, 85 aa, unidentified
  REGION 1..85: note = Description of Unknown:cds_NZ_WFIY01000004.1_cds_WP_170283913.1_2157 target sequence
SNLLNNYNNHEKVSNRSLYNLNQLIGSFKGRLDQGILDRVLDIFNSWRNNISSNSFPSHFAVRNYLGNRFKKNINANGDTRQAFK

SEQ ID NO: 23024 - protein, 85 aa, unidentified
  REGION 1..85: note = Description of Unknown:cds_NZ_WFIY01000004.1_cds_WP_170283913.1_2157 target sequence
DLIAELPLCWDGCNLCVGMDKGCMFGPYDQPFLISRNLVTEFLATFNKWFGKKDFSITNNLYLIFKDLINLARNEIKIVSPWISK

SEQ ID NO: 23025 - protein, 85 aa, unidentified
  REGION 1..85: note = Description of Unknown:cds_NZ_WFIY01000004.1_cds_WP_170283913.1_2157 target sequence
EIIDDLKTVKEEKERDLNITIICLNDSSNAEAIEEAEKSGIHIIKVPSSKESKEGKIHSKFMIIDNSIALMGSANFTVSGLKNNV

SEQ ID NO: 23026 - protein, 84 aa, unidentified
  REGION 1..84: note = Description of Unknown:cds_NZ_WFIY01000004.1_cds_WP_170283913.1_2157 target sequence
AIEEAEKSGIHIIKVPSSKESKEGKIHSKFMIIDNSIALMGSANFTVSGLKNNVEADMVTIDPDKIEKLLQQFDEISKNYGRHE

SEQ ID NO: 23027 - protein, 85 aa, unidentified
  REGION 1..85: note = Description of Unknown:cds_NZ_WFIY01000004.1_cds_WP_170283913.1_2157 target sequence
YGLILVPIVYNKTYDDKGKIINDMKWNRGIADEFPVPYYKRDFKVMLPREIKPYIFVDKNPKKSIVYKNKNLLNSNYRINKLDAS

SEQ ID NO: 23028 - protein, 85 aa, unidentified
  REGION 1..85: note = Description of Unknown:cds_NZ_WFIY01000004.1_cds_WP_170283913.1_2157 target sequence
KPFPLLIKYSYDSLRYGYYCKYGLVLLHSKKTCPLSHLCKLYERGNNGDCKYYDGPKPYERLYNVFPHIVRRVRREEGIGNRKEV

SEQ ID NO: 23029 - protein, 85 aa, unidentified
  REGION 1..85: note = Description of Unknown:cds_NZ_WFIY01000004.1_cds_WP_170283913.1_2157 target sequence
SALIVVDLGKTERILGKIEFSDKLTVTAFSDASIFRAKAADLMYKDFLWVSYKEGIGFRLNNLNGLIIEFNEDALKDYISWIINN

SEQ ID NO: 23030 - protein, 85 aa, unidentified
  REGION 1..85: note = Description of Unknown:cds_NZ_WFIY01000004.1_cds_WP_170283913.1_2157 target sequence
NQAIREWLCIKMLIYFGLEPNKNIILKKFSFSGKGFDAMDRFENIIDKIINNNFKLSCKDDNLTLFGSFVLIHTLAHVIINNIIS

SEQ ID NO: 23031 - protein, 85 aa, unidentified
  REGION 1..85: note = Description of Unknown:cds_NZ_WFIY01000004.1_cds_WP_170283913.1_2157 target sequence
ALVTPNILSDYMYYINHSIFGDTSASIYIVETIYGGFGYLKTINDMIISGDKTLSSILSNLLNNYNNHEKVSNRSLYNLNQLIGS

SEQ ID NO: 23032 - protein, 85 aa, unidentified
  REGION 1..85: note = Description of Unknown:cds_NZ_WFIY01000004.1_cds_WP_170283913.1_2157 target sequence
FKGRLDQGILDRVLDIFNSWRNNISSNSFPSHFAVRNYLGNRFKKNINANGDTRQAFKDLIAELPLCWDGCNLCVGMDKGCMFGP

SEQ ID NO: 23033 - protein, 85 aa, unidentified
  REGION 1..85: note = Description of Unknown:cds_NZ_WFIY01000004.1_cds_WP_170283913.1_2157 target sequence
YDQPFLISRNLVTEFLATFNKWFGKKDFSITNNLYLIFKDLINLARNEIKIVSPWISKEIIDDLKTVKEEKERDLNITIICLNDS

SEQ ID NO: 23034 - protein, 85 aa, unidentified
  REGION 1..85: note = Description of Unknown:cds_NZ_WFIY01000004.1_cds_WP_170283913.1_2157 target sequence
SNAEAIEEAEKSGIHIIKVPSSKESKEGKIHSKFMIIDNSIALMGSANFTVSGLKNNVEADMVTIDPDKIEKLLQQFDEISKNYG

SEQ ID NO: 23035 - protein, 85 aa, unidentified
  REGION 1..85: note = Description of Unknown:hvTR_Q0NPV0 target sequence
RYIVSPQLVLQVGKGQEVERALYLTPYDYIDEKSPIYYFLRSHLNIQQPEIVKRHILLTLRMTQLKGYLGNLLDIKDDIIIYSHK

SEQ ID NO: 23036 - protein, 85 aa, unidentified
  REGION 1..85: note = Description of Unknown:hvTR_Q0NPV0 target sequence
NNLEYSYVDNTIFNPFVYTQKKTLLKNDSFLYNVYPGACDFLVIWVARACDTSIPEFGSYEDVDNNIIKFETMLMEVFPQLDLDI

SEQ ID NO: 23037 - protein, 85 aa, unidentified
  REGION 1..85: note = Description of Unknown:hvTR_Q0NPV0 target sequence
TVESKFNNIFRTNLKLTGLKKIIQRVQDLDINYKSLLSRYDEHFINMTGNHFILNDEQLNLSIWDLDGTLALSSDGDTVMINNVK

SEQ ID NO: 23038 - protein, 85 aa, unidentified
  REGION 1..85: note = Description of Unknown:hvTR_Q0NPV0 target sequence
LFTDLVSDIDTQMERIKGDITYKVHLATPINSRIKLDIETSFIFIETATNNILLSSDKKISIILAKNHISIKVKNHIPNIEKYFT

SEQ ID NO: 23039 - protein, 85 aa, unidentified
  REGION 1..85: note = Description of Unknown:hvTR_Q0NPV0 target sequence
FLVIAINAMFNSVQKSADFTKVETVYWSRICQNTKNKNRKPIIINYLDPGMKKISNNFYRSDDKEVFINDNGIMFTCMDPLGKYN

SEQ ID NO: 23040 - protein, 85 aa, unidentified
  REGION 1..85: note = Description of Unknown:hvTR_Q0NPV0 target sequence
KVGFLNIFHDMRKYCIPCCFLHDQSHRSTFSSCVHQIDVEKKIVSPYILNFGKVVTESKMSFLPIIFDTFLNDGMSANMEQDNKR

SEQ ID NO: 23041 - protein, 85 aa, unidentified
  REGION 1..85: note = Description of Unknown:hvTR_Q0NPV0 target sequence
LKETSGYHIVRCCAGDDIVRLRTTSDIIQFVNEDKNILIVNDMVYFPMNASDIGNKIHILIQEIVHEVMIVKKKESSDKIDFFPP

SEQ ID NO: 23042 - protein, 85 aa, unidentified
  REGION 1..85: note = Description of Unknown:hvTR_Q0NPV0 target sequence
NYKLLKDLFPKQTIQTPIRSDSGMVLTTDGFYIDGKLFNEDLSSKYVTFTKNVVTSDSVAKYFSPLFKYVISEAKDRFIKTWMIN

SEQ ID NO: 23043 - protein, 84 aa, unidentified
  REGION 1..84: note = Description of Unknown:hvTR_Q0NPV0 target sequence
FYIDGKLFNEDLSSKYVTFTKNVVTSDSVAKYFSPLFKYVISEAKDRFIKTWMINIMIHMNVDPNNIIPTLEKYYPNSGRAQIN

SEQ ID NO: 23044 - protein, 85 aa, unidentified
  REGION 1..85: note = Description of Unknown:hvTR_Q0NPV0 target sequence
DYIDEKSPIYYFLRSHLNIQQPEIVKRHILLTLRMTQLKGYLGNLLDIKDDIIIYSHKNNLEYSYVDNTIFNPFVYTQKKTLLKN

SEQ ID NO: 23045 - protein, 85 aa, unidentified
  REGION 1..85: note = Description of Unknown:hvTR_Q0NPV0 target sequence
DSFLYNVYPGACDFLVIWVARACDTSIPEFGSYEDVDNNIIKFETMLMEVFPQLDLDITVESKFNNIFRTNLKLTGLKKIIQRVQ

SEQ ID NO: 23046 - protein, 85 aa, unidentified
  REGION 1..85: note = Description of Unknown:hvTR_Q0NPV0 target sequence
DLDINYKSLLSRYDEHFINMTGNHFILNDEQLNLSIWDLDGTLALSSDGDTVMINNVKLFTDLVSDIDTQMERIKGDITYKVHLA

SEQ ID NO: 23047 - protein, 85 aa, unidentified
  REGION 1..85: note = Description of Unknown:hvTR_Q0NPV0 target sequence
TPINSRIKLDIETSFIFIETATNNILLSSDKKISIILAKNHISIKVKNHIPNIEKYFTFLVIAINAMFNSVQKSADFTKVETVYW

SEQ ID NO: 23048 - protein, 85 aa, unidentified
  REGION 1..85: note = Description of Unknown:hvTR_Q0NPV0 target sequence
SRICQNTKNKNRKPIIINYLDPGMKKISNNFYRSDDKEVFINDNGIMFTCMDPLGKYNKVGFLNIFHDMRKYCIPCCFLHDQSHR

SEQ ID NO: 23049 - protein, 85 aa, unidentified
  REGION 1..85: note = Description of Unknown:hvTR_Q0NPV0 target sequence
STFSSCVHQIDVEKKIVSPYILNFGKVVTESKMSFLPIIFDTFLNDGMSANMEQDNKRLKETSGYHIVRCCAGDDIVRLRTTSDI

SEQ ID NO: 23050 - protein, 85 aa, unidentified
  REGION 1..85: note = Description of Unknown:hvTR_Q0NPV0 target sequence
IQFVNEDKNILIVNDMVYFPMNASDIGNKIHILIQEIVHEVMIVKKKESSDKIDFFPPNYKLLKDLFPKQTIQTPIRSDSGMVLT

SEQ ID NO: 23051 - protein, 85 aa, unidentified
  REGION 1..85: note = Description of Unknown:hvTR_Q0NPV0 target sequence
TDGFYIDGKLFNEDLSSKYVTFTKNVVTSDSVAKYFSPLFKYVISEAKDRFIKTWMINIMIHMNVDPNNIIPTLEKYYPNSGRAQ

SEQ ID NO: 23052 - protein, 85 aa, unidentified
  REGION 1..85: note = Description of Unknown:hvTR_Q3I8P6 target sequence
RYIVSPQLVLQVGKGQEVERALYLTPYDYIDEKSPIYYFLRSHLNIQRPEIVKRHILLTLRMTQLKGYLGNLLDIKDDIIIYSHK

SEQ ID NO: 23053 - protein, 85 aa, unidentified
  REGION 1..85: note = Description of Unknown:hvTR_Q3I8P6 target sequence
NNLEYSYVDNTIFNPFVYTQKKTLLKNDSFLYNVYSGACDFLVIWVARACDTSIPEFGSYEDVDNNIIKFETMLMEVFPQLDLDI

SEQ ID NO: 23054 - protein, 85 aa, unidentified
  REGION 1..85: note = Description of Unknown:hvTR_Q3I8P6 target sequence
TVESKFNNIFRTNLKLTGLKKIIQRVQDLDINYKSLLSRYDEHFINMTGNHFILNDEQLNLSIWDLDSTLALSSDGDTVMINNVK

SEQ ID NO: 23055 - protein, 85 aa, unidentified; identical to SEQ ID NO: 23038
  REGION 1..85: note = Description of Unknown:hvTR_Q3I8P6 target sequence

SEQ ID NO: 23056 - protein, 85 aa, unidentified
  REGION 1..85: note = Description of Unknown:hvTR_Q3I8P6 target sequence
FLVIAINAMFNSVQKSSDFTKVETVYWSRICQNTKNKNRKPIIINYLDPGMKKISNNFYRSDEKEVFINDNGIMFTCIDPLGKYN

SEQ ID NO: 23057 - protein, 85 aa, unidentified
  REGION 1..85: note = Description of Unknown:hvTR_Q3I8P6 target sequence
KVGFLNIFHDMRKYCIPCCFLHDQSHRSTFSSCVHQIDVEKKIVSPYILNFGKVVTESKMSFLPIIFDAFLNDGMTANMEQDNKR

SEQ ID NO: 23058 - protein, 85 aa, unidentified
  REGION 1..85: note = Description of Unknown:hvTR_Q3I8P6 target sequence
LKETSGYHIVRCCAGDDIVRLRTISDIIQFVNEDKNILIVNDMIYFPMNATDIGKKIHILIQEIVHEVMIVKKKESSDKIDFSPP

SEQ ID NO: 23059 - protein, 85 aa, unidentified
  REGION 1..85: note = Description of Unknown:hvTR_Q3I8P6 target sequence
NYKLLKDLFPKQTIQTPIHSDAGMVLTTDGFYIDGKLFNEDLSSKYVTFTKNVIASDAVTKYFSPLFKYVISEAKDRFIKTWMIN

SEQ ID NO: 23060 - protein, 84 aa, unidentified
  REGION 1..84: note = Description of Unknown:hvTR_Q3I8P6 target sequence
FYIDGKLFNEDLSSKYVTFTKNVIASDAVTKYFSPLFKYVISEAKDRFIKTWMINIMIHMNVDPNNIIPTLEKYYPNSGRAQIN

SEQ ID NO: 23061 - protein, 85 aa, unidentified
  REGION 1..85: note = Description of Unknown:hvTR_Q3I8P6 target sequence
DYIDEKSPIYYFLRSHLNIQRPEIVKRHILLTLRMTQLKGYLGNLLDIKDDIIIYSHKNNLEYSYVDNTIFNPFVYTQKKTLLKN

SEQ ID NO: 23062 - protein, 85 aa, unidentified
  REGION 1..85: note = Description of Unknown:hvTR_Q3I8P6 target sequence
DSFLYNVYSGACDFLVIWVARACDTSIPEFGSYEDVDNNIIKFETMLMEVFPQLDLDITVESKFNNIFRTNLKLTGLKKIIQRVQ

SEQ ID NO: 23063 - protein, 85 aa, unidentified
  REGION 1..85: note = Description of Unknown:hvTR_Q3I8P6 target sequence
DLDINYKSLLSRYDEHFINMTGNHFILNDEQLNLSIWDLDSTLALSSDGDTVMINNVKLFTDLVSDIDTQMERIKGDITYKVHLA

SEQ ID NO: 23064 - protein, 85 aa, unidentified
  REGION 1..85: note = Description of Unknown:hvTR_Q3I8P6 target sequence
TPINSRIKLDIETSFIFIETATNNILLSSDKKISIILAKNHISIKVKNHIPNIEKYFTFLVIAINAMFNSVQKSSDFTKVETVYW

SEQ ID NO: 23065 - protein, 85 aa, unidentified
  REGION 1..85: note = Description of Unknown:hvTR_Q3I8P6 target sequence
SRICQNTKNKNRKPIIINYLDPGMKKISNNFYRSDEKEVFINDNGIMFTCIDPLGKYNKVGFLNIFHDMRKYCIPCCFLHDQSHR

SEQ ID NO: 23066 - protein, 85 aa, unidentified
  REGION 1..85: note = Description of Unknown:hvTR_Q3I8P6 target sequence
STFSSCVHQIDVEKKIVSPYILNFGKVVTESKMSFLPIIFDAFLNDGMTANMEQDNKRLKETSGYHIVRCCAGDDIVRLRTISDI

SEQ ID NO: 23067 - protein, 85 aa, unidentified
  REGION 1..85: note = Description of Unknown:hvTR_Q3I8P6 target sequence
IQFVNEDKNILIVNDMIYFPMNATDIGKKIHILIQEIVHEVMIVKKKESSDKIDFSPPNYKLLKDLFPKQTIQTPIHSDAGMVLT

SEQ ID NO: 23068 - protein, 85 aa, unidentified
  REGION 1..85: note = Description of Unknown:hvTR_Q3I8P6 target sequence
TDGFYIDGKLFNEDLSSKYVTFTKNVIASDAVTKYFSPLFKYVISEAKDRFIKTWMINIMIHMNVDPNNIIPTLEKYYPNSGRAQ

SEQ ID NO: 23069 - protein, 85 aa, unidentified; identical to SEQ ID NO: 23035
  REGION 1..85: note = Description of Unknown:hvTR_A9J0Q5 target sequence

SEQ ID NO: 23070 - protein, 85 aa, unidentified; identical to SEQ ID NO: 23036
  REGION 1..85: note = Description of Unknown:hvTR_A9J0Q5 target sequence

SEQ ID NO: 23071 - protein, 85 aa, unidentified; identical to SEQ ID NO: 23037
  REGION 1..85: note = Description of Unknown:hvTR_A9J0Q5 target sequence

SEQ ID NO: 23072 - protein, 85 aa, unidentified; identical to SEQ ID NO: 23038
  REGION 1..85: note = Description of Unknown:hvTR_A9J0Q5 target sequence

SEQ ID NO: 23073 - protein, 85 aa, unidentified
  REGION 1..85: note = Description of Unknown:hvTR_A9J0Q5 target sequence
FLVIAINAMFNSVQKSADFTKVETVYWSRICQNTKNKNRKPIIINYLDPGMKKISNNFYRSDEKEVFINDNGIMFTCMDPLGKYN

SEQ ID NO: 23074 - protein, 85 aa, unidentified; identical to SEQ ID NO: 23057
  REGION 1..85: note = Description of Unknown:hvTR_A9J0Q5 target sequence

SEQ ID NO: 23075 - protein, 85 aa, unidentified
  REGION 1..85: note = Description of Unknown:hvTR_A9J0Q5 target sequence
LKETSGYHIVRCCAGDDIVRLRTTSDIIQFVNEDKNILIVNDMVYFPMNASDIGKKIHILIQEIVHEVMIVKKKESSDKIDFFPP

SEQ ID NO: 23076 - protein, 85 aa, unidentified
  REGION 1..85: note = Description of Unknown:hvTR_A9J0Q5 target sequence
NYKLLKDLFPKQTIQTPIQSDAGMVLTTDGFYIDGKLFNEDLSSKYVTFTKNVIASDAVAKYFSPLFKYVISEAKDRFIKTWMIN

SEQ ID NO: 23077 - protein, 84 aa, unidentified
  REGION 1..84: note = Description of Unknown:hvTR_A9J0Q5 target sequence
FYIDGKLFNEDLSSKYVTFTKNVIASDAVAKYFSPLFKYVISEAKDRFIKTWMINIMIHMNVDPNNIIPTLEKYYPNSGRAQIN

SEQ ID NO: 23078 - protein, 85 aa, unidentified; identical to SEQ ID NO: 23044
  REGION 1..85: note = Description of Unknown:hvTR_A9J0Q5 target sequence

SEQ ID NO: 23079 - protein, 85 aa, unidentified; identical to SEQ ID NO: 23045
  REGION 1..85: note = Description of Unknown:hvTR_A9J0Q5 target sequence

SEQ ID NO: 23080 - protein, 85 aa, unidentified; identical to SEQ ID NO: 23046
  REGION 1..85: note = Description of Unknown:hvTR_A9J0Q5 target sequence

SEQ ID NO: 23081 - protein, 85 aa, unidentified; identical to SEQ ID NO: 23047
  REGION 1..85: note = Description of Unknown:hvTR_A9J0Q5 target sequence

SEQ ID NO: 23082 - protein, 85 aa, unidentified
  REGION 1..85: note = Description of Unknown:hvTR_A9J0Q5 target sequence
SRICQNTKNKNRKPIIINYLDPGMKKISNNFYRSDEKEVFINDNGIMFTCMDPLGKYNKVGFLNIFHDMRKYCIPCCFLHDQSHR

SEQ ID NO: 23083 - protein, 85 aa, unidentified
  REGION 1..85: note = Description of Unknown:hvTR_A9J0Q5 target sequence
STFSSCVHQIDVEKKIVSPYILNFGKVVTESKMSFLPIIFDAFLNDGMTANMEQDNKRLKETSGYHIVRCCAGDDIVRLRTTSDI

SEQ ID NO: 23084 - protein, 85 aa, unidentified
  REGION 1..85: note = Description of Unknown:hvTR_A9J0Q5 target sequence
IQFVNEDKNILIVNDMVYFPMNASDIGKKIHILIQEIVHEVMIVKKKESSDKIDFFPPNYKLLKDLFPKQTIQTPIQSDAGMVLT

SEQ ID NO: 23085 - protein, 85 aa, unidentified
  REGION 1..85: note = Description of Unknown:hvTR_A9J0Q5 target sequence
TDGFYIDGKLFNEDLSSKYVTFTKNVIASDAVAKYFSPLFKYVISEAKDRFIKTWMINIMIHMNVDPNNIIPTLEKYYPNSGRAQ

SEQ ID NO: 23086 - protein, 85 aa, unidentified; identical to SEQ ID NO: 23035
  REGION 1..85: note = Description of Unknown:hvTR_P0DOU7 target sequence

SEQ ID NO: 23087 - protein, 85 aa, unidentified
  REGION 1..85: note = Description of Unknown:hvTR_P0DOU7 target sequence
NNLEYSYVDNTIFNPFVYTQKKTLLKNDSFLYNVYPGACDFLVIWVARACDTSIPEFGSYEDVDNNIIKFETMLMDVFPQLDLDI

SEQ ID NO: 23088 - protein, 85 aa, unidentified; identical to SEQ ID NO: 23037
  REGION 1..85: note = Description of Unknown:hvTR_P0DOU7 target sequence

SEQ ID NO: 23089 - protein, 85 aa, unidentified; identical to SEQ ID NO: 23038
  REGION 1..85: note = Description of Unknown:hvTR_P0DOU7 target sequence

SEQ ID NO: 23090 - protein, 85 aa, unidentified
  REGION 1..85: note = Description of Unknown:hvTR_P0DOU7 target sequence
FLVIAINAMFNSVQKSADFTKVETVYWSRICQNTKNKNRKPVIINYLDPGMKKISNNFYRSDEKEVFINDNDIMFTCMDPLGKYN

SEQ ID NO: 23091 - protein, 85 aa, unidentified; identical to SEQ ID NO: 23057
  REGION 1..85: note = Description of Unknown:hvTR_P0DOU7 target sequence

SEQ ID NO: 23092 - protein, 85 aa, unidentified
  REGION 1..85: note = Description of Unknown:hvTR_P0DOU7 target sequence
LKETSGYHIVRCCTGNDIVRLRTTSNIIQFVNEDKNILIVNDMVYFPMNASDIGKKIHILIQEIVHEVMIVKKKESSDKIDFFPP

SEQ ID NO: 23093 - protein, 85 aa, unidentified
  REGION 1..85: note = Description of Unknown:hvTR_P0DOU7 target sequence
NYKLLKDLFPKQTIQTPIQSDAGMVLTTDGFYIDGKLFNEDLSSKYVTFTKNVITSDAVAKYFSPLFKYVISEAKDRFIKTWMIN

SEQ ID NO: 23094 - protein, 84 aa, unidentified
  REGION 1..84: note = Description of Unknown:hvTR_P0DOU7 target sequence
FYIDGKLFNEDLSSKYVTFTKNVITSDAVAKYFSPLFKYVISEAKDRFIKTWMINIMIHMNVDPNNIIPTLEKYYPNFGRVQIN

SEQ ID NO: 23095 - protein, 85 aa, unidentified; identical to SEQ ID NO: 23044
  REGION 1..85: note = Description of Unknown:hvTR_P0DOU7 target sequence

SEQ ID NO: 23096 - protein, 85 aa, unidentified
  REGION 1..85: note = Description of Unknown:hvTR_P0DOU7 target sequence
DSFLYNVYPGACDFLVIWVARACDTSIPEFGSYEDVDNNIIKFETMLMDVFPQLDLDITVESKFNNIFRTNLKLTGLKKIIQRVQ

SEQ ID NO: 23097 - protein, 85 aa, unidentified; identical to SEQ ID NO: 23046
  REGION 1..85: note = Description of Unknown:hvTR_P0DOU7 target sequence

SEQ ID NO: 23098 - protein, 85 aa, unidentified
  REGION 1..85: note = Description of Unknown:hvTR_P0DOU7 target sequence
SRICQNTKNKNRKPVIINYLDPGMKKISNNFYRSDEKEVFINDNDIMFTCMDPLGKYNKVGFLNIFHDMRKYCIPCCFLHDQSHR

SEQ ID NO: 23099 - protein, 85 aa, unidentified
  REGION 1..85: note = Description of Unknown:hvTR_P0DOU7 target sequence
STFSSCVHQIDVEKKIVSPYILNFGKVVTESKMSFLPIIFDAFLNDGMTANMEQDNKRLKETSGYHIVRCCTGNDIVRLRTTSNI

SEQ ID NO: 23100 - protein, 85 aa, unidentified
  REGION 1..85: note = Description of Unknown:hvTR_P0DOU7 target sequence
TDGFYIDGKLFNEDLSSKYVTFTKNVITSDAVAKYFSPLFKYVISEAKDRFIKTWMINIMIHMNVDPNNIIPTLEKYYPNFGRVQ

SEQ ID NO: 23101 - protein, 85 aa, unidentified
  REGION 1..85: note = Description of Unknown:cds_NZ_WFIY01000004.1_cds_WP_155862761.1_574 target sequence
AFVQVPTRPGYPYPIGVSLTKDGANFVLFSENATAVQLLLFSHPDDKEPKEVIDVKERTGDLWHVCVPGIMPGQLYAYKVDGPYK

SEQ ID NO: 23102 - protein, 85 aa, unidentified
  REGION 1..85: note = Description of Unknown:cds_NZ_WFIY01000004.1_cds_WP_155862761.1_574 target sequence
PEQGLRFNKNKTLIDPYAKAVAGFIKWDDSLFGYKIGDPNQDLSFDERDSTPFIPKSVVVSDEFDWEDDKPLSLRIPWSQTIIYE

SEQ ID NO: 23103 - protein, 85 aa, unidentified
  REGION 1..85: note = Description of Unknown:cds_NZ_WFIY01000004.1_cds_WP_155862761.1_574 target sequence
THVKGFSIKRDDIDEKIRGKFLGLASKSAISYFKDLGITAVELMPVQQFVRDRFLVEKGLTNYWGYNPIAYFAPDCGYATDCLGK

SEQ ID NO: 23104 - protein, 85 aa, unidentified
  REGION 1..85: note = Description of Unknown:cds_NZ_WFIY01000004.1_cds_WP_155862761.1_574 target sequence
QVIEFKKMVKELHAAGIEVIIDVVYNHTGEGNQLGPTLSFRGIDNSSYYMLNPQNPRYYMDFTGAGNTLNLRHPRVLQMVMDSLR

SEQ ID NO: 23105 - protein, 85 aa, unidentified
  REGION 1..85: note = Description of Unknown:cds_NZ_WFIY01000004.1_cds_WP_155862761.1_574 target sequence
YWVLEMHVDGFRFDLASALARELYSVNMLSTFFVAIQQDPILSRVKLIAEPWDVGEGGYQVGNFPYQWAEWNGKYRDTIRRFWRG

SEQ ID NO: 23106 - protein, 85 aa, unidentified
  REGION 1..85: note = Description of Unknown:cds_NZ_WFIY01000004.1_cds_WP_155862761.1_574 target sequence
EPILYSELANRLMGSPDLYQGSGRTPFASINYVTSHDGFTLQDLVSYNQKHNEANGFDNKDGMDENYSWNCGFEGETQDPNVIAC

SEQ ID NO: 23107 - protein, 85 aa, unidentified
  REGION 1..85: note = Description of Unknown:cds_NZ_WFIY01000004.1_cds_WP_155862761.1_574 target sequence
REKQKRNFMITLFISQGVPMLLGGDELSRTQRGNNNAFCQDNEISWYDWNLDERKKAFRDFVKSIIYFRKAHPIFRRRKFFQGRK

SEQ ID NO: 23108 - protein, 85 aa, unidentified
  REGION 1..85: note = Description of Unknown:cds_NZ_WFIY01000004.1_cds_WP_155862761.1_574 target sequence
LFGSPYKDLTWISPAGTEIDDKTWNSPTQTIAFVLSGDAMDEVNERGERVADDTFLVILNGSPSSIKFKIPKLGEKWELVAWSCL

SEQ ID NO: 23109 - protein, 84 aa, unidentified
  REGION 1..84: note = Description of Unknown:cds_NZ_WFIY01000004.1_cds_WP_155862761.1_574 target sequence
IAFVLSGDAMDEVNERGERVADDTFLVILNGSPSSIKFKIPKLGEKWELVAWSCLRDPKENEKIVKAEQEIQVEGRTAIIYKRV

SEQ ID NO: 23110 - protein, 85 aa, unidentified
  REGION 1..85: note = Description of Unknown:cds_NZ_WFIY01000004.1_cds_WP_155862761.1_574 target sequence
LFSENATAVQLLLFSHPDDKEPKEVIDVKERTGDLWHVCVPGIMPGQLYAYKVDGPYKPEQGLRFNKNKTLIDPYAKAVAGFIKW

SEQ ID NO: 23111 - protein, 85 aa, unidentified
  REGION 1..85: note = Description of Unknown:cds_NZ_WFIY01000004.1_cds_WP_155862761.1_574 target sequence
DDSLFGYKIGDPNQDLSFDERDSTPFIPKSVVVSDEFDWEDDKPLSLRIPWSQTIIYETHVKGFSIKRDDIDEKIRGKFLGLASK

SEQ ID NO: 23112 - protein, 85 aa, unidentified
  REGION 1..85: note = Description of Unknown:cds_NZ_WFIY01000004.1_cds_WP_155862761.1_574 target sequence
SAISYFKDLGITAVELMPVQQFVRDRFLVEKGLTNYWGYNPIAYFAPDCGYATDCLGKQVIEFKKMVKELHAAGIEVIIDVVYNH

SEQ ID NO: 23113 - protein, 85 aa, unidentified
  REGION 1..85: note = Description of Unknown:cds_NZ_WFIY01000004.1_cds_WP_155862761.1_574 target sequence
TGEGNQLGPTLSFRGIDNSSYYMLNPQNPRYYMDFTGAGNTLNLRHPRVLQMVMDSLRYWVLEMHVDGFRFDLASALARELYSVN

SEQ ID NO: 23114 - protein, 85 aa, unidentified
  REGION 1..85: note = Description of Unknown:cds_NZ_WFIY01000004.1_cds_WP_155862761.1_574 target sequence
MLSTFFVAIQQDPILSRVKLIAEPWDVGEGGYQVGNFPYQWAEWNGKYRDTIRRFWRGEPILYSELANRLMGSPDLYQGSGRTPF

SEQ ID NO: 23115 - protein, 85 aa, unidentified
  REGION 1..85: note = Description of Unknown:cds_NZ_WFIY01000004.1_cds_WP_155862761.1_574 target sequence
ASINYVTSHDGFTLQDLVSYNQKHNEANGFDNKDGMDENYSWNCGFEGETQDPNVIACREKQKRNFMITLFISQGVPMLLGGDEL

SEQ ID NO: 23116 - protein, 85 aa, unidentified
  REGION 1..85: note = Description of Unknown:cds_NZ_WFIY01000004.1_cds_WP_155862761.1_574 target sequence
SRTQRGNNNAFCQDNEISWYDWNLDERKKAFRDFVKSIIYFRKAHPIFRRRKFFQGRKLFGSPYKDLTWISPAGTEIDDKTWNSP

SEQ ID NO: 23117 - protein, 85 aa, unidentified
  REGION 1..85: note = Description of Unknown:cds_NZ_WFIY01000004.1_cds_WP_155862761.1_574 target sequence
TQTIAFVLSGDAMDEVNERGERVADDTFLVILNGSPSSIKFKIPKLGEKWELVAWSCLRDPKENEKIVKAEQEIQVEGRTAIIYK

SEQ ID NO: 23118 - protein, 85 aa, unidentified
  REGION 1..85: note = Description of Unknown:cds_NC_007409.1_cds_YP_319891.1_60 target sequence
KLDRKKKRLLLKTIFSIVILILPLTFLHPTNSTVSSQNQVPIQIIYNYNVSGGVIYTAPLNIPSGFYNYYMINQYGTLLYSYLFS

SEQ ID NO: 23119 - protein, 85 aa, unidentified
  REGION 1..85: note = Description of Unknown:cds_NC_007409.1_cds_YP_319891.1_60 target sequence
TNPAFVVWYEPQPTTETYYFVYGQSVTSQLVSTDVFSLYTQFYIYNSSMWNISNGVVSGGVLTLNGKNSILTENYTAPRYTSALW

SEQ ID NO: 23120 - protein, 85 aa, unidentified
  REGION 1..85: note = Description of Unknown:cds_NC_007409.1_cds_YP_319891.1_60 target sequence
LYQILSPQSVSPTQIVYTSPIPPGSLIIVHVLTYTGSYQVPYPAIAQYNTPYIIAESYTSQYLTANSTHYYYYYNSLKYVGSMQQ

SEQ ID NO: 23121 - protein, 85 aa, unidentified
  REGION 1..85: note = Description of Unknown:cds_NC_007409.1_cds_YP_319891.1_60 target sequence
SLPFITTVSTNGLIFYSSAKNSQVLLPGATLPATSYTTNSTFIAGQLVGTGIDSYSINPSFVWCPEWIVNGSIQLLNGCKVPITG

SEQ ID NO: 23122 - protein, 85 aa, unidentified
  REGION 1..85: note = Description of Unknown:cds_NC_007409.1_cds_YP_319891.1_60 target sequence
HYQLDKSTYAVILNSVFNSSDDELIAPVNSIVTVTYSNGTSYSFTVTGSSIYSGLPVPLVVVKFYGVGVTGIHISTNAFGINQQY

SEQ ID NO: 23123 - protein, 85 aa, unidentified
  REGION 1..85: note = Description of Unknown:cds_NC_007409.1_cds_YP_319891.1_60 target sequence
SALIGFTDLLHTYGVLIQNGEAYSYIAGTKGPALGNVTFPMVVAVGEFAVGNTYYVFGEIVTTSRVFPFIQQSSYAIQPTIAYVN

SEQ ID NO: 23124 - protein, 85 aa, unidentified
  REGION 1..85: note = Description of Unknown:cds_NC_007409.1_cds_YP_319891.1_60 target sequence
YNGTIPLVIQSVAETLSTGTYYELSGIAAMNVGQPTPINSVILSVVSQPGLEIVGSNGNVYSTIVQNTSAPNLVLVGFQGYSITL

SEQ ID NO: 23125 - protein, 85 aa, unidentified
  REGION 1..85: note = Description of Unknown:cds_NC_007409.1_cds_YP_319891.1_60 target sequence
VYTNVQQNLVVTTNNFPVNLPSDMPLLVAIDQASRSITITVGQTQTQSIFMKTIPVNTTTPAVSLPIPNYPGNIIVDPESELTVI

SEQ ID NO: 23126 - protein, 84 aa, unidentified
  REGION 1..84: note = Description of Unknown:cds_NC_007409.1_cds_YP_319891.1_60 target sequence
DQASRSITITVGQTQTQSIFMKTIPVNTTTPAVSLPIPNYPGNIIVDPESELTVISYYIIGAVAIVSMAYGTKIWIGVFIFAIS

SEQ ID NO: 23127 - protein, 85 aa, unidentified
  REGION 1..85: note = Description of Unknown:cds_NC_007409.1_cds_YP_319891.1_60 target sequence
HPTNSTVSSQNQVPIQIIYNYNVSGGVIYTAPLNIPSGFYNYYMINQYGTLLYSYLFSTNPAFVVWYEPQPTTETYYFVYGQSVT

SEQ ID NO: 23128 - protein, 85 aa, unidentified
  REGION 1..85: note = Description of Unknown:cds_NC_007409.1_cds_YP_319891.1_60 target sequence
SQLVSTDVFSLYTQFYIYNSSMWNISNGVVSGGVLTLNGKNSILTENYTAPRYTSALWLYQILSPQSVSPTQIVYTSPIPPGSLI

SEQ ID NO: 23129 - protein, 85 aa, unidentified
  REGION 1..85: note = Description of Unknown:cds_NC_007409.1_cds_YP_319891.1_60 target sequence
IVHVLTYTGSYQVPYPAIAQYNTPYIIAESYTSQYLTANSTHYYYYYNSLKYVGSMQQSLPFITTVSTNGLIFYSSAKNSQVLLP

SEQ ID NO: 23130 - protein, 85 aa, unidentified
  REGION 1..85: note = Description of Unknown:cds_NC_007409.1_cds_YP_319891.1_60 target sequence
GATLPATSYTTNSTFIAGQLVGTGIDSYSINPSFVWCPEWIVNGSIQLLNGCKVPITGHYQLDKSTYAVILNSVFNSSDDELIAP

SEQ ID NO: 23131 - protein, 85 aa, unidentified
  REGION 1..85: note = Description of Unknown:cds_NC_007409.1_cds_YP_319891.1_60 target sequence
VNSIVTVTYSNGTSYSFTVTGSSIYSGLPVPLVVVKFYGVGVTGIHISTNAFGINQQYSALIGFTDLLHTYGVLIQNGEAYSYIA

SEQ ID NO: 23132 - protein, 85 aa, unidentified
  REGION 1..85: note = Description of Unknown:cds_NC_007409.1_cds_YP_319891.1_60 target sequence
GTKGPALGNVTFPMVVAVGEFAVGNTYYVFGEIVTTSRVFPFIQQSSYAIQPTIAYVNYNGTIPLVIQSVAETLSTGTYYELSGI

SEQ ID NO: 23133 - protein, 85 aa, unidentified
  REGION 1..85: note = Description of Unknown:cds_NC_007409.1_cds_YP_319891.1_60 target sequence
AAMNVGQPTPINSVILSVVSQPGLEIVGSNGNVYSTIVQNTSAPNLVLVGFQGYSITLVYTNVQQNLVVTTNNFPVNLPSDMPLL

SEQ ID NO: 23134 - protein, 85 aa, unidentified
  REGION 1..85: note = Description of Unknown:cds_NC_007409.1_cds_YP_319891.1_60 target sequence
VAIDQASRSITITVGQTQTQSIFMKTIPVNTTTPAVSLPIPNYPGNIIVDPESELTVISYYIIGAVAIVSMAYGTKIWIGVFIFA

SEQ ID NO: 23135 - protein, 85 aa, unidentified
  REGION 1..85: note = Description of Unknown:hvTR_Q4VCQ1 target sequence
DKLELVNDGLNIIDFIQKNQKEIQKTYGRSSIQQPSIKDRTKAWEDFLQCTSGESEQVEGGMSKDDGGVERRSLEDLSSTSPTDG

SEQ ID NO: 23136 - protein, 85 aa, unidentified
  REGION 1..85: note = Description of Unknown:hvTR_Q4VCQ1 target sequence
TIGKRVSNTRDWAEGSDDIQLDPVVTDVVYHDHGGECTGYGFTSSPERGWSDHSSGANNGDVCLVSDAKVLSYAPEIAVSKEDRE

SEQ ID NO: 23137 - protein, 85 aa, unidentified
  REGION 1..85: note = Description of Unknown:hvTR_Q4VCQ1 target sequence
TDLVHLEDKLSATGLNPTAIPFTPKNLSVPAKDSPVIAEHYYGLGVREQNVDPQTNRNVNLDSIKLYTSDDEEADQLEFEDEFAG

SEQ ID NO: 23138 - protein, 85 aa, unidentified
  REGION 1..85: note = Description of Unknown:hvTR_Q4VCQ1 target sequence
SSSEVIVGISPEEEEPSSAGRKPIESVGHIIEGQSTRDSLQIKGNKPADAPGAGPKDSAVKEKSPQKRLPMLAEEFECSGSEDPI

SEQ ID NO: 23139 - protein, 85 aa, unidentified
  REGION 1..85: note = Description of Unknown:hvTR_Q4VCQ1 target sequence
IQELLKENSFINSQQGKDAQPLYYRGIEGSRSPDKTEITSDAVQTANKQRPGTPMPKSRGIPIKKGTDEKYPSAGTENVPGSKSG

SEQ ID NO: 23140 - protein, 85 aa, unidentified
  REGION 1..85: note = Description of Unknown:hvTR_Q4VCQ1 target sequence
ATRHVRGSPPYQEGKSVNAENVQLNVPTVVKETDKSEANPADDNDSLDDKYIMPSDDFSNTFFPHDTDRLNYHADHLGDYDLETL

SEQ ID NO: 23141 - protein, 85 aa, unidentified
  REGION 1..85: note = Description of Unknown:hvTR_Q4VCQ1 target sequence
CEESVLMGVINSIKLINLDMRLNHIEEQVKEIPKIINKLESIDRVLAKTNTALSTIEGHLVSMMIMIPGKGKGERKGKSNPELKP

SEQ ID NO: 23142 - protein, 85 aa, unidentified
  REGION 1..85: note = Description of Unknown:hvTR_Q4VCQ1 target sequence
VIGRDVLEQQSLFSFDNVKNFRDGSLTNEPYGAAVQLRGDLILPELNFEETNASQFVPMADDSSRDVVKTLIRTHIKDRELRSEL

SEQ ID NO: 23143 - protein, 84 aa, unidentified
  REGION 1..84: note = Description of Unknown:hvTR_Q4VCQ1 target sequence
PYGAAVQLRGDLILPELNFEETNASQFVPMADDSSRDVVKTLIRTHIKDRELRSELIGYLNRAENDEEIQEIANTVNDIIDGNI

SEQ ID NO: 23144 - protein, 85 aa, unidentified
  REGION 1..85: note = Description of Unknown:hvTR_Q4VCQ1 target sequence
GRSSIQQPSIKDRTKAWEDFLQCTSGESEQVEGGMSKDDGGVERRSLEDLSSTSPTDGTIGKRVSNTRDWAEGSDDIQLDPVVTD

SEQ ID NO: 23145 - protein, 85 aa, unidentified
  REGION 1..85: note = Description of Unknown:hvTR_Q4VCQ1 target sequence
VVYHDHGGECTGYGFTSSPERGWSDHSSGANNGDVCLVSDAKVLSYAPEIAVSKEDRETDLVHLEDKLSATGLNPTAIPFTPKNL

SEQ ID NO: 23146 - protein, 85 aa, unidentified
  REGION 1..85: note = Description of Unknown:hvTR_Q4VCQ1 target sequence
SVPAKDSPVIAEHYYGLGVREQNVDPQTNRNVNLDSIKLYTSDDEEADQLEFEDEFAGSSSEVIVGISPEEEEPSSAGRKPIESV

SEQ ID NO: 23147 - protein, 85 aa, unidentified
  REGION 1..85: note = Description of Unknown:hvTR_Q4VCQ1 target sequence
GHIIEGQSTRDSLQIKGNKPADAPGAGPKDSAVKEKSPQKRLPMLAEEFECSGSEDPIIQELLKENSFINSQQGKDAQPLYYRGI

SEQ ID NO: 23148 - protein, 85 aa, unidentified
  REGION 1..85: note = Description of Unknown:hvTR_Q4VCQ1 target sequence
EGSRSPDKTEITSDAVQTANKQRPGTPMPKSRGIPIKKGTDEKYPSAGTENVPGSKSGATRHVRGSPPYQEGKSVNAENVQLNVP

SEQ ID NO: 23149 - protein, 85 aa, unidentified
  REGION 1..85: note = Description of Unknown:hvTR_Q4VCQ1 target sequence
TVVKETDKSEANPADDNDSLDDKYIMPSDDFSNTFFPHDTDRLNYHADHLGDYDLETLCEESVLMGVINSIKLINLDMRLNHIEE

SEQ ID NO: 23150 - protein, 85 aa, unidentified
  REGION 1..85: note = Description of Unknown:hvTR_Q4VCQ1 target sequence
QVKEIPKIINKLESIDRVLAKTNTALSTIEGHLVSMMIMIPGKGKGERKGKSNPELKPVIGRDVLEQQSLFSFDNVKNFRDGSLT

SEQ ID NO: 23151 - protein, 85 aa, unidentified
  REGION 1..85: note = Description of Unknown:hvTR_Q4VCQ1 target sequence
NEPYGAAVQLRGDLILPELNFEETNASQFVPMADDSSRDVVKTLIRTHIKDRELRSELIGYLNRAENDEEIQEIANTVNDIIDGN

SEQ ID NO: 23152 - protein, 85 aa, unidentified
  REGION 1..85: note = Description of Unknown:cds_NC_002728.1_cds_NP_112022.1_2 target sequence
DKLELVNDGLNIIDFIQKNQKEIQKTYGRSSIQQPSIKDQTKAWEDFLQCTSGESEQVEGGMSKDDGDVERRNLEDLSSTSPTDG

SEQ ID NO: 23153 - protein, 85 aa, unidentified
  REGION 1..85: note = Description of Unknown:cds_NC_002728.1_cds_NP_112022.1_2 target sequence
TIGKRVSNTRDWAEGSDDIQLDPVVTDVVYHDHGGECTGYGFTSSPERGWSDYTSGANNGNVCLVSDAKMLSYAPEIAVSKEDRE

SEQ ID NO: 23154 - protein, 85 aa, unidentified
  REGION 1..85: note = Description of Unknown:cds_NC_002728.1_cds_NP_112022.1_2 target sequence
TDLVHLENKLSTTGLNPTAVPFTLRNLSDPAKDSPVIAEHYYGLGVKEQNVGPQTSRNVNLDSIKLYTSDDEEADQLEFEDEFAG

SEQ ID NO: 23155 - protein, 85 aa, unidentified
  REGION 1..85: note = Description of Unknown:cds_NC_002728.1_cds_NP_112022.1_2 target sequence
SSSEVIVGISPEDEEPSSVGGKPNESIGRTIEGQSIRDNLQAKDNKSTDVPGAGPKDSAVKEEPPQKRLPMLAEEFECSGSEDPI

SEQ ID NO: 23156 - protein, 85 aa, unidentified
  REGION 1..85: note = Description of Unknown:cds_NC_002728.1_cds_NP_112022.1_2 target sequence
IRELLKENSLINCQQGKDAQPPYHWSIERSISPDKTEIVNGAVQTADRQRPGTPMPKSRGIPIKKGTDAKYPSAGTENVPGSKSG

SEQ ID NO: 23157 - protein, 85 aa, unidentified
  REGION 1..85: note = Description of Unknown:cds_NC_002728.1_cds_NP_112022.1_2 target sequence
ATRHVRGSPPYQEGKSVNAENVQLNASTAVKETDKSEVNPVDDNDSLDDKYIMPSDDFSNTFFPHDTDRLNYHADHLGDYDLETL

SEQ ID NO: 23158 - protein, 85 aa, unidentified
  REGION 1..85: note = Description of Unknown:cds_NC_002728.1_cds_NP_112022.1_2 target sequence
CEESVLMGVINSIKLINLDMRLNHIEEQVKEIPKIINKLESIDRVLAKTNTALSTIEGHLVSMMIMIPGKGKGERKGKNNPELKP

SEQ ID NO: 23159 - protein, 85 aa, unidentified
  REGION 1..85: note = Description of Unknown:cds_NC_002728.1_cds_NP_112022.1_2 target sequence
VIGRDILEQQSLFSFDNVKNFRDGSLTNEPYGAAVQLREDLILPELNFEETNASQFVPMADDSSRDVIKTLIRTHIKDRELRSEL

SEQ ID NO: 23160 - protein, 84 aa, unidentified
  REGION 1..84: note = Description of Unknown:cds_NC_002728.1_cds_NP_112022.1_2 target sequence
PYGAAVQLREDLILPELNFEETNASQFVPMADDSSRDVIKTLIRTHIKDRELRSELIGYLNKAENDEEIQEIANTVNDIIDGNI

SEQ ID NO: 23161 - protein, 85 aa, unidentified
  REGION 1..85: note = Description of Unknown:cds_NC_002728.1_cds_NP_112022.1_2 target sequence
GRSSIQQPSIKDQTKAWEDFLQCTSGESEQVEGGMSKDDGDVERRNLEDLSSTSPTDGTIGKRVSNTRDWAEGSDDIQLDPVVTD

SEQ ID NO: 23162 - protein, 85 aa, unidentified
  REGION 1..85: note = Description of Unknown:cds_NC_002728.1_cds_NP_112022.1_2 target sequence
VVYHDHGGECTGYGFTSSPERGWSDYTSGANNGNVCLVSDAKMLSYAPEIAVSKEDRETDLVHLENKLSTTGLNPTAVPFTLRNL

SEQ ID NO: 23163 - protein, 85 aa, unidentified
  REGION 1..85: note = Description of Unknown:cds_NC_002728.1_cds_NP_112022.1_2 target sequence
SDPAKDSPVIAEHYYGLGVKEQNVGPQTSRNVNLDSIKLYTSDDEEADQLEFEDEFAGSSSEVIVGISPEDEEPSSVGGKPNESI

SEQ ID NO: 23164 - protein, 85 aa, unidentified
  REGION 1..85: note = Description of Unknown:cds_NC_002728.1_cds_NP_112022.1_2 target sequence
GRTIEGQSIRDNLQAKDNKSTDVPGAGPKDSAVKEEPPQKRLPMLAEEFECSGSEDPIIRELLKENSLINCQQGKDAQPPYHWSI

SEQ ID NO: 23165 - protein, 85 aa, unidentified
  REGION 1..85: note = Description of Unknown:cds_NC_002728.1_cds_NP_112022.1_2 target sequence
ERSISPDKTEIVNGAVQTADRQRPGTPMPKSRGIPIKKGTDAKYPSAGTENVPGSKSGATRHVRGSPPYQEGKSVNAENVQLNAS

SEQ ID NO: 23166 - protein, 85 aa, unidentified
  REGION 1..85: note = Description of Unknown:cds_NC_002728.1_cds_NP_112022.1_2 target sequence
TAVKETDKSEVNPVDDNDSLDDKYIMPSDDFSNTFFPHDTDRLNYHADHLGDYDLETLCEESVLMGVINSIKLINLDMRLNHIEE

SEQ ID NO: 23167 - protein, 85 aa, unidentified
  REGION 1..85: note = Description of Unknown:cds_NC_002728.1_cds_NP_112022.1_2 target sequence
QVKEIPKIINKLESIDRVLAKTNTALSTIEGHLVSMMIMIPGKGKGERKGKNNPELKPVIGRDILEQQSLFSFDNVKNFRDGSLT

SEQ ID NO: 23168 - protein, 85 aa, unidentified
  REGION 1..85: note = Description of Unknown:cds_NC_002728.1_cds_NP_112022.1_2 target sequence
NEPYGAAVQLREDLILPELNFEETNASQFVPMADDSSRDVIKTLIRTHIKDRELRSELIGYLNKAENDEEIQEIANTVNDIIDGN

SEQ ID NO: 23169 - protein, 85 aa, unidentified
  REGION 1..85: note = Description of Unknown:hvTR_P03070 target sequence
DKVLNREESLQLMDLLGLERSAWGNIPLMRKAYLKKCKEFHPDKGGDEEKMKKMNTLYKKMEDGVKYAHQPDFGGFWDATEIPTY

SEQ ID NO: 23170 - protein, 85 aa, unidentified
  REGION 1..85: note = Description of Unknown:hvTR_P03070 target sequence
GTDEWEQWWNAFNEENLFCSEEMPSSDDEATADSQHSTPPKKKRKVEDPKDFPSELLSFLSHAVFSNRTLACFAIYTTKEKAALL

SEQ ID NO: 23171 - protein, 85 aa, unidentified
  REGION 1..85: note = Description of Unknown:hvTR_P03070 target sequence
YKKIMEKYSVTFISRHNSYNHNILFFLTPHRHRVSAINNYAQKLCTFSFLICKGVNKEYLMYSALTRDPFSVIEESLPGGLKEHD

SEQ ID NO: 23172 - protein, 85 aa, unidentified
  REGION 1..85: note = Description of Unknown:hvTR_P03070 target sequence
FNPEEAEETKQVSWKLVTEYAMETKCDDVLLLLGMYLEFQYSFEMCLKCIKKEQPSHYKYHEKHYANAAIFADSKNQKTICQQAV

SEQ ID NO: 23173 - protein, 85 aa, unidentified
  REGION 1..85: note = Description of Unknown:hvTR_P03070 target sequence
DTVLAKKRVDSLQLTREQMLTNRFNDLLDRMDIMFGSTGSADIEEWMAGVAWLHCLLPKMDSVVYDFLKCMVYNIPKKRYWLFKG

SEQ ID NO: 23174 - protein, 85 aa, unidentified
  REGION 1..85: note = Description of Unknown:hvTR_P03070 target sequence
PIDSGKTTLAAALLELCGGKALNVNLPLDRLNFELGVAIDQFLVVFEDVKGTGGESRDLPSGQGINNLDNLRDYLDGSVKVNLEK

SEQ ID NO: 23175 - protein, 85 aa, unidentified
  REGION 1..85: note = Description of Unknown:hvTR_P03070 target sequence
KHLNKRTQIFPPGIVTMNEYSVPKTLQARFVKQIDFRPKDYLKHCLERSEFLLEKRIIQSGIALLLMLIWYRPVAEFAQSIQSRI

SEQ ID NO: 23176 - protein, 85 aa, unidentified
  REGION 1..85: note = Description of Unknown:hvTR_P03070 target sequence
VEWKERLDKEFSLSVYQKMKFNVAMGIGVLDWLRNSDDDDEDSQENADKNEDGGEKNMEDSGHETGIDSQSQGSFQAPQSSQSVH

SEQ ID NO: 23177 - protein, 84 aa, unidentified
  REGION 1..84: note = Description of Unknown:hvTR_P03070 target sequence
VLDWLRNSDDDDEDSQENADKNEDGGEKNMEDSGHETGIDSQSQGSFQAPQSSQSVHDHNQPYHICRGFTCFKKPPTPPPEPET

SEQ ID NO: 23178 - protein, 85 aa, unidentified
  REGION 1..85: note = Description of Unknown:hvTR_P03070 target sequence
LMRKAYLKKCKEFHPDKGGDEEKMKKMNTLYKKMEDGVKYAHQPDFGGFWDATEIPTYGTDEWEQWWNAFNEENLFCSEEMPSSD

SEQ ID NO: 23179 - protein, 85 aa, unidentified
  REGION 1..85: note = Description of Unknown:hvTR_P03070 target sequence
DEATADSQHSTPPKKKRKVEDPKDFPSELLSFLSHAVFSNRTLACFAIYTTKEKAALLYKKIMEKYSVTFISRHNSYNHNILFFL

SEQ ID NO: 23180 - protein, 85 aa, unidentified
  REGION 1..85: note = Description of Unknown:hvTR_P03070 target sequence
TPHRHRVSAINNYAQKLCTFSFLICKGVNKEYLMYSALTRDPFSVIEESLPGGLKEHDFNPEEAEETKQVSWKLVTEYAMETKCD

SEQ ID NO: 23181 - protein, 85 aa, unidentified
  REGION 1..85: note = Description of Unknown:hvTR_P03070 target sequence
DVLLLLGMYLEFQYSFEMCLKCIKKEQPSHYKYHEKHYANAAIFADSKNQKTICQQAVDTVLAKKRVDSLQLTREQMLTNRFNDL

SEQ ID NO: 23182 - protein, 85 aa, unidentified
  REGION 1..85: note = Description of Unknown:hvTR_P03070 target sequence
LDRMDIMFGSTGSADIEEWMAGVAWLHCLLPKMDSVVYDFLKCMVYNIPKKRYWLFKGPIDSGKTTLAAALLELCGGKALNVNLP

SEQ ID NO: 23183 - protein, 85 aa, unidentified
  REGION 1..85: note = Description of Unknown:hvTR_P03070 target sequence
LDRLNFELGVAIDQFLVVFEDVKGTGGESRDLPSGQGINNLDNLRDYLDGSVKVNLEKKHLNKRTQIFPPGIVTMNEYSVPKTLQ

SEQ ID NO: 23184 - protein, 85 aa, unidentified
  REGION 1..85: note = Description of Unknown:hvTR_P03070 target sequence
ARFVKQIDFRPKDYLKHCLERSEFLLEKRIIQSGIALLLMLIWYRPVAEFAQSIQSRIVEWKERLDKEFSLSVYQKMKFNVAMGI

SEQ ID NO: 23185 - protein, 85 aa, unidentified
  REGION 1..85: note = Description of Unknown:hvTR_P03070 target sequence
GVLDWLRNSDDDDEDSQENADKNEDGGEKNMEDSGHETGIDSQSQGSFQAPQSSQSVHDHNQPYHICRGFTCFKKPPTPPPEPET

SEQ ID NO: 23186 - protein, 85 aa, unidentified
  REGION 1..85: note = Description of Unknown:cds_NC_030656.1_cds_YP_009268816.1_101 target sequence
IYTVSPQLVLLVDASQNIERALYLTPYNEIDETSTIYYFLSKHLDIKTPTLLKRHILLTMKIRQLKGYLQDLLNIDENIIIYSHK

SEQ ID NO: 23187 - protein, 85 aa, unidentified
  REGION 1..85: note = Description of Unknown:cds_NC_030656.1_cds_YP_009268816.1_101 target sequence
NNLEYSYVDNTIFNPFSPTQKKTLIKIDGILYNTYIDACNFLVIWVARANDTPVPEFGSSEEVNSNILKFESKMLEIFNTLDLNM

SEQ ID NO: 23188 - protein, 85 aa, unidentified
  REGION 1..85: note = Description of Unknown:cds_NC_030656.1_cds_YP_009268816.1_101 target sequence
TVESKFNNIFRTNLRTTGLRKIVKKLQEQNLKNKVLLYKSDEHFINLTGNNFILTDEDINLTVWNTDGTVALSSDGSTITVNNIS

SEQ ID NO: 23189 - protein, 85 aa, unidentified
  REGION 1..85: note = Description of Unknown:cds_NC_030656.1_cds_YP_009268816.1_101 target sequence
LFSSLVADLDPQMERIKGDITYKVNLFTPITSKIKLAIETSFIFVETATNNILLSVDKRISIILAKNHISIKVKNHIPNIEKYFA

SEQ ID NO: 23190 - protein, 85 aa, unidentified
  REGION 1..85: note = Description of Unknown:cds_NC_030656.1_cds_YP_009268816.1_101 target sequence
FLVIAINSMFNNVQQSSDFTKIETVYWSRICQNSKNKNRKPVIIQSLDADMTKVSENFYKSETKDVFVNANGVMFSCLDPLGKYN

SEQ ID NO: 23191 - protein, 85 aa, unidentified
  REGION 1..85: note = Description of Unknown:cds_NC_030656.1_cds_YP_009268816.1_101 target sequence
NIGFLSIFHRLQKICIPCCFLKPQSHTETFSSCVHNKEVDRTVINPYVLNFGKVVTESKISFLPILFDDYFNVDNNADFEPDNKR

SEQ ID NO: 23192 - protein, 85 aa, unidentified
  REGION 1..85: note = Description of Unknown:cds_NC_030656.1_cds_YP_009268816.1_101 target sequence
LQSTSGYYIVHCCAKETITRLRTQEDIIKYVNEDKNILIVGDMVYFPTNYTDIGNKIRIVVQEIVHDVLLVQKDADSDVINFIQP

SEQ ID NO: 23193 - protein, 85 aa, unidentified
  REGION 1..85: note = Description of Unknown:cds_NC_030656.1_cds_YP_009268816.1_101 target sequence
KSNPLKKLFPYIDNKIEIASDSGLTLTTDGFYVDGERFTETISSQYITFTDNVVSSGPIVKYFSNMFKYVVTKSIDRFIKTWIVN

SEQ ID NO: 23194 - protein, 84 aa, unidentified
  REGION 1..84: note = Description of Unknown:cds_NC_030656.1_cds_YP_009268816.1_101 target sequence
DGFYVDGERFTETISSQYITFTDNVVSSGPIVKYFSNMFKYVVTKSIDRFIKTWIVNIMVQFNITPTTDPATVKQLLEKYYPHK

SEQ ID NO: 23195 - protein, 85 aa, unidentified
  REGION 1..85: note = Description of Unknown:cds_NC_030656.1_cds_YP_009268816.1_101 target sequence
NEIDETSTIYYFLSKHLDIKTPTLLKRHILLTMKIRQLKGYLQDLLNIDENIIIYSHKNNLEYSYVDNTIFNPFSPTQKKTLIKI

SEQ ID NO: 23196 - protein, 85 aa, unidentified
  REGION 1..85: note = Description of Unknown:cds_NC_030656.1_cds_YP_009268816.1_101 target sequence
DGILYNTYIDACNFLVIWVARANDTPVPEFGSSEEVNSNILKFESKMLEIFNTLDLNMTVESKFNNIFRTNLRTTGLRKIVKKLQ

SEQ ID NO: 23197 - protein, 85 aa, unidentified
  REGION 1..85: note = Description of Unknown:cds_NC_030656.1_cds_YP_009268816.1_101 target sequence
EQNLKNKVLLYKSDEHFINLTGNNFILTDEDINLTVWNTDGTVALSSDGSTITVNNISLFSSLVADLDPQMERIKGDITYKVNLF

SEQ ID NO: 23198 - protein, 85 aa, unidentified
  REGION 1..85: note = Description of Unknown:cds_NC_030656.1_cds_YP_009268816.1_101 target sequence
TPITSKIKLAIETSFIFVETATNNILLSVDKRISIILAKNHISIKVKNHIPNIEKYFAFLVIAINSMFNNVQQSSDFTKIETVYW

SEQ ID NO: 23199 - protein, 85 aa, unidentified
  REGION 1..85: note = Description of Unknown:cds_NC_030656.1_cds_YP_009268816.1_101 target sequence
SRICQNSKNKNRKPVIIQSLDADMTKVSENFYKSETKDVFVNANGVMFSCLDPLGKYNNIGFLSIFHRLQKICIPCCFLKPQSHT

SEQ ID NO: 23200 - protein, 85 aa, unidentified
  REGION 1..85: note = Description of Unknown:cds_NC_030656.1_cds_YP_009268816.1_101 target sequence
ETFSSCVHNKEVDRTVINPYVLNFGKVVTESKISFLPILFDDYFNVDNNADFEPDNKRLQSTSGYYIVHCCAKETITRLRTQEDI

SEQ ID NO: 23201 - protein, 85 aa, unidentified
  REGION 1..85: note = Description of Unknown:cds_NC_030656.1_cds_YP_009268816.1_101 target sequence
IKYVNEDKNILIVGDMVYFPTNYTDIGNKIRIVVQEIVHDVLLVQKDADSDVINFIQPKSNPLKKLFPYIDNKIEIASDSGLTLT

SEQ ID NO: 23202 - protein, 85 aa, unidentified
  REGION 1..85: note = Description of Unknown:cds_NC_030656.1_cds_YP_009268816.1_101 target sequence
TDGFYVDGERFTETISSQYITFTDNVVSSGPIVKYFSNMFKYVVTKSIDRFIKTWIVNIMVQFNITPTTDPATVKQLLEKYYPHK

SEQ ID NO: 23203 - protein, 85 aa, unidentified
  REGION 1..85: note = Description of Unknown:hvTR_O55778.2 target sequence
DKLDLVNDGLDIIDFIQKNQKEIQKTYGRSSIQQPSTKDRTRAWEDFLQSTSGEHEQAEGGMPKNDGGTEGRNVEDLSSVTSSDG

SEQ ID NO: 23204 - protein, 85 aa, unidentified
  REGION 1..85: note = Description of Unknown:hvTR_O55778.2 target sequence
TIGQRVSNTRAWAEDPDDIQLDPMVTDVVYHDHGGECTGHGPSSSPERGWSYHMSGTHDGNVRAVPDTKVLPNAPKTTVPEEVRE

SEQ ID NO: 23205 - protein, 85 aa, unidentified
  REGION 1..85: note = Description of Unknown:hvTR_O55778.2 target sequence
IDLIGLEDKFASAGLNPAAVPFVPKNQSTPTEEPPVIPEYYYGSGRRGDLSKSPPRGNVNLDSIKIYTSDDEDENQLEYEDEFAK

SEQ ID NO: 23206 - protein, 85 aa, unidentified
  REGION 1..85: note = Description of Unknown:hvTR_O55778.2 target sequence
SSSEVVIDTTPEDNDSINQEEVVGDPSDQGLEHPFPLGKFPEKEETPDVRRKDSLMQDSCKRGGVPKRLPMLSEEFECSGSDDPI

SEQ ID NO: 23207 - protein, 85 aa, unidentified
  REGION 1..85: note = Description of Unknown:hvTR_O55778.2 target sequence
IQELEREGSHPGGSLRLREPPQSSGNSRNQPDRQLKTGDAASPGGVQRPGTPMPKSRIMPIKKGTDAKSQYVGTEDVPGSKSGAT

SEQ ID NO: 23208 - protein, 85 aa, unidentified
  REGION 1..85: note = Description of Unknown:hvTR_O55778.2 target sequence
RYVRGLPPNQESKSVTAENVQLSAPSAVTRNEGHDQEVTSNEDSLDDNILCHQMILLTLFLPHDTDRLNYHADHLNDYDLETLCE

SEQ ID NO: 23209 - protein, 85 aa, unidentified
  REGION 1..85: note = Description of Unknown:hvTR_O55778.2 target sequence
ESVLMGIVNAIKLINIDMRLNHIEEQMKEIPKIINKIDSIDRVLAKTNTALSTIEGHLVSMMIMIPGKGKGERKGKTNPELKPVI

SEQ ID NO: 23210 - protein, 85 aa, unidentified
  REGION 1..85: note = Description of Unknown:hvTR_O55778.2 target sequence
GRNILEQQELFSFDNLKNFRDGSLTDEPYGGVARIRDDLILPELNFSETNASQFVPLADDASKDVVRTMIRTHIKDRELRSELMD

SEQ ID NO: 23211 - protein, 84 aa, unidentified
  REGION 1..84: note = Description of Unknown:hvTR_O55778.2 target sequence
PYGGVARIRDDLILPELNFSETNASQFVPLADDASKDVVRTMIRTHIKDRELRSELMDYLNRAETDEEVQEVANTVNDIIDGNI

SEQ ID NO: 23212 - protein, 85 aa, unidentified
  REGION 1..85: note = Description of Unknown:hvTR_O55778.2 target sequence
GRSSIQQPSTKDRTRAWEDFLQSTSGEHEQAEGGMPKNDGGTEGRNVEDLSSVTSSDGTIGQRVSNTRAWAEDPDDIQLDPMVTD

SEQ ID NO: 23213 - protein, 85 aa, unidentified
  REGION 1..85: note = Description of Unknown:hvTR_O55778.2 target sequence
VVYHDHGGECTGHGPSSSPERGWSYHMSGTHDGNVRAVPDTKVLPNAPKTTVPEEVREIDLIGLEDKFASAGLNPAAVPFVPKNQ

SEQ ID NO: 23214 - protein, 85 aa, unidentified
  REGION 1..85: note = Description of Unknown:hvTR_O55778.2 target sequence
STPTEEPPVIPEYYYGSGRRGDLSKSPPRGNVNLDSIKIYTSDDEDENQLEYEDEFAKSSSEVVIDTTPEDNDSINQEEVVGDPS

SEQ ID NO: 23215 - protein, 85 aa, unidentified
  REGION 1..85: note = Description of Unknown:hvTR_O55778.2 target sequence
DQGLEHPFPLGKFPEKEETPDVRRKDSLMQDSCKRGGVPKRLPMLSEEFECSGSDDPIIQELEREGSHPGGSLRLREPPQSSGNS

SEQ ID NO: 23216 - protein, 85 aa, unidentified
  REGION 1..85: note = Description of Unknown:hvTR_O55778.2 target sequence
RNQPDRQLKTGDAASPGGVQRPGTPMPKSRIMPIKKGTDAKSQYVGTEDVPGSKSGATRYVRGLPPNQESKSVTAENVQLSAPSA

SEQ ID NO: 23217 - protein, 85 aa, unidentified
  REGION 1..85: note = Description of Unknown:hvTR_O55778.2 target sequence
VTRNEGHDQEVTSNEDSLDDNILCHQMILLTLFLPHDTDRLNYHADHLNDYDLETLCEESVLMGIVNAIKLINIDMRLNHIEEQM

SEQ ID NO: 23218 - protein, 85 aa, unidentified
  REGION 1..85: note = Description of Unknown:hvTR_O55778.2 target sequence
KEIPKIINKIDSIDRVLAKTNTALSTIEGHLVSMMIMIPGKGKGERKGKTNPELKPVIGRNILEQQELFSFDNLKNFRDGSLTDE

SEQ ID NO: 23219 - protein, 85 aa, unidentified
  REGION 1..85: note = Description of Unknown:hvTR_Q98277 target sequence
YTVNPQLVVLVDRQQQLREVRYLSLYGTLDEASPLYYFAKQHLRAETLAVERRHILLTLKISQLKGYLCHLLGLREDIIIYSHKN

SEQ ID NO: 23220 - protein, 85 aa, unidentified
  REGION 1..85: note = Description of Unknown:hvTR_Q98277 target sequence
NLEYSYVDNTIFNPFTMTQKKTLIKADSFLYNVYVDACDFLVVWVARAQDTPVPEFGSFEEVDANILKFEARLVEMFPELDLEFS

SEQ ID NO: 23221 - protein, 85 aa, unidentified
  REGION 1..85: note = Description of Unknown:hvTR_Q98277 target sequence
IQSKFNNVFRTNLRSTGLRNIVKRNQDNRILFIKTDEFFITMSGNHFVLNNEALNLSIWDAQGRLAISSDGDTITVNDVRLFTEL

SEQ ID NO: 23222 - protein, 85 aa, unidentified
  REGION 1..85: note = Description of Unknown:hvTR_Q98277 target sequence
VTDSNLQMERIKGDITYRIFLLSPITSKIKLDIETSFIFVETATNNILLSADKKISIILAKNHISIKVKNHIPNIEKYFTFLVIF

SEQ ID NO: 23223 - protein, 85 aa, unidentified
  REGION 1..85: note = Description of Unknown:hvTR_Q98277 target sequence
INRMFNAVQQAVDFTKIETIYWSRICQNTRDKNRKPVIVSSLDANMERVSDNFFRSPTREVFVNSNNIMFSCVDPLGKYNSVGFL

SEQ ID NO: 23224 - protein, 85 aa, unidentified
  REGION 1..85: note = Description of Unknown:hvTR_Q98277 target sequence
AIFYKLQKMCIPCCFLRSQAHTDTFISCVHHRELDRQLVSPYVLNFGKIVTEAKISFLPILFDQFFNEGLRIEFEADHKRLKATD

SEQ ID NO: 23225 - protein, 85 aa, unidentified
  REGION 1..85: note = Description of Unknown:hvTR_Q98277 target sequence
GYHVVKCCTRSEITRLRTQRDIIQFVNAEQNTLIAGDMVYFPMHGARSAGAEHQRVYILIQEIVHEVVMVQKAHDSDRIRFRELE

SEQ ID NO: 23226 - protein, 85 aa, unidentified
  REGION 1..85: note = Description of Unknown:hvTR_Q98277 target sequence
RNRLWEFFPYRVPSARIKEEHGLVLTTDGFYVDGKLFSEPLSTRYVAFTENVGTAGVAAKYFAPVFKYVVTEARELFIKTWLLNV

SEQ ID NO: 23227 - protein, 84 aa, unidentified
  REGION 1..84: note = Description of Unknown:hvTR_Q98277 target sequence
DGFYVDGKLFSEPLSTRYVAFTENVGTAGVAAKYFAPVFKYVVTEARELFIKTWLLNVMMQLGLTGESSAAQTREALERYYRLS

SEQ ID NO: 23228 - protein, 85 aa, unidentified
  REGION 1..85: note = Description of Unknown:hvTR_Q98277 target sequence
TLDEASPLYYFAKQHLRAETLAVERRHILLTLKISQLKGYLCHLLGLREDIIIYSHKNNLEYSYVDNTIFNPFTMTQKKTLIKAD

SEQ ID NO: 23229 - protein, 85 aa, unidentified
  REGION 1..85: note = Description of Unknown:hvTR_Q98277 target sequence
SFLYNVYVDACDFLVVWVARAQDTPVPEFGSFEEVDANILKFEARLVEMFPELDLEFSIQSKFNNVFRTNLRSTGLRNIVKRNQD

SEQ ID NO: 23230 - protein, 85 aa, unidentified
  REGION 1..85: note = Description of Unknown:hvTR_Q98277 target sequence
NRILFIKTDEFFITMSGNHFVLNNEALNLSIWDAQGRLAISSDGDTITVNDVRLFTELVTDSNLQMERIKGDITYRIFLLSPITS

SEQ ID NO: 23231 - protein, 85 aa, unidentified
  REGION 1..85: note = Description of Unknown:hvTR_Q98277 target sequence
KIKLDIETSFIFVETATNNILLSADKKISIILAKNHISIKVKNHIPNIEKYFTFLVIFINRMFNAVQQAVDFTKIETIYWSRICQ

SEQ ID NO: 23232 - protein, 85 aa, unidentified
  REGION 1..85: note = Description of Unknown:hvTR_Q98277 target sequence
NTRDKNRKPVIVSSLDANMERVSDNFFRSPTREVFVNSNNIMFSCVDPLGKYNSVGFLAIFYKLQKMCIPCCFLRSQAHTDTFIS

SEQ ID NO: 23233 - protein, 85 aa, unidentified
  REGION 1..85: note = Description of Unknown:hvTR_Q98277 target sequence
CVHHRELDRQLVSPYVLNFGKIVTEAKISFLPILFDQFFNEGLRIEFEADHKRLKATDGYHVVKCCTRSEITRLRTQRDIIQFVN

SEQ ID NO: 23234 - protein, 85 aa, unidentified
  REGION 1..85: note = Description of Unknown:hvTR_Q98277 target sequence
AEQNTLIAGDMVYFPMHGARSAGAEHQRVYILIQEIVHEVVMVQKAHDSDRIRFRELERNRLWEFFPYRVPSARIKEEHGLVLTT

SEQ ID NO: 23235 - protein, 85 aa, unidentified
  REGION 1..85: note = Description of Unknown:cds_NC_001906.3_cds_NP_047107.2_2 target sequence
RYVRGLPPNQESKSVTAENVQLSAPSAVTRNEGHDQEVTSNEDSLDDKYIMPSDDFANTFLPHDTDRLNYHADHLNDYDLETLCE

SEQ ID NO: 23236 - protein, 85 aa, unidentified
  REGION 1..85: note = Description of Unknown:cds_NC_001906.3_cds_NP_047107.2_2 target sequence
VTRNEGHDQEVTSNEDSLDDKYIMPSDDFANTFLPHDTDRLNYHADHLNDYDLETLCEESVLMGIVNAIKLINIDMRLNHIEEQM

SEQ ID NO: 23237 - protein, 85 aa, unidentified
  REGION 1..85: note = Description of Unknown:hvTR_Q6TVA5 target sequence
LYTVSPQLVVLVGRHQEIERVLYLSLYDEIDQSSPIYFFAKQYIQHDPVHVRRHILLTMRVQQLKGYLGHLLDLQEDIIVYSHKN

SEQ ID NO: 23238 - protein, 85 aa, unidentified
  REGION 1..85: note = Description of Unknown:hvTR_Q6TVA5 target sequence
NLEYSYVDNTIFNPFSPTQKKTLIRTDGILYNAYADACDFLVVWVARAADTAAPEFGSFEEPSDSILKFEERLIQEFAGLDLNMT

SEQ ID NO: 23239 - protein, 85 aa, unidentified
  REGION 1..85: note = Description of Unknown:hvTR_Q6TVA5 target sequence
VETKFNNIFRTNLRESGLRAIAQQSPERRREVGDFDILLSKTDDFFISMTGSRFLLVDEPLNLSVWDAEGALAISSDGKTLTVND

SEQ ID NO: 23240 - protein, 85 aa, unidentified
  REGION 1..85: note = Description of Unknown:hvTR_Q6TVA5 target sequence
VALFTKLVASMDVKMDRVKGDITYKVSLGTHITSKMKLDMETSFIFVETATNNILLSTDKRISIILAKSHVSVKVKNYIPNIEKY

SEQ ID NO: 23241 - protein, 85 aa, unidentified
  REGION 1..85: note = Description of Unknown:hvTR_Q6TVA5 target sequence
FTFLIIAISVMFNSVKQSSDFTKVETVYWSRICQNTKTKNRKPVIVQSLDADMTKVSDNFFRSDAREVFVNSNGVMFSCMDPDGR

SEQ ID NO: 23242 - protein, 85 aa, unidentified
  REGION 1..85: note = Description of Unknown:hvTR_Q6TVA5 target sequence
YNSVGFLSIFHRLQRICIPCCFLRSQAHTDTFKSCVYDEEVDRSSLNPYILNFGKVVTESKLSFLPIIFDKYFNEGLEADFEADN

SEQ ID NO: 23243 - protein, 85 aa, unidentified
  REGION 1..85: note = Description of Unknown:hvTR_Q6TVA5 target sequence
KRLRATAGYYVVHCCEGAIVRLRSVSEIVAYVNESGNILISGDMVYFPMRLSDSSATRILIQEIVHDVVCIRKDATEDAIHIAPD

SEQ ID NO: 23244 - protein, 85 aa, unidentified
  REGION 1..85: note = Description of Unknown:hvTR_Q6TVA5 target sequence
ARSRLADMFPHKTVPRVVAEEAGLTLATDGFFVDGARFAPKLSSSFTAFVRNATVPNAVSRHFAKLFRYVVTDAPERFVKTWSIN

SEQ ID NO: 23245 - protein, 84 aa, unidentified
  REGION 1..84: note = Description of Unknown:hvTR_Q6TVA5 target sequence
ATDGFFVDGARFAPKLSSSFTAFVRNATVPNAVSRHFAKLFRYVVTDAPERFVKTWSINCALKMGTEPDSSRAEALLRELYPQQ

SEQ ID NO: 23246 - protein, 85 aa, unidentified
  REGION 1..85: note = Description of Unknown:hvTR_Q6TVA5 target sequence
DEIDQSSPIYFFAKQYIQHDPVHVRRHILLTMRVQQLKGYLGHLLDLQEDIIVYSHKNNLEYSYVDNTIFNPFSPTQKKTLIRTD

SEQ ID NO: 23247 - protein, 85 aa, unidentified
  REGION 1..85: note = Description of Unknown:hvTR_Q6TVA5 target sequence
GILYNAYADACDFLVVWVARAADTAAPEFGSFEEPSDSILKFEERLIQEFAGLDLNMTVETKFNNIFRTNLRESGLRAIAQQSPE

SEQ ID NO: 23248 - protein, 85 aa, unidentified
  REGION 1..85: note = Description of Unknown:hvTR_Q6TVA5 target sequence
RRREVGDFDILLSKTDDFFISMTGSRFLLVDEPLNLSVWDAEGALAISSDGKTLTVNDVALFTKLVASMDVKMDRVKGDITYKVS

SEQ ID NO: 23249 - protein, 85 aa, unidentified
  REGION 1..85: note = Description of Unknown:hvTR_Q6TVA5 target sequence
LGTHITSKMKLDMETSFIFVETATNNILLSTDKRISIILAKSHVSVKVKNYIPNIEKYFTFLIIAISVMFNSVKQSSDFTKVETV

SEQ ID NO: 23250 - protein, 85 aa, unidentified
  REGION 1..85: note = Description of Unknown:hvTR_Q6TVA5 target sequence
YWSRICQNTKTKNRKPVIVQSLDADMTKVSDNFFRSDAREVFVNSNGVMFSCMDPDGRYNSVGFLSIFHRLQRICIPCCFLRSQA

SEQ ID NO: 23251 - protein, 85 aa, unidentified
  REGION 1..85: note = Description of Unknown:hvTR_Q6TVA5 target sequence
HTDTFKSCVYDEEVDRSSLNPYILNFGKVVTESKLSFLPIIFDKYFNEGLEADFEADNKRLRATAGYYVVHCCEGAIVRLRSVSE

SEQ ID NO: 23252 - protein, 85 aa, unidentified
  REGION 1..85: note = Description of Unknown:hvTR_Q6TVA5 target sequence
IVAYVNESGNILISGDMVYFPMRLSDSSATRILIQEIVHDVVCIRKDATEDAIHIAPDARSRLADMFPHKTVPRVVAEEAGLTLA

SEQ ID NO: 23253 - protein, 85 aa, unidentified
  REGION 1..85: note = Description of Unknown:hvTR_D3IZN1 target sequence
LYTVAPQLVVLVGRHQEIERVLYLSLYDEIDQSSPIYFFAKQYIQKDPEHVRRHILLTMRVRQLKGYLGHLLDLQDEIIVYSHKN

SEQ ID NO: 23254 - protein, 85 aa, unidentified
  REGION 1..85: note = Description of Unknown:hvTR_D3IZN1 target sequence
NLEYSYVDNTIFNPFSPTQKKTLIRTDGILYNAYADACDFLVVWVARAADTSAPEFGSFEEPNDSILKFEERLIREFANLDLNMS

SEQ ID NO: 23255 - protein, 85 aa, unidentified
  REGION 1..85: note = Description of Unknown:hvTR_D3IZN1 target sequence
VETKFNNIFRTNLRESGLRAIVQQSPDKRAEVGDFDILLSKTDDFFVSMTGTRFLLVDEPLNLSVWGPDGALAISSDGKTLTVND

SEQ ID NO: 23256 - protein, 85 aa, unidentified
  REGION 1..85: note = Description of Unknown:hvTR_D3IZN1 target sequence
VGLFTKLIASMDVKMDRVKGDITYKVSLATTITSKMKLDMETSFIFVETATNNILLSTDKRISIILAKSHVSVKVKNYIPNIEKY

SEQ ID NO: 23257 - protein, 85 aa, unidentified
  REGION 1..85: note = Description of Unknown:hvTR_D3IZN1 target sequence
FTFLIVAISVMFNNVKQSSDFTKVETVYWSRICQNTKTKNRKPVIVQSLDADMVKVSDNFFKSDAREVFVNGNGVMFSCMDPDGR

SEQ ID NO: 23258 - protein, 85 aa, unidentified
  REGION 1..85: note = Description of Unknown:hvTR_D3IZN1 target sequence
YNSVGFLSIFHRLQRICIPCCFLRSQAHTDTFKSCVHDEEVDRSALNPYILNFGKVVTESKLSFLPIIFDKYFNEGLEADFEADN

SEQ ID NO: 23259 - protein, 85 aa, unidentified
  REGION 1..85: note = Description of Unknown:hvTR_D3IZN1 target sequence
KRLRATAGYYVVHCCEGAIVRLRTVSEIVGYVNASGNVLISGDMVYFPMRLSETAATRILIQEIVHDVVRVRKDAATDAIHLDQD

SEQ ID NO: 23260 - protein, 85 aa, unidentified
  REGION 1..85: note = Description of Unknown:hvTR_D3IZN1 target sequence
ASGRLAGMFPHQAARRVVREENGLSLTTAGFFVDGKRFAPKLTSRYTAFVRNASVPNAVSRHFAKLFRHVVTDAPDRFMKTWSVN

SEQ ID NO: 23261 - protein, 84 aa, unidentified
  REGION 1..84: note = Description of Unknown:hvTR_D3IZN1 target sequence
TTAGFFVDGKRFAPKLTSRYTAFVRNASVPNAVSRHFAKLFRHVVTDAPDRFMKTWSVNCALKLGVEPDSARAPALLQEFYPQS

SEQ ID NO: 23262 - protein, 85 aa, unidentified
  REGION 1..85: note = Description of Unknown:hvTR_D3IZN1 target sequence
DEIDQSSPIYFFAKQYIQKDPEHVRRHILLTMRVRQLKGYLGHLLDLQDEIIVYSHKNNLEYSYVDNTIFNPFSPTQKKTLIRTD

SEQ ID NO: 23263 - protein, 85 aa, unidentified
  REGION 1..85: note = Description of Unknown:hvTR_D3IZN1 target sequence
GILYNAYADACDFLVVWVARAADTSAPEFGSFEEPNDSILKFEERLIREFANLDLNMSVETKFNNIFRTNLRESGLRAIVQQSPD

SEQ ID NO: 23264 - protein, 85 aa, unidentified
  REGION 1..85: note = Description of Unknown:hvTR_D3IZN1 target sequence
KRAEVGDFDILLSKTDDFFVSMTGTRFLLVDEPLNLSVWGPDGALAISSDGKTLTVNDVGLFTKLIASMDVKMDRVKGDITYKVS

SEQ ID NO: 23265 - protein, 85 aa, unidentified
  REGION 1..85: note = Description of Unknown:hvTR_D3IZN1 target sequence
LATTITSKMKLDMETSFIFVETATNNILLSTDKRISIILAKSHVSVKVKNYIPNIEKYFTFLIVAISVMFNNVKQSSDFTKVETV

SEQ ID NO: 23266 - protein, 85 aa, unidentified
  REGION 1..85: note = Description of Unknown:hvTR_D3IZN1 target sequence
YWSRICQNTKTKNRKPVIVQSLDADMVKVSDNFFKSDAREVFVNGNGVMFSCMDPDGRYNSVGFLSIFHRLQRICIPCCFLRSQA

SEQ ID NO: 23267 - protein, 85 aa, unidentified
  REGION 1..85: note = Description of Unknown:hvTR_D3IZN1 target sequence
HTDTFKSCVHDEEVDRSALNPYILNFGKVVTESKLSFLPIIFDKYFNEGLEADFEADNKRLRATAGYYVVHCCEGAIVRLRTVSE

SEQ ID NO: 23268 - protein, 85 aa, unidentified
  REGION 1..85: note = Description of Unknown:hvTR_D3IZN1 target sequence
IVGYVNASGNVLISGDMVYFPMRLSETAATRILIQEIVHDVVRVRKDAATDAIHLDQDASGRLAGMFPHQAARRVVREENGLSLT

SEQ ID NO: 23269 - protein, 85 aa, unidentified
  REGION 1..85: note = Description of Unknown:cds_NZ_WFIY01000004.1_cds_WP_155862317.1_41 target sequence
AFLRCYMCKNACGIIATVEGKVVRVAANRNHPQPGICGRGAAGPYLLTHPDRLKSPLIREGDQLVPTSWEKALDEVTKRLKELLD

SEQ ID NO: 23270 - protein, 85 aa, unidentified
  REGION 1..85: note = Description of Unknown:cds_NZ_WFIY01000004.1_cds_WP_155862317.1_41 target sequence
EGHPEYLAITYHDYGKELLERFAALYGTPNLIGHESVCHGPRTVAAELVLGAEGPRSIDPDYPNSKFVVFIGRNPLEGIVPDIVR

SEQ ID NO: 23271 - protein, 85 aa, unidentified
  REGION 1..85: note = Description of Unknown:cds_NZ_WFIY01000004.1_cds_WP_155862317.1_41 target sequence
RIEEGRKNGMKIAVIDPRKSAIAQRYADRWIPIRPGSDTAFLLSVIYYMIKNGMYDEDFLKKYSNAPLLIYEDDLSPTNEYSDKL

SEQ ID NO: 23272 - protein, 85 aa, unidentified
  REGION 1..85: note = Description of Unknown:cds_NZ_WFIY01000004.1_cds_WP_155862317.1_41 target sequence
IYEGERNGRRVATAFYLLMKEGEKVYSRLNYITGATYDDVKYIAENLWENRPSAAIDDGWHTSFSTDSTYTWMSAFIINAMIGNL

SEQ ID NO: 23273 - protein, 85 aa, unidentified
  REGION 1..85: note = Description of Unknown:cds_NZ_WFIY01000004.1_cds_WP_155862317.1_41 target sequence
DKKGGLVFSKKPKIKLYEENKAKVKRIDKIRYPLTYAAFQEVYRAILTGSPYPIKALMVVGTNLDGRDPNSDLVRRALSKLDFLV

SEQ ID NO: 23274 - protein, 85 aa, unidentified
  REGION 1..85: note = Description of Unknown:cds_NZ_WFIY01000004.1_cds_WP_155862317.1_41 target sequence
VVDVMPSDVTEYADVVLAESTYLERDELPLPVGWTLEAWVDIHQKAVEPYYDTKPLWWILLELERRLKLANDTFNSLQDMILSKL

SEQ ID NO: 23275 - protein, 85 aa, unidentified
  REGION 1..85: note = Description of Unknown:cds_NZ_WFIY01000004.1_cds_WP_155862317.1_41 target sequence
GINKEELYSKGCVKIPTEIYEVYPYKKGLNTPSGKVEIYSTILHEHGYYPLPTYIEKNVMPREDDEFYLTSGHTLYHTQDSITFD

SEQ ID NO: 23276 - protein, 85 aa, unidentified
  REGION 1..85: note = Description of Unknown:cds_NZ_WFIY01000004.1_cds_WP_155862317.1_41 target sequence
IPTLIKLAPENPVTINRKRAEKLGIKDNDEVELISLTTGQRVRCKVRVTDDIREDTAFTYFGFGRHSKGERFAYGHGFDVNSLIS

SEQ ID NO: 23277 - protein, 84 aa, unidentified
  REGION 1..84: note = Description of Unknown:cds_NZ_WFIY01000004.1_cds_WP_155862317.1_41 target sequence
IKDNDEVELISLTTGQRVRCKVRVTDDIREDTAFTYFGFGRHSKGERFAYGHGFDVNSLISDQITDPISGSIAQSLNIVKIRKV

SEQ ID NO: 23278 - protein, 85 aa, unidentified
  REGION 1..85: note = Description of Unknown:cds_NZ_WFIY01000004.1_cds_WP_155862317.1_41 target sequence
NRNHPQPGICGRGAAGPYLLTHPDRLKSPLIREGDQLVPTSWEKALDEVTKRLKELLDEGHPEYLAITYHDYGKELLERFAALYG

SEQ ID NO: 23279 - protein, 85 aa, unidentified
  REGION 1..85: note = Description of Unknown:cds_NZ_WFIY01000004.1_cds_WP_155862317.1_41 target sequence
TPNLIGHESVCHGPRTVAAELVLGAEGPRSIDPDYPNSKFVVFIGRNPLEGIVPDIVRRIEEGRKNGMKIAVIDPRKSAIAQRYA

SEQ ID NO: 23280 - protein, 85 aa, unidentified
  REGION 1..85: note = Description of Unknown:cds_NZ_WFIY01000004.1_cds_WP_155862317.1_41 target sequence
DRWIPIRPGSDTAFLLSVIYYMIKNGMYDEDFLKKYSNAPLLIYEDDLSPTNEYSDKLIYEGERNGRRVATAFYLLMKEGEKVYS

SEQ ID NO: 23281 - protein, 85 aa, unidentified
  REGION 1..85: note = Description of Unknown:cds_NZ_WFIY01000004.1_cds_WP_155862317.1_41 target sequence
RLNYITGATYDDVKYIAENLWENRPSAAIDDGWHTSFSTDSTYTWMSAFIINAMIGNLDKKGGLVFSKKPKIKLYEENKAKVKRI

SEQ ID NO: 23282 - protein, 85 aa, unidentified
  REGION 1..85: note = Description of Unknown:cds_NZ_WFIY01000004.1_cds_WP_155862317.1_41 target sequence
DKIRYPLTYAAFQEVYRAILTGSPYPIKALMVVGTNLDGRDPNSDLVRRALSKLDFLVVVDVMPSDVTEYADVVLAESTYLERDE

SEQ ID NO: 23283 - protein, 85 aa, unidentified
  REGION 1..85: note = Description of Unknown:cds_NZ_WFIY01000004.1_cds_WP_155862317.1_41 target sequence
LPLPVGWTLEAWVDIHQKAVEPYYDTKPLWWILLELERRLKLANDTFNSLQDMILSKLGINKEELYSKGCVKIPTEIYEVYPYKK

SEQ ID NO: 23284 - protein, 85 aa, unidentified
  REGION 1..85: note = Description of Unknown:cds_NZ_WFIY01000004.1_cds_WP_155862317.1_41 target sequence
GLNTPSGKVEIYSTILHEHGYYPLPTYIEKNVMPREDDEFYLTSGHTLYHTQDSITFDIPTLIKLAPENPVTINRKRAEKLGIKD

SEQ ID NO: 23285 - protein, 85 aa, unidentified
  REGION 1..85: note = Description of Unknown:cds_NZ_WFIY01000004.1_cds_WP_155863971.1_1895 target sequence
EFTPIDKLNVDERIIKILKKKGIEKLNPVQTDAVNSGLLEGKRLLVTSPTGSGKTLIAELGIISHLLSKGGKAVYITPLKALTAE

SEQ ID NO: 23286 - protein, 85 aa, unidentified
  REGION 1..85: note = Description of Unknown:cds_NZ_WFIY01000004.1_cds_WP_155863971.1_1895 target sequence
KYNELKDWEELGFKVGMTSGDYDSDDAWLENYDIIVSTYEKIDSLWRHNPSWLSEVDYFVLDEFHYLNDEERGPVVESVAIRAKR

SEQ ID NO: 23287 - protein, 85 aa, unidentified
  REGION 1..85: note = Description of Unknown:cds_NZ_WFIY01000004.1_cds_WP_155863971.1_1895 target sequence
KNLLALSATISNYEKIANWLNAIPVTTNWRPVPLREGVIVEGKKSYQLIFPDETIEIKGNDPIIAYTLYVLEHGGQVLVFRNSRK

SEQ ID NO: 23288 - protein, 85 aa, unidentified
  REGION 1..85: note = Description of Unknown:cds_NZ_WFIY01000004.1_cds_WP_155863971.1_1895 target sequence
MAESTAKKISSSMGLLSLPDKELLKVGEEIKNVEDAGSDEKEELYELVVRGVAFHHAGLSKGLREIIERAFRERKIKVIVATPTL

SEQ ID NO: 23289 - protein, 85 aa, unidentified
  REGION 1..85: note = Description of Unknown:cds_NZ_WFIY01000004.1_cds_WP_155863971.1_1895 target sequence
AAGVNLPARAVIIGDFHRYNRKILGYQEEIPIMEYKQMAGRAGRPGFDKEGEAVIVVRNKKEAEKVFKKYILSPPEPIESRLGNE

SEQ ID NO: 23290 - protein, 85 aa, unidentified
  REGION 1..85: note = Description of Unknown:cds_NZ_WFIY01000004.1_cds_WP_155863971.1_1895 target sequence
SAFYSFLLGIISSEKKISEDDLEDYAMDTLLDKDVAEKYVKRGITWLRDNEFIAGDDELVLTKFGKRVADLYINPFTAKVFKDYL

SEQ ID NO: 23291 - protein, 85 aa, unidentified
  REGION 1..85: note = Description of Unknown:cds_NZ_WFIY01000004.1_cds_WP_155863971.1_1895 target sequence
TKSDKSCNIAYLHLVAYTPDGPTVSVTRSELEELVDEAPCPLFVEEPEDEDEFYNYVSALKVAMIINDWIEEVDEDVILSRYGIG

SEQ ID NO: 23292 - protein, 85 aa, unidentified
  REGION 1..85: note = Description of Unknown:cds_NZ_WFIY01000004.1_cds_WP_155863971.1_1895 target sequence
SGDLRSIIDTMDWLTYSGYNVAKVLDLKEHYESLYTLNLRVKDGVKEELLDLVKIQGVGRKRARILYNHGIKKPEDVVMNVEKVK

SEQ ID NO: 23293 - protein, 84 aa, unidentified
  REGION 1..84: note = Description of Unknown:cds_NZ_WFIY01000004.1_cds_WP_155863971.1_1895 target sequence
LDLKEHYESLYTLNLRVKDGVKEELLDLVKIQGVGRKRARILYNHGIKKPEDVVMNVEKVKSLLGQKIGEKIAKEAARIIAGNA

SEQ ID NO: 23294 - protein, 85 aa, unidentified
  REGION 1..85: note = Description of Unknown:cds_NZ_WFIY01000004.1_cds_WP_155863971.1_1895 target sequence
PVQTDAVNSGLLEGKRLLVTSPTGSGKTLIAELGIISHLLSKGGKAVYITPLKALTAEKYNELKDWEELGFKVGMTSGDYDSDDA

SEQ ID NO: 23295 - protein, 85 aa, unidentified
  REGION 1..85: note = Description of Unknown:cds_NZ_WFIY01000004.1_cds_WP_155863971.1_1895 target sequence
WLENYDIIVSTYEKIDSLWRHNPSWLSEVDYFVLDEFHYLNDEERGPVVESVAIRAKRKNLLALSATISNYEKIANWLNAIPVTT

SEQ ID NO: 23296 - protein, 85 aa, unidentified
  REGION 1..85: note = Description of Unknown:cds_NZ_WFIY01000004.1_cds_WP_155863971.1_1895 target sequence
NWRPVPLREGVIVEGKKSYQLIFPDETIEIKGNDPIIAYTLYVLEHGGQVLVFRNSRKMAESTAKKISSSMGLLSLPDKELLKVG

SEQ ID NO: 23297 - protein, 85 aa, unidentified
  REGION 1..85: note = Description of Unknown:cds_NZ_WFIY01000004.1_cds_WP_155863971.1_1895 target sequence
EEIKNVEDAGSDEKEELYELVVRGVAFHHAGLSKGLREIIERAFRERKIKVIVATPTLAAGVNLPARAVIIGDFHRYNRKILGYQ

SEQ ID NO: 23298 - protein, 85 aa, unidentified
  REGION 1..85: note = Description of Unknown:cds_NZ_WFIY01000004.1_cds_WP_155863971.1_1895 target sequence
EEIPIMEYKQMAGRAGRPGFDKEGEAVIVVRNKKEAEKVFKKYILSPPEPIESRLGNESAFYSFLLGIISSEKKISEDDLEDYAM

SEQ ID NO: 23299 - protein, 85 aa, unidentified
  REGION 1..85: note = Description of Unknown:cds_NZ_WFIY01000004.1_cds_WP_155863971.1_1895 target sequence
DTLLDKDVAEKYVKRGITWLRDNEFIAGDDELVLTKFGKRVADLYINPFTAKVFKDYLTKSDKSCNIAYLHLVAYTPDGPTVSVT

SEQ ID NO: 23300 - protein, 85 aa, unidentified
  REGION 1..85: note = Description of Unknown:cds_NZ_WFIY01000004.1_cds_WP_155863971.1_1895 target sequence
RSELEELVDEAPCPLFVEEPEDEDEFYNYVSALKVAMIINDWIEEVDEDVILSRYGIGSGDLRSIIDTMDWLTYSGYNVAKVLDL

SEQ ID NO: 23301 - protein, 85 aa, unidentified
  REGION 1..85: note = Description of Unknown:cds_NZ_WFIY01000004.1_cds_WP_155862686.1_484 target sequence
TISLSSYELELIKKELKREPKEEELKVIDALWSEHCSYKSSKVFLRSLPSEGPNVVMGIEDWQDAGAVDIGDGYAIVMKVESHNH

SEQ ID NO: 23302 - protein, 85 aa, unidentified
  REGION 1..85: note = Description of Unknown:cds_NZ_WFIY01000004.1_cds_WP_155862686.1_484 target sequence
PSAIDPFNGAATGVGGIIRDIISKGARPIALLDMIRVGSLRHERNRWLLKGIISGIGFYGNSIGVPVVGGELSFDDSYTDNPLVD

SEQ ID NO: 23303 - protein, 85 aa, unidentified
  REGION 1..85: note = Description of Unknown:cds_NZ_WFIY01000004.1_cds_WP_155862686.1_484 target sequence
VACVGIVRKDKIIPSVVKKPGLKLVLAGLTGIDGLGGASFASRKLSGEDEIGAVQIADPFAGKIILDVTLEIADKVEAIKDLGGG

SEQ ID NO: 23304 - protein, 85 aa, unidentified
  REGION 1..85: note = Description of Unknown:cds_NZ_WFIY01000004.1_cds_WP_155862686.1_484 target sequence
GLAVAVTEMANGLGAIVNLDKVPLRVKGMKPEDIIISETQERMLYAVKDENVKEVCKAFEYYEYPCAVIGEIIEEPKIKFLYEGK

SEQ ID NO: 23305 - protein, 85 aa, unidentified
  REGION 1..85: note = Description of Unknown:cds_NZ_WFIY01000004.1_cds_WP_155862686.1_484 target sequence
EVVSLPSSLLLSPPIYVWGIKEDGEQKINEKPNVRIEDAIRNIVTSEDLVNKEWAYSQFDYEVGTSTVIKPGEADSALLLLPNGK

SEQ ID NO: 23306 - protein, 85 aa, unidentified
  REGION 1..85: note = Description of Unknown:cds_NZ_WFIY01000004.1_cds_WP_155862686.1_484 target sequence
FLAIKGDANPDLCVEDSYECGKAIFAEAYRNLATVGARGIAAVDHLQFGDPKKPKVYAKFVEAIRGISEAARFFNIPIVGGKVSF

SEQ ID NO: 23307 - protein, 85 aa, unidentified
  REGION 1..85: note = Description of Unknown:cds_NZ_WFIY01000004.1_cds_WP_155862686.1_484 target sequence
YNENSKGEPIKPTPLIVMAGLSDKPFRPSIEEGLDIVLIGITRDEMRASLFTKIFGQYGKLPKARLSEDLISSEIVIQGIHEGKI

SEQ ID NO: 23308 - protein, 85 aa, unidentified
  REGION 1..85: note = Description of Unknown:cds_NZ_WFIY01000004.1_cds_WP_155862686.1_484 target sequence
TYAKDISKGGLIGALWSIITKGYSVSISTDAIITAEDIYSKLFSENGGRFIVLTNDSQFFTRLAEKKGTIARVIGKVTKGSGIYI

SEQ ID NO: 23309 - protein, 84 aa, unidentified
  REGION 1..84: note = Description of Unknown:cds_NZ_WFIY01000004.1_cds_WP_155862686.1_484 target sequence
SVSISTDAIITAEDIYSKLFSENGGRFIVLTNDSQFFTRLAEKKGTIARVIGKVTKGSGIYIDSDYYDLSKEIDIYNNYLEARL

SEQ ID NO: 23310 - protein, 85 aa, unidentified
  REGION 1..85: note = Description of Unknown:cds_NZ_WFIY01000004.1_cds_WP_155862686.1_484 target sequence
IDALWSEHCSYKSSKVFLRSLPSEGPNVVMGIEDWQDAGAVDIGDGYAIVMKVESHNHPSAIDPFNGAATGVGGIIRDIISKGAR

SEQ ID NO: 23311 - protein, 85 aa, unidentified
  REGION 1..85: note = Description of Unknown:cds_NZ_WFIY01000004.1_cds_WP_155862686.1_484 target sequence
PIALLDMIRVGSLRHERNRWLLKGIISGIGFYGNSIGVPVVGGELSFDDSYTDNPLVDVACVGIVRKDKIIPSVVKKPGLKLVLA

SEQ ID NO: 23312 - protein, 85 aa, unidentified
  REGION 1..85: note = Description of Unknown:cds_NZ_WFIY01000004.1_cds_WP_155862686.1_484 target sequence
GLTGIDGLGGASFASRKLSGEDEIGAVQIADPFAGKIILDVTLEIADKVEAIKDLGGGGLAVAVTEMANGLGAIVNLDKVPLRVK

SEQ ID NO: 23313 - protein, 85 aa, unidentified
  REGION 1..85: note = Description of Unknown:cds_NZ_WFIY01000004.1_cds_WP_155862686.1_484 target sequence
GMKPEDIIISETQERMLYAVKDENVKEVCKAFEYYEYPCAVIGEIIEEPKIKFLYEGKEVVSLPSSLLLSPPIYVWGIKEDGEQK

SEQ ID NO: 23314 - protein, 85 aa, unidentified
  REGION 1..85: note = Description of Unknown:cds_NZ_WFIY01000004.1_cds_WP_155862686.1_484 target sequence
INEKPNVRIEDAIRNIVTSEDLVNKEWAYSQFDYEVGTSTVIKPGEADSALLLLPNGKFLAIKGDANPDLCVEDSYECGKAIFAE

SEQ ID NO: 23315 - protein, 85 aa, unidentified
  REGION 1..85: note = Description of Unknown:cds_NZ_WFIY01000004.1_cds_WP_155862686.1_484 target sequence
AYRNLATVGARGIAAVDHLQFGDPKKPKVYAKFVEAIRGISEAARFFNIPIVGGKVSFYNENSKGEPIKPTPLIVMAGLSDKPFR

SEQ ID NO: 23316 - protein, 85 aa, unidentified
  REGION 1..85: note = Description of Unknown:cds_NZ_WFIY01000004.1_cds_WP_155862686.1_484 target sequence
PSIEEGLDIVLIGITRDEMRASLFTKIFGQYGKLPKARLSEDLISSEIVIQGIHEGKITYAKDISKGGLIGALWSIITKGYSVSI

SEQ ID NO: 23317 - protein, 85 aa, unidentified
  REGION 1..85: note = Description of Unknown:cds_NZ_WFIY01000004.1_cds_WP_155863990.1_1915 target sequence
YKISNVTGDGNIINLTLPTSLRGHNEPLSVEVNLELFNPLKDEGKYILLVRDVTSNVIHLAIVFSQKDKKVISISSSDFILGKLY

SEQ ID NO: 23318 - protein, 85 aa, unidentified
  REGION 1..85: note = Description of Unknown:cds_NZ_WFIY01000004.1_cds_WP_155863990.1_1915 target sequence
KRREVEFIIPWVEELIAQEGRSFNFSIDIYSASREVELSKLSEIVRKAIVNSEDLQNLRFTLCRKINFTLSWDKIGKRKLLSYPL

SEQ ID NO: 23319 - protein, 85 aa, unidentified
  REGION 1..85: note = Description of Unknown:cds_NZ_WFIY01000004.1_cds_WP_155863990.1_1915 target sequence
PPIFNDFSKVEITSFANVAGEVEMYECERNKVIFTCRKIKNRINSLNVPKEISSLKLEEGKLYAFFSLNTPKIVETKGYDYFTSI

SEQ ID NO: 23320 - protein, 85 aa, unidentified
  REGION 1..85: note = Description of Unknown:cds_NZ_WFIY01000004.1_cds_WP_155863990.1_1915 target sequence
SFPINFYNVPILIIGLNGLNKSEKEGAFANVIYPMPKKQNVILPKFLRNNSWVSSLPKYIGEEKGDEEISDLTPNFNRKRILERI

SEQ ID NO: 23321 - protein, 85 aa, unidentified
  REGION 1..85: note = Description of Unknown:cds_NZ_WFIY01000004.1_cds_WP_155863990.1_1915 target sequence
LNKFYSSTITPVNGIKEMELNEGKAFSGDFNFKIIPANDKILRREFRKFINGLGKILYLSASSGRFSENPRKPSFTLKYSVIERL

SEQ ID NO: 23322 - protein, 85 aa, unidentified
  REGION 1..85: note = Description of Unknown:cds_NZ_WFIY01000004.1_cds_WP_155863990.1_1915 target sequence
SKKYNFEVNNGIMSGNIPHMLVPLLIKLYAGAEVKDEFHDSFKGYAGKIKERVDLILQEISSLSSLHSTNLETIIKYYSESDELY

SEQ ID NO: 23323 - protein, 85 aa, unidentified
  REGION 1..85: note = Description of Unknown:cds_NZ_WFIY01000004.1_cds_WP_155863990.1_1915 target sequence
EEIKRVLESSNSMTQVYYNLLASLLFLTSRIKDDRKRKKVESDEITNLMGSNHVLRLSNVEAYLINSFSPYSRVYIPVLNSSFVR

SEQ ID NO: 23324 - protein, 85 aa, unidentified
  REGION 1..85: note = Description of Unknown:cds_NZ_WFIY01000004.1_cds_WP_155863990.1_1915 target sequence
VRINTMNSKFAFLIDSAVEKLFSVVTYNLKLLLTPKGENSEVIIDHPEHTTFRIRVEKPIILSIEPKPIVQVINTDAIFFDFDVS

SEQ ID NO: 23325 - protein, 84 aa, unidentified
  REGION 1..84: note = Description of Unknown:cds_NZ_WFIY01000004.1_cds_WP_155863990.1_1915 target sequence
SVVTYNLKLLLTPKGENSEVIIDHPEHTTFRIRVEKPIILSIEPKPIVQVINTDAIFFDFDVSKVFFVSQYLWERHISRDFEVL

SEQ ID NO: 23326 - protein, 85 aa, unidentified
  REGION 1..85: note = Description of Unknown:cds_NZ_WFIY01000004.1_cds_WP_155863990.1_1915 target sequence
LSVEVNLELFNPLKDEGKYILLVRDVTSNVIHLAIVFSQKDKKVISISSSDFILGKLYKRREVEFIIPWVEELIAQEGRSFNFSI

SEQ ID NO: 23327 - protein, 85 aa, unidentified
  REGION 1..85: note = Description of Unknown:cds_NZ_WFIY01000004.1_cds_WP_155863990.1_1915 target sequence
DIYSASREVELSKLSEIVRKAIVNSEDLQNLRFTLCRKINFTLSWDKIGKRKLLSYPLPPIFNDFSKVEITSFANVAGEVEMYEC

SEQ ID NO: 23328 - protein, 85 aa, unidentified
  REGION 1..85: note = Description of Unknown:cds_NZ_WFIY01000004.1_cds_WP_155863990.1_1915 target sequence
ERNKVIFTCRKIKNRINSLNVPKEISSLKLEEGKLYAFFSLNTPKIVETKGYDYFTSISFPINFYNVPILIIGLNGLNKSEKEGA

SEQ ID NO: 23329 - protein, 85 aa, unidentified
  REGION 1..85: note = Description of Unknown:cds_NZ_WFIY01000004.1_cds_WP_155863990.1_1915 target sequence
FANVIYPMPKKQNVILPKFLRNNSWVSSLPKYIGEEKGDEEISDLTPNFNRKRILERILNKFYSSTITPVNGIKEMELNEGKAFS

SEQ ID NO: 23330 - protein, 85 aa, unidentified
  REGION 1..85: note = Description of Unknown:cds_NZ_WFIY01000004.1_cds_WP_155863990.1_1915 target sequence
GDFNFKIIPANDKILRREFRKFINGLGKILYLSASSGRFSENPRKPSFTLKYSVIERLSKKYNFEVNNGIMSGNIPHMLVPLLIK

SEQ ID NO: 23331 - protein, 85 aa, unidentified
  REGION 1..85: note = Description of Unknown:cds_NZ_WFIY01000004.1_cds_WP_155863990.1_1915 target sequence
LYAGAEVKDEFHDSFKGYAGKIKERVDLILQEISSLSSLHSTNLETIIKYYSESDELYEEIKRVLESSNSMTQVYYNLLASLLFL

SEQ ID NO: 23332 - protein, 85 aa, unidentified
  REGION 1..85: note = Description of Unknown:cds_NZ_WFIY01000004.1_cds_WP_155863990.1_1915 target sequence
TSRIKDDRKRKKVESDEITNLMGSNHVLRLSNVEAYLINSFSPYSRVYIPVLNSSFVRVRINTMNSKFAFLIDSAVEKLFSVVTY

SEQ ID NO: 23333 - protein, 85 aa, unidentified
  REGION 1..85: note = Description of Unknown:hvTR_C0H677 target sequence
SGRRKGCSAATASSSSSSPPSRLPPLPGHARRPRRKRCLVPEVFCTRDLADLCVRRDYEGLRRYLRRFEGSCVSLGWPSQCIYVV

SEQ ID NO: 23334 - protein, 85 aa, unidentified
  REGION 1..85: note = Description of Unknown:hvTR_C0H677 target sequence
GGEHSPHSLTEIDLEHCQNDFFGEFRALHLIGTVSHATCRYQVFVDAYGAVFAYDAQEDCLYELASDLAGFFAKGMIRCDPVHES

SEQ ID NO: 23335 - protein, 85 aa, unidentified
  REGION 1..85: note = Description of Unknown:hvTR_C0H677 target sequence
ICARLQPNVPLVHPDHRAELCRRSRASARGRYLRSLLAFRELLACEDTAARCAYVEAHREAQLTLIWPEKHSLVLRTARDLGLSA

SEQ ID NO: 23336 - protein, 85 aa, unidentified
  REGION 1..85: note = Description of Unknown:hvTR_C0H677 target sequence
SMLRRFQRSLYTREPVMPLGEIEGAEDKTFFHRVRILCGDTGTVYAALVGQDKLVRLARDLRGFVRVGLALLIDDFRYESIGPVD

SEQ ID NO: 23337 - protein, 85 aa, unidentified
  REGION 1..85: note = Description of Unknown:hvTR_C0H677 target sequence
RSSLYEANPELRLPFKKRRLVVGYFDSLSSLYLRGQPKFSSIWRGLRDAWTHKRPKPRERASGVHLQRYVRATAGRWLPLCWPPL

SEQ ID NO: 23338 - protein, 85 aa, unidentified
  REGION 1..85: note = Description of Unknown:hvTR_C0H677 target sequence
HGIMLGDTQYFGVVRDHKTYRRFSCLRQAGRLYFIGLVSVYECVPDANTAPEIWVSGHGHAFAYLPGEDKVYVLGLSFGEFFENG

SEQ ID NO: 23339 - protein, 85 aa, unidentified
  REGION 1..85: note = Description of Unknown:hvTR_C0H677 target sequence
LFAVYSFFERDYVDEIVEGAWFKHTFAGMYELSQILHDRANLLRVCQLHAGSKIRLGGSPACTFTFGSWNVAEADEANNFVIGVL

SEQ ID NO: 23340 - protein, 85 aa, unidentified
  REGION 1..85: note = Description of Unknown:hvTR_C0H677 target sequence
EQAHFVVIGWMEPVNKAVFMDAHGGIHVLLYGTMLVKLAETLRGFIRQGSFWFRCPRRFCFSPLDSSATVAAKPVSSHTSPAYDV

SEQ ID NO: 23341 - protein, 84 aa, unidentified
  REGION 1..84: note = Description of Unknown:hvTR_C0H677 target sequence
AHGGIHVLLYGTMLVKLAETLRGFIRQGSFWFRCPRRFCFSPLDSSATVAAKPVSSHTSPAYDVSEYVFSGRSVLDSVSGTGAS

SEQ ID NO: 23342 - protein, 85 aa, unidentified
  REGION 1..85: note = Description of Unknown:hvTR_C0H677 target sequence
GHARRPRRKRCLVPEVFCTRDLADLCVRRDYEGLRRYLRRFEGSCVSLGWPSQCIYVVGGEHSPHSLTEIDLEHCQNDFFGEFRA

SEQ ID NO: 23343 - protein, 85 aa, unidentified
  REGION 1..85: note = Description of Unknown:hvTR_C0H677 target sequence
LHLIGTVSHATCRYQVFVDAYGAVFAYDAQEDCLYELASDLAGFFAKGMIRCDPVHESICARLQPNVPLVHPDHRAELCRRSRAS

SEQ ID NO: 23344 - protein, 85 aa, unidentified
  REGION 1..85: note = Description of Unknown:hvTR_C0H677 target sequence
ARGRYLRSLLAFRELLACEDTAARCAYVEAHREAQLTLIWPEKHSLVLRTARDLGLSASMLRRFQRSLYTREPVMPLGEIEGAED

SEQ ID NO: 23345 - protein, 85 aa, unidentified
  REGION 1..85: note = Description of Unknown:hvTR_C0H677 target sequence
KTFFHRVRILCGDTGTVYAALVGQDKLVRLARDLRGFVRVGLALLIDDFRYESIGPVDRSSLYEANPELRLPFKKRRLVVGYFDS

SEQ ID NO: 23346 - protein, 85 aa, unidentified
  REGION 1..85: note = Description of Unknown:hvTR_C0H677 target sequence
LSSLYLRGQPKFSSIWRGLRDAWTHKRPKPRERASGVHLQRYVRATAGRWLPLCWPPLHGIMLGDTQYFGVVRDHKTYRRFSCLR

SEQ ID NO: 23347 - protein, 85 aa, unidentified
  REGION 1..85: note = Description of Unknown:hvTR_C0H677 target sequence
QAGRLYFIGLVSVYECVPDANTAPEIWVSGHGHAFAYLPGEDKVYVLGLSFGEFFENGLFAVYSFFERDYVDEIVEGAWFKHTFA

SEQ ID NO: 23348 - protein, 85 aa, unidentified
  REGION 1..85: note = Description of Unknown:hvTR_C0H677 target sequence
GMYELSQILHDRANLLRVCQLHAGSKIRLGGSPACTFTFGSWNVAEADEANNFVIGVLEQAHFVVIGWMEPVNKAVFMDAHGGIH

SEQ ID NO: 23349 - protein, 85 aa, unidentified
  REGION 1..85: note = Description of Unknown:cds_NC_024711.1_cds_YP_009052543.1_66 target sequence
AEEENVFVGTNCQSFDPSKVQCDKEGNMPIHILDKYCEENDTRYNIYPLTVIQAVFDGLTGTRLDRILAACNSVYLTWEGTFADT

SEQ ID NO: 23350 - protein, 85 aa, unidentified
  REGION 1..85: note = Description of Unknown:cds_NC_024711.1_cds_YP_009052543.1_66 target sequence
VNKLDKIYRRKGYIITYRDATNINWTQRYNSDDISDVAWTNPANWEGWSFDTVIKDLAEALEEIFTNIGDYKDFLDIITSFINDF

SEQ ID NO: 23351 - protein, 85 aa, unidentified
  REGION 1..85: note = Description of Unknown:cds_NC_024711.1_cds_YP_009052543.1_66 target sequence
VINVFNNINNYPKLVEIIKNSTVESLSIIIRDIFNNINEYPELKEIFNQYIKQWTESIFNNISSYPALNQFITNAINSHVETTIG

SEQ ID NO: 23352 - protein, 85 aa, unidentified
  REGION 1..85: note = Description of Unknown:cds_NC_024711.1_cds_YP_009052543.1_66 target sequence
NIFNNIDNYPAIKNLIVTNTVNKVVDIFKNIGQYPELQEAIQNNINERIDYIFNNINNYPELIGILSDLVCNCVKNIFANINNYP

SEQ ID NO: 23353 - protein, 85 aa, unidentified
  REGION 1..85: note = Description of Unknown:cds_NC_024711.1_cds_YP_009052543.1_66 target sequence
ALVTRINNAVNSRVDYIFNNIDRFPILKNLIETKVEARVTYIFEHINNFTELLNVIKGNIENIFDNIDNHPNLKVVIENKVESTV

SEQ ID NO: 23354 - protein, 85 aa, unidentified
  REGION 1..85: note = Description of Unknown:cds_NC_024711.1_cds_YP_009052543.1_66 target sequence
EHILSNIDNYPIIKEKIIQFCNEAIEAKRGVANGIASLDGDGKVPASQLPSYVDDVLEGYYVDETHFAEKYIEDAPVYYTPEKGK

SEQ ID NO: 23355 - protein, 85 aa, unidentified
  REGION 1..85: note = Description of Unknown:cds_NC_024711.1_cds_YP_009052543.1_66 target sequence
IYVDISESTDYSGKTYRWSGTKYSVISETLALGEVTGTAYDGGKGKKTTDIVNSLPKYIPSTQIKLFRSVNGNIVIGSHHYEFNN

SEQ ID NO: 23356 - protein, 85 aa, unidentified
  REGION 1..85: note = Description of Unknown:cds_NC_024711.1_cds_YP_009052543.1_66 target sequence
TTNVYESKPFNDGITFPIVSKTESGVMSAADKVKLDETLPNQITELSNNVYTKEEINNKFNNVPTVENTYTKAEVDKAIADAIKA

SEQ ID NO: 23357 - protein, 84 aa, unidentified
  REGION 1..84: note = Description of Unknown:cds_NC_024711.1_cds_YP_009052543.1_66 target sequence
PIVSKTESGVMSAADKVKLDETLPNQITELSNNVYTKEEINNKFNNVPTVENTYTKAEVDKAIADAIKALIPAGYEFVIKKKTT

SEQ ID NO: 23358 - protein, 85 aa, unidentified
  REGION 1..85: note = Description of Unknown:cds_NC_024711.1_cds_YP_009052543.1_66 target sequence
MPIHILDKYCEENDTRYNIYPLTVIQAVFDGLTGTRLDRILAACNSVYLTWEGTFADTVNKLDKIYRRKGYIITYRDATNINWTQ

SEQ ID NO: 23359 - protein, 85 aa, unidentified
  REGION 1..85: note = Description of Unknown:cds_NC_024711.1_cds_YP_009052543.1_66 target sequence
RYNSDDISDVAWTNPANWEGWSFDTVIKDLAEALEEIFTNIGDYKDFLDIITSFINDFVINVFNNINNYPKLVEIIKNSTVESLS

SEQ ID NO: 23360 - protein, 85 aa, unidentified
  REGION 1..85: note = Description of Unknown:cds_NC_024711.1_cds_YP_009052543.1_66 target sequence
IIIRDIFNNINEYPELKEIFNQYIKQWTESIFNNISSYPALNQFITNAINSHVETTIGNIFNNIDNYPAIKNLIVTNTVNKVVDI

SEQ ID NO: 23361 - protein, 85 aa, unidentified
  REGION 1..85: note = Description of Unknown:cds_NC_024711.1_cds_YP_009052543.1_66 target sequence
FKNIGQYPELQEAIQNNINERIDYIFNNINNYPELIGILSDLVCNCVKNIFANINNYPALVTRINNAVNSRVDYIFNNIDRFPIL

SEQ ID NO: 23362 - protein, 85 aa, unidentified
  REGION 1..85: note = Description of Unknown:cds_NC_024711.1_cds_YP_009052543.1_66 target sequence
KNLIETKVEARVTYIFEHINNFTELLNVIKGNIENIFDNIDNHPNLKVVIENKVESTVEHILSNIDNYPIIKEKIIQFCNEAIEA

SEQ ID NO: 23363 - protein, 85 aa, unidentified
  REGION 1..85: note = Description of Unknown:cds_NC_024711.1_cds_YP_009052543.1_66 target sequence
KRGVANGIASLDGDGKVPASQLPSYVDDVLEGYYVDETHFAEKYIEDAPVYYTPEKGKIYVDISESTDYSGKTYRWSGTKYSVIS

SEQ ID NO: 23364 - protein, 85 aa, unidentified
  REGION 1..85: note = Description of Unknown:cds_NC_024711.1_cds_YP_009052543.1_66 target sequence
ETLALGEVTGTAYDGGKGKKTTDIVNSLPKYIPSTQIKLFRSVNGNIVIGSHHYEFNNTTNVYESKPFNDGITFPIVSKTESGVM

SEQ ID NO: 23365 - protein, 85 aa, unidentified
  REGION 1..85: note = Description of Unknown:hvTR_P27588.1 target sequence
DLHSLLELGTKPTAPHVRNKKVILFDTNHQVSICNQIIDAINSGIDLGDLLEGGLLTLCVEHYYNSDKDKFNTSPVAKYLRDAGY

SEQ ID NO: 23366 - protein, 85 aa, unidentified
  REGION 1..85: note = Description of Unknown:hvTR_P27588.1 target sequence
EFDVIKNADATRFLDVSPNEPHYSPLILALKTLESTESQRGRIGLFLSFCSLFLPKLVVGDRASIEKALRQVTVHQEQGIVTYPN

SEQ ID NO: 23367 - protein, 85 aa, unidentified
  REGION 1..85: note = Description of Unknown:hvTR_P27588.1 target sequence
HWLTTGHMKVIFGILRSSFILKFVLIHQGVNLVTGHDAYDSIISNSVGQTRFSGLLIVKTVLEFILQKTDSGVTLHPLVRTSKVK

SEQ ID NO: 23368 - protein, 85 aa, unidentified
  REGION 1..85: note = Description of Unknown:hvTR_P27588.1 target sequence
NEVASFKQALSNLARHGEYAPFARVLNLSGINNLEHGLYPQLSAIALGVATAHGSTLAGVNVGEQYQQLREAAHDAEVKLQRRHE

SEQ ID NO: 23369 - protein, 85 aa, unidentified
  REGION 1..85: note = Description of Unknown:hvTR_P27588.1 target sequence
HQEIQAIAEDDEERKILEQFHLQKTEITHSQTLAVLSQKREKLARLAAEIENNIVEDQGFKQSQNRVSQSFLNDPTPVEVTVQAR

SEQ ID NO: 23370 - protein, 85 aa, unidentified
  REGION 1..85: note = Description of Unknown:hvTR_P27588.1 target sequence
PMNRPTALPPPVDDKIEHESTEDSSSSSSFVDLNDPFALLNEDEDTLDDSVMIPGTTSREFQGIPEPPRQSQDLNNSQGKQEDES

SEQ ID NO: 23371 - protein, 85 aa, unidentified
  REGION 1..85: note = Description of Unknown:hvTR_P27588.1 target sequence
TNRIKKQFLRYQELPPVQEDDESEYTTDSQESIDQPGSDNEQGVDLPPPPLYAQEKRQDPIQHPAANPQDPFGSIGDVNGDILEP

SEQ ID NO: 23372 - protein, 85 aa, unidentified
  REGION 1..85: note = Description of Unknown:hvTR_P27588.1 target sequence
IRSPSSPSAPQEDTRMREAYELSPDFTNDEDNQQNWPQRVVTKKGRTFLYPNDLLQTNPPESLITALVEEYQNPVSAKELQADWP

SEQ ID NO: 23373 - protein, 84 aa, unidentified
  REGION 1..84: note = Description of Unknown:hvTR_P27588.1 target sequence
MREAYELSPDFTNDEDNQQNWPQRVVTKKGRTFLYPNDLLQTNPPESLITALVEEYQNPVSAKELQADWPDMSFDERRHVAMNL

SEQ ID NO: 23374 - protein, 85 aa, unidentified
  REGION 1..85: note = Description of Unknown:hvTR_P27588.1 target sequence
NHQVSICNQIIDAINSGIDLGDLLEGGLLTLCVEHYYNSDKDKFNTSPVAKYLRDAGYEFDVIKNADATRFLDVSPNEPHYSPLI

SEQ ID NO: 23375 - protein, 85 aa, unidentified
  REGION 1..85: note = Description of Unknown:hvTR_P27588.1 target sequence
LALKTLESTESQRGRIGLFLSFCSLFLPKLVVGDRASIEKALRQVTVHQEQGIVTYPNHWLTTGHMKVIFGILRSSFILKFVLIH

SEQ ID NO: 23376 - protein, 85 aa, unidentified
  REGION 1..85: note = Description of Unknown:hvTR_P27588.1 target sequence
QGVNLVTGHDAYDSIISNSVGQTRFSGLLIVKTVLEFILQKTDSGVTLHPLVRTSKVKNEVASFKQALSNLARHGEYAPFARVLN

SEQ ID NO: 23377 - protein, 85 aa, unidentified
  REGION 1..85: note = Description of Unknown:hvTR_P27588.1 target sequence
LSGINNLEHGLYPQLSAIALGVATAHGSTLAGVNVGEQYQQLREAAHDAEVKLQRRHEHQEIQAIAEDDEERKILEQFHLQKTEI

SEQ ID NO: 23378 - protein, 85 aa, unidentified
  REGION 1..85: note = Description of Unknown:hvTR_P27588.1 target sequence
THSQTLAVLSQKREKLARLAAEIENNIVEDQGFKQSQNRVSQSFLNDPTPVEVTVQARPMNRPTALPPPVDDKIEHESTEDSSSS

SEQ ID NO: 23379 - protein, 85 aa, unidentified
  REGION 1..85: note = Description of Unknown:hvTR_P27588.1 target sequence
SSFVDLNDPFALLNEDEDTLDDSVMIPGTTSREFQGIPEPPRQSQDLNNSQGKQEDESTNRIKKQFLRYQELPPVQEDDESEYTT

SEQ ID NO: 23380 - protein, 85 aa, unidentified
  REGION 1..85: note = Description of Unknown:hvTR_P27588.1 target sequence
DSQESIDQPGSDNEQGVDLPPPPLYAQEKRQDPIQHPAANPQDPFGSIGDVNGDILEPIRSPSSPSAPQEDTRMREAYELSPDFT

SEQ ID NO: 23381 - protein, 85 aa, unidentified
  REGION 1..85: note = Description of Unknown:hvTR_C7B276 target sequence
DLHSLLELGTKPTAPHVRNKKVILFDTNHQVSICNQIIDAINSGIDLGDLLEGGLLTLCVEHYYNSDKDKFNTSPIAKYLRDAGY

SEQ ID NO: 23382 - protein, 85 aa, unidentified
  REGION 1..85: note = Description of Unknown:hvTR_C7B276 target sequence
EFDVIKNADATRFLDVIPNEPHYSPLILALKTLESTESQRGRIGLFLSFCSLFLPKLVVGDRASIEKALRQVTVHQEQGIVTYPN

SEQ ID NO: 23383 - protein, 85 aa, unidentified; identical to SEQ ID NO: 23367
  REGION 1..85: note = Description of Unknown:hvTR_C7B276 target sequence

SEQ ID NO: 23384 - protein, 85 aa, unidentified; identical to SEQ ID NO: 23368
  REGION 1..85: note = Description of Unknown:hvTR_C7B276 target sequence

SEQ ID NO: 23385 - protein, 85 aa, unidentified; identical to SEQ ID NO: 23369
  REGION 1..85: note = Description of Unknown:hvTR_C7B276 target sequence

SEQ ID NO: 23386 - protein, 85 aa, unidentified
  REGION 1..85: note = Description of Unknown:hvTR_C7B276 target sequence
PVNRPTALPPPVDDKIEHESTGDSSSSSSFVDLNDPFALLNEDEDTLDDSVMIPSTTSREFQGIPESPGQSQDLDNSQGKQEDES

SEQ ID NO: 23387 - protein, 85 aa, unidentified
  REGION 1..85: note = Description of Unknown:hvTR_C7B276 target sequence
TNPIKKQFLRYQELPPVQEDDESEYTTDSQESIDQPGSDNEQGVDLPPPPLYAQEKRQDPIQHPAASSQDPFGSIGDVNGDILEP

SEQ ID NO: 23388 - protein, 85 aa, unidentified
  REGION 1..85: note = Description of Unknown:hvTR_C7B276 target sequence
IRSPSSPSAPQEDTRAREAYELSPDFTNYEDNQQNWPQRVVTKKGRTFLYPNDLLQTSPPESLVTALVEEYQNPVSAKELQADWP

SEQ ID NO: 23389 - protein, 84 aa, unidentified
  REGION 1..84: note = Description of Unknown:hvTR_C7B276 target sequence
AREAYELSPDFTNYEDNQQNWPQRVVTKKGRTFLYPNDLLQTSPPESLVTALVEEYQNPVSAKELQADWPDMSFDERRHVAMNL

SEQ ID NO: 23390 - protein, 85 aa, unidentified
  REGION 1..85: note = Description of Unknown:hvTR_C7B276 target sequence
NHQVSICNQIIDAINSGIDLGDLLEGGLLTLCVEHYYNSDKDKFNTSPIAKYLRDAGYEFDVIKNADATRFLDVIPNEPHYSPLI

SEQ ID NO: 23391 - protein, 85 aa, unidentified; identical to SEQ ID NO: 23375
  REGION 1..85: note = Description of Unknown:hvTR_C7B276 target sequence

SEQ ID NO: 23392 - protein, 85 aa, unidentified; identical to SEQ ID NO: 23376
  REGION 1..85: note = Description of Unknown:hvTR_C7B276 target sequence

SEQ ID NO: 23393 - protein, 85 aa, unidentified; identical to SEQ ID NO: 23377
  REGION 1..85: note = Description of Unknown:hvTR_C7B276 target sequence

SEQ ID NO: 23394 - protein, 85 aa, unidentified
  REGION 1..85: note = Description of Unknown:hvTR_C7B276 target sequence
THSQTLAVLSQKREKLARLAAEIENNIVEDQGFKQSQNRVSQSFLNDPTPVEVTVQARPVNRPTALPPPVDDKIEHESTGDSSSS

SEQ ID NO: 23395 - protein, 85 aa, unidentified
  REGION 1..85: note = Description of Unknown:hvTR_C7B276 target sequence
SSFVDLNDPFALLNEDEDTLDDSVMIPSTTSREFQGIPESPGQSQDLDNSQGKQEDESTNPIKKQFLRYQELPPVQEDDESEYTT

SEQ ID NO: 23396 - protein, 85 aa, unidentified
  REGION 1..85: note = Description of Unknown:hvTR_C7B276 target sequence
DSQESIDQPGSDNEQGVDLPPPPLYAQEKRQDPIQHPAASSQDPFGSIGDVNGDILEPIRSPSSPSAPQEDTRAREAYELSPDFT

SEQ ID NO: 23397 - protein, 85 aa, unidentified
  REGION 1..85: note = Description of Unknown:hvTR_P03071.1 target sequence
DKVLNREESMELMDLLGLERAAWGNLPLMRKAYLRKCKEFHPDKGGDEDKMKRMNTLYKKMEQDVKVAHQPDFGTWSSSEVPTYG

SEQ ID NO: 23398 - protein, 85 aa, unidentified
  REGION 1..85: note = Description of Unknown:hvTR_P03071.1 target sequence
TEEWESWWSSFNEKWDEDLFCHEDMFASDEEATADSQHSTPPKKKRKVEDPKDFPSDLHQFLSQAVFSNRTLACFAVYTTKEKAQ

SEQ ID NO: 23399 - protein, 85 aa, unidentified
  REGION 1..85: note = Description of Unknown:hvTR_P03071.1 target sequence
ILYKKLMEKYSVTFISRHMCAGHNIIFFLTPHRHRVSAINNFCQKLCTFSFLICKGVNKEYLLYSALTRDPYHTIEESIQGGLKE

SEQ ID NO: 23400 - protein, 85 aa, unidentified
  REGION 1..85: note = Description of Unknown:hvTR_P03071.1 target sequence
HDFSPEEPEETKQVSWKLITEYAVETKCEDVFLLLGMYLEFQYNVEECKKCQKKDQPYHFKYHEKHFANAIIFAESKNQKSICQQ

SEQ ID NO: 23401 - protein, 85 aa, unidentified
  REGION 1..85: note = Description of Unknown:hvTR_P03071.1 target sequence
AVDTVLAKKRVDTLHMTREEMLTERFNHILDKMDLIFGAHGNAVLEQYMAGVAWLHCLLPKMDSVIFDFLHCIVFNVPKRRYWLF

SEQ ID NO: 23402 - protein, 85 aa, unidentified
  REGION 1..85: note = Description of Unknown:hvTR_P03071.1 target sequence
KGPIDSGKTTLAAGLLDLCGGKALNVNLPMERLTFELGVAIDQYMVVFEDVKGTGAESKDLPSGHGINNLDSLRDYLDGSVKVNL

SEQ ID NO: 23403 - protein, 85 aa, unidentified
  REGION 1..85: note = Description of Unknown:hvTR_P03071.1 target sequence
EKKHLNKRTQIFPPGLVTMNEYPVPKTLQARFVRQIDFRPKIYLRKSLQNSEFLLEKRILQSGMTLLLLLIWFRPVADFATDIQS

SEQ ID NO: 23404 - protein, 85 aa, unidentified
  REGION 1..85: note = Description of Unknown:hvTR_P03071.1 target sequence
RIVEWKERLDSEISMYTFSRMKYNICMGKCILDITREEDSETEDSGHGSSTESQSQCSSQVSDTSAPAEDSQRSDPHSQELHLCK

SEQ ID NO: 23405 - protein, 84 aa, unidentified
  REGION 1..84: note = Description of Unknown:hvTR_P03071.1 target sequence
YTFSRMKYNICMGKCILDITREEDSETEDSGHGSSTESQSQCSSQVSDTSAPAEDSQRSDPHSQELHLCKGFQCFKRPKTPPPK

SEQ ID NO: 23406 - protein, 85 aa, unidentified
  REGION 1..85: note = Description of Unknown:hvTR_P03071.1 target sequence
LMRKAYLRKCKEFHPDKGGDEDKMKRMNTLYKKMEQDVKVAHQPDFGTWSSSEVPTYGTEEWESWWSSFNEKWDEDLFCHEDMFA

SEQ ID NO: 23407 - protein, 85 aa, unidentified
  REGION 1..85: note = Description of Unknown:hvTR_P03071.1 target sequence
SDEEATADSQHSTPPKKKRKVEDPKDFPSDLHQFLSQAVFSNRTLACFAVYTTKEKAQILYKKLMEKYSVTFISRHMCAGHNIIF

SEQ ID NO: 23408 - protein, 85 aa, unidentified
  REGION 1..85: note = Description of Unknown:hvTR_P03071.1 target sequence
FLTPHRHRVSAINNFCQKLCTFSFLICKGVNKEYLLYSALTRDPYHTIEESIQGGLKEHDFSPEEPEETKQVSWKLITEYAVETK

SEQ ID NO: 23409 - protein, 85 aa, unidentified
  REGION 1..85: note = Description of Unknown:hvTR_P03071.1 target sequence
CEDVFLLLGMYLEFQYNVEECKKCQKKDQPYHFKYHEKHFANAIIFAESKNQKSICQQAVDTVLAKKRVDTLHMTREEMLTERFN

SEQ ID NO: 23410 - protein, 85 aa, unidentified
  REGION 1..85: note = Description of Unknown:hvTR_P03071.1 target sequence
HILDKMDLIFGAHGNAVLEQYMAGVAWLHCLLPKMDSVIFDFLHCIVFNVPKRRYWLFKGPIDSGKTTLAAGLLDLCGGKALNVN

SEQ ID NO: 23411 - protein, 85 aa, unidentified
  REGION 1..85: note = Description of Unknown:hvTR_P03071.1 target sequence
LPMERLTFELGVAIDQYMVVFEDVKGTGAESKDLPSGHGINNLDSLRDYLDGSVKVNLEKKHLNKRTQIFPPGLVTMNEYPVPKT

SEQ ID NO: 23412 - protein, 85 aa, unidentified
  REGION 1..85: note = Description of Unknown:hvTR_P03071.1 target sequence
LQARFVRQIDFRPKIYLRKSLQNSEFLLEKRILQSGMTLLLLLIWFRPVADFATDIQSRIVEWKERLDSEISMYTFSRMKYNICM

SEQ ID NO: 23413 - protein, 85 aa, unidentified; identical to SEQ ID NO: 23381
  REGION 1..85: note = Description of Unknown:cds_NC_001608.3_cds_YP_001531153.1_1 target sequence

SEQ ID NO: 23414 - protein, 85 aa, unidentified; identical to SEQ ID NO: 23382
  REGION 1..85: note = Description of Unknown:cds_NC_001608.3_cds_YP_001531153.1_1 target sequence

SEQ ID NO: 23415 - protein, 85 aa, unidentified; identical to SEQ ID NO: 23370
  REGION 1..85: note = Description of Unknown:cds_NC_001608.3_cds_YP_001531153.1_1 target sequence

SEQ ID NO: 23416 - protein, 85 aa, unidentified
  REGION 1..85: note = Description of Unknown:cds_NC_001608.3_cds_YP_001531153.1_1 target sequence
TNPIKKQFLRYQELPPVQEDDESEYTTDSQESIDQPGSDNEQGVDLPPPPLYAQEKRQDPIQHPAANPQDPFGSIGDVNGDILEP

SEQ ID NO: 23417 - protein, 85 aa, unidentified; identical to SEQ ID NO: 23390
  REGION 1..85: note = Description of Unknown:cds_NC_001608.3_cds_YP_001531153.1_1 target sequence

SEQ ID NO: 23418 - protein, 85 aa, unidentified; identical to SEQ ID NO: 23378
  REGION 1..85: note = Description of Unknown:cds_NC_001608.3_cds_YP_001531153.1_1 target sequence

SEQ ID NO: 23419 - protein, 85 aa, unidentified
  REGION 1..85: note = Description of Unknown:cds_NC_001608.3_cds_YP_001531153.1_1 target sequence
SSFVDLNDPFALLNEDEDTLDDSVMIPGTTSREFQGIPEPPRQSQDLNNSQGKQEDESTNPIKKQFLRYQELPPVQEDDESEYTT

SEQ ID NO: 23420 - protein, 85 aa, unidentified
  REGION 1..85: note = Description of Unknown:hvTR_P03071.2 target sequence
DKVLNREESMELMDLLGLERAAWGNLPLMRKALRKCKEFHPDKGGDEDKMKRMNTLYKKMEQDVKVAHQPDFGTWSSSEVPTYGT

SEQ ID NO: 23421 - protein, 85 aa, unidentified
  REGION 1..85: note = Description of Unknown:hvTR_P03071.2 target sequence
EEWESWWSSFNEKWDEDLFCHEDMFASDEEATADSQHSTPPKKKRKVEDPKDFPSDLHQFLSQAVFSNRTLACFAVYTTKEKAQI

SEQ ID NO: 23422 - protein, 85 aa, unidentified
  REGION 1..85: note = Description of Unknown:hvTR_P03071.2 target sequence
LYKKLMEKYSVTFISRHMCAGHNIIFFLTPHRHRVSAINNFCQKLCTFSFLICKGVNKEYLLYSALTRDPYHTIEESIQGGLKEH

SEQ ID NO: 23423 - protein, 85 aa, unidentified
  REGION 1..85: note = Description of Unknown:hvTR_P03071.2 target sequence
DFNPEEPEETKQVSWKLITEYAVETKCEDVFLLLGMYLEFQYNVEECKKCQKKDQPYHFKYHEKHFANAIIFAESKNKKVICQQA

SEQ ID NO: 23424 - protein, 85 aa, unidentified
  REGION 1..85: note = Description of Unknown:hvTR_P03071.2 target sequence
VDTVLAKKRVDTLHMTREEMLTERFNHILDKMDLIFGAHGNAVLEQYMAGVAWLHCLLPKMDSVIFDFLHCIVFNVPKRRYWLFK

SEQ ID NO: 23425 - protein, 85 aa, unidentified
  REGION 1..85: note = Description of Unknown:hvTR_P03071.2 target sequence
GPIDSGKTTLAAGLLDLCRGKALNVNLPMERLTFELGVAIDQYMVVFEDVKGTGAESKDLPSGHGINNLDSLRDYLDGSVKVNLE

SEQ ID NO: 23426 - protein, 85 aa, unidentified
  REGION 1..85: note = Description of Unknown:hvTR_P03071.2 target sequence
KKHLNKRTQIFPPGLVTMNEYPVPKTLQARFVRQIDFRPKIYLRKSLQNSEFLLEKRILQSGMTLLLLLIWFRPVADFATDIQSR

SEQ ID NO: 23427 - protein, 85 aa, unidentified
  REGION 1..85: note = Description of Unknown:hvTR_P03071.2 target sequence
IVEWKERLDSEISMYTFSRMKYNICMGKCILDITREEDSETEDSGHGSSTESQSQCSSQVSDTSAPAEDSQRSDPHSQELHLCKG

SEQ ID NO: 23428 - protein, 85 aa, unidentified
  REGION 1..85: note = Description of Unknown:hvTR_P03071.2 target sequence
LMRKALRKCKEFHPDKGGDEDKMKRMNTLYKKMEQDVKVAHQPDFGTWSSSEVPTYGTEEWESWWSSFNEKWDEDLFCHEDMFAS

SEQ ID NO: 23429 - protein, 85 aa, unidentified
  REGION 1..85: note = Description of Unknown:hvTR_P03071.2 target sequence
DEEATADSQHSTPPKKKRKVEDPKDFPSDLHQFLSQAVFSNRTLACFAVYTTKEKAQILYKKLMEKYSVTFISRHMCAGHNIIFF

SEQ ID NO: 23430 - protein, 85 aa, unidentified
  REGION 1..85: note = Description of Unknown:hvTR_P03071.2 target sequence
LTPHRHRVSAINNFCQKLCTFSFLICKGVNKEYLLYSALTRDPYHTIEESIQGGLKEHDFNPEEPEETKQVSWKLITEYAVETKC

SEQ ID NO: 23431 - protein, 85 aa, unidentified
  REGION 1..85: note = Description of Unknown:hvTR_P03071.2 target sequence
EDVFLLLGMYLEFQYNVEECKKCQKKDQPYHFKYHEKHFANAIIFAESKNKKVICQQAVDTVLAKKRVDTLHMTREEMLTERFNH

SEQ ID NO: 23432 - protein, 85 aa, unidentified
  REGION 1..85: note = Description of Unknown:hvTR_P03071.2 target sequence
ILDKMDLIFGAHGNAVLEQYMAGVAWLHCLLPKMDSVIFDFLHCIVFNVPKRRYWLFKGPIDSGKTTLAAGLLDLCRGKALNVNL

SEQ ID NO: 23433 - protein, 85 aa, unidentified
  REGION 1..85: note = Description of Unknown:hvTR_P03071.2 target sequence
PMERLTFELGVAIDQYMVVFEDVKGTGAESKDLPSGHGINNLDSLRDYLDGSVKVNLEKKHLNKRTQIFPPGLVTMNEYPVPKTL

SEQ ID NO: 23434 - protein, 85 aa, unidentified
  REGION 1..85: note = Description of Unknown:hvTR_P03071.2 target sequence
QARFVRQIDFRPKIYLRKSLQNSEFLLEKRILQSGMTLLLLLIWFRPVADFATDIQSRIVEWKERLDSEISMYTFSRMKYNICMG

SEQ ID NO: 23435 - protein, 84 aa, unidentified
  REGION 1..84: note = Description of Unknown:hvTR_P27588.2 target sequence
DTRMREAYELSPDFTNDEDNQQNWPQRVVTKKGRTFLYPNDLLQTNPPESLITALVEEYQNPVSAKELQADWPDMSFDEGDMLR

SEQ ID NO: 23436 - protein, 85 aa, unidentified
  REGION 1..85: note = Description of Unknown:hvTR_F5HCV3 target sequence
AQDDKGKKLRRSCVESFVGLSDELKAQLYQCVLLINDAYETIYDPSDLNRVVEDVCIRIMKECSKLGALCGLFTDINMFNLFCFF

SEQ ID NO: 23437 - protein, 85 aa, unidentified
  REGION 1..85: note = Description of Unknown:hvTR_F5HCV3 target sequence
RASRMRTKGAAGYNVPCAEASQGIIRILTERILFCTEKAFLTAACSGVSLPPAICKLLHEIYTEMKAKCLGAWRRLVCNRRPIMI

SEQ ID NO: 23438 - protein, 85 aa, unidentified
  REGION 1..85: note = Description of Unknown:hvTR_F5HCV3 target sequence
LTSSLLKLYNTYDTAGLLSEQSRALCLLVFQPVYLPRIMAPLEIMTKGQLAPENFYSITGSAEKRRPITTGKVTGLSYPGSGLMP

SEQ ID NO: 23439 - protein, 85 aa, unidentified
  REGION 1..85: note = Description of Unknown:hvTR_F5HCV3 target sequence
ESLILPILEPGLLPASMVDLSDVLAKPAVILSAPALSQFVISKPHPNMPHTVSIIPFNPSGTDPAFISTWQAASQNMVYNTSTAP

SEQ ID NO: 23440 - protein, 85 aa, unidentified
  REGION 1..85: note = Description of Unknown:hvTR_F5HCV3 target sequence
LKPATGSSQTVSVKAVAQGAVITATTVPQAMPARGTGGELPVMSASTPARDQVAACFVAENTGDSPDNPSSFLTSCHPCDPNTVI

SEQ ID NO: 23441 - protein, 85 aa, unidentified
  REGION 1..85: note = Description of Unknown:hvTR_F5HCV3 target sequence
VAQQFQPPQCVTLLQVTCAPSSTPPPDSTVRAPVVQLPTVVPLPASAFLPALAQPEASGEELPGGHDGDQGVPCRDSTAAATAAE

SEQ ID NO: 23442 - protein, 85 aa, unidentified
  REGION 1..85: note = Description of Unknown:hvTR_F5HCV3 target sequence
ATTPKRKQRSKERSSKKRKALTVPEADTTPSTTTPGTSLGSITTPQDVHATDVATSEGPSEAQPPLLSLPPPLDVDQSLFALLDE

SEQ ID NO: 23443 - protein, 85 aa, unidentified
  REGION 1..85: note = Description of Unknown:hvTR_F5HCV3 target sequence
AGPETWDVGSPLSPTDDALLSSILQGLYQLDTPPPLRSPSPASFGPESPADIPSPSGGEYTQLQPVRATSATPANEVQESGTLYQ

SEQ ID NO: 23444 - protein, 84 aa, unidentified
  REGION 1..84: note = Description of Unknown:hvTR_F5HCV3 target sequence
LSPTDDALLSSILQGLYQLDTPPPLRSPSPASFGPESPADIPSPSGGEYTQLQPVRATSATPANEVQESGTLYQLHQWRNYFRD

SEQ ID NO: 23445 - protein, 85 aa, unidentified
  REGION 1..85: note = Description of Unknown:hvTR_F5HCV3 target sequence
LYQCVLLINDAYETIYDPSDLNRVVEDVCIRIMKECSKLGALCGLFTDINMFNLFCFFRASRMRTKGAAGYNVPCAEASQGIIRI

SEQ ID NO: 23446 - protein, 85 aa, unidentified
  REGION 1..85: note = Description of Unknown:hvTR_F5HCV3 target sequence
LTERILFCTEKAFLTAACSGVSLPPAICKLLHEIYTEMKAKCLGAWRRLVCNRRPIMILTSSLLKLYNTYDTAGLLSEQSRALCL

SEQ ID NO: 23447 - protein, 85 aa, unidentified
  REGION 1..85: note = Description of Unknown:hvTR_F5HCV3 target sequence
LVFQPVYLPRIMAPLEIMTKGQLAPENFYSITGSAEKRRPITTGKVTGLSYPGSGLMPESLILPILEPGLLPASMVDLSDVLAKP

SEQ ID NO: 23448 - protein, 85 aa, unidentified
  REGION 1..85: note = Description of Unknown:hvTR_F5HCV3 target sequence
AVILSAPALSQFVISKPHPNMPHTVSIIPFNPSGTDPAFISTWQAASQNMVYNTSTAPLKPATGSSQTVSVKAVAQGAVITATTV

SEQ ID NO: 23449 - protein, 85 aa, unidentified
  REGION 1..85: note = Description of Unknown:hvTR_F5HCV3 target sequence
PQAMPARGTGGELPVMSASTPARDQVAACFVAENTGDSPDNPSSFLTSCHPCDPNTVIVAQQFQPPQCVTLLQVTCAPSSTPPPD

SEQ ID NO: 23450 - protein, 85 aa, unidentified
  REGION 1..85: note = Description of Unknown:hvTR_F5HCV3 target sequence
STVRAPVVQLPTVVPLPASAFLPALAQPEASGEELPGGHDGDQGVPCRDSTAAATAAEATTPKRKQRSKERSSKKRKALTVPEAD

SEQ ID NO: 23451 - protein, 85 aa, unidentified
  REGION 1..85: note = Description of Unknown:hvTR_F5HCV3 target sequence
TTPSTTTPGTSLGSITTPQDVHATDVATSEGPSEAQPPLLSLPPPLDVDQSLFALLDEAGPETWDVGSPLSPTDDALLSSILQGL

SEQ ID NO: 23452 - protein, 85 aa, unidentified
  REGION 1..85: note = Description of Unknown:cds_NC_035460.1_cds_YP_009407995.1_44 target sequence
LMYPKHVRKALKSLIKHKLCIDKVSIKHARILLEFGLHGSLPSSLYNEAISVDVYNVRFLPPNEVKVKDIIIALQHSQIIDSRLC

SEQ ID NO: 23453 - protein, 85 aa, unidentified
  REGION 1..85: note = Description of Unknown:cds_NC_035460.1_cds_YP_009407995.1_44 target sequence
NAVLMHRKELLTSGLRVVKLMLESNLLTSDDIKWILKEKLAPVAYMLKIEPKIAASYMKLSKDELVDVLTSISQDMWEYLYDKID

SEQ ID NO: 23454 - protein, 85 aa, unidentified
  REGION 1..85: note = Description of Unknown:cds_NC_035460.1_cds_YP_009407995.1_44 target sequence
LDLDSVLYASNMFNAPPLHKSLLKLTSESVAIDLVKKYPFKNVISFINAKIKVSDNFIVEMHNLVKQHFPKLLHFINDVLLLSCS

SEQ ID NO: 23455 - protein, 85 aa, unidentified
  REGION 1..85: note = Description of Unknown:cds_NC_035460.1_cds_YP_009407995.1_44 target sequence
RENLIKEYGIKCTAMFSMVIPINLSTLTEEEELFIEENISFYDINCRNFALNFRTKIMETKNKVITMKSGDVALIRSVSSRASIK

SEQ ID NO: 23456 - protein, 85 aa, unidentified
  REGION 1..85: note = Description of Unknown:cds_NC_035460.1_cds_YP_009407995.1_44 target sequence
SLKYKTSIRRRTTKVINVKNTIEDILMHIDTSKKRQKVKQSDVEKILSVFRLDPCAVRNVLLSTANTKTKIMALNIIKNWKSHSL

SEQ ID NO: 23457 - protein, 85 aa, unidentified
  REGION 1..85: note = Description of Unknown:cds_NC_035460.1_cds_YP_009407995.1_44 target sequence
SLTSTFTNFGGLINMDMLDTISTKILYNYKNLFTKITNYTITDISKCNCEKCDDVVYKTLRSKNISIDAETTDDELMMCLFDLIR

SEQ ID NO: 23458 - protein, 85 aa, unidentified
  REGION 1..85: note = Description of Unknown:cds_NC_035460.1_cds_YP_009407995.1_44 target sequence
LAIHGQINPNLIGIAGWGPLINLLIGQKIINIDIKKIVENEIVLIEQNIMLSGNELVDSLISIADSPAYIMSDTIFTNQLNDTHT

SEQ ID NO: 23459 - protein, 85 aa, unidentified
  REGION 1..85: note = Description of Unknown:cds_NC_035460.1_cds_YP_009407995.1_44 target sequence
KVILFFNILIEYMLSFAILRVDVLQQTTNIREFMFKIVNTVLEAAGIYFCQMRISEYIEDELYDLIEKSTTPSHLTHLMLRVILI

SEQ ID NO: 23460 - protein, 84 aa, unidentified
  REGION 1..84: note = Description of Unknown:cds_NC_035460.1_cds_YP_009407995.1_44 target sequence
YMLSFAILRVDVLQQTTNIREFMFKIVNTVLEAAGIYFCQMRISEYIEDELYDLIEKSTTPSHLTHLMLRVILIILEDINDRTC

SEQ ID NO: 23461 - protein, 85 aa, unidentified
  REGION 1..85: note = Description of Unknown:cds_NC_035460.1_cds_YP_009407995.1_44 target sequence
HARILLEFGLHGSLPSSLYNEAISVDVYNVRFLPPNEVKVKDIIIALQHSQIIDSRLCNAVLMHRKELLTSGLRVVKLMLESNLL

SEQ ID NO: 23462 - protein, 85 aa, unidentified
  REGION 1..85: note = Description of Unknown:cds_NC_035460.1_cds_YP_009407995.1_44 target sequence
TSDDIKWILKEKLAPVAYMLKIEPKIAASYMKLSKDELVDVLTSISQDMWEYLYDKIDLDLDSVLYASNMFNAPPLHKSLLKLTS

SEQ ID NO: 23463 - protein, 85 aa, unidentified
  REGION 1..85: note = Description of Unknown:cds_NC_035460.1_cds_YP_009407995.1_44 target sequence
ESVAIDLVKKYPFKNVISFINAKIKVSDNFIVEMHNLVKQHFPKLLHFINDVLLLSCSRENLIKEYGIKCTAMFSMVIPINLSTL

SEQ ID NO: 23464 - protein, 85 aa, unidentified
  REGION 1..85: note = Description of Unknown:cds_NC_035460.1_cds_YP_009407995.1_44 target sequence
TEEEELFIEENISFYDINCRNFALNFRTKIMETKNKVITMKSGDVALIRSVSSRASIKSLKYKTSIRRRTTKVINVKNTIEDILM

SEQ ID NO: 23465 - protein, 85 aa, unidentified
  REGION 1..85: note = Description of Unknown:cds_NC_035460.1_cds_YP_009407995.1_44 target sequence
HIDTSKKRQKVKQSDVEKILSVFRLDPCAVRNVLLSTANTKTKIMALNIIKNWKSHSLSLTSTFTNFGGLINMDMLDTISTKILY

SEQ ID NO: 23466 - protein, 85 aa, unidentified
  REGION 1..85: note = Description of Unknown:cds_NC_035460.1_cds_YP_009407995.1_44 target sequence
NYKNLFTKITNYTITDISKCNCEKCDDVVYKTLRSKNISIDAETTDDELMMCLFDLIRLAIHGQINPNLIGIAGWGPLINLLIGQ

SEQ ID NO: 23467 - protein, 85 aa, unidentified
  REGION 1..85: note = Description of Unknown:cds_NC_035460.1_cds_YP_009407995.1_44 target sequence
KIINIDIKKIVENEIVLIEQNIMLSGNELVDSLISIADSPAYIMSDTIFTNQLNDTHTKVILFFNILIEYMLSFAILRVDVLQQT

SEQ ID NO: 23468 - protein, 85 aa, unidentified
  REGION 1..85: note = Description of Unknown:hvTR_P03072 target sequence
DKVLNREESMELMDLLGLDRSAWGNIPVMRKAYLKKCKELHPDKGGDEDKMKRMNFLYKKMEQGVKVAHQPDFGTWNSSEVPTYG

SEQ ID NO: 23469 - protein, 85 aa, unidentified
  REGION 1..85: note = Description of Unknown:hvTR_P03072 target sequence
TDEWESWWNTFNEKWDEDLFCHEEMFASDDENTGSQHSTPPKKKKKVEDPKDFPVDLHAFLSQAVFSNRTVASFAVYTTKEKAQI

SEQ ID NO: 23470 - protein, 85 aa, unidentified
  REGION 1..85: note = Description of Unknown:hvTR_P03072 target sequence
LYKKLMEKYSVTFISRHGFGGHNILFFLTPHRHRVSAINNYCQKLCTFSFLICKGVNKEYLFYSALCRQPYAVVEESIQGGLKEH

SEQ ID NO: 23471 - protein, 85 aa, unidentified
  REGION 1..85: note = Description of Unknown:hvTR_P03072 target sequence
DFNPEEPEETKQVSWKLVTQYALETKCEDVFLLMGMYLDFQENPQQCKKCEKKDQPNHFNHHEKHYYNAQIFADSKNQKSICQQA

SEQ ID NO: 23472 - protein, 85 aa, unidentified
  REGION 1..85: note = Description of Unknown:hvTR_P03072 target sequence
VDTVAAKQRVDSIHMTREEMLVERFNFLLDKMDLIFGAHGNAVLEQYMAGVAWIHCLLPQMDTVIYDFLKCIVLNIPKKRYWLFK

SEQ ID NO: 23473 - protein, 85 aa, unidentified
  REGION 1..85: note = Description of Unknown:hvTR_P03072 target sequence
GPIDSGKTTLAAALLDLCGGKSLNVNMPLERLNFELGVGIDQFMVVFEDVKGTGAESRDLPSGHGISNLDCLRDYLDGSVKVNLE

SEQ ID NO: 23474 - protein, 85 aa, unidentified
  REGION 1..85: note = Description of Unknown:hvTR_P03072 target sequence
RKHQNKRTQVFPPGIVTMNEYSVPRTLQARFVRQIDFRPKAYLRKSLSCSEYLLEKRILQSGMTLLLLLIWFRPVADFAAAIHER

SEQ ID NO: 23475 - protein, 85 aa, unidentified
  REGION 1..85: note = Description of Unknown:hvTR_P03072 target sequence
IVQWKERLDLEISMYTFSTMKANVGMGRPILDFPREEDSEAEDSGHGSSTESQSQCFSQVSEASGADTQENCTFHICKGFQCFKK

SEQ ID NO: 23476 - protein, 84 aa, unidentified
  REGION 1..84: note = Description of Unknown:hvTR_P03072 target sequence
DLEISMYTFSTMKANVGMGRPILDFPREEDSEAEDSGHGSSTESQSQCFSQVSEASGADTQENCTFHICKGFQCFKKPKTPPPK

SEQ ID NO: 23477 - protein, 85 aa, unidentified
  REGION 1..85: note = Description of Unknown:hvTR_P03072 target sequence
VMRKAYLKKCKELHPDKGGDEDKMKRMNFLYKKMEQGVKVAHQPDFGTWNSSEVPTYGTDEWESWWNTFNEKWDEDLFCHEEMFA

SEQ ID NO: 23478 - protein, 85 aa, unidentified
  REGION 1..85: note = Description of Unknown:hvTR_P03072 target sequence
SDDENTGSQHSTPPKKKKKVEDPKDFPVDLHAFLSQAVFSNRTVASFAVYTTKEKAQILYKKLMEKYSVTFISRHGFGGHNILFF

SEQ ID NO: 23479 - protein, 85 aa, unidentified
  REGION 1..85: note = Description of Unknown:hvTR_P03072 target sequence
LTPHRHRVSAINNYCQKLCTFSFLICKGVNKEYLFYSALCRQPYAVVEESIQGGLKEHDFNPEEPEETKQVSWKLVTQYALETKC

SEQ ID NO: 23480 - protein, 85 aa, unidentified
  REGION 1..85: note = Description of Unknown:hvTR_P03072 target sequence
EDVFLLMGMYLDFQENPQQCKKCEKKDQPNHFNHHEKHYYNAQIFADSKNQKSICQQAVDTVAAKQRVDSIHMTREEMLVERFNF

SEQ ID NO: 23481 - protein, 85 aa, unidentified
  REGION 1..85: note = Description of Unknown:hvTR_P03072 target sequence
LLDKMDLIFGAHGNAVLEQYMAGVAWIHCLLPQMDTVIYDFLKCIVLNIPKKRYWLFKGPIDSGKTTLAAALLDLCGGKSLNVNM

SEQ ID NO: 23482 - protein, 85 aa, unidentified
  REGION 1..85: note = Description of Unknown:hvTR_P03072 target sequence
PLERLNFELGVGIDQFMVVFEDVKGTGAESRDLPSGHGISNLDCLRDYLDGSVKVNLERKHQNKRTQVFPPGIVTMNEYSVPRTL

SEQ ID NO: 23483 - protein, 85 aa, unidentified
  REGION 1..85: note = Description of Unknown:hvTR_P03072 target sequence
QARFVRQIDFRPKAYLRKSLSCSEYLLEKRILQSGMTLLLLLIWFRPVADFAAAIHERIVQWKERLDLEISMYTFSTMKANVGMG

SEQ ID NO: 23484 - protein, 85 aa, unidentified
  REGION 1..85: note = Description of Unknown:cds_NZ_WFIY01000004.1_cds_WP_155863154.1_1083 target sequence
LETQQIDLPTEFENFIKNFKDSSGNYKYMNQLNEMIAYRKKSLLLDFSDIYSYNDKIATEIIANPLYTLKILDEKLLKIISEIDP

SEQ ID NO: 23485 - protein, 85 aa, unidentified
  REGION 1..85: note = Description of Unknown:cds_NZ_WFIY01000004.1_cds_WP_155863154.1_1083 target sequence
TYPDEVERVHVRLINLPRTIELRKIRSNYINKLITVEGILTKQTPVKERAYKVVFKHIHPDCNQEFEWPEGDEEMDEIIKTPTVC

SEQ ID NO: 23486 - protein, 85 aa, unidentified
  REGION 1..85: note = Description of Unknown:cds_NZ_WFIY01000004.1_cds_WP_155863154.1_1083 target sequence
PLCGKPGQFEIVAEKTKLTDWQKVILQERPEEVPPGQLPRQLEVVLEDDLVDSARPGDRVKITGILLIKQDSIVKRGSRAVFDVY

SEQ ID NO: 23487 - protein, 85 aa, unidentified
  REGION 1..85: note = Description of Unknown:cds_NZ_WFIY01000004.1_cds_WP_155863154.1_1083 target sequence
MKALSIEVSQKVLDEVEITDEDKKKIEDLAKDPWIKQKIISSIAPSIFDHWEIKEAIALALFGGVPRVMPDGTRIRGDIHVLIIG

SEQ ID NO: 23488 - protein, 85 aa, unidentified
  REGION 1..85: note = Description of Unknown:cds_NZ_WFIY01000004.1_cds_WP_155863154.1_1083 target sequence
DPGTAKSQILQFAARVAPRSVYTTGKGATAAGLTAAVVREKNSGDYYLEAGALVLADGGIAVIDEIDKMREEDRVAIHEAMEQQT

SEQ ID NO: 23489 - protein, 85 aa, unidentified
  REGION 1..85: note = Description of Unknown:cds_NZ_WFIY01000004.1_cds_WP_155863154.1_1083 target sequence
VSIAKAGIVAKLNARATIIAAGNPKFGRYIAERGISENIDLPPTILSRFDLIFILVDKPGDEDQRLATHILDMHGGKQVKDIIPV

SEQ ID NO: 23490 - protein, 85 aa, unidentified
  REGION 1..85: note = Description of Unknown:cds_NZ_WFIY01000004.1_cds_WP_155863154.1_1083 target sequence
DLLKKYIAYARKYVNPELTEEAKQLLADFYVEMRKKSSETPDSPILITPRQLEALIRLSEAYARMALRKTVTKEDAENAINIMRI

SEQ ID NO: 23491 - protein, 85 aa, unidentified
  REGION 1..85: note = Description of Unknown:cds_NZ_WFIY01000004.1_cds_WP_155863154.1_1083 target sequence
FLEKVGIDVESGTMDIDTIMTGKPKSAREKMVKIMEIIDTLSGSEGCAKLREIVKEAEREGIERQSTEKLISDMKKSGLIYEAKP

SEQ ID NO: 23492 - protein, 84 aa, unidentified
  REGION 1..84: note = Description of Unknown:cds_NZ_WFIY01000004.1_cds_WP_155863154.1_1083 target sequence
DVESGTMDIDTIMTGKPKSAREKMVKIMEIIDTLSGSEGCAKLREIVKEAEREGIERQSTEKLISDMKKSGLIYEAKPECYKKV

SEQ ID NO: 23493 - protein, 85 aa, unidentified
  REGION 1..85: note = Description of Unknown:cds_NZ_WFIY01000004.1_cds_WP_155863154.1_1083 target sequence
YMNQLNEMIAYRKKSLLLDFSDIYSYNDKIATEIIANPLYTLKILDEKLLKIISEIDPTYPDEVERVHVRLINLPRTIELRKIRS

SEQ ID NO: 23494 - protein, 85 aa, unidentified
  REGION 1..85: note = Description of Unknown:cds_NZ_WFIY01000004.1_cds_WP_155863154.1_1083 target sequence
NYINKLITVEGILTKQTPVKERAYKVVFKHIHPDCNQEFEWPEGDEEMDEIIKTPTVCPLCGKPGQFEIVAEKTKLTDWQKVILQ

SEQ ID NO: 23495 - protein, 85 aa, unidentified
  REGION 1..85: note = Description of Unknown:cds_NZ_WFIY01000004.1_cds_WP_155863154.1_1083 target sequence
ERPEEVPPGQLPRQLEVVLEDDLVDSARPGDRVKITGILLIKQDSIVKRGSRAVFDVYMKALSIEVSQKVLDEVEITDEDKKKIE

SEQ ID NO: 23496 - protein, 85 aa, unidentified
  REGION 1..85: note = Description of Unknown:cds_NZ_WFIY01000004.1_cds_WP_155863154.1_1083 target sequence
DLAKDPWIKQKIISSIAPSIFDHWEIKEAIALALFGGVPRVMPDGTRIRGDIHVLIIGDPGTAKSQILQFAARVAPRSVYTTGKG

SEQ ID NO: 23497 - protein, 85 aa, unidentified
  REGION 1..85: note = Description of Unknown:cds_NZ_WFIY01000004.1_cds_WP_155863154.1_1083 target sequence
ATAAGLTAAVVREKNSGDYYLEAGALVLADGGIAVIDEIDKMREEDRVAIHEAMEQQTVSIAKAGIVAKLNARATIIAAGNPKFG

SEQ ID NO: 23498 - protein, 85 aa, unidentified
  REGION 1..85: note = Description of Unknown:cds_NZ_WFIY01000004.1_cds_WP_155863154.1_1083 target sequence
RYIAERGISENIDLPPTILSRFDLIFILVDKPGDEDQRLATHILDMHGGKQVKDIIPVDLLKKYIAYARKYVNPELTEEAKQLLA

SEQ ID NO: 23499 - protein, 85 aa, unidentified
  REGION 1..85: note = Description of Unknown:cds_NZ_WFIY01000004.1_cds_WP_155863154.1_1083 target sequence
DFYVEMRKKSSETPDSPILITPRQLEALIRLSEAYARMALRKTVTKEDAENAINIMRIFLEKVGIDVESGTMDIDTIMTGKPKSA

SEQ ID NO: 23500 - protein, 85 aa, unidentified
  REGION 1..85: note = Description of Unknown:cds_NC_030656.1_cds_YP_009268769.1_54 target sequence
QNIPNLYLFPNCVDIFTHEYSDEDFDKMSKSEKDMFKFAVFPLLKHRWKSAYVVKHNNVIKLNKENVTKTSKDTIWKKVNRSTLK

SEQ ID NO: 23501 - protein, 85 aa, unidentified
  REGION 1..85: note = Description of Unknown:cds_NC_030656.1_cds_YP_009268769.1_54 target sequence
TIHVTSVDKKKRMFKSGKSLITYECYAFLKCDINKDLNSFDEYTLRGLMDAGNKLKIFSNSVGNAKNTINVLGNNKPFSVVPLAS

SEQ ID NO: 23502 - protein, 85 aa, unidentified
  REGION 1..85: note = Description of Unknown:cds_NC_030656.1_cds_YP_009268769.1_54 target sequence
LKPVAQREIFSAWINKQYVILTGGTGVGKTSQVPKLLLWFNYLFGGFLSYSKVSNFEEKPIVLSLPRIALVRMHGNTFLSALGFS

SEQ ID NO: 23503 - protein, 85 aa, unidentified
  REGION 1..85: note = Description of Unknown:cds_NC_030656.1_cds_YP_009268769.1_54 target sequence
TWTGSPISIKFSAISEEEINKNPRPYGMVISTHKLTLSNLFNFSTIILDEVHEHDQIGDIVISVTKKKFKELDSVFLMTATLEDD

SEQ ID NO: 23504 - protein, 85 aa, unidentified
  REGION 1..85: note = Description of Unknown:cds_NC_030656.1_cds_YP_009268769.1_54 target sequence
RERFTEFLPNPVFIHIPGDTLFPISDVYIRNSVSITDYRNYTAQELKNISTAIKKYTPPAKACGIVFVATVSQCKAYLDFLAKEL

SEQ ID NO: 23505 - protein, 85 aa, unidentified
  REGION 1..85: note = Description of Unknown:cds_NC_030656.1_cds_YP_009268769.1_54 target sequence
PSVTFFIIHGKIINIDEIINKIYSNEGVSIIISTPYLESSVTIKNATHVYDTGKVFIPYPFGGKQRIISLSMRDQRRGRVGRTRP

SEQ ID NO: 23506 - protein, 85 aa, unidentified
  REGION 1..85: note = Description of Unknown:cds_NC_030656.1_cds_YP_009268769.1_54 target sequence
GTYVYFYDTKYLKPIIRIDSEFLHPYVLYAKYFNLNLPDDLLIIPSDLTLLNKTIEYIDSFNISNDQWMKIISNYYITMVEYAKL

SEQ ID NO: 23507 - protein, 85 aa, unidentified
  REGION 1..85: note = Description of Unknown:cds_NC_030656.1_cds_YP_009268769.1_54 target sequence
YVKGKSLAIEMDNFERFGIMTDNVFKNIISLQLRAKIISSRYNNVTYIHNCKVMFGPFSGTMFKVAYKRALKGYIYMITETTFVP

SEQ ID NO: 23508 - protein, 84 aa, unidentified
  REGION 1..84: note = Description of Unknown:cds_NC_030656.1_cds_YP_009268769.1_54 target sequence
LAIEMDNFERFGIMTDNVFKNIISLQLRAKIISSRYNNVTYIHNCKVMFGPFSGTMFKVAYKRALKGYIYMITETTFVPETVVN

SEQ ID NO: 23509 - protein, 85 aa, unidentified
  REGION 1..85: note = Description of Unknown:cds_NC_030656.1_cds_YP_009268769.1_54 target sequence
MSKSEKDMFKFAVFPLLKHRWKSAYVVKHNNVIKLNKENVTKTSKDTIWKKVNRSTLKTIHVTSVDKKKRMFKSGKSLITYECYA

SEQ ID NO: 23510 - protein, 85 aa, unidentified
  REGION 1..85: note = Description of Unknown:cds_NC_030656.1_cds_YP_009268769.1_54 target sequence
FLKCDINKDLNSFDEYTLRGLMDAGNKLKIFSNSVGNAKNTINVLGNNKPFSVVPLASLKPVAQREIFSAWINKQYVILTGGTGV

SEQ ID NO: 23511 - protein, 85 aa, unidentified
  REGION 1..85: note = Description of Unknown:cds_NC_030656.1_cds_YP_009268769.1_54 target sequence
GKTSQVPKLLLWFNYLFGGFLSYSKVSNFEEKPIVLSLPRIALVRMHGNTFLSALGFSTWTGSPISIKFSAISEEEINKNPRPYG

SEQ ID NO: 23512 - protein, 85 aa, unidentified
  REGION 1..85: note = Description of Unknown:cds_NC_030656.1_cds_YP_009268769.1_54 target sequence
MVISTHKLTLSNLFNFSTIILDEVHEHDQIGDIVISVTKKKFKELDSVFLMTATLEDDRERFTEFLPNPVFIHIPGDTLFPISDV

SEQ ID NO: 23513 - protein, 85 aa, unidentified
  REGION 1..85: note = Description of Unknown:cds_NC_030656.1_cds_YP_009268769.1_54 target sequence
YIRNSVSITDYRNYTAQELKNISTAIKKYTPPAKACGIVFVATVSQCKAYLDFLAKELPSVTFFIIHGKIINIDEIINKIYSNEG

SEQ ID NO: 23514 - protein, 85 aa, unidentified
  REGION 1..85: note = Description of Unknown:cds_NC_030656.1_cds_YP_009268769.1_54 target sequence
VSIIISTPYLESSVTIKNATHVYDTGKVFIPYPFGGKQRIISLSMRDQRRGRVGRTRPGTYVYFYDTKYLKPIIRIDSEFLHPYV

SEQ ID NO: 23515 - protein, 85 aa, unidentified
  REGION 1..85: note = Description of Unknown:cds_NC_030656.1_cds_YP_009268769.1_54 target sequence
LYAKYFNLNLPDDLLIIPSDLTLLNKTIEYIDSFNISNDQWMKIISNYYITMVEYAKLYVKGKSLAIEMDNFERFGIMTDNVFKN

SEQ ID NO: 23516 - protein, 85 aa, unidentified
  REGION 1..85: note = Description of Unknown:cds_NC_030656.1_cds_YP_009268760.1_45 target sequence
FLYTKEARLALKKLISANLKIEKLSKKHVSSLLRFSLHGMLPSDLYDEAIGVSVINVRFFNLDTIKVSDLIASLKYFDTVPKELE

SEQ ID NO: 23517 - protein, 85 aa, unidentified
  REGION 1..85: note = Description of Unknown:cds_NC_030656.1_cds_YP_009268760.1_45 target sequence
NTIMYHKKTIIESGDESALKFLMANDLIYIEDVKAILEKQITTTTFLLINSPRLACGYMQLTALELVATLLLINKEDWVNVISKI

SEQ ID NO: 23518 - protein, 85 aa, unidentified
  REGION 1..85: note = Description of Unknown:cds_NC_030656.1_cds_YP_009268760.1_45 target sequence
NISEKQLLYFCERLSYPPVNPTLKKIKDEAKCLEFIKKHFEYPVIKYVCETVKASKTFVYGCIEIIDKKLPKLNKHLNEFIASTI

SEQ ID NO: 23519 - protein, 85 aa, unidentified
  REGION 1..85: note = Description of Unknown:cds_NC_030656.1_cds_YP_009268760.1_45 target sequence
VPEELVLKYGIRAIVMFGIKIPLNIDTLTVSEQCFVEQHIALYDAAASRFSIRFRDRSQRLSKRTLTMRSGDKLVNHPLVRHIKC

SEQ ID NO: 23520 - protein, 85 aa, unidentified
  REGION 1..85: note = Description of Unknown:cds_NC_030656.1_cds_YP_009268760.1_45 target sequence
QNAVLDDILKYVDAANYKISKGELDNLMSDFCMDPLACQTIIMSTVSLKTKLLAIKVIRNWKTYSLSSTSTFSRMVSGIIYMDLF

SEQ ID NO: 23521 - protein, 85 aa, unidentified
  REGION 1..85: note = Description of Unknown:cds_NC_030656.1_cds_YP_009268760.1_45 target sequence
DYTGARILQTYKKTYDEIIRCSNTPMPPECDCFNCIITYNPITKRKLFSKVLQLSHTNLIKDNLVVGAVTDSVLLSILSDLILLA

SEQ ID NO: 23522 - protein, 85 aa, unidentified
  REGION 1..85: note = Description of Unknown:cds_NC_030656.1_cds_YP_009268760.1_45 target sequence
RHGVVDLDFLNTRAWGPLVTLFAGTKSLNVSIFRQATAMEQLEQANICSDGLSDSSNLVKLSNVYLCDIIKGYSPINPEYVSVVL

SEQ ID NO: 23523 - protein, 85 aa, unidentified
  REGION 1..85: note = Description of Unknown:cds_NC_030656.1_cds_YP_009268760.1_45 target sequence
FFNCIIEYMQAICMYRIHICKNTKRTREFITKVISTVLDTLNIPHEEIPVNSIVVTEMLEIESCALQVHSLHLFLKVVLMVLEDI

SEQ ID NO: 23524 - protein, 84 aa, unidentified
  REGION 1..84: note = Description of Unknown:cds_NC_030656.1_cds_YP_009268760.1_45 target sequence
IEYMQAICMYRIHICKNTKRTREFITKVISTVLDTLNIPHEEIPVNSIVVTEMLEIESCALQVHSLHLFLKVVLMVLEDINGNY

SEQ ID NO: 23525 - protein, 85 aa, unidentified
  REGION 1..85: note = Description of Unknown:cds_NC_030656.1_cds_YP_009268760.1_45 target sequence
HVSSLLRFSLHGMLPSDLYDEAIGVSVINVRFFNLDTIKVSDLIASLKYFDTVPKELENTIMYHKKTIIESGDESALKFLMANDL

SEQ ID NO: 23526 - protein, 85 aa, unidentified
  REGION 1..85: note = Description of Unknown:cds_NC_030656.1_cds_YP_009268760.1_45 target sequence
IYIEDVKAILEKQITTTTFLLINSPRLACGYMQLTALELVATLLLINKEDWVNVISKINISEKQLLYFCERLSYPPVNPTLKKIK

SEQ ID NO: 23527 - protein, 85 aa, unidentified
  REGION 1..85: note = Description of Unknown:cds_NC_030656.1_cds_YP_009268760.1_45 target sequence
DEAKCLEFIKKHFEYPVIKYVCETVKASKTFVYGCIEIIDKKLPKLNKHLNEFIASTIVPEELVLKYGIRAIVMFGIKIPLNIDT

SEQ ID NO: 23528 - protein, 85 aa, unidentified
  REGION 1..85: note = Description of Unknown:cds_NC_030656.1_cds_YP_009268760.1_45 target sequence
LTVSEQCFVEQHIALYDAAASRFSIRFRDRSQRLSKRTLTMRSGDKLVNHPLVRHIKCQNAVLDDILKYVDAANYKISKGELDNL

SEQ ID NO: 23529 - protein, 85 aa, unidentified
  REGION 1..85: note = Description of Unknown:cds_NC_030656.1_cds_YP_009268760.1_45 target sequence
MSDFCMDPLACQTIIMSTVSLKTKLLAIKVIRNWKTYSLSSTSTFSRMVSGIIYMDLFDYTGARILQTYKKTYDEIIRCSNTPMP

SEQ ID NO: 23530 - protein, 85 aa, unidentified
  REGION 1..85: note = Description of Unknown:cds_NC_030656.1_cds_YP_009268760.1_45 target sequence
PECDCFNCIITYNPITKRKLFSKVLQLSHTNLIKDNLVVGAVTDSVLLSILSDLILLARHGVVDLDFLNTRAWGPLVTLFAGTKS

SEQ ID NO: 23531 - protein, 85 aa, unidentified
  REGION 1..85: note = Description of Unknown:cds_NC_030656.1_cds_YP_009268760.1_45 target sequence
LNVSIFRQATAMEQLEQANICSDGLSDSSNLVKLSNVYLCDIIKGYSPINPEYVSVVLFFNCIIEYMQAICMYRIHICKNTKRTR

SEQ ID NO: 23532 - protein, 85 aa, unidentified
  REGION 1..85: note = Description of Unknown:hvTR_Q6TVF2 target sequence
ENPLPEMLLFPNCVTVFPFEYALEDVLRLPDETRRAFALAAFPLVKHRWRGARVERNDRRVWLDVEREARAAAVAASTSALLDDA

SEQ ID NO: 23533 - protein, 85 aa, unidentified
  REGION 1..85: note = Description of Unknown:hvTR_Q6TVF2 target sequence
MDRLVDDQGRVITPEAYAFMRCAPGARVAELADDVAAIAGIVHGGNALRIFSSDSVHAKEAWRERSVGVLGNPEPLEPVPLASLK

SEQ ID NO: 23534 - protein, 85 aa, unidentified
  REGION 1..85: note = Description of Unknown:hvTR_Q6TVF2 target sequence
PDVQQTLFAAWCRRRPVVLTGDTGVGKTSQVPKLLLWFNYLFGGFDRLDAIHEFSERPVVLSLPRVTLVRAHTATYLRSLGFVGI

SEQ ID NO: 23535 - protein, 85 aa, unidentified
  REGION 1..85: note = Description of Unknown:hvTR_Q6TVF2 target sequence
DGSPVSQRHGALTDDERNSAPRAYGLVMSTHRLTLNAIRRFDTVVVDEIHEHDQMGDIVVAVARKLAGSVRSLVLMTATLEDDRE

SEQ ID NO: 23536 - protein, 85 aa, unidentified
  REGION 1..85: note = Description of Unknown:hvTR_Q6TVF2 target sequence
RLEEFLDDPAFVHIGGGTLFAIREVYVKNAQQPPLSRKYAEEELRNVTEALGTFVPDQGKCGILFVATVAQCALFAENISAKHPG

SEQ ID NO: 23537 - protein, 85 aa, unidentified
  REGION 1..85: note = Description of Unknown:hvTR_Q6TVF2 target sequence
LLVRIVHGKIPSVADVLAEVYAADRPAVLVSTPYLESSVTVKNATHVYDTGRVFVPEPFGGRERIVSRAMYTQRRGRVGRVAPGT

SEQ ID NO: 23538 - protein, 85 aa, unidentified
  REGION 1..85: note = Description of Unknown:hvTR_Q6TVF2 target sequence
YVRFFDTRLAAPIKRIDSEFLHPYVLYARVFDLKLPDDLLVRPSDPELLRRTEEYVDGFGISVCRWTELLNRHYMHMLEYAKVYV

SEQ ID NO: 23539 - protein, 85 aa, unidentified
  REGION 1..85: note = Description of Unknown:hvTR_Q6TVF2 target sequence
RGGRLARALDAFERDGVMTQEATEAIRAVEMLAGVVAVRRTGDRYRAECKVLFGPFVGKRFSVVGRRRPGKYVLMVTDRVFIESE

SEQ ID NO: 23540 - protein, 84 aa, unidentified
  REGION 1..84: note = Description of Unknown:hvTR_Q6TVF2 target sequence
LARALDAFERDGVMTQEATEAIRAVEMLAGVVAVRRTGDRYRAECKVLFGPFVGKRFSVVGRRRPGKYVLMVTDRVFIESEVPS

SEQ ID NO: 23541 - protein, 85 aa, unidentified
  REGION 1..85: note = Description of Unknown:hvTR_Q6TVF2 target sequence
RLPDETRRAFALAAFPLVKHRWRGARVERNDRRVWLDVEREARAAAVAASTSALLDDAMDRLVDDQGRVITPEAYAFMRCAPGAR

SEQ ID NO: 23542 - protein, 85 aa, unidentified
  REGION 1..85: note = Description of Unknown:hvTR_Q6TVF2 target sequence
VAELADDVAAIAGIVHGGNALRIFSSDSVHAKEAWRERSVGVLGNPEPLEPVPLASLKPDVQQTLFAAWCRRRPVVLTGDTGVGK

SEQ ID NO: 23543 - protein, 85 aa, unidentified
  REGION 1..85: note = Description of Unknown:hvTR_Q6TVF2 target sequence
TSQVPKLLLWFNYLFGGFDRLDAIHEFSERPVVLSLPRVTLVRAHTATYLRSLGFVGIDGSPVSQRHGALTDDERNSAPRAYGLV

SEQ ID NO: 23544 - protein, 85 aa, unidentified
  REGION 1..85: note = Description of Unknown:hvTR_Q6TVF2 target sequence
MSTHRLTLNAIRRFDTVVVDEIHEHDQMGDIVVAVARKLAGSVRSLVLMTATLEDDRERLEEFLDDPAFVHIGGGTLFAIREVYV

SEQ ID NO: 23545 - protein, 85 aa, unidentified
  REGION 1..85: note = Description of Unknown:hvTR_Q6TVF2 target sequence
KNAQQPPLSRKYAEEELRNVTEALGTFVPDQGKCGILFVATVAQCALFAENISAKHPGLLVRIVHGKIPSVADVLAEVYAADRPA

SEQ ID NO: 23546 - protein, 85 aa, unidentified
  REGION 1..85: note = Description of Unknown:hvTR_Q6TVF2 target sequence
VLVSTPYLESSVTVKNATHVYDTGRVFVPEPFGGRERIVSRAMYTQRRGRVGRVAPGTYVRFFDTRLAAPIKRIDSEFLHPYVLY

SEQ ID NO: 23547 - protein, 85 aa, unidentified
  REGION 1..85: note = Description of Unknown:hvTR_Q6TVF2 target sequence
ARVFDLKLPDDLLVRPSDPELLRRTEEYVDGFGISVCRWTELLNRHYMHMLEYAKVYVRGGRLARALDAFERDGVMTQEATEAIR

SEQ ID NO: 23548 - protein, 85 aa, unidentified
  REGION 1..85: note = Description of Unknown:hvTR_Q98218 target sequence
KNLPGVFAFPDNETIFAHAYSQRELEAMLPARAGAQPHAFAYAAWPLSKHRWRGAFVCRQRGVLKLNLELDAGAFERVPRSEAER

SEQ ID NO: 23549 - protein, 85 aa, unidentified
  REGION 1..85: note = Description of Unknown:hvTR_Q98218 target sequence
FEPEQSDARALMHRGADGTVMSFECYSFLRCRPGLELREAGLALLRGLVVGGNRMRIFSGVRRAGASAATSAGMLGNESPFERAP

SEQ ID NO: 23550 - protein, 85 aa, unidentified
  REGION 1..85: note = Description of Unknown:hvTR_Q98218 target sequence
FASLRIDAQAALFRAWAARRPTVVTGGTGVGKTSQVPKLLLWFNYLFGGTEDLDVLAPARERPVVLSLPRVALVRMNGHALRRAL

SEQ ID NO: 23551 - protein, 85 aa, unidentified
  REGION 1..85: note = Description of Unknown:hvTR_Q98218 target sequence
GFDALEGSPVELRYGDLAPADANSSRSPFRLVVSTNQLTLGALFAHGTVILDEVHEHDQMADIMLAVLRVHRARVDSIVLMSATL

SEQ ID NO: 23552 - protein, 85 aa, unidentified
  REGION 1..85: note = Description of Unknown:hvTR_Q98218 target sequence
EDDRERLQEFFPDAEFVHIPGSTRFEIRGVYVRNSSDPRDARAYDEEERRNVSAALSAHRPRAGRCGILFVASVAQCEDYARLLT

SEQ ID NO: 23553 - protein, 85 aa, unidentified
  REGION 1..85: note = Description of Unknown:hvTR_Q98218 target sequence
REHPELGVYVVHGKTPNVDALLAEVYASARPCVLVSTPYLESSVTIRTVTHVYDTGRVFVPAPFGGRQMLISPAMRTQRRGRVGR

SEQ ID NO: 23554 - protein, 85 aa, unidentified
  REGION 1..85: note = Description of Unknown:hvTR_Q98218 target sequence
VMPGTYVYFYDPARLAPIKRIDSEFLYNYIIYARHYGLVLPDDLYVQPSDLELLRRCEEYLDGFGLAPERLFELASTRYLRMVEY

SEQ ID NO: 23555 - protein, 85 aa, unidentified
  REGION 1..85: note = Description of Unknown:hvTR_Q98218 target sequence
AKIYARGGARAEELNRFERDGVVTEDVLASIRALNLRARVLSARARRGQFLHTCEVAFGPYAGTRFLLANRRRLRGDIFMVTERS

SEQ ID NO: 23556 - protein, 84 aa, unidentified
  REGION 1..84: note = Description of Unknown:hvTR_Q98218 target sequence
ARGGARAEELNRFERDGVVTEDVLASIRALNLRARVLSARARRGQFLHTCEVAFGPYAGTRFLLANRRRLRGDIFMVTERSFVL

SEQ ID NO: 23557 - protein, 85 aa, unidentified
  REGION 1..85: note = Description of Unknown:hvTR_Q98218 target sequence
MLPARAGAQPHAFAYAAWPLSKHRWRGAFVCRQRGVLKLNLELDAGAFERVPRSEAERFEPEQSDARALMHRGADGTVMSFECYS

SEQ ID NO: 23558 - protein, 85 aa, unidentified
  REGION 1..85: note = Description of Unknown:hvTR_Q98218 target sequence
FLRCRPGLELREAGLALLRGLVVGGNRMRIFSGVRRAGASAATSAGMLGNESPFERAPFASLRIDAQAALFRAWAARRPTVVTGG

SEQ ID NO: 23559 - protein, 85 aa, unidentified
  REGION 1..85: note = Description of Unknown:hvTR_Q98218 target sequence
TGVGKTSQVPKLLLWFNYLFGGTEDLDVLAPARERPVVLSLPRVALVRMNGHALRRALGFDALEGSPVELRYGDLAPADANSSRS

SEQ ID NO: 23560 - protein, 85 aa, unidentified
  REGION 1..85: note = Description of Unknown:hvTR_Q98218 target sequence
PFRLVVSTNQLTLGALFAHGTVILDEVHEHDQMADIMLAVLRVHRARVDSIVLMSATLEDDRERLQEFFPDAEFVHIPGSTRFEI

SEQ ID NO: 23561 - protein, 85 aa, unidentified
  REGION 1..85: note = Description of Unknown:hvTR_Q98218 target sequence
RGVYVRNSSDPRDARAYDEEERRNVSAALSAHRPRAGRCGILFVASVAQCEDYARLLTREHPELGVYVVHGKTPNVDALLAEVYA

SEQ ID NO: 23562 - protein, 85 aa, unidentified
  REGION 1..85: note = Description of Unknown:hvTR_Q98218 target sequence
SARPCVLVSTPYLESSVTIRTVTHVYDTGRVFVPAPFGGRQMLISPAMRTQRRGRVGRVMPGTYVYFYDPARLAPIKRIDSEFLY

SEQ ID NO: 23563 - protein, 85 aa, unidentified
  REGION 1..85: note = Description of Unknown:hvTR_Q98218 target sequence
NYIIYARHYGLVLPDDLYVQPSDLELLRRCEEYLDGFGLAPERLFELASTRYLRMVEYAKIYARGGARAEELNRFERDGVVTEDV

SEQ ID NO: 23564 - protein, 85 aa, unidentified
  REGION 1..85: note = Description of Unknown:hvTR_D3IZI3 target sequence
ENHLPDMLMFPNCVSVFPFEYSLEDVFRLPEERRGAFAMAVFPLLKHRWRGARLENDQRAVWLSVEREDRGRALAARDCPWLADA

SEQ ID NO: 23565 - protein, 85 aa, unidentified
  REGION 1..85: note = Description of Unknown:hvTR_D3IZI3 target sequence
AARMVDDEGRAATPEAYAFMRAAPGVRVADLAADAGALAGLVFGGNALRVFSSEASQAREGWKARSVGVLGNAAPLAPVPLASLR

SEQ ID NO: 23566 - protein, 85 aa, unidentified
  REGION 1..85: note = Description of Unknown:hvTR_D3IZI3 target sequence
PEAQRELFAAWAGRRPVVLTGGTGVGKTSQVPKLLLWFNYLFGGFERLDAVCEFAERPIVLSLPRVTLVRAHTATYLASLGFEKA

SEQ ID NO: 23567 - protein, 85 aa, unidentified
  REGION 1..85: note = Description of Unknown:hvTR_D3IZI3 target sequence
DGSPVSPRYGAIPDAERNTAPRAYGLVVATHRLTLTAVRRYDTVVVDEIHEHDQMGDIVVAVARKLSANMRSLVLMTATLEDDRA

SEQ ID NO: 23568 - protein, 85 aa, unidentified
  REGION 1..85: note = Description of Unknown:hvTR_D3IZI3 target sequence
RLEEFLDRPAFVHIAGDTLFPIREVYVKNTQLPPLSRKYAEAELRNVVRALGTFVPEPGKCGILFVATVAQCALFAEHVEAAHPG

SEQ ID NO: 23569 - protein, 85 aa, unidentified
  REGION 1..85: note = Description of Unknown:hvTR_D3IZI3 target sequence
LLVRVVHGKVPSVAAVLEEVYAADRPAVLVSTPYLESSVTVRTATHVYDTGRVFVPEPFGGRETFVSRSMYTQRKGRVGRVAPGT

SEQ ID NO: 23570 - protein, 85 aa, unidentified
  REGION 1..85: note = Description of Unknown:hvTR_D3IZI3 target sequence
YVRFFDTRLALPLKRIDSEFLHPYVLYARIFGLKLPEDLLVQPSDLALLRRTEEYVDGFGISLSRWTQLLDRHYMHMLEYAKVYV

SEQ ID NO: 23571 - protein, 85 aa, unidentified
  REGION 1..85: note = Description of Unknown:hvTR_D3IZI3 target sequence
RGGRLAAALDAFERTGVMTHEAAEAIRAVDMLAAVLNVRKSKDRYRAECKVLFGPFAGKKFVVAGRRPPGSHVLMVTDRVFIEAE

SEQ ID NO: 23572 - protein, 84 aa, unidentified
  REGION 1..84: note = Description of Unknown:hvTR_D3IZI3 target sequence
LAAALDAFERTGVMTHEAAEAIRAVDMLAAVLNVRKSKDRYRAECKVLFGPFAGKKFVVAGRRPPGSHVLMVTDRVFIEAEPPF

SEQ ID NO: 23573 - protein, 85 aa, unidentified
  REGION 1..85: note = Description of Unknown:hvTR_D3IZI3 target sequence
RLPEERRGAFAMAVFPLLKHRWRGARLENDQRAVWLSVEREDRGRALAARDCPWLADAAARMVDDEGRAATPEAYAFMRAAPGVR

SEQ ID NO: 23574 - protein, 85 aa, unidentified
  REGION 1..85: note = Description of Unknown:hvTR_D3IZI3 target sequence
VADLAADAGALAGLVFGGNALRVFSSEASQAREGWKARSVGVLGNAAPLAPVPLASLRPEAQRELFAAWAGRRPVVLTGGTGVGK

SEQ ID NO: 23575 - protein, 85 aa, unidentified
  REGION 1..85: note = Description of Unknown:hvTR_D3IZI3 target sequence
TSQVPKLLLWFNYLFGGFERLDAVCEFAERPIVLSLPRVTLVRAHTATYLASLGFEKADGSPVSPRYGAIPDAERNTAPRAYGLV

SEQ ID NO: 23576 - protein, 85 aa, unidentified
  REGION 1..85: note = Description of Unknown:hvTR_D3IZI3 target sequence
VATHRLTLTAVRRYDTVVVDEIHEHDQMGDIVVAVARKLSANMRSLVLMTATLEDDRARLEEFLDRPAFVHIAGDTLFPIREVYV

SEQ ID NO: 23577 - protein, 85 aa, unidentified
  REGION 1..85: note = Description of Unknown:hvTR_D3IZI3 target sequence
KNTQLPPLSRKYAEAELRNVVRALGTFVPEPGKCGILFVATVAQCALFAEHVEAAHPGLLVRVVHGKVPSVAAVLEEVYAADRPA

SEQ ID NO: 23578 - protein, 85 aa, unidentified
  REGION 1..85: note = Description of Unknown:hvTR_D3IZI3 target sequence
VLVSTPYLESSVTVRTATHVYDTGRVFVPEPFGGRETFVSRSMYTQRKGRVGRVAPGTYVRFFDTRLALPLKRIDSEFLHPYVLY

SEQ ID NO: 23579 - protein, 85 aa, unidentified
  REGION 1..85: note = Description of Unknown:hvTR_D3IZI3 target sequence
ARIFGLKLPEDLLVQPSDLALLRRTEEYVDGFGISLSRWTQLLDRHYMHMLEYAKVYVRGGRLAAALDAFERTGVMTHEAAEAIR

SEQ ID NO: 23580 - protein, 85 aa, unidentified
  REGION 1..85: note = Description of Unknown:cds_NZ_WFIY01000004.1_cds_WP_155864159.1_2113 target sequence
RRLDLEDVIKGKGNYVDDLPFSGYYGVFVRSQYPHAILRKVDVEGARRKGAFVLTAEDLLSLSTLKGKEEQEGSSSISSLLAYKK

SEQ ID NO: 23581 - protein, 85 aa, unidentified
  REGION 1..85: note = Description of Unknown:cds_NZ_WFIY01000004.1_cds_WP_155864159.1_2113 target sequence
VRYVGEPIALVIAKDPYEATDLAEEVSVDYEPLPAVSNIDEALKNDVLVFEELGTNEVYKKTFEYGEMPKNDKEIEVSLYWSRSS

SEQ ID NO: 23582 - protein, 85 aa, unidentified
  REGION 1..85: note = Description of Unknown:cds_NZ_WFIY01000004.1_cds_WP_155864159.1_2113 target sequence
GNPIETFGVISIPQGDGVTIISNLQAPQFQSNEISKYFKVKVVPTRHGGSFGSKFSVTRYAIVLGLASLKFNIPIKWIETRTEHL

SEQ ID NO: 23583 - protein, 85 aa, unidentified
  REGION 1..85: note = Description of Unknown:cds_NZ_WFIY01000004.1_cds_WP_155864159.1_2113 target sequence
MASNSSGPERKFRIKAYFKRDGTVTGLDFKIWEDIGASLYNGQAFKPTGILAGPYKVKNIKYDVSLVATNKNPPGAFRGAGTPPH

SEQ ID NO: 23584 - protein, 85 aa, unidentified
  REGION 1..85: note = Description of Unknown:cds_NZ_WFIY01000004.1_cds_WP_155864159.1_2113 target sequence
TWALERVMDFIADELKMERHEVRRKNLIDSFPYDAPYAHYDSGNPRNLLDLALSRKDLWSLREKGYGVGLACSTDPSTPSGQEGV

SEQ ID NO: 23585 - protein, 85 aa, unidentified
  REGION 1..85: note = Description of Unknown:cds_NZ_WFIY01000004.1_cds_WP_155864159.1_2113 target sequence
KLSIRNGKVILGIGYGPEGQGNEHVGKLLVSRLLGIPLETIEVELLDSENSPSSFGPGGSRMAVFLAGAIKGAVEELVSKLRRKY

SEQ ID NO: 23586 - protein, 85 aa, unidentified
  REGION 1..85: note = Description of Unknown:cds_NZ_WFIY01000004.1_cds_WP_155864159.1_2113 target sequence
NAEYKDGFLLRGEEKIPITSLQEEVSYVYSQQGKTRFIAYPFACDIAVVKVDEETGLIKPVKLVVYLDPGTPLDEEVVKEQVIGG

SEQ ID NO: 23587 - protein, 85 aa, unidentified
  REGION 1..85: note = Description of Unknown:cds_NZ_WFIY01000004.1_cds_WP_155864159.1_2113 target sequence
SAIGVSLALYESYVYDKGQLLTLSLSDYGLPSADQMPEFEVHLVPTPSPYTPFGEKGIGEVPVGVAAAAVTSAVEDAIKKRISKV

SEQ ID NO: 23588 - protein, 84 aa, unidentified
  REGION 1..84: note = Description of Unknown:cds_NZ_WFIY01000004.1_cds_WP_155864159.1_2113 target sequence
VSLALYESYVYDKGQLLTLSLSDYGLPSADQMPEFEVHLVPTPSPYTPFGEKGIGEVPVGVAAAAVTSAVEDAIKKRISKVPIR

SEQ ID NO: 23589 - protein, 85 aa, unidentified
  REGION 1..85: note = Description of Unknown:cds_NZ_WFIY01000004.1_cds_WP_155864159.1_2113 target sequence
FVRSQYPHAILRKVDVEGARRKGAFVLTAEDLLSLSTLKGKEEQEGSSSISSLLAYKKVRYVGEPIALVIAKDPYEATDLAEEVS

SEQ ID NO: 23590 - protein, 85 aa, unidentified
  REGION 1..85: note = Description of Unknown:cds_NZ_WFIY01000004.1_cds_WP_155864159.1_2113 target sequence
VDYEPLPAVSNIDEALKNDVLVFEELGTNEVYKKTFEYGEMPKNDKEIEVSLYWSRSSGNPIETFGVISIPQGDGVTIISNLQAP

SEQ ID NO: 23591 - protein, 85 aa, unidentified
  REGION 1..85: note = Description of Unknown:cds_NZ_WFIY01000004.1_cds_WP_155864159.1_2113 target sequence
QFQSNEISKYFKVKVVPTRHGGSFGSKFSVTRYAIVLGLASLKFNIPIKWIETRTEHLMASNSSGPERKFRIKAYFKRDGTVTGL

SEQ ID NO: 23592 - protein, 85 aa, unidentified
  REGION 1..85: note = Description of Unknown:cds_NZ_WFIY01000004.1_cds_WP_155864159.1_2113 target sequence
DFKIWEDIGASLYNGQAFKPTGILAGPYKVKNIKYDVSLVATNKNPPGAFRGAGTPPHTWALERVMDFIADELKMERHEVRRKNL

SEQ ID NO: 23593 - protein, 85 aa, unidentified
  REGION 1..85: note = Description of Unknown:cds_NZ_WFIY01000004.1_cds_WP_155864159.1_2113 target sequence
IDSFPYDAPYAHYDSGNPRNLLDLALSRKDLWSLREKGYGVGLACSTDPSTPSGQEGVKLSIRNGKVILGIGYGPEGQGNEHVGK

SEQ ID NO: 23594 - protein, 85 aa, unidentified
  REGION 1..85: note = Description of Unknown:cds_NZ_WFIY01000004.1_cds_WP_155864159.1_2113 target sequence
LLVSRLLGIPLETIEVELLDSENSPSSFGPGGSRMAVFLAGAIKGAVEELVSKLRRKYNAEYKDGFLLRGEEKIPITSLQEEVSY

SEQ ID NO: 23595 - protein, 85 aa, unidentified
  REGION 1..85: note = Description of Unknown:cds_NZ_WFIY01000004.1_cds_WP_155864159.1_2113 target sequence
VYSQQGKTRFIAYPFACDIAVVKVDEETGLIKPVKLVVYLDPGTPLDEEVVKEQVIGGSAIGVSLALYESYVYDKGQLLTLSLSD

SEQ ID NO: 23596 - protein, 85 aa, unidentified
  REGION 1..85: note = Description of Unknown:hvTR_A0A0R8I9X5 target sequence
ENHLPDMLMFPNCVSVFPFEYSLEDVFRLPEERRRAFAMAVFPLSKHRWRGARLQRDERSVWLSVEEDRGRALGERNCSWLSDVA

SEQ ID NO: 23597 - protein, 85 aa, unidentified
  REGION 1..85: note = Description of Unknown:hvTR_A0A0R8I9X5 target sequence
ARMVDDEGRAVTPEAYAFMRAAPGARVAELAADAGVLAGLVAGGNALRVFSSESTQAREGWKARSVGVLGNAAPLAPVPLASLRP

SEQ ID NO: 23598 - protein, 85 aa, unidentified
  REGION 1..85: note = Description of Unknown:hvTR_A0A0R8I9X5 target sequence
EVQRELFSAWIGRRPVVLTGGTGVGKTSQVPKLLMWFNYLFGGFERLDAVREFAERPLVLSLPRVTLVRAHTATYLASLGFGSAD

SEQ ID NO: 23599 - protein, 85 aa, unidentified
  REGION 1..85: note = Description of Unknown:hvTR_A0A0R8I9X5 target sequence
GSPVSPRYGAIPDAERNTAPRTYGLVVATHRLTLTAIRRYDTVVVDEIHEHDQMGDIVVAVARKLGSNMRSLVLMTATLEDDRAR

SEQ ID NO: 23600 - protein, 85 aa, unidentified
  REGION 1..85: note = Description of Unknown:hvTR_A0A0R8I9X5 target sequence
LEEFLDRPAFVHIEGDTLFPIREVYVKNTQQPPLSRKYAEAELQNVVQALGTFVPEQGKCGILFVATVAQCALFAETIEAKHPGL

SEQ ID NO: 23601 - protein, 85 aa, unidentified
  REGION 1..85: note = Description of Unknown:hvTR_A0A0R8I9X5 target sequence
LVRVVHGKVPSVAAVLEEVYAADRPAVLVSTPYLESSVTVRTATHVYDTGRVYVPEPFGGRETFVSKSMYTQRKGRVGRVAPGTY

SEQ ID NO: 23602 - protein, 85 aa, unidentified
  REGION 1..85: note = Description of Unknown:hvTR_A0A0R8I9X5 target sequence
VRFFDTRLALPLKRIDSEFLHPYVLYARIFGLTLPDDLLVQPSDLALLRRTEEYVDGFGISLSRWTQLLDRHYMHMVEYAKVYVR

SEQ ID NO: 23603 - protein, 85 aa, unidentified
  REGION 1..85: note = Description of Unknown:hvTR_A0A0R8I9X5 target sequence
GGRLAAALDAFERTGVMTHEAAEAIRAVDMLAAVLNVRKSKDRYRAECKVLFGPFAGKKFVVAGRRPPGSHVLMVTDRVFIEAEP

SEQ ID NO: 23604 - protein, 84 aa, unidentified; identical to SEQ ID NO: 23572
  REGION 1..84: note = Description of Unknown:hvTR_A0A0R8I9X5 target sequence

SEQ ID NO: 23605 - protein, 85 aa, unidentified
  REGION 1..85: note = Description of Unknown:hvTR_A0A0R8I9X5 target sequence
RLPEERRRAFAMAVFPLSKHRWRGARLQRDERSVWLSVEEDRGRALGERNCSWLSDVAARMVDDEGRAVTPEAYAFMRAAPGARV

SEQ ID NO: 23606 - protein, 85 aa, unidentified
  REGION 1..85: note = Description of Unknown:hvTR_A0A0R8I9X5 target sequence
AELAADAGVLAGLVAGGNALRVFSSESTQAREGWKARSVGVLGNAAPLAPVPLASLRPEVQRELFSAWIGRRPVVLTGGTGVGKT

SEQ ID NO: 23607 - protein, 85 aa, unidentified
  REGION 1..85: note = Description of Unknown:hvTR_A0A0R8I9X5 target sequence
SQVPKLLMWFNYLFGGFERLDAVREFAERPLVLSLPRVTLVRAHTATYLASLGFGSADGSPVSPRYGAIPDAERNTAPRTYGLVV

SEQ ID NO: 23608 - protein, 85 aa, unidentified
  REGION 1..85: note = Description of Unknown:hvTR_A0A0R8I9X5 target sequence
ATHRLTLTAIRRYDTVVVDEIHEHDQMGDIVVAVARKLGSNMRSLVLMTATLEDDRARLEEFLDRPAFVHIEGDTLFPIREVYVK

SEQ ID NO: 23609 - protein, 85 aa, unidentified
  REGION 1..85: note = Description of Unknown:hvTR_A0A0R8I9X5 target sequence
NTQQPPLSRKYAEAELQNVVQALGTFVPEQGKCGILFVATVAQCALFAETIEAKHPGLLVRVVHGKVPSVAAVLEEVYAADRPAV

SEQ ID NO: 23610 - protein, 85 aa, unidentified
  REGION 1..85: note = Description of Unknown:hvTR_A0A0R8I9X5 target sequence
LVSTPYLESSVTVRTATHVYDTGRVYVPEPFGGRETFVSKSMYTQRKGRVGRVAPGTYVRFFDTRLALPLKRIDSEFLHPYVLYA

SEQ ID NO: 23611 - protein, 85 aa, unidentified
  REGION 1..85: note = Description of Unknown:hvTR_A0A0R8I9X5 target sequence
RIFGLTLPDDLLVQPSDLALLRRTEEYVDGFGISLSRWTQLLDRHYMHMVEYAKVYVRGGRLAAALDAFERTGVMTHEAAEAIRA

SEQ ID NO: 23612 - protein, 85 aa, unidentified
  REGION 1..85: note = Description of Unknown:cds_NC_001608.3_cds_YP_001531156.1_4 target sequence
KTTCFLISLILIQGTKNLPILEIASNNQPQNVDSVCSGTLQKTEDVHLMGFTLSGQKVADSPLEASKRWAFRTGVPPKNVEYTEG

SEQ ID NO: 23613 - protein, 85 aa, unidentified
  REGION 1..85: note = Description of Unknown:cds_NC_001608.3_cds_YP_001531156.1_4 target sequence
EEAKTCYNISVTDPSGKSLLLDPPTNIRDYPKCKTIHHIQGQNPHAQGIALHLWGAFFLYDRIASTTMYRGKVFTEGNIAAMIVN

SEQ ID NO: 23614 - protein, 85 aa, unidentified
  REGION 1..85: note = Description of Unknown:cds_NC_001608.3_cds_YP_001531156.1_4 target sequence
KTVHKMIFSRQGQGYRHMNLTSTNKYWTSSNGTQTNDTGCFGALQEYNSTKNQTCAPSKIPPPLPTARPEIKLTSTPTDATKLNT

SEQ ID NO: 23615 - protein, 85 aa, unidentified
  REGION 1..85: note = Description of Unknown:cds_NC_001608.3_cds_YP_001531156.1_4 target sequence
TDPSSDDEDLATSGSGSGEREPHTTSDAVTKQGLSSTMPPTPSPQPSTPQQGGNNTNHSQDAVTELDKNNTTAQPSMPPHNTTTI

SEQ ID NO: 23616 - protein, 85 aa, unidentified
  REGION 1..85: note = Description of Unknown:cds_NC_001608.3_cds_YP_001531156.1_4 target sequence
STNNTSKHNFSTLSAPLQNTTNDNTQSTITENEQTSAPSITTLPPTGNPTTAKSTSSKKGPATTAPNTTNEHFTSPPPTPSSTAQ

SEQ ID NO: 23617 - protein, 85 aa, unidentified
  REGION 1..85: note = Description of Unknown:cds_NC_001608.3_cds_YP_001531156.1_4 target sequence
HLVYFRRKRSILWREGDMFPFLDGLINAPIDFDPVPNTKTIFDESSSSGASAEEDQHASPNISLTLSYFPNINENTAYSGENEND

SEQ ID NO: 23618 - protein, 85 aa, unidentified
  REGION 1..85: note = Description of Unknown:cds_NC_001608.3_cds_YP_001531156.1_4 target sequence
CDAELRIWSVQEDDLAAGLSWIPFFGPGIEGLYTAVLIKNQNNLVCRLRRLANQTAKSLELLLRVTTEERTFSLINRHAIDFLLT

SEQ ID NO: 23619 - protein, 85 aa, unidentified
  REGION 1..85: note = Description of Unknown:cds_NC_001608.3_cds_YP_001531156.1_4 target sequence
RWGGTCKVLGPDCCIGIEDLSKNISEQIDQIKKDEQKEGTGWGLGGKWWTSDWGVLTNLGILLLLSIAVLIALSCICRIFTKYIG

SEQ ID NO: 23620 - protein, 84 aa, unidentified
  REGION 1..84: note = Description of Unknown:cds_NC_001608.3_cds_YP_001531156.1_4 target sequence
WGGTCKVLGPDCCIGIEDLSKNISEQIDQIKKDEQKEGTGWGLGGKWWTSDWGVLTNLGILLLLSIAVLIALSCICRIFTKYIG

SEQ ID NO: 23621 - protein, 85 aa, unidentified
  REGION 1..85: note = Description of Unknown:cds_NC_001608.3_cds_YP_001531156.1_4 target sequence
QPQNVDSVCSGTLQKTEDVHLMGFTLSGQKVADSPLEASKRWAFRTGVPPKNVEYTEGEEAKTCYNISVTDPSGKSLLLDPPTNI

SEQ ID NO: 23622 - protein, 85 aa, unidentified
  REGION 1..85: note = Description of Unknown:cds_NC_001608.3_cds_YP_001531156.1_4 target sequence
RDYPKCKTIHHIQGQNPHAQGIALHLWGAFFLYDRIASTTMYRGKVFTEGNIAAMIVNKTVHKMIFSRQGQGYRHMNLTSTNKYW

SEQ ID NO: 23623 - protein, 85 aa, unidentified
  REGION 1..85: note = Description of Unknown:cds_NC_001608.3_cds_YP_001531156.1_4 target sequence
TSSNGTQTNDTGCFGALQEYNSTKNQTCAPSKIPPPLPTARPEIKLTSTPTDATKLNTTDPSSDDEDLATSGSGSGEREPHTTSD

SEQ ID NO: 23624 - protein, 85 aa, unidentified
  REGION 1..85: note = Description of Unknown:cds_NC_001608.3_cds_YP_001531156.1_4 target sequence
AVTKQGLSSTMPPTPSPQPSTPQQGGNNTNHSQDAVTELDKNNTTAQPSMPPHNTTTISTNNTSKHNFSTLSAPLQNTTNDNTQS

SEQ ID NO: 23625 - protein, 85 aa, unidentified
  REGION 1..85: note = Description of Unknown:cds_NC_001608.3_cds_YP_001531156.1_4 target sequence
TITENEQTSAPSITTLPPTGNPTTAKSTSSKKGPATTAPNTTNEHFTSPPPTPSSTAQHLVYFRRKRSILWREGDMFPFLDGLIN

SEQ ID NO: 23626 - protein, 85 aa, unidentified
  REGION 1..85: note = Description of Unknown:cds_NC_001608.3_cds_YP_001531156.1_4 target sequence
APIDFDPVPNTKTIFDESSSSGASAEEDQHASPNISLTLSYFPNINENTAYSGENENDCDAELRIWSVQEDDLAAGLSWIPFFGP

SEQ ID NO: 23627 - protein, 85 aa, unidentified
  REGION 1..85: note = Description of Unknown:cds_NC_001608.3_cds_YP_001531156.1_4 target sequence
GIEGLYTAVLIKNQNNLVCRLRRLANQTAKSLELLLRVTTEERTFSLINRHAIDFLLTRWGGTCKVLGPDCCIGIEDLSKNISEQ

SEQ ID NO: 23628 - protein, 85 aa, unidentified
  REGION 1..85: note = Description of Unknown:hvTR_Q2HR71 target sequence
PRYTESEWLTDFIIDALDSGRFWGVGWLDEQKRIFTVPGRNRRERMPEGFDDFYEAFLEERRRHGLPEIPETETGLGCFGRLLRT

SEQ ID NO: 23629 - protein, 85 aa, unidentified
  REGION 1..85: note = Description of Unknown:hvTR_Q2HR71 target sequence
ANRARQERPFTIYKGKMKLNRWIMTPRPYKGCEGCLVYLTQEPAMKNMLKALFGIYPHDDKHREKALRRSLRKKAQREAARKQAA

SEQ ID NO: 23630 - protein, 85 aa, unidentified
  REGION 1..85: note = Description of Unknown:hvTR_Q2HR71 target sequence
AVATPTTSSAAEVSSRSQSEDTESSDSENELWVGAQGFVGRDMHSLFFEEPEPSGFGSSGQSSSLLAPDSPRPSTSQVQGPLHVH

SEQ ID NO: 23631 - protein, 85 aa, unidentified
  REGION 1..85: note = Description of Unknown:hvTR_Q2HR71 target sequence
TPTDLCLPTGGLPSPVIFPHETQGLLAPPAGQSQTPFSPEGPVPSHVSGLDDCLPMVDHIEGCLLDLLSDVGQELPDLGDLGELL

SEQ ID NO: 23632 - protein, 85 aa, unidentified
  REGION 1..85: note = Description of Unknown:hvTR_Q2HR71 target sequence
CETASPQGPMQSEGGEEGSTESVSVLPATHPLESSAPGASVMGSGQELPDLGDLSELLCETASPQGPMQSEGGEEGSTESVSVLP

SEQ ID NO: 23633 - protein, 85 aa, unidentified
  REGION 1..85: note = Description of Unknown:hvTR_Q2HR71 target sequence
ATHPLESSAPGASVMGSSFQASDNVDDFIDCIPPLCRDDRDVEDQEKADQTFYWYGSDMRPKVLTATQSVAAYLSKKQAIYKVGD

SEQ ID NO: 23634 - protein, 85 aa, unidentified
  REGION 1..85: note = Description of Unknown:hvTR_Q2HR71 target sequence
KLVPLVVEVYYFGEKVKTHFDLTGGIVICSQVPEASPEHICQTVPPYKCLLPRTAHCSVDANRTLEQTLDRFSMGVVAIGTNMGI

SEQ ID NO: 23635 - protein, 84 aa, unidentified
  REGION 1..84: note = Description of Unknown:hvTR_Q2HR71 target sequence
FLKGLLEYPAYFVGNASRRRIGKCRPLSHRHEIQQAFDVERHNREPEGSRYASLFLGRRPSPEYDWDHYPVILHIYLAPFYHRD

SEQ ID NO: 23636 - protein, 85 aa, unidentified
  REGION 1..85: note = Description of Unknown:hvTR_Q2HR71 target sequence
LDEQKRIFTVPGRNRRERMPEGFDDFYEAFLEERRRHGLPEIPETETGLGCFGRLLRTANRARQERPFTIYKGKMKLNRWIMTPR

SEQ ID NO: 23637 - protein, 85 aa, unidentified
  REGION 1..85: note = Description of Unknown:hvTR_Q2HR71 target sequence
PYKGCEGCLVYLTQEPAMKNMLKALFGIYPHDDKHREKALRRSLRKKAQREAARKQAAAVATPTTSSAAEVSSRSQSEDTESSDS

SEQ ID NO: 23638 - protein, 85 aa, unidentified
  REGION 1..85: note = Description of Unknown:hvTR_Q2HR71 target sequence
ENELWVGAQGFVGRDMHSLFFEEPEPSGFGSSGQSSSLLAPDSPRPSTSQVQGPLHVHTPTDLCLPTGGLPSPVIFPHETQGLLA

SEQ ID NO: 23639 - protein, 85 aa, unidentified
  REGION 1..85: note = Description of Unknown:hvTR_Q2HR71 target sequence
PPAGQSQTPFSPEGPVPSHVSGLDDCLPMVDHIEGCLLDLLSDVGQELPDLGDLGELLCETASPQGPMQSEGGEEGSTESVSVLP

SEQ ID NO: 23640 - protein, 85 aa, unidentified
  REGION 1..85: note = Description of Unknown:hvTR_Q2HR71 target sequence
ATHPLESSAPGASVMGSGQELPDLGDLSELLCETASPQGPMQSEGGEEGSTESVSVLPATHPLESSAPGASVMGSSFQASDNVDD

SEQ ID NO: 23641 - protein, 85 aa, unidentified
  REGION 1..85: note = Description of Unknown:hvTR_Q2HR71 target sequence
FIDCIPPLCRDDRDVEDQEKADQTFYWYGSDMRPKVLTATQSVAAYLSKKQAIYKVGDKLVPLVVEVYYFGEKVKTHFDLTGGIV

SEQ ID NO: 23642 - protein, 85 aa, unidentified
  REGION 1..85: note = Description of Unknown:hvTR_Q2HR71 target sequence
ICSQVPEASPEHICQTVPPYKCLLPRTAHCSVDANRTLEQTLDRFSMGVVAIGTNMGIFLKGLLEYPAYFVGNASRRRIGKCRPL

SEQ ID NO: 23643 - protein, 85 aa, unidentified
  REGION 1..85: note = Description of Unknown:hvTR_A0A059WI18 target sequence
EPSRGLGAPARPAAEAPPGDALGNDDLVLLSRYFFPDTDSDDDDADDPRAVAGPASDAAAADDAGLPETGGGAQPPAPPRETCAV

SEQ ID NO: 23644 - protein, 85 aa, unidentified
  REGION 1..85: note = Description of Unknown:hvTR_A0A059WI18 target sequence
CTERIDDAQICNTFPCLHCFCIPCLKTWLPMRNSCPLCNAAVAYLIVGVQPNGSYSTIPVVNDPRTRLEAEDAVRAGTAVDFIWV

SEQ ID NO: 23645 - protein, 85 aa, unidentified
  REGION 1..85: note = Description of Unknown:hvTR_A0A059WI18 target sequence
DRPGQPAPPSVTLGGRTVRALSPPARMGRPVTDSEDTDDDADSDEDEDSDEDEDDSLADPTFHPAPARGARGPAARGDAAPAHRA

SEQ ID NO: 23646 - protein, 85 aa, unidentified
  REGION 1..85: note = Description of Unknown:hvTR_A0A059WI18 target sequence
SARGGARGGARGGAAPRAPARGTRAAHPAPAENPAPIVIGDSPPASPRRPSSAAAPPVVPVAPRPRPAAEPPAPAPGAAPRQPAH

SEQ ID NO: 23647 - protein, 85 aa, unidentified
  REGION 1..85: note = Description of Unknown:hvTR_A0A059WI18 target sequence
QTQAQARAQARTQARAQASLAQALAQALVQARPGAGAQPRPATQVPPAAQAQLRPAAPLGTRAQPRAHPSAPPQAPAPPLCAVVA

SEQ ID NO: 23648 - protein, 85 aa, unidentified
  REGION 1..85: note = Description of Unknown:hvTR_A0A059WI18 target sequence
AAASARKRPASASEAAPAPRGPKRPSLPPPPGGSPHPRPAPARAPALAGAPPPPRPLAAPAAPPPPQAAPPPPAAPPPPVERRDR

SEQ ID NO: 23649 - protein, 85 aa, unidentified
  REGION 1..85: note = Description of Unknown:hvTR_A0A059WI18 target sequence
SSLGPRPAEQGPRKCVRKTRHVDAECAPAALGPTRYLPVSGVSSVVALAPYLNKTVTGDCLPVLDMETGDIGAYVVLVGRACNMA

SEQ ID NO: 23650 - protein, 84 aa, unidentified
  REGION 1..84: note = Description of Unknown:hvTR_A0A059WI18 target sequence
ARALAEASPEWLRRTRLPEAAPGRVSPPEYPADPAHGLWMTPVGGMLFDQGALLGGRSFHSLDSRHPWTPGPAGPPPTRGSGGP

SEQ ID NO: 23651 - protein, 85 aa, unidentified
  REGION 1..85: note = Description of Unknown:hvTR_A0A059WI18 target sequence
VLLSRYFFPDTDSDDDDADDPRAVAGPASDAAAADDAGLPETGGGAQPPAPPRETCAVCTERIDDAQICNTFPCLHCFCIPCLKT

SEQ ID NO: 23652 - protein, 85 aa, unidentified
  REGION 1..85: note = Description of Unknown:hvTR_A0A059WI18 target sequence
WLPMRNSCPLCNAAVAYLIVGVQPNGSYSTIPVVNDPRTRLEAEDAVRAGTAVDFIWVDRPGQPAPPSVTLGGRTVRALSPPARM

SEQ ID NO: 23653 - protein, 85 aa, unidentified
  REGION 1..85: note = Description of Unknown:hvTR_A0A059WI18 target sequence
GRPVTDSEDTDDDADSDEDEDSDEDEDDSLADPTFHPAPARGARGPAARGDAAPAHRASARGGARGGARGGAAPRAPARGTRAAH

SEQ ID NO: 23654 - protein, 85 aa, unidentified
  REGION 1..85: note = Description of Unknown:hvTR_A0A059WI18 target sequence
PAPAENPAPIVIGDSPPASPRRPSSAAAPPVVPVAPRPRPAAEPPAPAPGAAPRQPAHQTQAQARAQARTQARAQASLAQALAQA

SEQ ID NO: 23655 - protein, 85 aa, unidentified
  REGION 1..85: note = Description of Unknown:hvTR_A0A059WI18 target sequence
LVQARPGAGAQPRPATQVPPAAQAQLRPAAPLGTRAQPRAHPSAPPQAPAPPLCAVVAAAASARKRPASASEAAPAPRGPKRPSL

SEQ ID NO: 23656 - protein, 85 aa, unidentified
  REGION 1..85: note = Description of Unknown:hvTR_A0A059WI18 target sequence
PPPPGGSPHPRPAPARAPALAGAPPPPRPLAAPAAPPPPQAAPPPPAAPPPPVERRDRSSLGPRPAEQGPRKCVRKTRHVDAECA

SEQ ID NO: 23657 - protein, 85 aa, unidentified
  REGION 1..85: note = Description of Unknown:hvTR_A0A059WI18 target sequence
PAALGPTRYLPVSGVSSVVALAPYLNKTVTGDCLPVLDMETGDIGAYVVLVGRACNMARALAEASPEWLRRTRLPEAAPGRVSPP

SEQ ID NO: 23658 - protein, 85 aa, unidentified
  REGION 1..85: note = Description of Unknown:cds_NZ_WFIY01000004.1_cds_WP_155864306.1_2301 target sequence
KVVIKEGKGGIYKIIVNDPFPPVEFPFEGKESEKDLSFFSLNITESEGNIVIEKDLDIKEHVLGLGEKAYELDRRRGRFIMYNVD

SEQ ID NO: 23659 - protein, 85 aa, unidentified
  REGION 1..85: note = Description of Unknown:cds_NZ_WFIY01000004.1_cds_WP_155864306.1_2301 target sequence
AGAYDKFSEPLYLNVPFIITVKHGVAKGYFINSASKVIFDIGFEDYGKIKIKIPEPSVEIYYFEGPTVEKVLEQYAELTGKPFLP

SEQ ID NO: 23660 - protein, 85 aa, unidentified
  REGION 1..85: note = Description of Unknown:cds_NZ_WFIY01000004.1_cds_WP_155864306.1_2301 target sequence
PIWAFGYMISRYSYFPQDKIVKLLDELKEEGFRVSGVFLDIDYMDSFKLFTWDRNRFPDPRRFIDEVHSRGVKVITIVDHSVRVD

SEQ ID NO: 23661 - protein, 85 aa, unidentified
  REGION 1..85: note = Description of Unknown:cds_NZ_WFIY01000004.1_cds_WP_155864306.1_2301 target sequence
QNYNVFISGLGKYCEMSSGELFVGKLWPGNSVYPDFFREETRDWWSGLISSWLSQGIDGIWLDMNEPTDFTKVQEILDIFKDTPI

SEQ ID NO: 23662 - protein, 85 aa, unidentified
  REGION 1..85: note = Description of Unknown:cds_NZ_WFIY01000004.1_cds_WP_155864306.1_2301 target sequence
QIKDNRFYTTFPDNVVHYLRGKKVPHSQVRNAYPYYEAMATFEGFKKAGRDEIFILSRSGYAGIQKYAFVWTGDNTSSWDQLRLQ

SEQ ID NO: 23663 - protein, 85 aa, unidentified
  REGION 1..85: note = Description of Unknown:cds_NZ_WFIY01000004.1_cds_WP_155864306.1_2301 target sequence
LQTVLGLSISGIPYVGIDIGGFQGRLSKVENSPEILLYMFRLAMFFPFFRTHKAKDGIDVEPIYLPYYYKEKVRDVINTRYKFLP

SEQ ID NO: 23664 - protein, 85 aa, unidentified
  REGION 1..85: note = Description of Unknown:cds_NZ_WFIY01000004.1_cds_WP_155864306.1_2301 target sequence
YIYCLAKEAHETGHPIIRPLFYEFPEDEDTYRIDDEYMLGKYVLYAPQLGESRVVYLPGKWFEFSTGEERGGWVKTNADLPIYIR

SEQ ID NO: 23665 - protein, 84 aa, unidentified
  REGION 1..84: note = Description of Unknown:cds_NZ_WFIY01000004.1_cds_WP_155864306.1_2301 target sequence
RENSVVNLDGNDLIALGNSKLKCEIEIEKKGNIITFSKPYFVNMLVTDKVEKVIINGNEVKAEDFGALSKVKINKEVRKVELVY

SEQ ID NO: 23666 - protein, 85 aa, unidentified
  REGION 1..85: note = Description of Unknown:cds_NZ_WFIY01000004.1_cds_WP_155864306.1_2301 target sequence
EGKESEKDLSFFSLNITESEGNIVIEKDLDIKEHVLGLGEKAYELDRRRGRFIMYNVDAGAYDKFSEPLYLNVPFIITVKHGVAK

SEQ ID NO: 23667 - protein, 85 aa, unidentified
  REGION 1..85: note = Description of Unknown:cds_NZ_WFIY01000004.1_cds_WP_155864306.1_2301 target sequence
GYFINSASKVIFDIGFEDYGKIKIKIPEPSVEIYYFEGPTVEKVLEQYAELTGKPFLPPIWAFGYMISRYSYFPQDKIVKLLDEL

SEQ ID NO: 23668 - protein, 85 aa, unidentified
  REGION 1..85: note = Description of Unknown:cds_NZ_WFIY01000004.1_cds_WP_155864306.1_2301 target sequence
KEEGFRVSGVFLDIDYMDSFKLFTWDRNRFPDPRRFIDEVHSRGVKVITIVDHSVRVDQNYNVFISGLGKYCEMSSGELFVGKLW

SEQ ID NO: 23669 - protein, 85 aa, unidentified
  REGION 1..85: note = Description of Unknown:cds_NZ_WFIY01000004.1_cds_WP_155864306.1_2301 target sequence
PGNSVYPDFFREETRDWWSGLISSWLSQGIDGIWLDMNEPTDFTKVQEILDIFKDTPIQIKDNRFYTTFPDNVVHYLRGKKVPHS

SEQ ID NO: 23670 - protein, 85 aa, unidentified
  REGION 1..85: note = Description of Unknown:cds_NZ_WFIY01000004.1_cds_WP_155864306.1_2301 target sequence
QVRNAYPYYEAMATFEGFKKAGRDEIFILSRSGYAGIQKYAFVWTGDNTSSWDQLRLQLQTVLGLSISGIPYVGIDIGGFQGRLS

SEQ ID NO: 23671 - protein, 85 aa, unidentified
  REGION 1..85: note = Description of Unknown:cds_NZ_WFIY01000004.1_cds_WP_155864306.1_2301 target sequence
KVENSPEILLYMFRLAMFFPFFRTHKAKDGIDVEPIYLPYYYKEKVRDVINTRYKFLPYIYCLAKEAHETGHPIIRPLFYEFPED

SEQ ID NO: 23672 - protein, 85 aa, unidentified
  REGION 1..85: note = Description of Unknown:cds_NZ_WFIY01000004.1_cds_WP_155864306.1_2301 target sequence
EDTYRIDDEYMLGKYVLYAPQLGESRVVYLPGKWFEFSTGEERGGWVKTNADLPIYIRENSVVNLDGNDLIALGNSKLKCEIEIE

SEQ ID NO: 23673 - protein, 85 aa, unidentified
  REGION 1..85: note = Description of Unknown:cds_NC_035460.1_cds_YP_009408004.1_53 target sequence
DNNLPNIFFFPNNVTVYSYNYTQDEFDSMNKLEKQRFKLTVFPLLKHRWKFAYVVQKGNIIKLNKETNSKSFKKIELNSINLPIY

SEQ ID NO: 23674 - protein, 85 aa, unidentified
  REGION 1..85: note = Description of Unknown:cds_NC_035460.1_cds_YP_009408004.1_53 target sequence
VDNKNKQFKIDNKLISFECYSFIKCKQGVNVDTFDDYILKGLIEGGNAMKIFSNSVGNIESSKEIFGNTLPFAKIPLASLLPKAQ

SEQ ID NO: 23675 - protein, 85 aa, unidentified
  REGION 1..85: note = Description of Unknown:cds_NC_035460.1_cds_YP_009408004.1_53 target sequence
VEIFSAWMSHNPVVLTGGTGVGKTSQVPKLLLWFNYLFGGFSTLLKISPFEEREIVLSLPRITLVKLHSNTLLNSLGFKHINGSP

SEQ ID NO: 23676 - protein, 85 aa, unidentified
  REGION 1..85: note = Description of Unknown:cds_NC_035460.1_cds_YP_009408004.1_53 target sequence
INLKFGAITNDIINHKPKSYGIIFATHKLTLTKLFNYGTVIIDEVHEHDQIGDIIIAISRKHISKLDSLFLMTATLEDDRSRLQN

SEQ ID NO: 23677 - protein, 85 aa, unidentified
  REGION 1..85: note = Description of Unknown:cds_NC_035460.1_cds_YP_009408004.1_53 target sequence
FLPNPIFVHIPGDTLYKISEVYIKNKIDFRDKNKYLEEELKNLVTAIKKYTPKPKYSGIVFVATIAQCETYKIYLQSHLPYNIYI

SEQ ID NO: 23678 - protein, 85 aa, unidentified
  REGION 1..85: note = Description of Unknown:cds_NC_035460.1_cds_YP_009408004.1_53 target sequence
IHGKVNDIDKILNEVYTTFNVSIIVSTPYLESSVTIKNVTHIYDMGRVFIPAPLGGKQIFISKSMRDQRKGRVGRVMPGTYLYFY

SEQ ID NO: 23679 - protein, 85 aa, unidentified
  REGION 1..85: note = Description of Unknown:cds_NC_035460.1_cds_YP_009408004.1_53 target sequence
DINNMKTINRIDSEYLHNYVLYAKQFNLTLPKDLFIIPSDLSLLYRTQEYIENFNISDKMWSKILSSYYLKMVEYAKIYSKGGEN

SEQ ID NO: 23680 - protein, 84 aa, unidentified
  REGION 1..84: note = Description of Unknown:cds_NC_035460.1_cds_YP_009408004.1_53 target sequence
NAIALDNFERDDIMNDTVYNSIISLDLKAKVLKIRKQKNMYLHTCKLLFGPFYGKIFNIQFKKPLNEYILMITEHMFIPYLKIV

SEQ ID NO: 23681 - protein, 85 aa, unidentified
  REGION 1..85: note = Description of Unknown:cds_NC_035460.1_cds_YP_009408004.1_53 target sequence
SMNKLEKQRFKLTVFPLLKHRWKFAYVVQKGNIIKLNKETNSKSFKKIELNSINLPIYVDNKNKQFKIDNKLISFECYSFIKCKQ

SEQ ID NO: 23682 - protein, 85 aa, unidentified
  REGION 1..85: note = Description of Unknown:cds_NC_035460.1_cds_YP_009408004.1_53 target sequence
GVNVDTFDDYILKGLIEGGNAMKIFSNSVGNIESSKEIFGNTLPFAKIPLASLLPKAQVEIFSAWMSHNPVVLTGGTGVGKTSQV

SEQ ID NO: 23683 - protein, 85 aa, unidentified
  REGION 1..85: note = Description of Unknown:cds_NC_035460.1_cds_YP_009408004.1_53 target sequence
PKLLLWFNYLFGGFSTLLKISPFEEREIVLSLPRITLVKLHSNTLLNSLGFKHINGSPINLKFGAITNDIINHKPKSYGIIFATH

SEQ ID NO: 23684 - protein, 85 aa, unidentified
  REGION 1..85: note = Description of Unknown:cds_NC_035460.1_cds_YP_009408004.1_53 target sequence
KLTLTKLFNYGTVIIDEVHEHDQIGDIIIAISRKHISKLDSLFLMTATLEDDRSRLQNFLPNPIFVHIPGDTLYKISEVYIKNKI

SEQ ID NO: 23685 - protein, 85 aa, unidentified
  REGION 1..85: note = Description of Unknown:cds_NC_035460.1_cds_YP_009408004.1_53 target sequence
DFRDKNKYLEEELKNLVTAIKKYTPKPKYSGIVFVATIAQCETYKIYLQSHLPYNIYIIHGKVNDIDKILNEVYTTFNVSIIVST

SEQ ID NO: 23686 - protein, 85 aa, unidentified
  REGION 1..85: note = Description of Unknown:cds_NC_035460.1_cds_YP_009408004.1_53 target sequence
PYLESSVTIKNVTHIYDMGRVFIPAPLGGKQIFISKSMRDQRKGRVGRVMPGTYLYFYDINNMKTINRIDSEYLHNYVLYAKQFN

SEQ ID NO: 23687 - protein, 85 aa, unidentified
  REGION 1..85: note = Description of Unknown:cds_NC_035460.1_cds_YP_009408004.1_53 target sequence
LTLPKDLFIIPSDLSLLYRTQEYIENFNISDKMWSKILSSYYLKMVEYAKIYSKGGENAIALDNFERDDIMNDTVYNSIISLDLK

SEQ ID NO: 23688 - protein, 85 aa, unidentified
  REGION 1..85: note = Description of Unknown:hvTR_Q6TUW4 target sequence
DNHLPEIFYFPNCVDVFSHQYSQSEFDKMEKDFKKGFSLSVFPIIKHRWKKSFVVMDDGVLKLNLESSVNGNKIKKKIIITRYPE

SEQ ID NO: 23689 - protein, 85 aa, unidentified
  REGION 1..85: note = Description of Unknown:hvTR_Q6TUW4 target sequence
SVNFKLKTYTIGNLKITFECYSYLMCRQVTDTNLFDEYILRGLVEGGNALKIFSKKTGHVKSTIGIFGNDTPFLKVPLMSLKPLS

SEQ ID NO: 23690 - protein, 85 aa, unidentified
  REGION 1..85: note = Description of Unknown:hvTR_Q6TUW4 target sequence
QQKIFNAWISNKPVILTGGTGVGKTSQVPKLLLWFNYLFGGFKNLNKISSFNEKQIVLSLPRVTLVKLHSKTLLSSIGFNKIDSS

SEQ ID NO: 23691 - protein, 85 aa, unidentified
  REGION 1..85: note = Description of Unknown:hvTR_Q6TUW4 target sequence
PISLKFGSMPDSLINTNPKPYGLVFSTHKLTISKLFRFTKQLLIDEVHEHDPIGDIIISILNKKYNMFNSLFLMTATLEDDRERI

SEQ ID NO: 23692 - protein, 85 aa, unidentified
  REGION 1..85: note = Description of Unknown:hvTR_Q6TUW4 target sequence
NNFFTNPLFIHIPGGTLYNISEVYIKNALSFLNKYEYVEEEKKNIFEAIKKYTPLKSFSGIIFVSSVSQCEEYKKYLSQRFPYDF

SEQ ID NO: 23693 - protein, 85 aa, unidentified
  REGION 1..85: note = Description of Unknown:hvTR_Q6TUW4 target sequence
YIIHGKVLNIDEMLKKIYSNLNVSIIISTPYLESSVTIYNATHIYDTGRVYIPAPFGGKETFISKSMMEQRKGRVGRVRPGLYIY

SEQ ID NO: 23694 - protein, 85 aa, unidentified
  REGION 1..85: note = Description of Unknown:hvTR_Q6TUW4 target sequence
FYDILYLKPIKKIDFEFLHNYVLYGKYYDLDLANDLFIIPSNLNNIKKTEQYIDSFNIPISQWMYILCNYYLRVLEYAKIYVKGG

SEQ ID NO: 23695 - protein, 84 aa, unidentified
  REGION 1..84: note = Description of Unknown:hvTR_Q6TUW4 target sequence
GGTYAKSLDLFERENIVDNVVIDSIKSLNMRAKILCFKKKNNVYILTCEIMFGVYLGKRFNLTYNKPLTGFVLMITECDFIPEY

SEQ ID NO: 23696 - protein, 85 aa, unidentified
  REGION 1..85: note = Description of Unknown:hvTR_Q6TUW4 target sequence
KMEKDFKKGFSLSVFPIIKHRWKKSFVVMDDGVLKLNLESSVNGNKIKKKIIITRYPESVNFKLKTYTIGNLKITFECYSYLMCR

SEQ ID NO: 23697 - protein, 85 aa, unidentified
  REGION 1..85: note = Description of Unknown:hvTR_Q6TUW4 target sequence
QVTDTNLFDEYILRGLVEGGNALKIFSKKTGHVKSTIGIFGNDTPFLKVPLMSLKPLSQQKIFNAWISNKPVILTGGTGVGKTSQ

SEQ ID NO: 23698 - protein, 85 aa, unidentified
  REGION 1..85: note = Description of Unknown:hvTR_Q6TUW4 target sequence
VPKLLLWFNYLFGGFKNLNKISSFNEKQIVLSLPRVTLVKLHSKTLLSSIGFNKIDSSPISLKFGSMPDSLINTNPKPYGLVFST

SEQ ID NO: 23699 - protein, 85 aa, unidentified
  REGION 1..85: note = Description of Unknown:hvTR_Q6TUW4 target sequence
HKLTISKLFRFTKQLLIDEVHEHDPIGDIIISILNKKYNMFNSLFLMTATLEDDRERINNFFTNPLFIHIPGGTLYNISEVYIKN

SEQ ID NO: 23700 - protein, 85 aa, unidentified
  REGION 1..85: note = Description of Unknown:hvTR_Q6TUW4 target sequence
ALSFLNKYEYVEEEKKNIFEAIKKYTPLKSFSGIIFVSSVSQCEEYKKYLSQRFPYDFYIIHGKVLNIDEMLKKIYSNLNVSIII

SEQ ID NO: 23701 - protein, 85 aa, unidentified
  REGION 1..85: note = Description of Unknown:hvTR_Q6TUW4 target sequence
STPYLESSVTIYNATHIYDTGRVYIPAPFGGKETFISKSMMEQRKGRVGRVRPGLYIYFYDILYLKPIKKIDFEFLHNYVLYGKY

SEQ ID NO: 23702 - protein, 85 aa, unidentified
  REGION 1..85: note = Description of Unknown:hvTR_Q6TUW4 target sequence
YDLDLANDLFIIPSNLNNIKKTEQYIDSFNIPISQWMYILCNYYLRVLEYAKIYVKGGTYAKSLDLFERENIVDNVVIDSIKSLN

SEQ ID NO: 23703 - protein, 85 aa, unidentified
  REGION 1..85: note = Description of Unknown:cds_NZ_WFIY01000004.1_cds_1222 target sequence
RIGIDIGGAFTDVVVFDENSGDLLWTKVETTPDDPSVGVIKGVESLNLDLKNADLIIHGQTLAINTIIERKGAKVGLITTKGFRD

SEQ ID NO: 23704 - protein, 85 aa, unidentified
  REGION 1..85: note = Description of Unknown:cds_NZ_WFIY01000004.1_cds_1222 target sequence
ILEIQRANRRDMYNFRYKKPEPFVPRYLRLEISERIKSNGEILRPINEEEVNDVVQKLLEMKVSSIAVSLINSYINPIHEKKVYE

SEQ ID NO: 23705 - protein, 85 aa, unidentified
  REGION 1..85: note = Description of Unknown:cds_NZ_WFIY01000004.1_cds_1222 target sequence
LIKKIDDKVFVTLSSDITREWKEYERTNTAVLNTYIMPKIHEYLDKIEREFRNRGFKGNLFAMLSNGGTSTFEFAKKYPIYTLES

SEQ ID NO: 23706 - protein, 85 aa, unidentified
  REGION 1..85: note = Description of Unknown:cds_NZ_WFIY01000004.1_cds_1222 target sequence
GPVAGIVGAIKIGEVMGIKDIITFDGGSTTTKASLVFNSEPNITTEYYINRNRYNPGYPVKVPTVDIIETGNGGTSIAWIDETNN

SEQ ID NO: 23707 - protein, 85 aa, unidentified
  REGION 1..85: note = Description of Unknown:cds_NZ_WFIY01000004.1_cds_1222 target sequence
LNVGPRAAGSMPGPAAYGRGGKDPTLTDAYIICGLLNQEELLGGKIKVNRKLAEEAISKIANYYKIPIEEASYGIIKIANYNASN

SEQ ID NO: 23708 - protein, 85 aa, unidentified
  REGION 1..85: note = Description of Unknown:cds_NZ_WFIY01000004.1_cds_1222 target sequence
VIRLISVQRGYDPRDFTLFAYGGSGPMFAPFVAKELEIRKIVIPYIPAGVFSAWGMLATDIRHDLVMSFPLRIDKEDSIKIINDK

SEQ ID NO: 23709 - protein, 85 aa, unidentified
  REGION 1..85: note = Description of Unknown:cds_NZ_WFIY01000004.1_cds_1222 target sequence
FYELENRVKSILANEGFSNIIIVRYAEMRYYGQEHTVKVPIMGGIIRDIEIEEIKRRFNEVHKAIYSFTLDSPIEIVNFHVSGIA

SEQ ID NO: 23710 - protein, 84 aa, unidentified
  REGION 1..84: note = Description of Unknown:cds_NZ_WFIY01000004.1_cds_1222 target sequence
IAKLNKLPIIKINRENRQIDKAFKGMRKTYLGKFDEWPVYDKELLPLSYEVQGPAIIEDDTSTAIILDDQKGVLDEYGNLIITW

SEQ ID NO: 23711 - protein, 85 aa, unidentified
  REGION 1..85: note = Description of Unknown:cds_NZ_WFIY01000004.1_cds_1222 target sequence
VETTPDDPSVGVIKGVESLNLDLKNADLIIHGQTLAINTIIERKGAKVGLITTKGFRDILEIQRANRRDMYNFRYKKPEPFVPRY

SEQ ID NO: 23712 - protein, 85 aa, unidentified
  REGION 1..85: note = Description of Unknown:cds_NZ_WFIY01000004.1_cds_1222 target sequence
LRLEISERIKSNGEILRPINEEEVNDVVQKLLEMKVSSIAVSLINSYINPIHEKKVYELIKKIDDKVFVTLSSDITREWKEYERT

SEQ ID NO: 23713 - protein, 85 aa, unidentified
  REGION 1..85: note = Description of Unknown:cds_NZ_WFIY01000004.1_cds_1222 target sequence
NTAVLNTYIMPKIHEYLDKIEREFRNRGFKGNLFAMLSNGGTSTFEFAKKYPIYTLESGPVAGIVGAIKIGEVMGIKDIITFDGG

SEQ ID NO: 23714 - protein, 85 aa, unidentified
  REGION 1..85: note = Description of Unknown:cds_NZ_WFIY01000004.1_cds_1222 target sequence
STTTKASLVFNSEPNITTEYYINRNRYNPGYPVKVPTVDIIETGNGGTSIAWIDETNNLNVGPRAAGSMPGPAAYGRGGKDPTLT

SEQ ID NO: 23715 - protein, 85 aa, unidentified
  REGION 1..85: note = Description of Unknown:cds_NZ_WFIY01000004.1_cds_1222 target sequence
DAYIICGLLNQEELLGGKIKVNRKLAEEAISKIANYYKIPIEEASYGIIKIANYNASNVIRLISVQRGYDPRDFTLFAYGGSGPM

SEQ ID NO: 23716 - protein, 85 aa, unidentified
  REGION 1..85: note = Description of Unknown:cds_NZ_WFIY01000004.1_cds_1222 target sequence
FAPFVAKELEIRKIVIPYIPAGVFSAWGMLATDIRHDLVMSFPLRIDKEDSIKIINDKFYELENRVKSILANEGFSNIIIVRYAE

SEQ ID NO: 23717 - protein, 85 aa, unidentified
  REGION 1..85: note = Description of Unknown:cds_NZ_WFIY01000004.1_cds_1222 target sequence
MRYYGQEHTVKVPIMGGIIRDIEIEEIKRRFNEVHKAIYSFTLDSPIEIVNFHVSGIAKLNKLPIIKINRENRQIDKAFKGMRKT

SEQ ID NO: 23718 - protein, 85 aa, unidentified
  REGION 1..85: note = Description of Unknown:hvTR_G0XU00 target sequence
EKNLPDIFFFPNCVNVFSYKYSQDEFSNMSKTERASFSLAVFPVIKHRWHNAHVVKHKGIYKVSAEARGEKVSPPSLGKPVYINL

SEQ ID NO: 23719 - protein, 85 aa, unidentified
  REGION 1..85: note = Description of Unknown:hvTR_G0XU00 target sequence
TTRQYIYSEYTISFECYSFLKCITNTEINSFDDYILRGLLEAGNSLQIFSNSVGKRTDTVGVLGNKYPFSKIPLASLTPKAQREI

SEQ ID NO: 23720 - protein, 85 aa, unidentified
  REGION 1..85: note = Description of Unknown:hvTR_G0XU00 target sequence
FSAWISHRPVVLTGGTGVGKTSQVPKLLLWFNYLFGGFSTLDKITDFHERPVILSLPRIALVRLHSNTILKSLGFKVLDGSPISL

SEQ ID NO: 23721 - protein, 85 aa, unidentified
  REGION 1..85: note = Description of Unknown:hvTR_G0XU00 target sequence
RYGSIPDELINKHPKKYGIVFSTHKLSLTKLFSYGTLIIDEVHEHDQIGDIIIAVARKHHTKIDSMFLMTATLEDDRERLKVFLP

SEQ ID NO: 23722 - protein, 85 aa, unidentified
  REGION 1..85: note = Description of Unknown:hvTR_G0XU00 target sequence
NPAFIHIPGDTLFKIREVFIHNKINPSSRMAYIEEEKRNLVTAIEMYTPPDGSSGIVFVATVSQCHEYKSYLEKRLPYEMFIIHG

SEQ ID NO: 23723 - protein, 85 aa, unidentified
  REGION 1..85: note = Description of Unknown:hvTR_G0XU00 target sequence
KVLDIDEILEKVYSSPNVSIIISTPYLESSVTIRNVTHIYDMGRVFVPAPFGGSQQFISKSMRDQRKGRVGRVNPGTYVYFYDLS

SEQ ID NO: 23724 - protein, 85 aa, unidentified
  REGION 1..85: note = Description of Unknown:hvTR_G0XU00 target sequence
YMKSIQRIDSEFLHNYILYANKFNLTLPEDLFIIPTNLDVLWRTKEYIDSFDISTETWNKLLSNYYMKIIEYAKLYVLSPILAEE

SEQ ID NO: 23725 - protein, 84 aa, unidentified
  REGION 1..84: note = Description of Unknown:hvTR_G0XU00 target sequence
LAEELDNFERTGELTSTVKEAILSLNLRIKILNFKHKDEDTYIHFCRVLFGVYNGTNATIYYHRPLTGYMNMISDTIFVPVDNN

SEQ ID NO: 23726 - protein, 85 aa, unidentified
  REGION 1..85: note = Description of Unknown:hvTR_G0XU00 target sequence
NMSKTERASFSLAVFPVIKHRWHNAHVVKHKGIYKVSAEARGEKVSPPSLGKPVYINLTTRQYIYSEYTISFECYSFLKCITNTE

SEQ ID NO: 23727 - protein, 85 aa, unidentified
  REGION 1..85: note = Description of Unknown:hvTR_G0XU00 target sequence
INSFDDYILRGLLEAGNSLQIFSNSVGKRTDTVGVLGNKYPFSKIPLASLTPKAQREIFSAWISHRPVVLTGGTGVGKTSQVPKL

SEQ ID NO: 23728 - protein, 85 aa, unidentified
  REGION 1..85: note = Description of Unknown:hvTR_G0XU00 target sequence
LLWFNYLFGGFSTLDKITDFHERPVILSLPRIALVRLHSNTILKSLGFKVLDGSPISLRYGSIPDELINKHPKKYGIVFSTHKLS

SEQ ID NO: 23729 - protein, 85 aa, unidentified
  REGION 1..85: note = Description of Unknown:hvTR_G0XU00 target sequence
LTKLFSYGTLIIDEVHEHDQIGDIIIAVARKHHTKIDSMFLMTATLEDDRERLKVFLPNPAFIHIPGDTLFKIREVFIHNKINPS

SEQ ID NO: 23730 - protein, 85 aa, unidentified
  REGION 1..85: note = Description of Unknown:hvTR_G0XU00 target sequence
SRMAYIEEEKRNLVTAIEMYTPPDGSSGIVFVATVSQCHEYKSYLEKRLPYEMFIIHGKVLDIDEILEKVYSSPNVSIIISTPYL

SEQ ID NO: 23731 - protein, 85 aa, unidentified
  REGION 1..85: note = Description of Unknown:hvTR_G0XU00 target sequence
ESSVTIRNVTHIYDMGRVFVPAPFGGSQQFISKSMRDQRKGRVGRVNPGTYVYFYDLSYMKSIQRIDSEFLHNYILYANKFNLTL

SEQ ID NO: 23732 - protein, 85 aa, unidentified
  REGION 1..85: note = Description of Unknown:hvTR_G0XU00 target sequence
PEDLFIIPTNLDVLWRTKEYIDSFDISTETWNKLLSNYYMKIIEYAKLYVLSPILAEELDNFERTGELTSTVKEAILSLNLRIKI

SEQ ID NO: 23733 - protein, 85 aa, unidentified
  REGION 1..85: note = Description of Unknown:hvTR_Q3I8U5 target sequence
EKNLPDIFFFPNCVNVFSYKYSQDEFSNMSKTERDNFSLAVFPVIKHRWHNAHVVKHKGIYKVSTEARGKKVSPPSLGKPAHINL

SEQ ID NO: 23734 - protein, 85 aa, unidentified
  REGION 1..85: note = Description of Unknown:hvTR_Q3I8U5 target sequence
MSKQYIYSEYAISFECYSFLKCITNTEINSFDEYILRGLLEAGNSLQIFSNSVGKRIDTIGVLGNKYPFSKIPLASLTPKAQREI

SEQ ID NO: 23735 - protein, 85 aa, unidentified
  REGION 1..85: note = Description of Unknown:hvTR_Q3I8U5 target sequence
FLAWISHRPVVLTGGTGVGKTSQVPKLLLWFNYLFGGFSTLDKITDFHERPVILSLPRIALVRLHSNTILKSLGFKVLDGSPISL

SEQ ID NO: 23736 - protein, 85 aa, unidentified
  REGION 1..85: note = Description of Unknown:hvTR_Q3I8U5 target sequence
RYGSIPEELINKQPKKYGIVFSTHKLSLTKLFSYGTIIIDEVHEHDQIGDIIIAVARKHHTKIDSMFLMTATLEDDRERLKIFLP

SEQ ID NO: 23737 - protein, 85 aa, unidentified
  REGION 1..85: note = Description of Unknown:hvTR_Q3I8U5 target sequence
NPAFIHIPGDTLFKISEVFIHNKINPSSRMAYIEEEKRNLVTAIQMYTPPDGSSGIVFVASVAQCHEYKSYLEKRLPYDMYIIHG

SEQ ID NO: 23738 - protein, 85 aa, unidentified; identical to SEQ ID NO: 23723
  REGION 1..85: note = Description of Unknown:hvTR_Q3I8U5 target sequence

SEQ ID NO: 23739 - protein, 85 aa, unidentified
  REGION 1..85: note = Description of Unknown:hvTR_Q3I8U5 target sequence
YMKSIQRIDSEFLHNYILYANKFNLTLPEDLFIIPTNLDILWRTKEYIDSFDISTETWNKLLSNYYMKMIEYAKLYVLSPILAEE

SEQ ID NO: 23740 - protein, 84 aa, unidentified
  REGION 1..84: note = Description of Unknown:hvTR_Q3I8U5 target sequence
LAEELDNFERTGELTSIVQEAILSLNLRIKILKFKHKDDDTYIHFCRILFGVYNGTNATIYYHRPLTGYMNMISDTIFVPVDNN

SEQ ID NO: 23741 - protein, 85 aa, unidentified
  REGION 1..85: note = Description of Unknown:hvTR_Q3I8U5 target sequence
NMSKTERDNFSLAVFPVIKHRWHNAHVVKHKGIYKVSTEARGKKVSPPSLGKPAHINLMSKQYIYSEYAISFECYSFLKCITNTE

SEQ ID NO: 23742 - protein, 85 aa, unidentified
  REGION 1..85: note = Description of Unknown:hvTR_Q3I8U5 target sequence
INSFDEYILRGLLEAGNSLQIFSNSVGKRIDTIGVLGNKYPFSKIPLASLTPKAQREIFLAWISHRPVVLTGGTGVGKTSQVPKL

SEQ ID NO: 23743 - protein, 85 aa, unidentified
  REGION 1..85: note = Description of Unknown:hvTR_Q3I8U5 target sequence
LLWFNYLFGGFSTLDKITDFHERPVILSLPRIALVRLHSNTILKSLGFKVLDGSPISLRYGSIPEELINKQPKKYGIVFSTHKLS

SEQ ID NO: 23744 - protein, 85 aa, unidentified
  REGION 1..85: note = Description of Unknown:hvTR_Q3I8U5 target sequence
LTKLFSYGTIIIDEVHEHDQIGDIIIAVARKHHTKIDSMFLMTATLEDDRERLKIFLPNPAFIHIPGDTLFKISEVFIHNKINPS

SEQ ID NO: 23745 - protein, 85 aa, unidentified
  REGION 1..85: note = Description of Unknown:hvTR_Q3I8U5 target sequence
SRMAYIEEEKRNLVTAIQMYTPPDGSSGIVFVASVAQCHEYKSYLEKRLPYDMYIIHGKVLDIDEILEKVYSSPNVSIIISTPYL

SEQ ID NO: 23746 - protein, 85 aa, unidentified; identical to SEQ ID NO: 23731
  REGION 1..85: note = Description of Unknown:hvTR_Q3I8U5 target sequence

SEQ ID NO: 23747 - protein, 85 aa, unidentified
  REGION 1..85: note = Description of Unknown:hvTR_Q3I8U5 target sequence
PEDLFIIPTNLDILWRTKEYIDSFDISTETWNKLLSNYYMKMIEYAKLYVLSPILAEELDNFERTGELTSIVQEAILSLNLRIKI

SEQ ID NO: 23748 - protein, 85 aa, unidentified
  REGION 1..85: note = Description of Unknown:hvTR_A7XCG8 target sequence
DNHLPEIFYFPNCVDIFSHQYSQIEFNKMEKTTKKNFSLAVFPIIKHRWKKSFIVIDNGIFKLNLESENNNKIKKNIKIDTYPES

SEQ ID NO: 23749 - protein, 85 aa, unidentified
  REGION 1..85: note = Description of Unknown:hvTR_A7XCG8 target sequence
IDIQLKIYTVGNLKITFECYSYLMCKQIKDINLFNEYILRGLIEGGNALKIFSKKTGYVNSSIGIFGNESSFLKIPLTSLKPLAQ

SEQ ID NO: 23750 - protein, 85 aa, unidentified
  REGION 1..85: note = Description of Unknown:hvTR_A7XCG8 target sequence
QKIFNAWLSNKPVILTGGTGVGKTSQVPKLLLWFNYLFGGFKNLNNINNFHERQIVLSLPRVTLVKLHSKTLLSSIGFKQINNSP

SEQ ID NO: 23751 - protein, 85 aa, unidentified
  REGION 1..85: note = Description of Unknown:hvTR_A7XCG8 target sequence
ISLKFGSMPDNLINNNPKPYGLVFSTHKLTLSKLFDYGTIIIDEVHEHDQIGDIIISVLNKNINMFNSLFLMTATLEDDRERIND

SEQ ID NO: 23752 - protein, 85 aa, unidentified
  REGION 1..85: note = Description of Unknown:hvTR_A7XCG8 target sequence
FFTNPLFIHIPGGTLYNISEIYIKNTSSFLNKYEYIEEEKKNILNAIKKYTPLKKFSGIVFVSSVSQCEEYKKYLSQKLPYDFYI

SEQ ID NO: 23753 - protein, 85 aa, unidentified
  REGION 1..85: note = Description of Unknown:hvTR_A7XCG8 target sequence
IHGKVLNIDDMLKNIYSSKNVSIIISTPYLESSVTIYNVTHIYDTGRVYIPAPFGGKEMFISKSMMEQRKGRVGRVRPGLYIYFY

SEQ ID NO: 23754 - protein, 85 aa, unidentified
  REGION 1..85: note = Description of Unknown:hvTR_A7XCG8 target sequence
DVLCLKPIKKIDFEFLHNYVLYAKYYNLTLPNDLFIIPNNLDNIKKTEEYIDSFNIPISKWMYILSNYYLRILEYAKIYIKGGIY

SEQ ID NO: 23755 - protein, 84 aa, unidentified
  REGION 1..84: note = Description of Unknown:hvTR_A7XCG8 target sequence
GGIYSKSLDLFERENIINNVVVDSIKSLNMRAKVLFFKKKNNIYVLTCEIMFGVYLGKKFNLTYRKPLTGFILMITECNFIPEY

SEQ ID NO: 23756 - protein, 85 aa, unidentified
  REGION 1..85: note = Description of Unknown:hvTR_A7XCG8 target sequence
KMEKTTKKNFSLAVFPIIKHRWKKSFIVIDNGIFKLNLESENNNKIKKNIKIDTYPESIDIQLKIYTVGNLKITFECYSYLMCKQ

SEQ ID NO: 23757 - protein, 85 aa, unidentified
  REGION 1..85: note = Description of Unknown:hvTR_A7XCG8 target sequence
IKDINLFNEYILRGLIEGGNALKIFSKKTGYVNSSIGIFGNESSFLKIPLTSLKPLAQQKIFNAWLSNKPVILTGGTGVGKTSQV

SEQ ID NO: 23758 - protein, 85 aa, unidentified
  REGION 1..85: note = Description of Unknown:hvTR_A7XCG8 target sequence
PKLLLWFNYLFGGFKNLNNINNFHERQIVLSLPRVTLVKLHSKTLLSSIGFKQINNSPISLKFGSMPDNLINNNPKPYGLVFSTH

SEQ ID NO: 23759 - protein, 85 aa, unidentified
  REGION 1..85: note = Description of Unknown:hvTR_A7XCG8 target sequence
KLTLSKLFDYGTIIIDEVHEHDQIGDIIISVLNKNINMFNSLFLMTATLEDDRERINDFFTNPLFIHIPGGTLYNISEIYIKNTS

SEQ ID NO: 23760 - protein, 85 aa, unidentified
  REGION 1..85: note = Description of Unknown:hvTR_A7XCG8 target sequence
SFLNKYEYIEEEKKNILNAIKKYTPLKKFSGIVFVSSVSQCEEYKKYLSQKLPYDFYIIHGKVLNIDDMLKNIYSSKNVSIIIST

SEQ ID NO: 23761 - protein, 85 aa, unidentified
  REGION 1..85: note = Description of Unknown:hvTR_A7XCG8 target sequence
PYLESSVTIYNVTHIYDTGRVYIPAPFGGKEMFISKSMMEQRKGRVGRVRPGLYIYFYDVLCLKPIKKIDFEFLHNYVLYAKYYN

SEQ ID NO: 23762 - protein, 85 aa, unidentified
  REGION 1..85: note = Description of Unknown:hvTR_A7XCG8 target sequence
LTLPNDLFIIPNNLDNIKKTEEYIDSFNIPISKWMYILSNYYLRILEYAKIYIKGGIYSKSLDLFERENIINNVVVDSIKSLNMR

SEQ ID NO: 23763 - protein, 85 aa, unidentified
  REGION 1..85: note = Description of Unknown:hvTR_P12927 target sequence
EKNLPDIFFFPNCVNVFSYKYSQDEFSNMSKTERDSFSLAVFPVIKHRWHNAHVVKHKGIYKVSTEARGKKVSPPSLGKPAHINL

SEQ ID NO: 23764 - protein, 85 aa, unidentified
  REGION 1..85: note = Description of Unknown:hvTR_P12927 target sequence
TAKQYIYSEHTISFECYSFLKCITNTEINSFDEYILRGLLEAGNSLQIFSNSVGKRTDTIGVLGNKYPFSKIPLASLTPKAQREI

SEQ ID NO: 23765 - protein, 85 aa, unidentified
  REGION 1..85: note = Description of Unknown:hvTR_P12927 target sequence
FSAWISHRPVVLTGGTGVGKTSQVPKLLLWFNYLFGGFSTLDKITNFHERPVILSLPRIALVRLHSNTILKSLGFKVLDGSPISL

SEQ ID NO: 23766 - protein, 85 aa, unidentified
  REGION 1..85: note = Description of Unknown:hvTR_P12927 target sequence
RYGSIPEELINKQPKKYGIVFSTHKLSLTKLFSYGTLIIDEVHEHDQIGDIIIAVARKHHTKIDSMFLMTATLEDDRERLKVFLP

SEQ ID NO: 23767 - protein, 85 aa, unidentified; identical to SEQ ID NO: 23737
  REGION 1..85: note = Description of Unknown:hvTR_P12927 target sequence

SEQ ID NO: 23768 - protein, 85 aa, unidentified
  REGION 1..85: note = Description of Unknown:hvTR_P12927 target sequence
KVLDIDEILEKVYSSPNVSIIISTPYLESSVTIRNVTHIYDMGKVFVPAPFGGSQEFISKSMRDQRKGRVGRVNPGTYVYFYDLS

SEQ ID NO: 23769 - protein, 84 aa, unidentified
  REGION 1..84: note = Description of Unknown:hvTR_P12927 target sequence
LAEELDNFERTGELTSIVREAILSLNLRIKILNFKHKDDDTYIHFCKILFGVYNGTNATIYYHRPLTGYMNMISDTIFVPVDNN

SEQ ID NO: 23770 - protein, 85 aa, unidentified
  REGION 1..85: note = Description of Unknown:hvTR_P12927 target sequence
NMSKTERDSFSLAVFPVIKHRWHNAHVVKHKGIYKVSTEARGKKVSPPSLGKPAHINLTAKQYIYSEHTISFECYSFLKCITNTE

SEQ ID NO: 23771 - protein, 85 aa, unidentified
  REGION 1..85: note = Description of Unknown:hvTR_P12927 target sequence
INSFDEYILRGLLEAGNSLQIFSNSVGKRTDTIGVLGNKYPFSKIPLASLTPKAQREIFSAWISHRPVVLTGGTGVGKTSQVPKL

SEQ ID NO: 23772 - protein, 85 aa, unidentified
  REGION 1..85: note = Description of Unknown:hvTR_P12927 target sequence
LLWFNYLFGGFSTLDKITNFHERPVILSLPRIALVRLHSNTILKSLGFKVLDGSPISLRYGSIPEELINKQPKKYGIVFSTHKLS

SEQ ID NO: 23773 - protein, 85 aa, unidentified
  REGION 1..85: note = Description of Unknown:hvTR_P12927 target sequence
LTKLFSYGTLIIDEVHEHDQIGDIIIAVARKHHTKIDSMFLMTATLEDDRERLKVFLPNPAFIHIPGDTLFKISEVFIHNKINPS

SEQ ID NO: 23774 - protein, 85 aa, unidentified; identical to SEQ ID NO: 23745
  REGION 1..85: note = Description of Unknown:hvTR_P12927 target sequence

SEQ ID NO: 23775 - protein, 85 aa, unidentified
  REGION 1..85: note = Description of Unknown:hvTR_P12927 target sequence
ESSVTIRNVTHIYDMGKVFVPAPFGGSQEFISKSMRDQRKGRVGRVNPGTYVYFYDLSYMKSIQRIDSEFLHNYILYANKFNLTL

SEQ ID NO: 23776 - protein, 85 aa, unidentified
  REGION 1..85: note = Description of Unknown:hvTR_P12927 target sequence
PEDLFIIPTNLDILWRTKEYIDSFDISTETWNKLLSNYYMKMIEYAKLYVLSPILAEELDNFERTGELTSIVREAILSLNLRIKI

SEQ ID NO: 23777 - protein, 85 aa, unidentified
  REGION 1..85: note = Description of Unknown:hvTR_P0DSU5 target sequence
EKNLPDIFFFPNCVNVFSYKYSQDEFSNMSNMERDSFSLAVFPVIKHRWHNAHVVKHKGIYKVSTEAHGKKVSPPSLGKPSHINL

SEQ ID NO: 23778 - protein, 85 aa, unidentified
  REGION 1..85: note = Description of Unknown:hvTR_P0DSU5 target sequence
TAKQYIYSEHTISFECYSFLKCITNAEINSFDEYILRGLLEAGNSLQIFSNSVGKRTDTIGVLGNKYPFSKIPLASLTPKAQREI

SEQ ID NO: 23779 - protein, 85 aa, unidentified; identical to SEQ ID NO: 23720
  REGION 1..85: note = Description of Unknown:hvTR_P0DSU5 target sequence

SEQ ID NO: 23780 - protein, 85 aa, unidentified; identical to SEQ ID NO: 23766
  REGION 1..85: note = Description of Unknown:hvTR_P0DSU5 target sequence

SEQ ID NO: 23781 - protein, 85 aa, unidentified; identical to SEQ ID NO: 23737
  REGION 1..85: note = Description of Unknown:hvTR_P0DSU5 target sequence

SEQ ID NO: 23782 - protein, 85 aa, unidentified
  REGION 1..85: note = Description of Unknown:hvTR_P0DSU5 target sequence
KVLEIDKILEKVYSSPNVSIIISAPYLESSVTIHNVTHIYDMGRVFVPAPFGGSQQFISKSMRDQRKGRVGRVNPGTYVYFYDLS

SEQ ID NO: 23783 - protein, 85 aa, unidentified
  REGION 1..85: note = Description of Unknown:hvTR_P0DSU5 target sequence
YMKSIQRINSEFLHNYILYANKFNLTLPEDLFIIPTNLDILWRTKEYIDSFDISTETWNKLLSNYYMKMIEYAKLYVLSPILAEE

SEQ ID NO: 23784 - protein, 84 aa, unidentified
  REGION 1..84: note = Description of Unknown:hvTR_P0DSU5 target sequence
LAEELDNFERTGELTSIVQEAILSLNLRIKILNFKHKDNDTYIHFCKILFGVYNGTNATIYYHRPLTGYMNMISDTIFVPVDNN

SEQ ID NO: 23785 - protein, 85 aa, unidentified
  REGION 1..85: note = Description of Unknown:hvTR_P0DSU5 target sequence
NMSNMERDSFSLAVFPVIKHRWHNAHVVKHKGIYKVSTEAHGKKVSPPSLGKPSHINLTAKQYIYSEHTISFECYSFLKCITNAE

SEQ ID NO: 23786 - protein, 85 aa, unidentified; identical to SEQ ID NO: 23771
  REGION 1..85: note = Description of Unknown:hvTR_P0DSU5 target sequence

SEQ ID NO: 23787 - protein, 85 aa, unidentified; identical to SEQ ID NO: 23743
  REGION 1..85: note = Description of Unknown:hvTR_P0DSU5 target sequence

SEQ ID NO: 23788 - protein, 85 aa, unidentified; identical to SEQ ID NO: 23773
  REGION 1..85: note = Description of Unknown:hvTR_P0DSU5 target sequence

SEQ ID NO: 23789 - protein, 85 aa, unidentified
  REGION 1..85: note = Description of Unknown:hvTR_P0DSU5 target sequence
SRMAYIEEEKRNLVTAIQMYTPPDGSSGIVFVASVAQCHEYKSYLEKRLPYDMYIIHGKVLEIDKILEKVYSSPNVSIIISAPYL

SEQ ID NO: 23790 - protein, 85 aa, unidentified
  REGION 1..85: note = Description of Unknown:hvTR_P0DSU5 target sequence
ESSVTIHNVTHIYDMGRVFVPAPFGGSQQFISKSMRDQRKGRVGRVNPGTYVYFYDLSYMKSIQRINSEFLHNYILYANKFNLTL

SEQ ID NO: 23791 - protein, 85 aa, unidentified
  REGION 1..85: note = Description of Unknown:cds_NC_002549.1_cds_NP_066246.1_4 target sequence
GVTGILQLPRDRFKRTSFFLWVIILFQRTFSIPLGVIHNSTLQVSDVDKLVCRDKLSSTNQLRSVGLNLEGNGVATDVPSATKRW

SEQ ID NO: 23792 - protein, 85 aa, unidentified
  REGION 1..85: note = Description of Unknown:cds_NC_002549.1_cds_NP_066246.1_4 target sequence
GFRSGVPPKVVNYEAGEWAENCYNLEIKKPDGSECLPAAPDGIRGFPRCRYVHKVSGTGPCAGDFAFHKEGAFFLYDRLASTVIY

SEQ ID NO: 23793 - protein, 85 aa, unidentified
  REGION 1..85: note = Description of Unknown:cds_NC_002549.1_cds_NP_066246.1_4 target sequence
RGTTFAEGVVAFLILPQAKKDFFSSHPLREPVNATEDPSSGYYSTTIRYQATGFGTNETEYLFEVDNLTYVQLESRFTPQFLLQL

SEQ ID NO: 23794 - protein, 85 aa, unidentified
  REGION 1..85: note = Description of Unknown:cds_NC_002549.1_cds_NP_066246.1_4 target sequence
NETIYTSGKRSNTTGKLIWKVNPEIDTTIGEWAFWETKKNLTRKIRSEELSFTVVSNGAKNISGQSPARTSSDPGTNTTTEDHKI

SEQ ID NO: 23795 - protein, 85 aa, unidentified
  REGION 1..85: note = Description of Unknown:cds_NC_002549.1_cds_NP_066246.1_4 target sequence
MASENSSAMVQVHSQGREAAVSHLTTLATISTSPQSLTTKPGPDNSTHNTPVYKLDISEATQVEQHHRRTDNDSTASDTPSATTA

SEQ ID NO: 23796 - protein, 85 aa, unidentified
  REGION 1..85: note = Description of Unknown:cds_NC_002549.1_cds_NP_066246.1_4 target sequence
AGPPKAENTNTSKSTDFLDPATTTSPQNHSETAGNNNTHHQDTGEESASSGKLGLITNTIAGVAGLITGGRRTRREAIVNAQPKC

SEQ ID NO: 23797 - protein, 85 aa, unidentified
  REGION 1..85: note = Description of Unknown:cds_NC_002549.1_cds_NP_066246.1_4 target sequence
NPNLHYWTTQDEGAAIGLAWIPYFGPAAEGIYIEGLMHNQDGLICGLRQLANETTQALQLFLRATTELRTFSILNRKAIDFLLQR

SEQ ID NO: 23798 - protein, 84 aa, unidentified
  REGION 1..84: note = Description of Unknown:cds_NC_002549.1_cds_NP_066246.1_4 target sequence
LLQRWGGTCHILGPDCCIEPHDWTKNITDKIDQIIHDFVDKTLPDQGDNDNWWTGWRQWIPAGIGVTGVIIAVIALFCICKFVF

SEQ ID NO: 23799 - protein, 85 aa, unidentified
  REGION 1..85: note = Description of Unknown:cds_NC_002549.1_cds_NP_066246.1_4 target sequence
RTFSIPLGVIHNSTLQVSDVDKLVCRDKLSSTNQLRSVGLNLEGNGVATDVPSATKRWGFRSGVPPKVVNYEAGEWAENCYNLEI

SEQ ID NO: 23800 - protein, 85 aa, unidentified
  REGION 1..85: note = Description of Unknown:cds_NC_002549.1_cds_NP_066246.1_4 target sequence
KKPDGSECLPAAPDGIRGFPRCRYVHKVSGTGPCAGDFAFHKEGAFFLYDRLASTVIYRGTTFAEGVVAFLILPQAKKDFFSSHP

SEQ ID NO: 23801 - protein, 85 aa, unidentified
  REGION 1..85: note = Description of Unknown:cds_NC_002549.1_cds_NP_066246.1_4 target sequence
LREPVNATEDPSSGYYSTTIRYQATGFGTNETEYLFEVDNLTYVQLESRFTPQFLLQLNETIYTSGKRSNTTGKLIWKVNPEIDT

SEQ ID NO: 23802 - protein, 85 aa, unidentified
  REGION 1..85: note = Description of Unknown:cds_NC_002549.1_cds_NP_066246.1_4 target sequence
TIGEWAFWETKKNLTRKIRSEELSFTVVSNGAKNISGQSPARTSSDPGTNTTTEDHKIMASENSSAMVQVHSQGREAAVSHLTTL

SEQ ID NO: 23803 - protein, 85 aa, unidentified
  REGION 1..85: note = Description of Unknown:cds_NC_002549.1_cds_NP_066246.1_4 target sequence
ATISTSPQSLTTKPGPDNSTHNTPVYKLDISEATQVEQHHRRTDNDSTASDTPSATTAAGPPKAENTNTSKSTDFLDPATTTSPQ

SEQ ID NO: 23804 - protein, 85 aa, unidentified
  REGION 1..85: note = Description of Unknown:cds_NC_002549.1_cds_NP_066246.1_4 target sequence
NHSETAGNNNTHHQDTGEESASSGKLGLITNTIAGVAGLITGGRRTRREAIVNAQPKCNPNLHYWTTQDEGAAIGLAWIPYFGPA

SEQ ID NO: 23805 - protein, 85 aa, unidentified
  REGION 1..85: note = Description of Unknown:cds_NC_002549.1_cds_NP_066246.1_4 target sequence
AEGIYIEGLMHNQDGLICGLRQLANETTQALQLFLRATTELRTFSILNRKAIDFLLQRWGGTCHILGPDCCIEPHDWTKNITDKI

SEQ ID NO: 23806 - protein, 85 aa, unidentified
  REGION 1..85: note = Description of Unknown:cds_NC_025808.1_cds_YP_009110703.1_5 target sequence
MGNATSIVQNFNIKGDGNTFSPSAETASSAVPSLSLNPGLLNPGGKAWTLIDPTVPATAPGSLRLMTTEDFPAALGTSILGSNGA

SEQ ID NO: 23807 - protein, 85 aa, unidentified
  REGION 1..85: note = Description of Unknown:cds_NC_025808.1_cds_YP_009110703.1_5 target sequence
APSSGMYLVPVKETLNVVTEHAIAQFEKLQSAYELDRDYLDAKGVAPESVSFKNYLSHVDCYVGVSARQAATNFQKNVPVITKSK

SEQ ID NO: 23808 - protein, 85 aa, unidentified
  REGION 1..85: note = Description of Unknown:cds_NC_025808.1_cds_YP_009110703.1_5 target sequence
MMSFMTSAQNILSLLGPWEKSVREVLTMLPSSTPYGTLKCDMKAIVAMLEEQLPEDNLCRLYPQAAACSIARRNGGVRWKEPTSD

SEQ ID NO: 23809 - protein, 85 aa, unidentified
  REGION 1..85: note = Description of Unknown:cds_NC_025808.1_cds_YP_009110703.1_5 target sequence
EAPSMATNDVAASTMGALANTTPLAEKSNTTEESMRLVAESSVDLICSRRPISASVWARTVEPKSYNIRTLKVSEALWLRQSQVT

SEQ ID NO: 23810 - protein, 85 aa, unidentified
  REGION 1..85: note = Description of Unknown:cds_NC_025808.1_cds_YP_009110703.1_5 target sequence
TGFDVAYTLTDSTKKHFWITKGTTVINLEQTGSMMFEVNIEGKDYKKGSFDPNGSTLVLLVMQSRLPFETWTVASQIEGIAQVAS

SEQ ID NO: 23811 - protein, 85 aa, unidentified
  REGION 1..85: note = Description of Unknown:cds_NC_025808.1_cds_YP_009110703.1_5 target sequence
IVVTAGSGSTVNTSIIGSTSLSYLFERETITTSNTEVNTYLLCTWQSPTECVDANSWPDAWDAITTLTPLTTGTVTVKGSTVEKV

SEQ ID NO: 23812 - protein, 85 aa, unidentified
  REGION 1..85: note = Description of Unknown:cds_NC_025808.1_cds_YP_009110703.1_5 target sequence
TPVDLIGSYTPESLTAALPNDAGNILALRAETLAKAVKNEDDSVTDESSPFSAPIQGILALQQKETEGTAGSPDPKPPGTLQKIA

SEQ ID NO: 23813 - protein, 84 aa, unidentified
  REGION 1..84: note = Description of Unknown:cds_NC_025808.1_cds_YP_009110703.1_5 target sequence
LQKIASRAMHMFLGDPKSVLKQTTPVLKDPQVWTSFVQGVRDGIRNKSLSAGVRSIVDNLSAVQSVKEWKQNVLGKIQKLFKPK

SEQ ID NO: 23814 - protein, 85 aa, unidentified
  REGION 1..85: note = Description of Unknown:cds_NC_025808.1_cds_YP_009110703.1_5 target sequence
SSAVPSLSLNPGLLNPGGKAWTLIDPTVPATAPGSLRLMTTEDFPAALGTSILGSNGAAPSSGMYLVPVKETLNVVTEHAIAQFE

SEQ ID NO: 23815 - protein, 85 aa, unidentified
  REGION 1..85: note = Description of Unknown:cds_NC_025808.1_cds_YP_009110703.1_5 target sequence
KLQSAYELDRDYLDAKGVAPESVSFKNYLSHVDCYVGVSARQAATNFQKNVPVITKSKMMSFMTSAQNILSLLGPWEKSVREVLT

SEQ ID NO: 23816 - protein, 85 aa, unidentified
  REGION 1..85: note = Description of Unknown:cds_NC_025808.1_cds_YP_009110703.1_5 target sequence
MLPSSTPYGTLKCDMKAIVAMLEEQLPEDNLCRLYPQAAACSIARRNGGVRWKEPTSDEAPSMATNDVAASTMGALANTTPLAEK

SEQ ID NO: 23817 - protein, 85 aa, unidentified
  REGION 1..85: note = Description of Unknown:cds_NC_025808.1_cds_YP_009110703.1_5 target sequence
SNTTEESMRLVAESSVDLICSRRPISASVWARTVEPKSYNIRTLKVSEALWLRQSQVTTGFDVAYTLTDSTKKHFWITKGTTVIN

SEQ ID NO: 23818 - protein, 85 aa, unidentified
  REGION 1..85: note = Description of Unknown:cds_NC_025808.1_cds_YP_009110703.1_5 target sequence
LEQTGSMMFEVNIEGKDYKKGSFDPNGSTLVLLVMQSRLPFETWTVASQIEGIAQVASIVVTAGSGSTVNTSIIGSTSLSYLFER

SEQ ID NO: 23819 - protein, 85 aa, unidentified
  REGION 1..85: note = Description of Unknown:cds_NC_025808.1_cds_YP_009110703.1_5 target sequence
ETITTSNTEVNTYLLCTWQSPTECVDANSWPDAWDAITTLTPLTTGTVTVKGSTVEKVTPVDLIGSYTPESLTAALPNDAGNILA

SEQ ID NO: 23820 - protein, 85 aa, unidentified
  REGION 1..85: note = Description of Unknown:cds_NC_025808.1_cds_YP_009110703.1_5 target sequence
LRAETLAKAVKNEDDSVTDESSPFSAPIQGILALQQKETEGTAGSPDPKPPGTLQKIASRAMHMFLGDPKSVLKQTTPVLKDPQV

SEQ ID NO: 23821 - protein, 85 aa, unidentified
  REGION 1..85: note = Description of Unknown:cds_NC_038664.1_cds_YP_009507782.1_5 target sequence
MGNATSIVQNFNIKGDGNTFSPSAETASSAVPSLSLNPGLLNPGGKAWTLIDPTVPATAPGSLRLMTTEDVPAALGTSILGSNGA

SEQ ID NO: 23822 - protein, 85 aa, unidentified
  REGION 1..85: note = Description of Unknown:cds_NC_038664.1_cds_YP_009507782.1_5 target sequence
APSSGMYLVPVKETLNVVTDHAIAQFEKLQSAYELDRDYLDEKGVAPESVSFKNYLTYVDCYVGVSARQAATNFQKHVPVVTKSK

SEQ ID NO: 23823 - protein, 85 aa, unidentified
  REGION 1..85: note = Description of Unknown:cds_NC_038664.1_cds_YP_009507782.1_5 target sequence
MMSFMTSAQNILSLLGPWEKSIREVLTMLPSSTPYGTLKCDMKAIVAMLEEQLPEGNLCRLYPQAAACSIARRNGGVRWKEPNSD

SEQ ID NO: 23824 - protein, 85 aa, unidentified
  REGION 1..85: note = Description of Unknown:cds_NC_038664.1_cds_YP_009507782.1_5 target sequence
EAPSLATNDVAASTMGALANTTPLADKSNTTEESMRLVSESSVDLICSRRPISASVWARTVEPKSYNIRTLKVSEALWLRQSQVS

SEQ ID NO: 23825 - protein, 85 aa, unidentified
  REGION 1..85: note = Description of Unknown:cds_NC_038664.1_cds_YP_009507782.1_5 target sequence
AGFDVAYNLNDSTQRHFWITTGTTVINLEQTGSMMFEVNIEGKDYKKGNFQPNGATLVLLVMQSRLPFETWTVSSQIEGIAQVAS

SEQ ID NO: 23826 - protein, 85 aa, unidentified
  REGION 1..85: note = Description of Unknown:cds_NC_038664.1_cds_YP_009507782.1_5 target sequence
IVVTAGSGSTVNTSIIGSTSLSYLFERETITTANTEVNTYLLCTWQSSSICTDADSWPDAWDAVTTLTPLTTGTVTVKGSTVEKV

SEQ ID NO: 23827 - protein, 85 aa, unidentified
  REGION 1..85: note = Description of Unknown:cds_NC_038664.1_cds_YP_009507782.1_5 target sequence
TPVDLIGSYTPESLTAALPNDAGNILALRAETLAKAVKNEDDSVTDESSPFSAPIQGILALQQKETEGTAGTPDLKPPGTLQKIA

SEQ ID NO: 23828 - protein, 84 aa, unidentified; identical to SEQ ID NO: 23813
  REGION 1..84: note = Description of Unknown:cds_NC_038664.1_cds_YP_009507782.1_5 target sequence

SEQ ID NO: 23829 - protein, 85 aa, unidentified
  REGION 1..85: note = Description of Unknown:cds_NC_038664.1_cds_YP_009507782.1_5 target sequence
SSAVPSLSLNPGLLNPGGKAWTLIDPTVPATAPGSLRLMTTEDVPAALGTSILGSNGAAPSSGMYLVPVKETLNVVTDHAIAQFE

SEQ ID NO: 23830 - protein, 85 aa, unidentified
  REGION 1..85: note = Description of Unknown:cds_NC_038664.1_cds_YP_009507782.1_5 target sequence
KLQSAYELDRDYLDEKGVAPESVSFKNYLTYVDCYVGVSARQAATNFQKHVPVVTKSKMMSFMTSAQNILSLLGPWEKSIREVLT

SEQ ID NO: 23831 - protein, 85 aa, unidentified
  REGION 1..85: note = Description of Unknown:cds_NC_038664.1_cds_YP_009507782.1_5 target sequence
MLPSSTPYGTLKCDMKAIVAMLEEQLPEGNLCRLYPQAAACSIARRNGGVRWKEPNSDEAPSLATNDVAASTMGALANTTPLADK

SEQ ID NO: 23832 - protein, 85 aa, unidentified
  REGION 1..85: note = Description of Unknown:cds_NC_038664.1_cds_YP_009507782.1_5 target sequence
SNTTEESMRLVSESSVDLICSRRPISASVWARTVEPKSYNIRTLKVSEALWLRQSQVSAGFDVAYNLNDSTQRHFWITTGTTVIN

SEQ ID NO: 23833 - protein, 85 aa, unidentified
  REGION 1..85: note = Description of Unknown:cds_NC_038664.1_cds_YP_009507782.1_5 target sequence
LEQTGSMMFEVNIEGKDYKKGNFQPNGATLVLLVMQSRLPFETWTVSSQIEGIAQVASIVVTAGSGSTVNTSIIGSTSLSYLFER

SEQ ID NO: 23834 - protein, 85 aa, unidentified
  REGION 1..85: note = Description of Unknown:cds_NC_038664.1_cds_YP_009507782.1_5 target sequence
ETITTANTEVNTYLLCTWQSSSICTDADSWPDAWDAVTTLTPLTTGTVTVKGSTVEKVTPVDLIGSYTPESLTAALPNDAGNILA

SEQ ID NO: 23835 - protein, 85 aa, unidentified
  REGION 1..85: note = Description of Unknown:cds_NC_038664.1_cds_YP_009507782.1_5 target sequence
LRAETLAKAVKNEDDSVTDESSPFSAPIQGILALQQKETEGTAGTPDLKPPGTLQKIASRAMHMFLGDPKSVLKQTTPVLKDPQV

SEQ ID NO: 23836 - protein, 85 aa, unidentified
  REGION 1..85: note = Description of Unknown:cds_NC_039345.1_cds_YP_009513277.1_4 target sequence
ILQVPEKRHQRTVLFIWLVILFQRAVSVPLGVIHNSTLQVSDIDKFVCHDKLTSTNQLRSIGLNLEGNGIATDVPSATKRWGFRA

SEQ ID NO: 23837 - protein, 85 aa, unidentified
  REGION 1..85: note = Description of Unknown:cds_NC_039345.1_cds_YP_009513277.1_4 target sequence
GVPPKVVGYEAGEWAENCYNLEIKKPDGSECLPMAPEGIRGFPRCRYVHKVSGTGSCESGFAFHKEGAFFLYDRLASTIIYRGTT

SEQ ID NO: 23838 - protein, 85 aa, unidentified
  REGION 1..85: note = Description of Unknown:cds_NC_039345.1_cds_YP_009513277.1_4 target sequence
FAEGVVAFIILPKAEKNFLQPPLTQGPTNTTNDPSSMYHSTTLEYETTRFGTNRSAFWFKVDNLTFVQLESRFTPQFLVELNETI

SEQ ID NO: 23839 - protein, 85 aa, unidentified
  REGION 1..85: note = Description of Unknown:cds_NC_039345.1_cds_YP_009513277.1_4 target sequence
YIEGKRSNTTGRLIWQVNSRVDTDVGEWAFWENKKNLKKSFPREELSLTAVPRAADSEHDAHPPEYTPGPDSNPTINDNTELVTE

SEQ ID NO: 23840 - protein, 85 aa, unidentified
  REGION 1..85: note = Description of Unknown:cds_NC_039345.1_cds_YP_009513277.1_4 target sequence
DPAHLVQLQRQGRKEILPTTIPQAIEREPPAAQHDNPRNSPTPPSPIESDITDSTQAEDLTHTDDPSTINSATEEPLPEVGETTQ

SEQ ID NO: 23841 - protein, 85 aa, unidentified
  REGION 1..85: note = Description of Unknown:cds_NC_039345.1_cds_YP_009513277.1_4 target sequence
VPRDPEGPRRTQPTPPTGQPEQPSDNTMTPGQIHSESAAPMGERSIDGPGLLTNTLAGVARLITGAGRAKRESPEIRGAKCNPNL

SEQ ID NO: 23842 - protein, 85 aa, unidentified
  REGION 1..85: note = Description of Unknown:cds_NC_039345.1_cds_YP_009513277.1_4 target sequence
HYWTTHEESAAAGLAWIPYFGPAAEGIYTEGLMQNQNELICGLRQLANETTQALQLFLRSTTELRTFSILNRKAIDFLLQRWGGT

SEQ ID NO: 23843 - protein, 84 aa, unidentified
  REGION 1..84: note = Description of Unknown:cds_NC_039345.1_cds_YP_009513277.1_4 target sequence
LLQRWGGTCRILGPDCCIEPHDWTKNITDRIDQIIHDFVDKPLPDQSNNDNWWTGWRQWIPAGIGVVGVIAAFIALICICKIIC

SEQ ID NO: 23844 - protein, 85 aa, unidentified
  REGION 1..85: note = Description of Unknown:cds_NC_039345.1_cds_YP_009513277.1_4 target sequence
VPLGVIHNSTLQVSDIDKFVCHDKLTSTNQLRSIGLNLEGNGIATDVPSATKRWGFRAGVPPKVVGYEAGEWAENCYNLEIKKPD

SEQ ID NO: 23845 - protein, 85 aa, unidentified
  REGION 1..85: note = Description of Unknown:cds_NC_039345.1_cds_YP_009513277.1_4 target sequence
GSECLPMAPEGIRGFPRCRYVHKVSGTGSCESGFAFHKEGAFFLYDRLASTIIYRGTTFAEGVVAFIILPKAEKNFLQPPLTQGP

SEQ ID NO: 23846 - protein, 85 aa, unidentified
  REGION 1..85: note = Description of Unknown:cds_NC_039345.1_cds_YP_009513277.1_4 target sequence
TNTTNDPSSMYHSTTLEYETTRFGTNRSAFWFKVDNLTFVQLESRFTPQFLVELNETIYIEGKRSNTTGRLIWQVNSRVDTDVGE

SEQ ID NO: 23847 - protein, 85 aa, unidentified
  REGION 1..85: note = Description of Unknown:cds_NC_039345.1_cds_YP_009513277.1_4 target sequence
WAFWENKKNLKKSFPREELSLTAVPRAADSEHDAHPPEYTPGPDSNPTINDNTELVTEDPAHLVQLQRQGRKEILPTTIPQAIER

SEQ ID NO: 23848 - protein, 85 aa, unidentified
  REGION 1..85: note = Description of Unknown:cds_NC_039345.1_cds_YP_009513277.1_4 target sequence
EPPAAQHDNPRNSPTPPSPIESDITDSTQAEDLTHTDDPSTINSATEEPLPEVGETTQVPRDPEGPRRTQPTPPTGQPEQPSDNT

SEQ ID NO: 23849 - protein, 85 aa, unidentified
  REGION 1..85: note = Description of Unknown:cds_NC_039345.1_cds_YP_009513277.1_4 target sequence
MTPGQIHSESAAPMGERSIDGPGLLTNTLAGVARLITGAGRAKRESPEIRGAKCNPNLHYWTTHEESAAAGLAWIPYFGPAAEGI

SEQ ID NO: 23850 - protein, 85 aa, unidentified
  REGION 1..85: note = Description of Unknown:cds_NC_039345.1_cds_YP_009513277.1_4 target sequence
YTEGLMQNQNELICGLRQLANETTQALQLFLRSTTELRTFSILNRKAIDFLLQRWGGTCRILGPDCCIEPHDWTKNITDRIDQII

SEQ ID NO: 23851 - protein, 85 aa, unidentified
  REGION 1..85: note = Description of Unknown:hvTR_Q9PZT1 target sequence
ELFRGVLQVSSNVLDCANDNWWCSLLDLDTSDWEPLTHTNRLMAIYLSSVASKLDFTGGPLAGCLYFFQVECNKFEEGYHIHVVI

SEQ ID NO: 23852 - protein, 85 aa, unidentified
  REGION 1..85: note = Description of Unknown:hvTR_Q9PZT1 target sequence
GGPGLNPRNLTVCVEGLFNNVLYHLVTENVKLKFLPGMTTKGKYFRDGEQFIENYLMKKIPLNVVWCVTNIDGYIDTCISATFRR

SEQ ID NO: 23853 - protein, 85 aa, unidentified
  REGION 1..85: note = Description of Unknown:hvTR_Q9PZT1 target sequence
GACHAKKPRITTAINDTSSDAGESSGTGAEVVPINGKGTKASIKFQTMVNWLCENRVFTEDKWKLVDFNQYTLLSSSHSGSFQIQ

SEQ ID NO: 23854 - protein, 85 aa, unidentified
  REGION 1..85: note = Description of Unknown:hvTR_Q9PZT1 target sequence
SALKLAIYKATNLVPTSTFLLHTDFEQVMCIKDNKIVKLLLCQNYDPLLVGQHVLKWIDKKCGKKNTLWFYGPPSTGKTNLAMAI

SEQ ID NO: 23855 - protein, 85 aa, unidentified
  REGION 1..85: note = Description of Unknown:hvTR_Q9PZT1 target sequence
AKSVPVYGMVNWNNENFPFNDVAGKSLVVWDEGIIKSTIVEAAKAILGGQPTRVDQKMRGSVAVPGVPVVITSNGDITFVVSGNT

SEQ ID NO: 23856 - protein, 85 aa, unidentified
  REGION 1..85: note = Description of Unknown:hvTR_Q9PZT1 target sequence
TTTVHAKALKERMVKLNFTVRCSPDMGLLTEADVQQWLTWCNAQSWDHYENWAINYTFDFPGINADALHPDLQTTPIVTDTSISS

SEQ ID NO: 23857 - protein, 85 aa, unidentified
  REGION 1..85: note = Description of Unknown:hvTR_Q9PZT1 target sequence
SGGESSEELSESSFFNLITPGAWNTETPRSSTPIPGTSSGESFVGSSVSSEVVAASWEEAFYTPLADQFRELLVGVDYVWDGVRG

SEQ ID NO: 23858 - protein, 84 aa, unidentified
  REGION 1..84: note = Description of Unknown:hvTR_Q9PZT1 target sequence
DYVWDGVRGLPVCCVQHINNSGGGLGLCPHCINVGAWYNGWKFREFTPDLVRCSCHVGASNPFSVLTCKKCAYLSGLQSFVDYE

SEQ ID NO: 23859 - protein, 85 aa, unidentified
  REGION 1..85: note = Description of Unknown:hvTR_Q9PZT1 target sequence
LDTSDWEPLTHTNRLMAIYLSSVASKLDFTGGPLAGCLYFFQVECNKFEEGYHIHVVIGGPGLNPRNLTVCVEGLFNNVLYHLVT

SEQ ID NO: 23860 - protein, 85 aa, unidentified
  REGION 1..85: note = Description of Unknown:hvTR_Q9PZT1 target sequence
ENVKLKFLPGMTTKGKYFRDGEQFIENYLMKKIPLNVVWCVTNIDGYIDTCISATFRRGACHAKKPRITTAINDTSSDAGESSGT

SEQ ID NO: 23861 - protein, 85 aa, unidentified
  REGION 1..85: note = Description of Unknown:hvTR_Q9PZT1 target sequence
GAEVVPINGKGTKASIKFQTMVNWLCENRVFTEDKWKLVDFNQYTLLSSSHSGSFQIQSALKLAIYKATNLVPTSTFLLHTDFEQ

SEQ ID NO: 23862 - protein, 85 aa, unidentified
  REGION 1..85: note = Description of Unknown:hvTR_Q9PZT1 target sequence
VMCIKDNKIVKLLLCQNYDPLLVGQHVLKWIDKKCGKKNTLWFYGPPSTGKTNLAMAIAKSVPVYGMVNWNNENFPFNDVAGKSL

SEQ ID NO: 23863 - protein, 85 aa, unidentified
  REGION 1..85: note = Description of Unknown:hvTR_Q9PZT1 target sequence
VVWDEGIIKSTIVEAAKAILGGQPTRVDQKMRGSVAVPGVPVVITSNGDITFVVSGNTTTTVHAKALKERMVKLNFTVRCSPDMG

SEQ ID NO: 23864 - protein, 85 aa, unidentified
  REGION 1..85: note = Description of Unknown:hvTR_Q9PZT1 target sequence
LLTEADVQQWLTWCNAQSWDHYENWAINYTFDFPGINADALHPDLQTTPIVTDTSISSSGGESSEELSESSFFNLITPGAWNTET

SEQ ID NO: 23865 - protein, 85 aa, unidentified
  REGION 1..85: note = Description of Unknown:hvTR_Q9PZT1 target sequence
PRSSTPIPGTSSGESFVGSSVSSEVVAASWEEAFYTPLADQFRELLVGVDYVWDGVRGLPVCCVQHINNSGGGLGLCPHCINVGA

SEQ ID NO: 23866 - protein, 85 aa, unidentified
  REGION 1..85: note = Description of Unknown:cds_NZ_WFIY01000004.1_cds_WP_155862762.1_575 target sequence
VNVSYRIQLNKEFNFSNLISILDYLHDLGVEWLYLSPILQARKGSTHGYDVYDFKKVSEDLGGEEKFLELCKEARRRGMRIIVDI

SEQ ID NO: 23867 - protein, 85 aa, unidentified
  REGION 1..85: note = Description of Unknown:cds_NZ_WFIY01000004.1_cds_WP_155862762.1_575 target sequence
VPNHMALENPYLLDFLRNSNSKYKKFFDFDGDKIVLPILGEEDLSKLKIVEENGEKFLDYYGLKLPLIGEGNDLKELLKKQNYEL

SEQ ID NO: 23868 - protein, 85 aa, unidentified
  REGION 1..85: note = Description of Unknown:cds_NZ_WFIY01000004.1_cds_WP_155862762.1_575 target sequence
VYWKMFDKINYRRFFDVNGLIGIRQEDEDVFNEYHEKIFELKECIDGLRVDHIDGLLNPRKYLEMLREKMGNDKYIVVEKILSPK

SEQ ID NO: 23869 - protein, 85 aa, unidentified
  REGION 1..85: note = Description of Unknown:cds_NZ_WFIY01000004.1_cds_WP_155862762.1_575 target sequence
EKLRDWKIDGTTGYDFMRDVNLLFVNSKNEGKFKEIYEDFVGQKLDLEEEKIKAKIDVINQLFYGDVDRILRKLKELTGKEIKKE

SEQ ID NO: 23870 - protein, 85 aa, unidentified
  REGION 1..85: note = Description of Unknown:cds_NZ_WFIY01000004.1_cds_WP_155862762.1_575 target sequence
SLIKFLSCLNVYRTYITEDEIEWEDIEEIKECADESILDLINERKGMMILQQLEDPIMAKGYEDTLFYRYNLLVSLNEVGSDLKF

SEQ ID NO: 23871 - protein, 85 aa, unidentified
  REGION 1..85: note = Description of Unknown:cds_NZ_WFIY01000004.1_cds_WP_155862762.1_575 target sequence
GISCEEFHARNIERELFWPNTMIDTSTHDTKLSEDVRARINALSNFPEEWRNLIKTWSAINEKYKVKGYPTRNDEYRFYQILLGT

SEQ ID NO: 23872 - protein, 85 aa, unidentified
  REGION 1..85: note = Description of Unknown:cds_NZ_WFIY01000004.1_cds_WP_155862762.1_575 target sequence
WSCYSKEYEDRLVNYMIKAIREEKTNTSWLNPNQEYENATINFVRRVIKDKEFLSSFIPFFKKINRVGSIYSIEQVILKLTSPGL

SEQ ID NO: 23873 - protein, 84 aa, unidentified
  REGION 1..84: note = Description of Unknown:cds_NZ_WFIY01000004.1_cds_WP_155862762.1_575 target sequence
LKLTSPGLPDIYQGNETLTYLMVDPDNRRKVNFNTLAEMLKEIKSEDPVTLFKNEEFGKLKLYVTWKLLNLRRIGRNYSKVIGQ

SEQ ID NO: 23874 - protein, 85 aa, unidentified
  REGION 1..85: note = Description of Unknown:cds_NZ_WFIY01000004.1_cds_WP_155862762.1_575 target sequence
LGVEWLYLSPILQARKGSTHGYDVYDFKKVSEDLGGEEKFLELCKEARRRGMRIIVDIVPNHMALENPYLLDFLRNSNSKYKKFF

SEQ ID NO: 23875 - protein, 85 aa, unidentified
  REGION 1..85: note = Description of Unknown:cds_NZ_WFIY01000004.1_cds_WP_155862762.1_575 target sequence
DFDGDKIVLPILGEEDLSKLKIVEENGEKFLDYYGLKLPLIGEGNDLKELLKKQNYELVYWKMFDKINYRRFFDVNGLIGIRQED

SEQ ID NO: 23876 - protein, 85 aa, unidentified
  REGION 1..85: note = Description of Unknown:cds_NZ_WFIY01000004.1_cds_WP_155862762.1_575 target sequence
EDVFNEYHEKIFELKECIDGLRVDHIDGLLNPRKYLEMLREKMGNDKYIVVEKILSPKEKLRDWKIDGTTGYDFMRDVNLLFVNS

SEQ ID NO: 23877 - protein, 85 aa, unidentified
  REGION 1..85: note = Description of Unknown:cds_NZ_WFIY01000004.1_cds_WP_155862762.1_575 target sequence
KNEGKFKEIYEDFVGQKLDLEEEKIKAKIDVINQLFYGDVDRILRKLKELTGKEIKKESLIKFLSCLNVYRTYITEDEIEWEDIE

SEQ ID NO: 23878 - protein, 85 aa, unidentified
  REGION 1..85: note = Description of Unknown:cds_NZ_WFIY01000004.1_cds_WP_155862762.1_575 target sequence
EIKECADESILDLINERKGMMILQQLEDPIMAKGYEDTLFYRYNLLVSLNEVGSDLKFGISCEEFHARNIERELFWPNTMIDTST

SEQ ID NO: 23879 - protein, 85 aa, unidentified
  REGION 1..85: note = Description of Unknown:cds_NZ_WFIY01000004.1_cds_WP_155862762.1_575 target sequence
HDTKLSEDVRARINALSNFPEEWRNLIKTWSAINEKYKVKGYPTRNDEYRFYQILLGTWSCYSKEYEDRLVNYMIKAIREEKTNT

SEQ ID NO: 23880 - protein, 85 aa, unidentified
  REGION 1..85: note = Description of Unknown:cds_NZ_WFIY01000004.1_cds_WP_155862762.1_575 target sequence
SWLNPNQEYENATINFVRRVIKDKEFLSSFIPFFKKINRVGSIYSIEQVILKLTSPGLPDIYQGNETLTYLMVDPDNRRKVNFNT

SEQ ID NO: 23881 - protein, 85 aa, unidentified
  REGION 1..85: note = Description of Unknown:cds_NC_030656.1_cds_YP_009268812.1_97 target sequence
DHDTLKSSDINLFLNTKIQLSSNYNNQHLSLVNEEHIHKAVQTDSCSVCNMLSSVTNYNIVSGGAPRQKPYKRQKQSQSQSDREL

SEQ ID NO: 23882 - protein, 85 aa, unidentified
  REGION 1..85: note = Description of Unknown:cds_NC_030656.1_cds_YP_009268812.1_97 target sequence
KRREDACKARNYQEENLETVPLDELTSTQEWVLKLRKDGDRIAAYIRNNKCNIESFTIQDMLMVMEKLNIARRDRSELFEIMAHV

SEQ ID NO: 23883 - protein, 85 aa, unidentified
  REGION 1..85: note = Description of Unknown:cds_NC_030656.1_cds_YP_009268812.1_97 target sequence
KSSLTNSNLSVKAGHPLMLIYSRSNAKLAQQIKEMEMVYEPSNYPTLIATSRFQSSHFIDMSSSSDLSFCYKSHDSTCFVSPILM

SEQ ID NO: 23884 - protein, 85 aa, unidentified
  REGION 1..85: note = Description of Unknown:cds_NC_030656.1_cds_YP_009268812.1_97 target sequence
ALFGVKIAALENTFISGDTFMLIHQLYEYRKVQPENYMLLVSRLTEEHPIIISGIGDIISTEVQRANLHAMIRKIVMNMRMGVFH

SEQ ID NO: 23885 - protein, 85 aa, unidentified
  REGION 1..85: note = Description of Unknown:cds_NC_030656.1_cds_YP_009268812.1_97 target sequence
CKEDETIDNQLMKIIHTGCSTVMSDEEQTLASILSIVGFKPALVSVSRGMSSDLTLQSAPYVVVDPMRMITTSTSPISINTKNVC

SEQ ID NO: 23886 - protein, 85 aa, unidentified
  REGION 1..85: note = Description of Unknown:cds_NC_030656.1_cds_YP_009268812.1_97 target sequence
SLAYDGSSSRVMFVPPNVSYRSTGCSIETFPTLCGNNQGFMDRTPQSPIIVNGTLMFLVERRNAKSVIGECFTGFRSVINDAPID

SEQ ID NO: 23887 - protein, 85 aa, unidentified
  REGION 1..85: note = Description of Unknown:cds_NC_030656.1_cds_YP_009268812.1_97 target sequence
VAQELHLNGIMYKLKSAVCYRTGDNFLDSCGSSNSEVFLTGHYTILFTELGPWMYDPMSILSKPSREARLMRAIKQLYKQEVNAD

SEQ ID NO: 23888 - protein, 84 aa, unidentified
  REGION 1..84: note = Description of Unknown:cds_NC_030656.1_cds_YP_009268812.1_97 target sequence
KQLYKQEVNADDDSSIYDWMRNEGANIVARKKEQLMKNISVFEDDLLTIDEAMVMISRQCCLLVYAQDYAPYISSRTVGEGLWF

SEQ ID NO: 23889 - protein, 85 aa, unidentified
  REGION 1..85: note = Description of Unknown:cds_NC_030656.1_cds_YP_009268812.1_97 target sequence
HLSLVNEEHIHKAVQTDSCSVCNMLSSVTNYNIVSGGAPRQKPYKRQKQSQSQSDRELKRREDACKARNYQEENLETVPLDELTS

SEQ ID NO: 23890 - protein, 85 aa, unidentified
  REGION 1..85: note = Description of Unknown:cds_NC_030656.1_cds_YP_009268812.1_97 target sequence
TQEWVLKLRKDGDRIAAYIRNNKCNIESFTIQDMLMVMEKLNIARRDRSELFEIMAHVKSSLTNSNLSVKAGHPLMLIYSRSNAK

SEQ ID NO: 23891 - protein, 85 aa, unidentified
  REGION 1..85: note = Description of Unknown:cds_NC_030656.1_cds_YP_009268812.1_97 target sequence
LAQQIKEMEMVYEPSNYPTLIATSRFQSSHFIDMSSSSDLSFCYKSHDSTCFVSPILMALFGVKIAALENTFISGDTFMLIHQLY

SEQ ID NO: 23892 - protein, 85 aa, unidentified
  REGION 1..85: note = Description of Unknown:cds_NC_030656.1_cds_YP_009268812.1_97 target sequence
EYRKVQPENYMLLVSRLTEEHPIIISGIGDIISTEVQRANLHAMIRKIVMNMRMGVFHCKEDETIDNQLMKIIHTGCSTVMSDEE

SEQ ID NO: 23893 - protein, 85 aa, unidentified
  REGION 1..85: note = Description of Unknown:cds_NC_030656.1_cds_YP_009268812.1_97 target sequence
QTLASILSIVGFKPALVSVSRGMSSDLTLQSAPYVVVDPMRMITTSTSPISINTKNVCSLAYDGSSSRVMFVPPNVSYRSTGCSI

SEQ ID NO: 23894 - protein, 85 aa, unidentified
  REGION 1..85: note = Description of Unknown:cds_NC_030656.1_cds_YP_009268812.1_97 target sequence
ETFPTLCGNNQGFMDRTPQSPIIVNGTLMFLVERRNAKSVIGECFTGFRSVINDAPIDVAQELHLNGIMYKLKSAVCYRTGDNFL

SEQ ID NO: 23895 - protein, 85 aa, unidentified
  REGION 1..85: note = Description of Unknown:cds_NC_030656.1_cds_YP_009268812.1_97 target sequence
DSCGSSNSEVFLTGHYTILFTELGPWMYDPMSILSKPSREARLMRAIKQLYKQEVNADDDSSIYDWMRNEGANIVARKKEQLMKN

SEQ ID NO: 23896 - protein, 85 aa, unidentified
  REGION 1..85: note = Description of Unknown:cds_NZ_WFIY01000004.1_cds_WP_155864172.1_2130 target sequence
GKRVKGLSEVIGFIILLIIALAILVPLGFYLTSLPTKQEQAQENAESYKALAAQQISEFQPVYNPQSPSPVLPPVYLTYTDGSLY

SEQ ID NO: 23897 - protein, 85 aa, unidentified
  REGION 1..85: note = Description of Unknown:cds_NZ_WFIY01000004.1_cds_WP_155864172.1_2130 target sequence
FILTSSKNPPIPVVVKAYLIEYGNNWLVEKTNLVVTSTTVNSTYANTYKAIEIPLTSIYKLNPANIKAVAILTNLGNIIYAYPPT

SEQ ID NO: 23898 - protein, 85 aa, unidentified
  REGION 1..85: note = Description of Unknown:cds_NZ_WFIY01000004.1_cds_WP_155864172.1_2130 target sequence
YIPLPSVKPEAIFISTNTLSICILKNPKFELICKCLYLIDLAKQLGTNTLTFWLSSFSYLTAPPGRDYLKLDLSWYGPIAFCGSS

SEQ ID NO: 23899 - protein, 85 aa, unidentified
  REGION 1..85: note = Description of Unknown:cds_NZ_WFIY01000004.1_cds_WP_155864172.1_2130 target sequence
SSCLAKFEGYFNGSFSHAYIKIDGNISNAYFIVPRSTFPTLLLTQRNVIINGIAQNIIFTDSLVNNACIINATNINICVGSPSCL

SEQ ID NO: 23900 - protein, 85 aa, unidentified
  REGION 1..85: note = Description of Unknown:cds_NZ_WFIY01000004.1_cds_WP_155864172.1_2130 target sequence
VIKDAVNANLHITNSTGCIVFNGTFKGYVYGVYEQKSGKGISISGCIDNGSLIGNITSIKLTSGEGINGCIASAHEIKINSATIS

SEQ ID NO: 23901 - protein, 85 aa, unidentified
  REGION 1..85: note = Description of Unknown:cds_NZ_WFIY01000004.1_cds_WP_155864172.1_2130 target sequence
GSIASGKIEACETEGEIELGELANGKVVVEGANGYVTTSQNTIVKFLPNPNSFLDKTSVRLFSGIIDGKLNFINDCLELCNLLSP

SEQ ID NO: 23902 - protein, 85 aa, unidentified
  REGION 1..85: note = Description of Unknown:cds_NZ_WFIY01000004.1_cds_WP_155864172.1_2130 target sequence
VIISIPPSALNMDDNNGYIKTLGYVITPIKIRFSLQLVNPTNVTEVFTQMPIAIKVSADFQPNSLFTHNCFLGSTTVQLSPPLVL

SEQ ID NO: 23903 - protein, 84 aa, unidentified
  REGION 1..84: note = Description of Unknown:cds_NZ_WFIY01000004.1_cds_WP_155864172.1_2130 target sequence
GSTTVQLSPPLVLQPFSSENQTFTVSIPVTLINKPQIQNLKSPCINCFQIQYIELTIGLRSTSGYTFTTTILVTPNQIITYPQT

SEQ ID NO: 23904 - protein, 85 aa, unidentified
  REGION 1..85: note = Description of Unknown:cds_NZ_WFIY01000004.1_cds_WP_155864172.1_2130 target sequence
GFYLTSLPTKQEQAQENAESYKALAAQQISEFQPVYNPQSPSPVLPPVYLTYTDGSLYFILTSSKNPPIPVVVKAYLIEYGNNWL

SEQ ID NO: 23905 - protein, 85 aa, unidentified
  REGION 1..85: note = Description of Unknown:cds_NZ_WFIY01000004.1_cds_WP_155864172.1_2130 target sequence
VEKTNLVVTSTTVNSTYANTYKAIEIPLTSIYKLNPANIKAVAILTNLGNIIYAYPPTYIPLPSVKPEAIFISTNTLSICILKNP

SEQ ID NO: 23906 - protein, 85 aa, unidentified
  REGION 1..85: note = Description of Unknown:cds_NZ_WFIY01000004.1_cds_WP_155864172.1_2130 target sequence
KFELICKCLYLIDLAKQLGTNTLTFWLSSFSYLTAPPGRDYLKLDLSWYGPIAFCGSSSSCLAKFEGYFNGSFSHAYIKIDGNIS

SEQ ID NO: 23907 - protein, 85 aa, unidentified
  REGION 1..85: note = Description of Unknown:cds_NZ_WFIY01000004.1_cds_WP_155864172.1_2130 target sequence
NAYFIVPRSTFPTLLLTQRNVIINGIAQNIIFTDSLVNNACIINATNINICVGSPSCLVIKDAVNANLHITNSTGCIVFNGTFKG

SEQ ID NO: 23908 - protein, 85 aa, unidentified
  REGION 1..85: note = Description of Unknown:cds_NZ_WFIY01000004.1_cds_WP_155864172.1_2130 target sequence
YVYGVYEQKSGKGISISGCIDNGSLIGNITSIKLTSGEGINGCIASAHEIKINSATISGSIASGKIEACETEGEIELGELANGKV

SEQ ID NO: 23909 - protein, 85 aa, unidentified
  REGION 1..85: note = Description of Unknown:cds_NZ_WFIY01000004.1_cds_WP_155864172.1_2130 target sequence
VVEGANGYVTTSQNTIVKFLPNPNSFLDKTSVRLFSGIIDGKLNFINDCLELCNLLSPVIISIPPSALNMDDNNGYIKTLGYVIT

SEQ ID NO: 23910 - protein, 85 aa, unidentified
  REGION 1..85: note = Description of Unknown:cds_NZ_WFIY01000004.1_cds_WP_155864172.1_2130 target sequence
PIKIRFSLQLVNPTNVTEVFTQMPIAIKVSADFQPNSLFTHNCFLGSTTVQLSPPLVLQPFSSENQTFTVSIPVTLINKPQIQNL

SEQ ID NO: 23911 - protein, 85 aa, unidentified
  REGION 1..85: note = Description of Unknown:cds_NZ_WFIY01000004.1_cds_WP_155863289.1_1246 target sequence
LYKKSRLYASILVIIMLLGFYLPTTNGFNIVTHSALTDKISNGTWVWAPEAPPTPGGVYWNFWSPTNLVLGFFQYLPLAVYVHND

SEQ ID NO: 23912 - protein, 85 aa, unidentified
  REGION 1..85: note = Description of Unknown:cds_NZ_WFIY01000004.1_cds_WP_155863289.1_1246 target sequence
HQFIPILATNWTWNGNELIVTLRHPYYWDTVNGPKPFTAWDVWTTYMIGIRLFGWYSNYGLYNVTVINNYTVAFWFKGIYWKNLD

SEQ ID NO: 23913 - protein, 85 aa, unidentified
  REGION 1..85: note = Description of Unknown:cds_NZ_WFIY01000004.1_cds_WP_155863289.1_1246 target sequence
RTAAVVLASYIGAPYFQFGKYAKILATLNTSNLALSSYLSNLTSYIQSLNVTPTSNGFYFPNVSSINDELMCWVANPYFEQAFPN

SEQ ID NO: 23914 - protein, 85 aa, unidentified
  REGION 1..85: note = Description of Unknown:cds_NZ_WFIY01000004.1_cds_WP_155863289.1_1246 target sequence
SSIKYYPKMITYWSSGNTQTYNFLEDGILGYCVTAIPYSIYETIKSEGYIIYMACTYGGVGFYLNPQIYPFNNPIVRQALYYAIN

SEQ ID NO: 23915 - protein, 85 aa, unidentified
  REGION 1..85: note = Description of Unknown:cds_NZ_WFIY01000004.1_cds_WP_155863289.1_1246 target sequence
TTELAEAYAPDYISGPTNFAGIPSGFLPEFQKMLPSSFFQGLNNYSYNLQKATQLLEEAGFKKVNGYWVLPNGSQLTISIIAPSG

SEQ ID NO: 23916 - protein, 85 aa, unidentified
  REGION 1..85: note = Description of Unknown:cds_NZ_WFIY01000004.1_cds_WP_155863289.1_1246 target sequence
FTDFVALSQEFATQLNAFGIKAQVYELSTSDFYSEFFSGDFEAAPFFTPFTDTIDAWRIASIIPQPPFNLSKPTWYIYNGENYTI

SEQ ID NO: 23917 - protein, 85 aa, unidentified
  REGION 1..85: note = Description of Unknown:cds_NZ_WFIY01000004.1_cds_WP_155863289.1_1246 target sequence
NVSQIVIQMHTLQYGSPQYINDTEKLMAWYNYWLPAIADVQKVEPVELNPYEANWNAILSTHNQTFISTILFPFIAYDFEYMGPV

SEQ ID NO: 23918 - protein, 84 aa, unidentified
  REGION 1..84: note = Description of Unknown:cds_NZ_WFIY01000004.1_cds_WP_155863289.1_1246 target sequence
ILFPFIAYDFEYMGPVIGLLMGYIVPPGVTPHLPTYVKPTPSTTTVPPPVATKSSIIPIVGGILVVIIAVAVVFTIIRRRGKPE

SEQ ID NO: 23919 - protein, 85 aa, unidentified
  REGION 1..85: note = Description of Unknown:cds_NZ_WFIY01000004.1_cds_WP_155863289.1_1246 target sequence
FNIVTHSALTDKISNGTWVWAPEAPPTPGGVYWNFWSPTNLVLGFFQYLPLAVYVHNDHQFIPILATNWTWNGNELIVTLRHPYY

SEQ ID NO: 23920 - protein, 85 aa, unidentified
  REGION 1..85: note = Description of Unknown:cds_NZ_WFIY01000004.1_cds_WP_155863289.1_1246 target sequence
WDTVNGPKPFTAWDVWTTYMIGIRLFGWYSNYGLYNVTVINNYTVAFWFKGIYWKNLDRTAAVVLASYIGAPYFQFGKYAKILAT

SEQ ID NO: 23921 - protein, 85 aa, unidentified
  REGION 1..85: note = Description of Unknown:cds_NZ_WFIY01000004.1_cds_WP_155863289.1_1246 target sequence
LNTSNLALSSYLSNLTSYIQSLNVTPTSNGFYFPNVSSINDELMCWVANPYFEQAFPNSSIKYYPKMITYWSSGNTQTYNFLEDG

SEQ ID NO: 23922 - protein, 85 aa, unidentified
  REGION 1..85: note = Description of Unknown:cds_NZ_WFIY01000004.1_cds_WP_155863289.1_1246 target sequence
ILGYCVTAIPYSIYETIKSEGYIIYMACTYGGVGFYLNPQIYPFNNPIVRQALYYAINTTELAEAYAPDYISGPTNFAGIPSGFL

SEQ ID NO: 23923 - protein, 85 aa, unidentified
  REGION 1..85: note = Description of Unknown:cds_NZ_WFIY01000004.1_cds_WP_155863289.1_1246 target sequence
PEFQKMLPSSFFQGLNNYSYNLQKATQLLEEAGFKKVNGYWVLPNGSQLTISIIAPSGFTDFVALSQEFATQLNAFGIKAQVYEL

SEQ ID NO: 23924 - protein, 85 aa, unidentified
  REGION 1..85: note = Description of Unknown:cds_NZ_WFIY01000004.1_cds_WP_155863289.1_1246 target sequence
STSDFYSEFFSGDFEAAPFFTPFTDTIDAWRIASIIPQPPFNLSKPTWYIYNGENYTINVSQIVIQMHTLQYGSPQYINDTEKLM

SEQ ID NO: 23925 - protein, 85 aa, unidentified
  REGION 1..85: note = Description of Unknown:cds_NZ_WFIY01000004.1_cds_WP_155863289.1_1246 target sequence
AWYNYWLPAIADVQKVEPVELNPYEANWNAILSTHNQTFISTILFPFIAYDFEYMGPVIGLLMGYIVPPGVTPHLPTYVKPTPST

SEQ ID NO: 23926 - protein, 85 aa, unidentified
  REGION 1..85: note = Description of Unknown:hvTR_F6KS47 target sequence
DAPAWIAVLQIPTGFLSNPANWRDWDGLQRPRNLLADDWPVQELRESVPLFDHAVNLGYCILQQLFASHAVTLPCRVKPSMFLQL

SEQ ID NO: 23927 - protein, 85 aa, unidentified
  REGION 1..85: note = Description of Unknown:hvTR_F6KS47 target sequence
EPSSGEENEMHYHLVVNQADMVGRECSNWLRTWKVFMAGYLVAPTWTLSWNIRKTRQGRLYQADMSFVKNYLLPKLPLNDCYYAW

SEQ ID NO: 23928 - protein, 85 aa, unidentified
  REGION 1..85: note = Description of Unknown:hvTR_F6KS47 target sequence
TNIDRFEAAVLSVRNRQLSGPQGAIALPFTDAQPQAPAAEGVPPTMAGKGTQRFMDLIDWLVENGIATEKRWLSVNKLSYRSFLG

SEQ ID NO: 23929 - protein, 85 aa, unidentified
  REGION 1..85: note = Description of Unknown:hvTR_F6KS47 target sequence
SSGGVLQAKNALQIAKREMVLAHPLLGYLTKNASTFEESNKVAQLFSLNGYNPVDAAWYFAAWARGVWPKRRAIWLWGPASTGKT

SEQ ID NO: 23930 - protein, 85 aa, unidentified
  REGION 1..85: note = Description of Unknown:hvTR_F6KS47 target sequence
LLAAAIANLSPSYGCVNWTNQNFPFNDCHCQSLVWWEEGRMTENIVEVAKAVLGGAPVRLDVKNKGSEDYIPTCVIITSNGDLTV

SEQ ID NO: 23931 - protein, 85 aa, unidentified
  REGION 1..85: note = Description of Unknown:hvTR_F6KS47 target sequence
TVDGPVVSTQHQEALQTRITMFQFQRMVPDGLAPLPEEEVRSFFKLGEQELNMKGTPPEEFRVPRNFDKQPMASTSNLPKALCAP

SEQ ID NO: 23932 - protein, 85 aa, unidentified
  REGION 1..85: note = Description of Unknown:hvTR_F6KS47 target sequence
IDEDQVQWDSEDDWFPPPTQKRRRAVQETPPRTPSEIIEFSSPSPVADAPPTTPDSPGELSLTPTSVSQIVSAPFPEETAERYGA

SEQ ID NO: 23933 - protein, 84 aa, unidentified
  REGION 1..84: note = Description of Unknown:hvTR_F6KS47 target sequence
QIVSAPFPEETAERYGAGDIEAFWSEHVFDADWATRLHICPPGGPRPYGLFWTYLWSREFWRFKQSVSRSEAHLVNRRFIWAWW

SEQ ID NO: 23934 - protein, 85 aa, unidentified
  REGION 1..85: note = Description of Unknown:hvTR_F6KS47 target sequence
LQRPRNLLADDWPVQELRESVPLFDHAVNLGYCILQQLFASHAVTLPCRVKPSMFLQLEPSSGEENEMHYHLVVNQADMVGRECS

SEQ ID NO: 23935 - protein, 85 aa, unidentified
  REGION 1..85: note = Description of Unknown:hvTR_F6KS47 target sequence
NWLRTWKVFMAGYLVAPTWTLSWNIRKTRQGRLYQADMSFVKNYLLPKLPLNDCYYAWTNIDRFEAAVLSVRNRQLSGPQGAIAL

SEQ ID NO: 23936 - protein, 85 aa, unidentified
  REGION 1..85: note = Description of Unknown:hvTR_F6KS47 target sequence
PFTDAQPQAPAAEGVPPTMAGKGTQRFMDLIDWLVENGIATEKRWLSVNKLSYRSFLGSSGGVLQAKNALQIAKREMVLAHPLLG

SEQ ID NO: 23937 - protein, 85 aa, unidentified
  REGION 1..85: note = Description of Unknown:hvTR_F6KS47 target sequence
YLTKNASTFEESNKVAQLFSLNGYNPVDAAWYFAAWARGVWPKRRAIWLWGPASTGKTLLAAAIANLSPSYGCVNWTNQNFPFND

SEQ ID NO: 23938 - protein, 85 aa, unidentified
  REGION 1..85: note = Description of Unknown:hvTR_F6KS47 target sequence
CHCQSLVWWEEGRMTENIVEVAKAVLGGAPVRLDVKNKGSEDYIPTCVIITSNGDLTVTVDGPVVSTQHQEALQTRITMFQFQRM

SEQ ID NO: 23939 - protein, 85 aa, unidentified
  REGION 1..85: note = Description of Unknown:hvTR_F6KS47 target sequence
VPDGLAPLPEEEVRSFFKLGEQELNMKGTPPEEFRVPRNFDKQPMASTSNLPKALCAPIDEDQVQWDSEDDWFPPPTQKRRRAVQ

SEQ ID NO: 23940 - protein, 85 aa, unidentified
  REGION 1..85: note = Description of Unknown:hvTR_F6KS47 target sequence
ETPPRTPSEIIEFSSPSPVADAPPTTPDSPGELSLTPTSVSQIVSAPFPEETAERYGAGDIEAFWSEHVFDADWATRLHICPPGG

SEQ ID NO: 23941 - protein, 85 aa, unidentified
  REGION 1..85: note = Description of Unknown:cds_NZ_WFIY01000004.1_cds_WP_155863523.1_1467 target sequence
LSDFGKLVKDKLGYNLFPYQSYVSERIIRELEEGKSNFIVVSMPTGSGKTVIELFMAYYFLKKGVKNVIVMEPTRLLCDQMYFNF

SEQ ID NO: 23942 - protein, 85 aa, unidentified
  REGION 1..85: note = Description of Unknown:cds_NZ_WFIY01000004.1_cds_WP_155863523.1_1467 target sequence
WRKIFGEDVGMEYEGECTAFEEGKKIIVSTPFTAEKCAPETEAIIVDEVHHAFGDSRYESTLVSLDPKYLIGFTALLPSYKKYMV

SEQ ID NO: 23943 - protein, 85 aa, unidentified
  REGION 1..85: note = Description of Unknown:cds_NZ_WFIY01000004.1_cds_WP_155863523.1_1467 target sequence
DPRLIEKLGKPKFLNYDFKALAEIDPTFNPPKAIADVFDAEMNKIEDSAYEAFFRGQIKGDKNTLKFLEITLYSYGKEAFCESLG

SEQ ID NO: 23944 - protein, 85 aa, unidentified
  REGION 1..85: note = Description of Unknown:cds_NZ_WFIY01000004.1_cds_WP_155863523.1_1467 target sequence
RMEGKIEENPQLDFLCESKELSHKARALRQILSIYKIEDFKPVLIFTSRKATAYEFEKAIEDLDPGRIKVLTGDSSKFERQKLVK

SEQ ID NO: 23945 - protein, 85 aa, unidentified
  REGION 1..85: note = Description of Unknown:cds_NZ_WFIY01000004.1_cds_WP_155863523.1_1467 target sequence
SAKRGEIDVIISTLVGEEGIDIPEAKLLIMTDVPQSPLRFYQRLGRLIRSKTDDNNNDSENTLKYLVVALTPKTPEYDNLDDALR

SEQ ID NO: 23946 - protein, 85 aa, unidentified
  REGION 1..85: note = Description of Unknown:cds_NZ_WFIY01000004.1_cds_WP_155863523.1_1467 target sequence
NLYLEGVDVSYIVEKKEGKGPVARVVDIVKKEGGGTSFSKLDSSIGEISSIEVLLSPKNVETQMGDYVDRAIKEGRIFYYYDVDK

SEQ ID NO: 23947 - protein, 85 aa, unidentified
  REGION 1..85: note = Description of Unknown:cds_NZ_WFIY01000004.1_cds_WP_155863523.1_1467 target sequence
MADLASKVLLGSYCNLCFGEKCMKICKDCIREVGKLLISKKGRVKLEKKGILLHYMKLVLPEKVDEIMNAMNKEKDEIMKKVECA

SEQ ID NO: 23948 - protein, 84 aa, unidentified
  REGION 1..84: note = Description of Unknown:cds_NZ_WFIY01000004.1_cds_WP_155863523.1_1467 target sequence
NAMNKEKDEIMKKVECASISLSSTKRANVYSIIINFNVSVDGMTIYPKLQLDYYNANEQEIKLAEINAKAIGYKAIYLFLQQLK

SEQ ID NO: 23949 - protein, 85 aa, unidentified
  REGION 1..85: note = Description of Unknown:cds_NZ_WFIY01000004.1_cds_WP_155863523.1_1467 target sequence
IRELEEGKSNFIVVSMPTGSGKTVIELFMAYYFLKKGVKNVIVMEPTRLLCDQMYFNFWRKIFGEDVGMEYEGECTAFEEGKKII

SEQ ID NO: 23950 - protein, 85 aa, unidentified
  REGION 1..85: note = Description of Unknown:cds_NZ_WFIY01000004.1_cds_WP_155863523.1_1467 target sequence
VSTPFTAEKCAPETEAIIVDEVHHAFGDSRYESTLVSLDPKYLIGFTALLPSYKKYMVDPRLIEKLGKPKFLNYDFKALAEIDPT

SEQ ID NO: 23951 - protein, 85 aa, unidentified
  REGION 1..85: note = Description of Unknown:cds_NZ_WFIY01000004.1_cds_WP_155863523.1_1467 target sequence
FNPPKAIADVFDAEMNKIEDSAYEAFFRGQIKGDKNTLKFLEITLYSYGKEAFCESLGRMEGKIEENPQLDFLCESKELSHKARA

SEQ ID NO: 23952 - protein, 85 aa, unidentified
  REGION 1..85: note = Description of Unknown:cds_NZ_WFIY01000004.1_cds_WP_155863523.1_1467 target sequence
LRQILSIYKIEDFKPVLIFTSRKATAYEFEKAIEDLDPGRIKVLTGDSSKFERQKLVKSAKRGEIDVIISTLVGEEGIDIPEAKL

SEQ ID NO: 23953 - protein, 85 aa, unidentified
  REGION 1..85: note = Description of Unknown:cds_NZ_WFIY01000004.1_cds_WP_155863523.1_1467 target sequence
LIMTDVPQSPLRFYQRLGRLIRSKTDDNNNDSENTLKYLVVALTPKTPEYDNLDDALRNLYLEGVDVSYIVEKKEGKGPVARVVD

SEQ ID NO: 23954 - protein, 85 aa, unidentified
  REGION 1..85: note = Description of Unknown:cds_NZ_WFIY01000004.1_cds_WP_155863523.1_1467 target sequence
IVKKEGGGTSFSKLDSSIGEISSIEVLLSPKNVETQMGDYVDRAIKEGRIFYYYDVDKMADLASKVLLGSYCNLCFGEKCMKICK

SEQ ID NO: 23955 - protein, 85 aa, unidentified
  REGION 1..85: note = Description of Unknown:cds_NZ_WFIY01000004.1_cds_WP_155863523.1_1467 target sequence
DCIREVGKLLISKKGRVKLEKKGILLHYMKLVLPEKVDEIMNAMNKEKDEIMKKVECASISLSSTKRANVYSIIINFNVSVDGMT

SEQ ID NO: 23956 - protein, 85 aa, unidentified
  REGION 1..85: note = Description of Unknown:cds_NC_035460.1_cds_YP_009408050.1_99 target sequence
ESNKDDLFLTAKINLNNNYNNQTLTLVDFNHIHTATPSLSCTVCNTLSNISSDDIISAGVRQRVSKNKKKHTDKESTSQCKQQCG

SEQ ID NO: 23957 - protein, 85 aa, unidentified
  REGION 1..85: note = Description of Unknown:cds_NC_035460.1_cds_YP_009408050.1_99 target sequence
EYIPIDEVASTQHWNARLRRDGELIAKFLTTNKCDINTFTMQDMLNVMRKLNIVRNSRQELFEILSHVKSSLSNSSISVKSTHPL

SEQ ID NO: 23958 - protein, 85 aa, unidentified
  REGION 1..85: note = Description of Unknown:cds_NC_035460.1_cds_YP_009408050.1_99 target sequence
VLVHSHANPRISEQLKELEKIFSPAQHDILLSTTRFQSMNFIDMSSASDLAFKFRDSDTTSFVHPILVALFGVKLPAIENAYIYG

SEQ ID NO: 23959 - protein, 85 aa, unidentified
  REGION 1..85: note = Description of Unknown:cds_NC_035460.1_cds_YP_009408050.1_99 target sequence
DSTSLLHQLHEYKKVGPHNYMLLVNRLTEESPILFTGINDAISTEIQRANIHTMIRKLILNIRTGIFYTYECDMIEPILMKIIHT

SEQ ID NO: 23960 - protein, 85 aa, unidentified
  REGION 1..85: note = Description of Unknown:cds_NC_035460.1_cds_YP_009408050.1_99 target sequence
NCSQIMSDEEHILASILSIVGIRPALISLPIPGNFNNYDMRLKSAPYIVVNPMKMITTLNSPICINSSNICSLTFDSSSGRVVFA

SEQ ID NO: 23961 - protein, 85 aa, unidentified
  REGION 1..85: note = Description of Unknown:cds_NC_035460.1_cds_YP_009408050.1_99 target sequence
PSVGFKSMYNNIDQYSLCNQPQINPAMNMPMMPSNPINSSVIVNGVMIFYVERRQNKNIFGGECFTGFRSIIDDTPIDISTELLI

SEQ ID NO: 23962 - protein, 85 aa, unidentified
  REGION 1..85: note = Description of Unknown:cds_NC_035460.1_cds_YP_009408050.1_99 target sequence
NGIMYRLRSAVCYKIGDQFFESCESSNSYNADMFLKGHYSILFTESGPWMYNPLSIFNKSSRDARMMRALKNQYKKVNNNYDDSG

SEQ ID NO: 23963 - protein, 84 aa, unidentified
  REGION 1..84: note = Description of Unknown:cds_NC_035460.1_cds_YP_009408050.1_99 target sequence
ALKNQYKKVNNNYDDSGFYDWIKGDGAQFAAIKQQMLMNNTAMFEDDLLSMEEAMMMISKQCCILIYSQDYGPYISSKTITELF

SEQ ID NO: 23964 - protein, 85 aa, unidentified
  REGION 1..85: note = Description of Unknown:cds_NC_035460.1_cds_YP_009408050.1_99 target sequence
DFNHIHTATPSLSCTVCNTLSNISSDDIISAGVRQRVSKNKKKHTDKESTSQCKQQCGEYIPIDEVASTQHWNARLRRDGELIAK

SEQ ID NO: 23965 - protein, 85 aa, unidentified
  REGION 1..85: note = Description of Unknown:cds_NC_035460.1_cds_YP_009408050.1_99 target sequence
FLTTNKCDINTFTMQDMLNVMRKLNIVRNSRQELFEILSHVKSSLSNSSISVKSTHPLVLVHSHANPRISEQLKELEKIFSPAQH

SEQ ID NO: 23966 - protein, 85 aa, unidentified
  REGION 1..85: note = Description of Unknown:cds_NC_035460.1_cds_YP_009408050.1_99 target sequence
DILLSTTRFQSMNFIDMSSASDLAFKFRDSDTTSFVHPILVALFGVKLPAIENAYIYGDSTSLLHQLHEYKKVGPHNYMLLVNRL

SEQ ID NO: 23967 - protein, 85 aa, unidentified
  REGION 1..85: note = Description of Unknown:cds_NC_035460.1_cds_YP_009408050.1_99 target sequence
TEESPILFTGINDAISTEIQRANIHTMIRKLILNIRTGIFYTYECDMIEPILMKIIHTNCSQIMSDEEHILASILSIVGIRPALI

SEQ ID NO: 23968 - protein, 85 aa, unidentified
  REGION 1..85: note = Description of Unknown:cds_NC_035460.1_cds_YP_009408050.1_99 target sequence
SLPIPGNFNNYDMRLKSAPYIVVNPMKMITTLNSPICINSSNICSLTFDSSSGRVVFAPSVGFKSMYNNIDQYSLCNQPQINPAM

SEQ ID NO: 23969 - protein, 85 aa, unidentified
  REGION 1..85: note = Description of Unknown:cds_NC_035460.1_cds_YP_009408050.1_99 target sequence
NMPMMPSNPINSSVIVNGVMIFYVERRQNKNIFGGECFTGFRSIIDDTPIDISTELLINGIMYRLRSAVCYKIGDQFFESCESSN

SEQ ID NO: 23970 - protein, 85 aa, unidentified
  REGION 1..85: note = Description of Unknown:cds_NC_035460.1_cds_YP_009408050.1_99 target sequence
SYNADMFLKGHYSILFTESGPWMYNPLSIFNKSSRDARMMRALKNQYKKVNNNYDDSGFYDWIKGDGAQFAAIKQQMLMNNTAMF

SEQ ID NO: 23971 - protein, 85 aa, unidentified
  REGION 1..85: note = Description of Unknown:cds_NZ_WFIY01000004.1_cds_WP_155864018.1_1949 target sequence
SLDPLFRPKSIAVVGASRNREKIGNIILRNLLSTYRGKIYPVNNKAEEIEGMKSYKTLKEIPGDVDLAIISVPRQFAVEVMEDAV

SEQ ID NO: 23972 - protein, 85 aa, unidentified
  REGION 1..85: note = Description of Unknown:cds_NZ_WFIY01000004.1_cds_WP_155864018.1_1949 target sequence
EKGVKASIVITSGFREVGEEGAKLEEELISTARKGGIRVLGPNTMGLISPDFNGTFAYANVQRGEIALVVQSGGIGAYMLDWAQR

SEQ ID NO: 23973 - protein, 85 aa, unidentified
  REGION 1..85: note = Description of Unknown:cds_NZ_WFIY01000004.1_cds_WP_155864018.1_1949 target sequence
TRTGISFLVSMGNQADVKEYEVIDYLSRDPETRAIFVYLEGVSDGEKFLDVVPDAASRKPVVFIKGGATAKGAEAVKTHTGSLAG

SEQ ID NO: 23974 - protein, 85 aa, unidentified
  REGION 1..85: note = Description of Unknown:cds_NZ_WFIY01000004.1_cds_WP_155864018.1_1949 target sequence
SYEVFKAAIKTVGGIFVEDLSDFLNLTRFVTSPEPIKGDILVVTNSGGHGVLTSDAISRSGLNMVDIPDRIKDELRKILPVTSLP

SEQ ID NO: 23975 - protein, 85 aa, unidentified
  REGION 1..85: note = Description of Unknown:cds_NZ_WFIY01000004.1_cds_WP_155864018.1_1949 target sequence
KNPLDLSGDAGRDRYAEAMKIVQDLDCTKLVIVQSLPVVSCSEVAKVLLNYKGKGVVGVMMGVDEDSALRILESASIPAFNFPEA

SEQ ID NO: 23976 - protein, 85 aa, unidentified
  REGION 1..85: note = Description of Unknown:cds_NZ_WFIY01000004.1_cds_WP_155864018.1_1949 target sequence
AVRAIRYLTSKPNPRKKIRIAQPISSAVELTKGKEYLADYEALKLMEIYGIKTPKWGIAQSEEEAQRVADSIGYPVVMKISADKP

SEQ ID NO: 23977 - protein, 85 aa, unidentified
  REGION 1..85: note = Description of Unknown:cds_NZ_WFIY01000004.1_cds_WP_155864018.1_1949 target sequence
LHKTEMKGVVMNVEKDMVKSVYKQLSQITKRVMIQEQLTGLEVFVGGLKDPVFGHTVLVGSGGIYVEVLKNVSYGISPVYEDEAL

SEQ ID NO: 23978 - protein, 84 aa, unidentified
  REGION 1..84: note = Description of Unknown:cds_NZ_WFIY01000004.1_cds_WP_155864018.1_1949 target sequence
VEVLKNVSYGISPVYEDEALEMLKESKVHDMLTARKRGYDEGSLIRTIVTVSRMIVDLNIKEMDINPLIVNEKGAFAVDVRILF

SEQ ID NO: 23979 - protein, 85 aa, unidentified
  REGION 1..85: note = Description of Unknown:cds_NZ_WFIY01000004.1_cds_WP_155864018.1_1949 target sequence
LRNLLSTYRGKIYPVNNKAEEIEGMKSYKTLKEIPGDVDLAIISVPRQFAVEVMEDAVEKGVKASIVITSGFREVGEEGAKLEEE

SEQ ID NO: 23980 - protein, 85 aa, unidentified
  REGION 1..85: note = Description of Unknown:cds_NZ_WFIY01000004.1_cds_WP_155864018.1_1949 target sequence
LISTARKGGIRVLGPNTMGLISPDFNGTFAYANVQRGEIALVVQSGGIGAYMLDWAQRTRTGISFLVSMGNQADVKEYEVIDYLS

SEQ ID NO: 23981 - protein, 85 aa, unidentified
  REGION 1..85: note = Description of Unknown:cds_NZ_WFIY01000004.1_cds_WP_155864018.1_1949 target sequence
RDPETRAIFVYLEGVSDGEKFLDVVPDAASRKPVVFIKGGATAKGAEAVKTHTGSLAGSYEVFKAAIKTVGGIFVEDLSDFLNLT

SEQ ID NO: 23982 - protein, 85 aa, unidentified
  REGION 1..85: note = Description of Unknown:cds_NZ_WFIY01000004.1_cds_WP_155864018.1_1949 target sequence
RFVTSPEPIKGDILVVTNSGGHGVLTSDAISRSGLNMVDIPDRIKDELRKILPVTSLPKNPLDLSGDAGRDRYAEAMKIVQDLDC

SEQ ID NO: 23983 - protein, 85 aa, unidentified
  REGION 1..85: note = Description of Unknown:cds_NZ_WFIY01000004.1_cds_WP_155864018.1_1949 target sequence
TKLVIVQSLPVVSCSEVAKVLLNYKGKGVVGVMMGVDEDSALRILESASIPAFNFPEAAVRAIRYLTSKPNPRKKIRIAQPISSA

SEQ ID NO: 23984 - protein, 85 aa, unidentified
  REGION 1..85: note = Description of Unknown:cds_NZ_WFIY01000004.1_cds_WP_155864018.1_1949 target sequence
VELTKGKEYLADYEALKLMEIYGIKTPKWGIAQSEEEAQRVADSIGYPVVMKISADKPLHKTEMKGVVMNVEKDMVKSVYKQLSQ

SEQ ID NO: 23985 - protein, 85 aa, unidentified
  REGION 1..85: note = Description of Unknown:cds_NZ_WFIY01000004.1_cds_WP_155864018.1_1949 target sequence
ITKRVMIQEQLTGLEVFVGGLKDPVFGHTVLVGSGGIYVEVLKNVSYGISPVYEDEALEMLKESKVHDMLTARKRGYDEGSLIRT

SEQ ID NO: 23986 - protein, 85 aa, unidentified
  REGION 1..85: note = Description of Unknown:cds_NZ_WFIY01000004.1_cds_266 target sequence
ISCSPRNYTLIIAEKPKAARKIVDAFSSKFITCKSNSVLYWVIPSRNIVIASAVGHLFNLTGPSGFPIFEVEWKPLWEIDKKSYY

SEQ ID NO: 23987 - protein, 85 aa, unidentified
  REGION 1..85: note = Description of Unknown:cds_NZ_WFIY01000004.1_cds_266 target sequence
TRKYLILLQRLCKYAKEYINACDYDIEGSVIGYMIIKNFGDLKKAKRMKFSSLTKEELIKSFNNLQPLDYNMVNAGIARHVVDWL

SEQ ID NO: 23988 - protein, 85 aa, unidentified
  REGION 1..85: note = Description of Unknown:cds_NZ_WFIY01000004.1_cds_266 target sequence
WGINVSRALMSAVKDVSNKSVILSAGRVQSPTLIEVVKRHLDRETFVPLPYFKIELKIRLGNIINTVYLDQEFHNIDDVESLITR

SEQ ID NO: 23989 - protein, 85 aa, unidentified
  REGION 1..85: note = Description of Unknown:cds_NZ_WFIY01000004.1_cds_266 target sequence
LKKDKLIIDKNILNKDKIARPPPFNLGDLQLEAGRLFGLSPYRTERIGEELYLDGVISYPRTNSQKIPPTVNINDIVAGLSQRFG

SEQ ID NO: 23990 - protein, 85 aa, unidentified
  REGION 1..85: note = Description of Unknown:cds_NZ_WFIY01000004.1_cds_266 target sequence
KLVDELNLMTKGKFIVRQGNKDDPAHPAIYPTGIIPKKLGKQESEVYELIVRRFLASISRDAEVTKQRIILKFEKEKLKLQLDFQ

SEQ ID NO: 23991 - protein, 85 aa, unidentified
  REGION 1..85: note = Description of Unknown:cds_NZ_WFIY01000004.1_cds_266 target sequence
KITYEGWLKIYPYHRFENEELVNVEEGSEVEIISIKPRLLLTKPSTRFTRVSLLKWMEDVKIGTEATRGKIIETLFQRKYVVTRG

SEQ ID NO: 23992 - protein, 85 aa, unidentified
  REGION 1..85: note = Description of Unknown:cds_NZ_WFIY01000004.1_cds_266 target sequence
SYIHPTKLGIIVSEVLEKYFNELTNVKMTADMEDKLDEIIYGKKNKDEVINEVKDKISKYFEKYNEEKKIIGLELAKGLNLVKYN

SEQ ID NO: 23993 - protein, 84 aa, unidentified
  REGION 1..84: note = Description of Unknown:cds_NZ_WFIY01000004.1_cds_266 target sequence
NEEKKIIGLELAKGLNLVKYNKCKLCDFEAIKDGLCKYHLIAKEKLNEAIKIWKDRTGYDIKTILKYIRGSKSTGKLISDLMSI

SEQ ID NO: 23994 - protein, 85 aa, unidentified
  REGION 1..85: note = Description of Unknown:cds_NZ_WFIY01000004.1_cds_266 target sequence
SKFITCKSNSVLYWVIPSRNIVIASAVGHLFNLTGPSGFPIFEVEWKPLWEIDKKSYYTRKYLILLQRLCKYAKEYINACDYDIE

SEQ ID NO: 23995 - protein, 85 aa, unidentified
  REGION 1..85: note = Description of Unknown:cds_NZ_WFIY01000004.1_cds_266 target sequence
GSVIGYMIIKNFGDLKKAKRMKFSSLTKEELIKSFNNLQPLDYNMVNAGIARHVVDWLWGINVSRALMSAVKDVSNKSVILSAGR

SEQ ID NO: 23996 - protein, 85 aa, unidentified
  REGION 1..85: note = Description of Unknown:cds_NZ_WFIY01000004.1_cds_266 target sequence
VQSPTLIEVVKRHLDRETFVPLPYFKIELKIRLGNIINTVYLDQEFHNIDDVESLITRLKKDKLIIDKNILNKDKIARPPPFNLG

SEQ ID NO: 23997 - protein, 85 aa, unidentified
  REGION 1..85: note = Description of Unknown:cds_NZ_WFIY01000004.1_cds_266 target sequence
DLQLEAGRLFGLSPYRTERIGEELYLDGVISYPRTNSQKIPPTVNINDIVAGLSQRFGKLVDELNLMTKGKFIVRQGNKDDPAHP

SEQ ID NO: 23998 - protein, 85 aa, unidentified
  REGION 1..85: note = Description of Unknown:cds_NZ_WFIY01000004.1_cds_266 target sequence
AIYPTGIIPKKLGKQESEVYELIVRRFLASISRDAEVTKQRIILKFEKEKLKLQLDFQKITYEGWLKIYPYHRFENEELVNVEEG

SEQ ID NO: 23999 - protein, 85 aa, unidentified
  REGION 1..85: note = Description of Unknown:cds_NZ_WFIY01000004.1_cds_266 target sequence
SEVEIISIKPRLLLTKPSTRFTRVSLLKWMEDVKIGTEATRGKIIETLFQRKYVVTRGSYIHPTKLGIIVSEVLEKYFNELTNVK

SEQ ID NO: 24000 - protein, 85 aa, unidentified
  REGION 1..85: note = Description of Unknown:cds_NZ_WFIY01000004.1_cds_266 target sequence
MTADMEDKLDEIIYGKKNKDEVINEVKDKISKYFEKYNEEKKIIGLELAKGLNLVKYNKCKLCDFEAIKDGLCKYHLIAKEKLNE

SEQ ID NO: 24001 - protein, 85 aa, unidentified
  REGION 1..85: note = Description of Unknown:cds_NZ_WFIY01000004.1_cds_WP_155863767.1_1642 target sequence
NYLQLAILVYIIGMMTADFIILYYLLRRPIVNKKAIFFVSSVLLYMSVEAVDISYILFSHGSIIIEPVSLIIASIPIILSTMMKN

SEQ ID NO: 24002 - protein, 85 aa, unidentified
  REGION 1..85: note = Description of Unknown:cds_NZ_WFIY01000004.1_cds_WP_155863767.1_1642 target sequence
SITRWREDKTSALTLALTIVADEIAMGYAYSEAFGPHINPLIDSVSNIAFGVMMLADSIFFLALSPRKIEELALFTFASSMAFMP

SEQ ID NO: 24003 - protein, 85 aa, unidentified
  REGION 1..85: note = Description of Unknown:cds_NZ_WFIY01000004.1_cds_WP_155863767.1_1642 target sequence
NIFFTFSAYTELVGSLIASIIMIVNIITLYLIESRKLTFNAQLLSISLGFFDFVMMLSLSIYATSKDLYTISLTMIASMVWYFTL

SEQ ID NO: 24004 - protein, 85 aa, unidentified
  REGION 1..85: note = Description of Unknown:cds_NZ_WFIY01000004.1_cds_WP_155863767.1_1642 target sequence
VLYRFKDVKIKLGLKYPLVFVIFINFAELTMGFGESVLGFRITNNLWMPSMMSMHSKSMDPMHMHMLMWSPTSNPWWWIFPTDPW

SEQ ID NO: 24005 - protein, 85 aa, unidentified
  REGION 1..85: note = Description of Unknown:cds_NZ_WFIY01000004.1_cds_WP_155863767.1_1642 target sequence
SMTSMAYKQAMMATHNILFAGFWASYMLIMMTTMMPFYVVMMGAEMSYLVYERFKTAKNSNVKSWAVAILVGIPLFVWLLPYYTQ

SEQ ID NO: 24006 - protein, 85 aa, unidentified
  REGION 1..85: note = Description of Unknown:cds_NZ_WFIY01000004.1_cds_WP_155863767.1_1642 target sequence
TYIFGMSGMLSHINPEFAPTLLSLTLSLVAIALASTLFGRRAYCNLVCMSAHMWTNIYYDQFKPKKSSKIWEYIRWISLSIMIIV

SEQ ID NO: 24007 - protein, 85 aa, unidentified
  REGION 1..85: note = Description of Unknown:cds_NZ_WFIY01000004.1_cds_WP_155863767.1_1642 target sequence
FTYVFLIYLGIAKNPSIGTLQIPLLDFYGMFTLNYVWWFFFFLTPVFGTYSCARQGWCGFGNFVGLFNKILFKIKADSVDTCKSC

SEQ ID NO: 24008 - protein, 84 aa, unidentified
  REGION 1..84: note = Description of Unknown:cds_NZ_WFIY01000004.1_cds_WP_155863767.1_1642 target sequence
VGLFNKILFKIKADSVDTCKSCKTVQCESACPVKIPIRTDVLSKGYTNRISCVGCGDCVEACPYNNLEIIDIRNAFRSEKARTS

SEQ ID NO: 24009 - protein, 85 aa, unidentified
  REGION 1..85: note = Description of Unknown:cds_NZ_WFIY01000004.1_cds_WP_155863767.1_1642 target sequence
RPIVNKKAIFFVSSVLLYMSVEAVDISYILFSHGSIIIEPVSLIIASIPIILSTMMKNSITRWREDKTSALTLALTIVADEIAMG

SEQ ID NO: 24010 - protein, 85 aa, unidentified
  REGION 1..85: note = Description of Unknown:cds_NZ_WFIY01000004.1_cds_WP_155863767.1_1642 target sequence
YAYSEAFGPHINPLIDSVSNIAFGVMMLADSIFFLALSPRKIEELALFTFASSMAFMPNIFFTFSAYTELVGSLIASIIMIVNII

SEQ ID NO: 24011 - protein, 85 aa, unidentified
  REGION 1..85: note = Description of Unknown:cds_NZ_WFIY01000004.1_cds_WP_155863767.1_1642 target sequence
TLYLIESRKLTFNAQLLSISLGFFDFVMMLSLSIYATSKDLYTISLTMIASMVWYFTLVLYRFKDVKIKLGLKYPLVFVIFINFA

SEQ ID NO: 24012 - protein, 85 aa, unidentified
  REGION 1..85: note = Description of Unknown:cds_NZ_WFIY01000004.1_cds_WP_155863767.1_1642 target sequence
ELTMGFGESVLGFRITNNLWMPSMMSMHSKSMDPMHMHMLMWSPTSNPWWWIFPTDPWSMTSMAYKQAMMATHNILFAGFWASYM

SEQ ID NO: 24013 - protein, 85 aa, unidentified
  REGION 1..85: note = Description of Unknown:cds_NZ_WFIY01000004.1_cds_WP_155863767.1_1642 target sequence
LIMMTTMMPFYVVMMGAEMSYLVYERFKTAKNSNVKSWAVAILVGIPLFVWLLPYYTQTYIFGMSGMLSHINPEFAPTLLSLTLS

SEQ ID NO: 24014 - protein, 85 aa, unidentified
  REGION 1..85: note = Description of Unknown:cds_NZ_WFIY01000004.1_cds_WP_155863767.1_1642 target sequence
LVAIALASTLFGRRAYCNLVCMSAHMWTNIYYDQFKPKKSSKIWEYIRWISLSIMIIVFTYVFLIYLGIAKNPSIGTLQIPLLDF

SEQ ID NO: 24015 - protein, 85 aa, unidentified
  REGION 1..85: note = Description of Unknown:cds_NZ_WFIY01000004.1_cds_WP_155863767.1_1642 target sequence
YGMFTLNYVWWFFFFLTPVFGTYSCARQGWCGFGNFVGLFNKILFKIKADSVDTCKSCKTVQCESACPVKIPIRTDVLSKGYTNR

SEQ ID NO: 24016 - protein, 85 aa, unidentified
  REGION 1..85: note = Description of Unknown:cds_NZ_WFIY01000004.1_cds_WP_155862592.1_365 target sequence
ISPSGCGVFGILRKRNAPKIKGKDVVNAIDIVRYRGSDKGAGFAVFNLKEGNSYYIKAFYFGDGEEIKREIEDQGIRINGFNEKY

SEQ ID NO: 24017 - protein, 85 aa, unidentified
  REGION 1..85: note = Description of Unknown:cds_NZ_WFIY01000004.1_cds_WP_155862592.1_365 target sequence
MGELCDCDFEISLGSIASLKKIVRNINEILWNNGKKGRIYSAGKSLQVYKGVGYPADIARQYDIYEVEGDMWIAHTRQPTNSPGS

SEQ ID NO: 24018 - protein, 85 aa, unidentified
  REGION 1..85: note = Description of Unknown:cds_NZ_WFIY01000004.1_cds_WP_155862592.1_365 target sequence
YPYWSHPFSAFDVAIVHNGDVSSFGANVEFLQSRGWGGFVGTDSEVMAFLFEELISEGLSVEEVTRIMSNPSRRFSKLNVEEDYI

SEQ ID NO: 24019 - protein, 85 aa, unidentified
  REGION 1..85: note = Description of Unknown:cds_NZ_WFIY01000004.1_cds_WP_155862592.1_365 target sequence
YRNARLDGPFTAIIGYDSGNDLFMIGIADRAKFRPVIIGEDENYYYIASEENQIRMLSPSAKVWTLEPGNYFIASLLKGLINPGR

SEQ ID NO: 24020 - protein, 85 aa, unidentified
  REGION 1..85: note = Description of Unknown:cds_NZ_WFIY01000004.1_cds_WP_155862592.1_365 target sequence
DVSKISSFSKPVFYTEKFDIDARGLGYKDVNKAIMEFVNKSGKKEVTVVNLLGHRYIGISFPKAGLRLNLYGVVGNAMANLNENN

SEQ ID NO: 24021 - protein, 85 aa, unidentified
  REGION 1..85: note = Description of Unknown:cds_NZ_WFIY01000004.1_cds_WP_155862592.1_365 target sequence
VFHVYGNVADDCCDTMQGGKVVIHGDARDVLAQTFQGGYIYVKGNAGNRVGIQMREYMNKRPYLVIGGMVDDYLGEYMAGGVIMV

SEQ ID NO: 24022 - protein, 85 aa, unidentified
  REGION 1..85: note = Description of Unknown:cds_NZ_WFIY01000004.1_cds_WP_155862592.1_365 target sequence
LGLGIKGEPVGNYIGSGMVGGRIYIRGKVNPEKIGLQPSKQEMVRFLKALLLDSMISEEKYNKLKEMPYIEVVKELDGEAKKYAQ

SEQ ID NO: 24023 - protein, 84 aa, unidentified
  REGION 1..84: note = Description of Unknown:cds_NZ_WFIY01000004.1_cds_WP_155862592.1_365 target sequence
NKLKEMPYIEVVKELDGEAKKYAQKLFEEKVGIPTYEYRELTEDEIKELEPIARDYAIETNQNKDTIVEMLKEKYTVITSSLRK

SEQ ID NO: 24024 - protein, 85 aa, unidentified
  REGION 1..85: note = Description of Unknown:cds_NZ_WFIY01000004.1_cds_WP_155862592.1_365 target sequence
AIDIVRYRGSDKGAGFAVFNLKEGNSYYIKAFYFGDGEEIKREIEDQGIRINGFNEKYMGELCDCDFEISLGSIASLKKIVRNIN

SEQ ID NO: 24025 - protein, 85 aa, unidentified
  REGION 1..85: note = Description of Unknown:cds_NZ_WFIY01000004.1_cds_WP_155862592.1_365 target sequence
EILWNNGKKGRIYSAGKSLQVYKGVGYPADIARQYDIYEVEGDMWIAHTRQPTNSPGSYPYWSHPFSAFDVAIVHNGDVSSFGAN

SEQ ID NO: 24026 - protein, 85 aa, unidentified
  REGION 1..85: note = Description of Unknown:cds_NZ_WFIY01000004.1_cds_WP_155862592.1_365 target sequence
VEFLQSRGWGGFVGTDSEVMAFLFEELISEGLSVEEVTRIMSNPSRRFSKLNVEEDYIYRNARLDGPFTAIIGYDSGNDLFMIGI

SEQ ID NO: 24027 - protein, 85 aa, unidentified
  REGION 1..85: note = Description of Unknown:cds_NZ_WFIY01000004.1_cds_WP_155862592.1_365 target sequence
ADRAKFRPVIIGEDENYYYIASEENQIRMLSPSAKVWTLEPGNYFIASLLKGLINPGRDVSKISSFSKPVFYTEKFDIDARGLGY

SEQ ID NO: 24028 - protein, 85 aa, unidentified
  REGION 1..85: note = Description of Unknown:cds_NZ_WFIY01000004.1_cds_WP_155862592.1_365 target sequence
KDVNKAIMEFVNKSGKKEVTVVNLLGHRYIGISFPKAGLRLNLYGVVGNAMANLNENNVFHVYGNVADDCCDTMQGGKVVIHGDA

SEQ ID NO: 24029 - protein, 85 aa, unidentified
  REGION 1..85: note = Description of Unknown:cds_NZ_WFIY01000004.1_cds_WP_155862592.1_365 target sequence
RDVLAQTFQGGYIYVKGNAGNRVGIQMREYMNKRPYLVIGGMVDDYLGEYMAGGVIMVLGLGIKGEPVGNYIGSGMVGGRIYIRG

SEQ ID NO: 24030 - protein, 85 aa, unidentified
  REGION 1..85: note = Description of Unknown:cds_NZ_WFIY01000004.1_cds_WP_155862592.1_365 target sequence
KVNPEKIGLQPSKQEMVRFLKALLLDSMISEEKYNKLKEMPYIEVVKELDGEAKKYAQKLFEEKVGIPTYEYRELTEDEIKELEP

SEQ ID NO: 24031 - protein, 85 aa, unidentified
  REGION 1..85: note = Description of Unknown:cds_NZ_WFIY01000004.1_cds_WP_155864023.1_1954 target sequence
VETQEISEQKLEEKADYNMRYYYYLFKLSKENPAKFWGDLAQELITWFEPWKETMKQEDPLTRWFIGGKLNASYNAVDRHLNSPR

SEQ ID NO: 24032 - protein, 85 aa, unidentified
  REGION 1..85: note = Description of Unknown:cds_NZ_WFIY01000004.1_cds_WP_155864023.1_1954 target sequence
KFKAAIIWESERGERRIVTYQDLFYEVNRWANALRELGVKKGDRVTIYMPLTPEGIFAKLACARLGAIHSVVFAGFGSQALADRI

SEQ ID NO: 24033 - protein, 85 aa, unidentified
  REGION 1..85: note = Description of Unknown:cds_NZ_WFIY01000004.1_cds_WP_155864023.1_1954 target sequence
DDAKSKVVITADAYYRTGKLVELKKIVDEALDRLGDKSPVSKVLVYRRTGVEIPFKEGRDVYFDEVGKYKYIEPERMDSNDPLFI

SEQ ID NO: 24034 - protein, 85 aa, unidentified
  REGION 1..85: note = Description of Unknown:cds_NZ_WFIY01000004.1_cds_WP_155864023.1_1954 target sequence
LYTSGTTGKPKGIVHSTGGYLVGTATMLLWSYGLSQENDVLFNTSDIGWIVGHSYITYAPLVMGRTVVIYESAPYYPYPDKWAEI

SEQ ID NO: 24035 - protein, 85 aa, unidentified
  REGION 1..85: note = Description of Unknown:cds_NZ_WFIY01000004.1_cds_WP_155864023.1_1954 target sequence
IERYKATTFGTSATALRAFMKYGDDYVKAHDLSSLRIIVTNGEVLNYSPWKWGLEVVGGGKVFMSHQWWQTETGAPNLGYLPGLV

SEQ ID NO: 24036 - protein, 85 aa, unidentified
  REGION 1..85: note = Description of Unknown:cds_NZ_WFIY01000004.1_cds_WP_155864023.1_1954 target sequence
YMPMKSGPASGYPLPGNFIEVLDDQGNPTKPRERGYLVMKPPFPPYMMMGMWNDPGNERLKKTYFSKFPGIYYPGDYAMIDEDGY

SEQ ID NO: 24037 - protein, 85 aa, unidentified
  REGION 1..85: note = Description of Unknown:cds_NZ_WFIY01000004.1_cds_WP_155864023.1_1954 target sequence
VWVLGRADETIKVAAHRIGAGEVESAITSHQAVAEAAVIGLPDPVKGEEVHAFIVLKEGYTPSDELAKNIQNHVREVMGPIVTPK

SEQ ID NO: 24038 - protein, 84 aa, unidentified
  REGION 1..84: note = Description of Unknown:cds_NZ_WFIY01000004.1_cds_WP_155864023.1_1954 target sequence
TPSDELAKNIQNHVREVMGPIVTPKIHFVDKLPKTRSGKVMRRVIKAVMMGSPIGDISTMEDEASMEEIRKAAEEFKKEISKQQ

SEQ ID NO: 24039 - protein, 85 aa, unidentified
  REGION 1..85: note = Description of Unknown:cds_NZ_WFIY01000004.1_cds_WP_155864023.1_1954 target sequence
LSKENPAKFWGDLAQELITWFEPWKETMKQEDPLTRWFIGGKLNASYNAVDRHLNSPRKFKAAIIWESERGERRIVTYQDLFYEV

SEQ ID NO: 24040 - protein, 85 aa, unidentified
  REGION 1..85: note = Description of Unknown:cds_NZ_WFIY01000004.1_cds_WP_155864023.1_1954 target sequence
NRWANALRELGVKKGDRVTIYMPLTPEGIFAKLACARLGAIHSVVFAGFGSQALADRIDDAKSKVVITADAYYRTGKLVELKKIV

SEQ ID NO: 24041 - protein, 85 aa, unidentified
  REGION 1..85: note = Description of Unknown:cds_NZ_WFIY01000004.1_cds_WP_155864023.1_1954 target sequence
DEALDRLGDKSPVSKVLVYRRTGVEIPFKEGRDVYFDEVGKYKYIEPERMDSNDPLFILYTSGTTGKPKGIVHSTGGYLVGTATM

SEQ ID NO: 24042 - protein, 85 aa, unidentified
  REGION 1..85: note = Description of Unknown:cds_NZ_WFIY01000004.1_cds_WP_155864023.1_1954 target sequence
LLWSYGLSQENDVLFNTSDIGWIVGHSYITYAPLVMGRTVVIYESAPYYPYPDKWAEIIERYKATTFGTSATALRAFMKYGDDYV

SEQ ID NO: 24043 - protein, 85 aa, unidentified
  REGION 1..85: note = Description of Unknown:cds_NZ_WFIY01000004.1_cds_WP_155864023.1_1954 target sequence
KAHDLSSLRIIVTNGEVLNYSPWKWGLEVVGGGKVFMSHQWWQTETGAPNLGYLPGLVYMPMKSGPASGYPLPGNFIEVLDDQGN

SEQ ID NO: 24044 - protein, 85 aa, unidentified
  REGION 1..85: note = Description of Unknown:cds_NZ_WFIY01000004.1_cds_WP_155864023.1_1954 target sequence
PTKPRERGYLVMKPPFPPYMMMGMWNDPGNERLKKTYFSKFPGIYYPGDYAMIDEDGYVWVLGRADETIKVAAHRIGAGEVESAI

SEQ ID NO: 24045 - protein, 85 aa, unidentified
  REGION 1..85: note = Description of Unknown:cds_NZ_WFIY01000004.1_cds_WP_155864023.1_1954 target sequence
TSHQAVAEAAVIGLPDPVKGEEVHAFIVLKEGYTPSDELAKNIQNHVREVMGPIVTPKIHFVDKLPKTRSGKVMRRVIKAVMMGS

SEQ ID NO: 24046 - protein, 85 aa, unidentified
  REGION 1..85: note = Description of Unknown:cds_NC_030656.1_cds_YP_009268735.1_20 target sequence
FNIFGKMCNSAPATQDSIKAIEHLLLVHANSAVVARTRSGKGLLITRQNLQLAKITFRHTSIDVVLTVFLDFCDDEIIDPPEAAH

SEQ ID NO: 24047 - protein, 85 aa, unidentified
  REGION 1..85: note = Description of Unknown:cds_NC_030656.1_cds_YP_009268735.1_20 target sequence
TMHEVDTETFYSPKPSESPLSDILFKRADTCMDLLRTIYLHWPTEGIHTFSDINYWLSTVGMYDYRLVHFRDIRKRKNSSTNLTI

SEQ ID NO: 24048 - protein, 85 aa, unidentified
  REGION 1..85: note = Description of Unknown:cds_NC_030656.1_cds_YP_009268735.1_20 target sequence
IDDMVIGLVGYHAIWVKNLNKYNRPELDVMKYDLSLIASKNMWTKYMRTFNSSKMYAMCTTIALNGKSVIPVNISMYPGPTFTAS

SEQ ID NO: 24049 - protein, 85 aa, unidentified
  REGION 1..85: note = Description of Unknown:cds_NC_030656.1_cds_YP_009268735.1_20 target sequence
SPTDNIIIDFLDWLTDANSSCTNITIVGFMSNFLESILIQKEVKKSSDWTLIGDKTIMSDKGNTVTFFDVSQFALGLSFSDYCKF

SEQ ID NO: 24050 - protein, 85 aa, unidentified
  REGION 1..85: note = Description of Unknown:cds_NC_030656.1_cds_YP_009268735.1_20 target sequence
WGGVSSSLPADLLSFSDFQKSVDSTIDTANSASMSLYETVTQQQVLLSKILPIGNVEQFNSIENMFITNAAVLGCSEHNGLYYPV

SEQ ID NO: 24051 - protein, 85 aa, unidentified
  REGION 1..85: note = Description of Unknown:cds_NC_030656.1_cds_YP_009268735.1_20 target sequence
HETAKEFIADTIHTSIIKSKTPVVHKNTRRVAIKNLLNAISEYQYPLGKPTYVTVPEKEKMYIALCEVKTLSKLMIPIIEPPNGN

SEQ ID NO: 24052 - protein, 85 aa, unidentified
  REGION 1..85: note = Description of Unknown:cds_NC_030656.1_cds_YP_009268735.1_20 target sequence
FDAPFCVPLTSVDIATITRVGGYKIRILGALQWESSDKVIFSGLEKITSSVKQFDSKQTSEMFKKMSASVDLLLNDCVLESSPES

SEQ ID NO: 24053 - protein, 84 aa, unidentified
  REGION 1..84: note = Description of Unknown:cds_NC_030656.1_cds_YP_009268735.1_20 target sequence
TSEMFKKMSASVDLLLNDCVLESSPESLVMLAFAVSYCRAKVHTAIERIDNHFSAKLVDQHDFASVWIREPAETASEIVKIAFC

SEQ ID NO: 24054 - protein, 85 aa, unidentified
  REGION 1..85: note = Description of Unknown:cds_NC_030656.1_cds_YP_009268735.1_20 target sequence
HANSAVVARTRSGKGLLITRQNLQLAKITFRHTSIDVVLTVFLDFCDDEIIDPPEAAHTMHEVDTETFYSPKPSESPLSDILFKR

SEQ ID NO: 24055 - protein, 85 aa, unidentified
  REGION 1..85: note = Description of Unknown:cds_NC_030656.1_cds_YP_009268735.1_20 target sequence
ADTCMDLLRTIYLHWPTEGIHTFSDINYWLSTVGMYDYRLVHFRDIRKRKNSSTNLTIIDDMVIGLVGYHAIWVKNLNKYNRPEL

SEQ ID NO: 24056 - protein, 85 aa, unidentified
  REGION 1..85: note = Description of Unknown:cds_NC_030656.1_cds_YP_009268735.1_20 target sequence
DVMKYDLSLIASKNMWTKYMRTFNSSKMYAMCTTIALNGKSVIPVNISMYPGPTFTASSPTDNIIIDFLDWLTDANSSCTNITIV

SEQ ID NO: 24057 - protein, 85 aa, unidentified
  REGION 1..85: note = Description of Unknown:cds_NC_030656.1_cds_YP_009268735.1_20 target sequence
GFMSNFLESILIQKEVKKSSDWTLIGDKTIMSDKGNTVTFFDVSQFALGLSFSDYCKFWGGVSSSLPADLLSFSDFQKSVDSTID

SEQ ID NO: 24058 - protein, 85 aa, unidentified
  REGION 1..85: note = Description of Unknown:cds_NC_030656.1_cds_YP_009268735.1_20 target sequence
TANSASMSLYETVTQQQVLLSKILPIGNVEQFNSIENMFITNAAVLGCSEHNGLYYPVHETAKEFIADTIHTSIIKSKTPVVHKN

SEQ ID NO: 24059 - protein, 85 aa, unidentified
  REGION 1..85: note = Description of Unknown:cds_NC_030656.1_cds_YP_009268735.1_20 target sequence
TRRVAIKNLLNAISEYQYPLGKPTYVTVPEKEKMYIALCEVKTLSKLMIPIIEPPNGNFDAPFCVPLTSVDIATITRVGGYKIRI

SEQ ID NO: 24060 - protein, 85 aa, unidentified
  REGION 1..85: note = Description of Unknown:cds_NC_030656.1_cds_YP_009268735.1_20 target sequence
LGALQWESSDKVIFSGLEKITSSVKQFDSKQTSEMFKKMSASVDLLLNDCVLESSPESLVMLAFAVSYCRAKVHTAIERIDNHFS

SEQ ID NO: 24061 - protein, 85 aa, unidentified
  REGION 1..85: note = Description of Unknown:cds_NC_007409.1_cds_YP_319888.1_57 target sequence
QPWEYVYDLLMPAGTPIGEKQFTKYIYLTLAVPATKEFEEKISKGDTKDLELPVYPVAFNTKPAEFKGDRIATKKDLLTRSGLYD

SEQ ID NO: 24062 - protein, 85 aa, unidentified
  REGION 1..85: note = Description of Unknown:cds_NC_007409.1_cds_YP_319888.1_57 target sequence
DDYDFEAPIKDLEFKSALVPGYFPLAVLKLYFEGDIDAHPEDYGLKPIDGHKWYSSVNGSYKVTNGLLFNVDETKNSDHYSVLFL

SEQ ID NO: 24063 - protein, 85 aa, unidentified
  REGION 1..85: note = Description of Unknown:cds_NC_007409.1_cds_YP_319888.1_57 target sequence
DENPKEFNTLNGYGVVRFYMDLKNAPPEVYTKAKEECISAGGLYYYDAREETAYCRLPLNKEANIKASEFIHQLYEMIKSKITSE

SEQ ID NO: 24064 - protein, 85 aa, unidentified
  REGION 1..85: note = Description of Unknown:cds_NC_007409.1_cds_YP_319888.1_57 target sequence
DFLKNEMVYQLPGPKVIPVKPVIGKTFEEMVKTADKYLLLGETAKEETKQETKQETGKEEEEKKETKQESQEQLFNPFAIVDEML

SEQ ID NO: 24065 - protein, 85 aa, unidentified
  REGION 1..85: note = Description of Unknown:cds_NC_007409.1_cds_YP_319888.1_57 target sequence
AEGQPAEAKQENSPQQQNPPAEAKQRQQQEENNAEAPQQRQQEENTPLKMNILTEEESNKSEEGQQPLENNIQTFGFKGDIADFF

SEQ ID NO: 24066 - protein, 85 aa, unidentified
  REGION 1..85: note = Description of Unknown:cds_NC_007409.1_cds_YP_319888.1_57 target sequence
ASLVKDKYIFLPILSRRSPSEYKNAKKQRTFKGEAVEEHTEIPRENMKYAEFRKKYSEIVNKYAVPFMHDGIWAILPGKEQELYK

SEQ ID NO: 24067 - protein, 85 aa, unidentified
  REGION 1..85: note = Description of Unknown:cds_NC_007409.1_cds_YP_319888.1_57 target sequence
ELDKLVQEAQKLGISPEEIEFMVTVLLVPKDAVVREINRQIKEIRTDIDEVKQELQNPDLKKTKIASLKKQLEQKQLRLNLLKDL

SEQ ID NO: 24068 - protein, 84 aa, unidentified
  REGION 1..84: note = Description of Unknown:cds_NC_007409.1_cds_YP_319888.1_57 target sequence
DLKKTKIASLKKQLEQKQLRLNLLKDLYSTVTKEEIDKLAGKVKDTLYTLNQIAKYAGQQEETDETTEEEEEEEEEGNDTVKLS

SEQ ID NO: 24069 - protein, 85 aa, unidentified
  REGION 1..85: note = Description of Unknown:cds_NC_007409.1_cds_YP_319888.1_57 target sequence
LTLAVPATKEFEEKISKGDTKDLELPVYPVAFNTKPAEFKGDRIATKKDLLTRSGLYDDDYDFEAPIKDLEFKSALVPGYFPLAV

SEQ ID NO: 24070 - protein, 85 aa, unidentified
  REGION 1..85: note = Description of Unknown:cds_NC_007409.1_cds_YP_319888.1_57 target sequence
LKLYFEGDIDAHPEDYGLKPIDGHKWYSSVNGSYKVTNGLLFNVDETKNSDHYSVLFLDENPKEFNTLNGYGVVRFYMDLKNAPP

SEQ ID NO: 24071 - protein, 85 aa, unidentified
  REGION 1..85: note = Description of Unknown:cds_NC_007409.1_cds_YP_319888.1_57 target sequence
EVYTKAKEECISAGGLYYYDAREETAYCRLPLNKEANIKASEFIHQLYEMIKSKITSEDFLKNEMVYQLPGPKVIPVKPVIGKTF

SEQ ID NO: 24072 - protein, 85 aa, unidentified
  REGION 1..85: note = Description of Unknown:cds_NC_007409.1_cds_YP_319888.1_57 target sequence
EEMVKTADKYLLLGETAKEETKQETKQETGKEEEEKKETKQESQEQLFNPFAIVDEMLAEGQPAEAKQENSPQQQNPPAEAKQRQ

SEQ ID NO: 24073 - protein, 85 aa, unidentified
  REGION 1..85: note = Description of Unknown:cds_NC_007409.1_cds_YP_319888.1_57 target sequence
QQEENNAEAPQQRQQEENTPLKMNILTEEESNKSEEGQQPLENNIQTFGFKGDIADFFASLVKDKYIFLPILSRRSPSEYKNAKK

SEQ ID NO: 24074 - protein, 85 aa, unidentified
  REGION 1..85: note = Description of Unknown:cds_NC_007409.1_cds_YP_319888.1_57 target sequence
QRTFKGEAVEEHTEIPRENMKYAEFRKKYSEIVNKYAVPFMHDGIWAILPGKEQELYKELDKLVQEAQKLGISPEEIEFMVTVLL

SEQ ID NO: 24075 - protein, 85 aa, unidentified
  REGION 1..85: note = Description of Unknown:cds_NC_007409.1_cds_YP_319888.1_57 target sequence
VPKDAVVREINRQIKEIRTDIDEVKQELQNPDLKKTKIASLKKQLEQKQLRLNLLKDLYSTVTKEEIDKLAGKVKDTLYTLNQIA

SEQ ID NO: 24076 - protein, 85 aa, unidentified
  REGION 1..85: note = Description of Unknown:vpeps_4Z24_1 target sequence
TKDNLTGDIVIIGAGAAGSLLAHYLARFSNMKIILLEAGHSHFNDPVVTDPMGFFGKYNPPNENISMSQNPSYSWQGAQEPNTGA

SEQ ID NO: 24077 - protein, 85 aa, unidentified
  REGION 1..85: note = Description of Unknown:vpeps_4Z24_1 target sequence
YGNRPIIAHGMGFGGSTMINRLNLVVGGRTVFDNDWPVGWKYDDVKNYFRRVLVDINPVRDNTKASITSVALDALRIIAEQQIAS

SEQ ID NO: 24078 - protein, 85 aa, unidentified
  REGION 1..85: note = Description of Unknown:vpeps_4Z24_1 target sequence
GEPVDFLLNKATGNVPNVEKTTPDAVPLNLNDYEGVNSVVAFSSFYMGVNQLSDGNYIRKYAGNTYLNRNYVDENGRGIGKFSGL

SEQ ID NO: 24079 - protein, 85 aa, unidentified
  REGION 1..85: note = Description of Unknown:vpeps_4Z24_1 target sequence
RVVSDAVVDRIIFKGNRAVGVNYIDREGIMHYVKVNKEVVVTSGAFYTPTILQRSGIGDFTYLSSIGVKNLVYNNPLVGTGLKNH

SEQ ID NO: 24080 - protein, 85 aa, unidentified
  REGION 1..85: note = Description of Unknown:vpeps_4Z24_1 target sequence
YSPVTITRVHGEPSEVSRFLSNMAANPTNMGFKGLAELGFHRLDPNKPANANTVTYRKYQLMMTAGVGIPAEQQYLSGLSPSSNN

SEQ ID NO: 24081 - protein, 85 aa, unidentified
  REGION 1..85: note = Description of Unknown:vpeps_4Z24_1 target sequence
LFTLIADDIRFAPEGYIKIGTPNIPRDVPKIFFNTFVTYTPTSAPADQQWPIAQKTLAPLISALLGYDIIYQTLMSMNQTARDSG

SEQ ID NO: 24082 - protein, 85 aa, unidentified
  REGION 1..85: note = Description of Unknown:vpeps_4Z24_1 target sequence
FQVSLEMVYPLNDLIYKLHNGLATYGANWWHYFVPTLVGDDTPAGREFADTLSKLSYYPRVGAHLDSHQGCSCSIGRTVDSNLKV

SEQ ID NO: 24083 - protein, 85 aa, unidentified
  REGION 1..85: note = Description of Unknown:vpeps_4Z24_1 target sequence
YPRVGAHLDSHQGCSCSIGRTVDSNLKVIGTQNVRVADLSAAAFPPGGNTWATASMIGARAVDLILGFPYLRDLPVNDVPILNVN

SEQ ID NO: 24084 - protein, 85 aa, unidentified
  REGION 1..85: note = Description of Unknown:vpeps_4Z24_1 target sequence
FSNMKIILLEAGHSHFNDPVVTDPMGFFGKYNPPNENISMSQNPSYSWQGAQEPNTGAYGNRPIIAHGMGFGGSTMINRLNLVVG

SEQ ID NO: 24085 - protein, 85 aa, unidentified
  REGION 1..85: note = Description of Unknown:vpeps_4Z24_1 target sequence
GRTVFDNDWPVGWKYDDVKNYFRRVLVDINPVRDNTKASITSVALDALRIIAEQQIASGEPVDFLLNKATGNVPNVEKTTPDAVP

SEQ ID NO: 24086 - protein, 85 aa, unidentified
  REGION 1..85: note = Description of Unknown:vpeps_4Z24_1 target sequence
LNLNDYEGVNSVVAFSSFYMGVNQLSDGNYIRKYAGNTYLNRNYVDENGRGIGKFSGLRVVSDAVVDRIIFKGNRAVGVNYIDRE

SEQ ID NO: 24087 - protein, 85 aa, unidentified
  REGION 1..85: note = Description of Unknown:vpeps_4Z24_1 target sequence
GIMHYVKVNKEVVVTSGAFYTPTILQRSGIGDFTYLSSIGVKNLVYNNPLVGTGLKNHYSPVTITRVHGEPSEVSRFLSNMAANP

SEQ ID NO: 24088 - protein, 85 aa, unidentified
  REGION 1..85: note = Description of Unknown:vpeps_4Z24_1 target sequence
TNMGFKGLAELGFHRLDPNKPANANTVTYRKYQLMMTAGVGIPAEQQYLSGLSPSSNNLFTLIADDIRFAPEGYIKIGTPNIPRD

SEQ ID NO: 24089 - protein, 85 aa, unidentified
  REGION 1..85: note = Description of Unknown:vpeps_4Z24_1 target sequence
VPKIFFNTFVTYTPTSAPADQQWPIAQKTLAPLISALLGYDIIYQTLMSMNQTARDSGFQVSLEMVYPLNDLIYKLHNGLATYGA

SEQ ID NO: 24090 - protein, 85 aa, unidentified
  REGION 1..85: note = Description of Unknown:vpeps_4Z24_1 target sequence
NWWHYFVPTLVGDDTPAGREFADTLSKLSYYPRVGAHLDSHQGCSCSIGRTVDSNLKVIGTQNVRVADLSAAAFPPGGNTWATAS

SEQ ID NO: 24091 - protein, 85 aa, unidentified
  REGION 1..85: note = Description of Unknown:hvTR_Q6TVB9 target sequence
MSKINRRPPRPRSERMNTDVIKLFHGHDETVPGILPHQLATVDFLVRRVLDDGVSVLLFHIMGSGKTVIALLFAMVASRTKKVYI

SEQ ID NO: 24092 - protein, 85 aa, unidentified
  REGION 1..85: note = Description of Unknown:hvTR_Q6TVB9 target sequence
LVPNVNVMNIFNYSMVMVANLFNAPFVIENIFVYSTTSFYSLNCNDGVVNYNGLSKYENSVFVVDEAHNIFGNNTGELMMVIKNK

SEQ ID NO: 24093 - protein, 85 aa, unidentified
  REGION 1..85: note = Description of Unknown:hvTR_Q6TVB9 target sequence
TRVPFLLLSASPITNTPITLSSIISLMSETDVEIGDIVVQGKKVFQILLNEHGVSVLRDVLKGRISYYEMPDTDMPEVVYHGRRF

SEQ ID NO: 24094 - protein, 85 aa, unidentified
  REGION 1..85: note = Description of Unknown:hvTR_Q6TVB9 target sequence
LDTRVVYCRMSRLQEENYLTVRRLCNNEMFEKNMNNVSMAVLGPLNLVNNLDVLFQAQEKDIYPNLRISNGVLYGNELTKLDISC

SEQ ID NO: 24095 - protein, 85 aa, unidentified
  REGION 1..85: note = Description of Unknown:hvTR_Q6TVB9 target sequence
KFKFFIDKVEEMRGKHFIYFSNSTYGSLIIRHVMLSNGYSEYNGSHSNNPHTIDGRPKTFAIVTSKMKASLEELLEAYNSPENDD

SEQ ID NO: 24096 - protein, 85 aa, unidentified
  REGION 1..85: note = Description of Unknown:hvTR_Q6TVB9 target sequence
GSRLMFLFSSNIMSESYTLKEVRNIWFMTIPDTFSQFNQILGRAVRKFSYTDVSLPVNVYLMAAVYSDFDEDIVSLEDYSVEDIN

SEQ ID NO: 24097 - protein, 85 aa, unidentified
  REGION 1..85: note = Description of Unknown:hvTR_Q6TVB9 target sequence
ALPFDVKKLFYLKFKAKETNRVYAILQELSEAYSARPHPQLVDVVLGEIVRQFFARRCRVPAEDPKLVAVVKAVLGTREAALEYI

SEQ ID NO: 24098 - protein, 84 aa, unidentified
  REGION 1..84: note = Description of Unknown:hvTR_Q6TVB9 target sequence
RRCRVPAEDPKLVAVVKAVLGTREAALEYIRAVVDGHFFVTNRTFGKCLLFRHERDIVTVPFELEHDAFAWAINFRKEVSVVNI

SEQ ID NO: 24099 - protein, 85 aa, unidentified
  REGION 1..85: note = Description of Unknown:hvTR_Q6TVB9 target sequence
DETVPGILPHQLATVDFLVRRVLDDGVSVLLFHIMGSGKTVIALLFAMVASRTKKVYILVPNVNVMNIFNYSMVMVANLFNAPFV

SEQ ID NO: 24100 - protein, 85 aa, unidentified
  REGION 1..85: note = Description of Unknown:hvTR_Q6TVB9 target sequence
IENIFVYSTTSFYSLNCNDGVVNYNGLSKYENSVFVVDEAHNIFGNNTGELMMVIKNKTRVPFLLLSASPITNTPITLSSIISLM

SEQ ID NO: 24101 - protein, 85 aa, unidentified
  REGION 1..85: note = Description of Unknown:hvTR_Q6TVB9 target sequence
SETDVEIGDIVVQGKKVFQILLNEHGVSVLRDVLKGRISYYEMPDTDMPEVVYHGRRFLDTRVVYCRMSRLQEENYLTVRRLCNN

SEQ ID NO: 24102 - protein, 85 aa, unidentified
  REGION 1..85: note = Description of Unknown:hvTR_Q6TVB9 target sequence
EMFEKNMNNVSMAVLGPLNLVNNLDVLFQAQEKDIYPNLRISNGVLYGNELTKLDISCKFKFFIDKVEEMRGKHFIYFSNSTYGS

SEQ ID NO: 24103 - protein, 85 aa, unidentified
  REGION 1..85: note = Description of Unknown:hvTR_Q6TVB9 target sequence
LIIRHVMLSNGYSEYNGSHSNNPHTIDGRPKTFAIVTSKMKASLEELLEAYNSPENDDGSRLMFLFSSNIMSESYTLKEVRNIWF

SEQ ID NO: 24104 - protein, 85 aa, unidentified
  REGION 1..85: note = Description of Unknown:hvTR_Q6TVB9 target sequence
MTIPDTFSQFNQILGRAVRKFSYTDVSLPVNVYLMAAVYSDFDEDIVSLEDYSVEDINALPFDVKKLFYLKFKAKETNRVYAILQ

SEQ ID NO: 24105 - protein, 85 aa, unidentified
  REGION 1..85: note = Description of Unknown:hvTR_Q6TVB9 target sequence
ELSEAYSARPHPQLVDVVLGEIVRQFFARRCRVPAEDPKLVAVVKAVLGTREAALEYIRAVVDGHFFVTNRTFGKCLLFRHERDI

SEQ ID NO: 24106 - protein, 85 aa, unidentified
  REGION 1..85: note = Description of Unknown:cds_NZ_WFIY01000004.1_cds_WP_155864047.1_1983 target sequence
IVKSICPFCGVGCGIDLEVEGGKIVRVLPDKTHVVSKGHLCGKGSVAFKSLYAEDRVLYPLKREGEKFVRISWKEAIEEIYIKLN

SEQ ID NO: 24107 - protein, 85 aa, unidentified
  REGION 1..85: note = Description of Unknown:cds_NZ_WFIY01000004.1_cds_WP_155864047.1_1983 target sequence
DIIKKYGPFSVGFYGGCQNTLEEVYSFMKLARALGTNNVDSCARVCHDPSAIALKEMLGVGASSTSVVQIPKAKVLVIAGESITE

SEQ ID NO: 24108 - protein, 85 aa, unidentified
  REGION 1..85: note = Description of Unknown:cds_NZ_WFIY01000004.1_cds_WP_155864047.1_1983 target sequence
SHPVISQYIVELKRKGGKLIVIDPRLTGIAKIADLYLQISPSTDIYLFNAVANYLISNGLIDENFIKQRTEGFEDYKRVVSKYSI

SEQ ID NO: 24109 - protein, 85 aa, unidentified
  REGION 1..85: note = Description of Unknown:cds_NZ_WFIY01000004.1_cds_WP_155864047.1_1983 target sequence
EDAEKITGIPREKIIEFAKLISQKPVIFSWGLGLTQSSGVNGVRALVNLALLTGNVGIEGGGLIVYRGQANVQGSGDLVKPNVFP

SEQ ID NO: 24110 - protein, 85 aa, unidentified
  REGION 1..85: note = Description of Unknown:cds_NZ_WFIY01000004.1_cds_WP_155864047.1_1983 target sequence
NGKMDELHALQLKEVWGFKPPIQPGKTVTEALYGSNLKAIFLMNFNPAKSFPNRKVVEKFLSSLDLLVVIDSFMTETAKFAHYIL

SEQ ID NO: 24111 - protein, 85 aa, unidentified
  REGION 1..85: note = Description of Unknown:cds_NZ_WFIY01000004.1_cds_WP_155864047.1_1983 target sequence
PAAMWAEKEGSVTSLDRLVKWRFKAVNPPGEARPELEIIADLARKFGFNFSSDPKEVFNELKEVSIYSNLNFGEMTDYSLPSRYP

SEQ ID NO: 24112 - protein, 85 aa, unidentified
  REGION 1..85: note = Description of Unknown:cds_NZ_WFIY01000004.1_cds_WP_155864047.1_1983 target sequence
QNDEVLYREKFLTEDGKAHFRPVEQPKLSKGMILITGREVTHYNTDELIVRSGFPEIPLEVFINPEDATRLGIKEGDEVEISSKC

SEQ ID NO: 24113 - protein, 84 aa, unidentified
  REGION 1..84: note = Description of Unknown:cds_NZ_WFIY01000004.1_cds_WP_155864047.1_1983 target sequence
PEIPLEVFINPEDATRLGIKEGDEVEISSKCGSAKARVRLSRDIMRGVAFAYMHNTEINYVVCNDLDEESKTPKFKYIVINIRK

SEQ ID NO: 24114 - protein, 85 aa, unidentified
  REGION 1..85: note = Description of Unknown:cds_NZ_WFIY01000004.1_cds_WP_155864047.1_1983 target sequence
LPDKTHVVSKGHLCGKGSVAFKSLYAEDRVLYPLKREGEKFVRISWKEAIEEIYIKLNDIIKKYGPFSVGFYGGCQNTLEEVYSF

SEQ ID NO: 24115 - protein, 85 aa, unidentified
  REGION 1..85: note = Description of Unknown:cds_NZ_WFIY01000004.1_cds_WP_155864047.1_1983 target sequence
MKLARALGTNNVDSCARVCHDPSAIALKEMLGVGASSTSVVQIPKAKVLVIAGESITESHPVISQYIVELKRKGGKLIVIDPRLT

SEQ ID NO: 24116 - protein, 85 aa, unidentified
  REGION 1..85: note = Description of Unknown:cds_NZ_WFIY01000004.1_cds_WP_155864047.1_1983 target sequence
GIAKIADLYLQISPSTDIYLFNAVANYLISNGLIDENFIKQRTEGFEDYKRVVSKYSIEDAEKITGIPREKIIEFAKLISQKPVI

SEQ ID NO: 24117 - protein, 85 aa, unidentified
  REGION 1..85: note = Description of Unknown:cds_NZ_WFIY01000004.1_cds_WP_155864047.1_1983 target sequence
FSWGLGLTQSSGVNGVRALVNLALLTGNVGIEGGGLIVYRGQANVQGSGDLVKPNVFPNGKMDELHALQLKEVWGFKPPIQPGKT

SEQ ID NO: 24118 - protein, 85 aa, unidentified
  REGION 1..85: note = Description of Unknown:cds_NZ_WFIY01000004.1_cds_WP_155864047.1_1983 target sequence
VTEALYGSNLKAIFLMNFNPAKSFPNRKVVEKFLSSLDLLVVIDSFMTETAKFAHYILPAAMWAEKEGSVTSLDRLVKWRFKAVN

SEQ ID NO: 24119 - protein, 85 aa, unidentified
  REGION 1..85: note = Description of Unknown:cds_NZ_WFIY01000004.1_cds_WP_155864047.1_1983 target sequence
PPGEARPELEIIADLARKFGFNFSSDPKEVFNELKEVSIYSNLNFGEMTDYSLPSRYPQNDEVLYREKFLTEDGKAHFRPVEQPK

SEQ ID NO: 24120 - protein, 85 aa, unidentified
  REGION 1..85: note = Description of Unknown:cds_NZ_WFIY01000004.1_cds_WP_155864047.1_1983 target sequence
LSKGMILITGREVTHYNTDELIVRSGFPEIPLEVFINPEDATRLGIKEGDEVEISSKCGSAKARVRLSRDIMRGVAFAYMHNTEI

SEQ ID NO: 24121 - protein, 85 aa, unidentified
  REGION 1..85: note = Description of Unknown:hvTR_A5HBG1 target sequence
DKTLSRNEAKELMQLLGLDMTCWGNLPLMRTKYLSKCKEFHPDKGGNEEKMKKLNSLYLKLQECVSTVHQLNEEEDEVWSSSQIP

SEQ ID NO: 24122 - protein, 85 aa, unidentified
  REGION 1..85: note = Description of Unknown:hvTR_A5HBG1 target sequence
TYGTPDWDYWWSQFNSYWEEELRCNEEMPKSPGETPTKRTREDDEEPQCSQATPPKKKKDNATDASLSFPKELEEFVSQAVFSNR

SEQ ID NO: 24123 - protein, 85 aa, unidentified
  REGION 1..85: note = Description of Unknown:hvTR_A5HBG1 target sequence
TLTAFVIHTTKEKAETLYKKLLSKFKCNFASRHSYYNTALVFILTPFRHRVSAVNNFCKGYCTISFLFCKGVNNAYGLYSRMTRD

SEQ ID NO: 24124 - protein, 85 aa, unidentified
  REGION 1..85: note = Description of Unknown:hvTR_A5HBG1 target sequence
PFTLCEENIPGGLKENDFKAEDLYGEFKDQLNWKALSEFALELGIDDVYLLLGLYLQLSIKVEECEKCNSNEDATHNRLHMEHQK

SEQ ID NO: 24125 - protein, 85 aa, unidentified
  REGION 1..85: note = Description of Unknown:hvTR_A5HBG1 target sequence
NALLFSDSKSQKNVCQQAIDVVIAKRRVDSLNMSREDLLARRFEKILDKMDKTIKGEQDVLLYMAGVAWYLGLNGKIDELVYRYL

SEQ ID NO: 24126 - protein, 85 aa, unidentified
  REGION 1..85: note = Description of Unknown:hvTR_A5HBG1 target sequence
KVIVENVPKKRYWVFKGPINSGKTTVAAALLDLCGGKALNINIPADRLNFELGVAIDQFTVVFEDVKGQVGDNKLLPSGNGMSNL

SEQ ID NO: 24127 - protein, 85 aa, unidentified
  REGION 1..85: note = Description of Unknown:hvTR_A5HBG1 target sequence
DNLRDYLDGSVKVNLEKKHLNKRSQIFPPGIVTMNEYLVPATLAPRFHKTVLFTPKRHLKESLDKTPELMVKRVLQSGMCILIML

SEQ ID NO: 24128 - protein, 84 aa, unidentified
  REGION 1..84: note = Description of Unknown:hvTR_A5HBG1 target sequence
TPKRHLKESLDKTPELMVKRVLQSGMCILIMLIWCRPVSDFHPCIQAKVVYWKELLDKYIGLTEFADMQMNVTNGCNILEKHNA

SEQ ID NO: 24129 - protein, 85 aa, unidentified
  REGION 1..85: note = Description of Unknown:hvTR_A5HBG1 target sequence
LMRTKYLSKCKEFHPDKGGNEEKMKKLNSLYLKLQECVSTVHQLNEEEDEVWSSSQIPTYGTPDWDYWWSQFNSYWEEELRCNEE

SEQ ID NO: 24130 - protein, 85 aa, unidentified
  REGION 1..85: note = Description of Unknown:hvTR_A5HBG1 target sequence
MPKSPGETPTKRTREDDEEPQCSQATPPKKKKDNATDASLSFPKELEEFVSQAVFSNRTLTAFVIHTTKEKAETLYKKLLSKFKC

SEQ ID NO: 24131 - protein, 85 aa, unidentified
  REGION 1..85: note = Description of Unknown:hvTR_A5HBG1 target sequence
NFASRHSYYNTALVFILTPFRHRVSAVNNFCKGYCTISFLFCKGVNNAYGLYSRMTRDPFTLCEENIPGGLKENDFKAEDLYGEF

SEQ ID NO: 24132 - protein, 85 aa, unidentified
  REGION 1..85: note = Description of Unknown:hvTR_A5HBG1 target sequence
KDQLNWKALSEFALELGIDDVYLLLGLYLQLSIKVEECEKCNSNEDATHNRLHMEHQKNALLFSDSKSQKNVCQQAIDVVIAKRR

SEQ ID NO: 24133 - protein, 85 aa, unidentified
  REGION 1..85: note = Description of Unknown:hvTR_A5HBG1 target sequence
VDSLNMSREDLLARRFEKILDKMDKTIKGEQDVLLYMAGVAWYLGLNGKIDELVYRYLKVIVENVPKKRYWVFKGPINSGKTTVA

SEQ ID NO: 24134 - protein, 85 aa, unidentified
  REGION 1..85: note = Description of Unknown:hvTR_A5HBG1 target sequence
AALLDLCGGKALNINIPADRLNFELGVAIDQFTVVFEDVKGQVGDNKLLPSGNGMSNLDNLRDYLDGSVKVNLEKKHLNKRSQIF

SEQ ID NO: 24135 - protein, 85 aa, unidentified
  REGION 1..85: note = Description of Unknown:hvTR_A5HBG1 target sequence
PPGIVTMNEYLVPATLAPRFHKTVLFTPKRHLKESLDKTPELMVKRVLQSGMCILIMLIWCRPVSDFHPCIQAKVVYWKELLDKY

SEQ ID NO: 24136 - protein, 85 aa, unidentified
  REGION 1..85: note = Description of Unknown:cds_NC_035460.1_cds_YP_009408119.1_168 target sequence
ATHACDDVCMCDKLYHIHKEIKNNLYPLHYYVYFKEDIDTVKTLLDNGYDVNKQTQLLLLTPLHYAIIKGNLEMIKLLIKYGADV

SEQ ID NO: 24137 - protein, 85 aa, unidentified
  REGION 1..85: note = Description of Unknown:cds_NC_035460.1_cds_YP_009408119.1_168 target sequence
NIVDIDNHMSIMYCNITEIYNINIVNEILPKITNINKLSNFAENVIHIFSDTTINTVEILKVLYKAGAKMDEKNISNKTPLFMAN

SEQ ID NO: 24138 - protein, 85 aa, unidentified
  REGION 1..85: note = Description of Unknown:cds_NC_035460.1_cds_YP_009408119.1_168 target sequence
AKGNIEVVNFLLNIGVKYFTQCKDNNTLLYWSYNHKHIIELSKLWISKGLDINHKNNYGYTPLHMLCYIEPTYEQIKTFIDNGAN

SEQ ID NO: 24139 - protein, 85 aa, unidentified
  REGION 1..85: note = Description of Unknown:cds_NC_035460.1_cds_YP_009408119.1_168 target sequence
ANLTDNYHNTPLHTYLTTIKQIEPKIIELLLNNMNNININNIYGYSPFKYISTKKNLSIEVIQMFINKNLDNNNKYLSSILHDLV

SEQ ID NO: 24140 - protein, 85 aa, unidentified
  REGION 1..85: note = Description of Unknown:cds_NC_035460.1_cds_YP_009408119.1_168 target sequence
KNNENVDVVKFWLNTFPNINIYDKTAYRSTLLHLAASNKNINMLKFILTKNIDVNAKNNNGESAIFNAVSSIDKIKLLVSAGADI

SEQ ID NO: 24141 - protein, 85 aa, unidentified
  REGION 1..85: note = Description of Unknown:cds_NC_035460.1_cds_YP_009408119.1_168 target sequence
TIINNNGESILFNAVRFCKNVEVVKTLINDYKIDVNIVSNYNHVILSYYNLCGIDANDLVDCYINAKPTLDTLLLCMYNINDYDI

SEQ ID NO: 24142 - protein, 85 aa, unidentified
  REGION 1..85: note = Description of Unknown:cds_NC_035460.1_cds_YP_009408119.1_168 target sequence
KNKLMCEKYLLEILILDIKILKNKKYAFIYNEYKNIIDEIENEITLSKSIKIGNSKYTLYDLIKLNNPDITIRFINNDILLKHTS

SEQ ID NO: 24143 - protein, 84 aa, unidentified
  REGION 1..84: note = Description of Unknown:cds_NC_035460.1_cds_YP_009408119.1_168 target sequence
NSKYTLYDLIKLNNPDITIRFINNDILLKHTSLKYLGYKVSTILNNANKRKEHINNTISKLDNINFNEWNMLPNEIKNKIAKHC

SEQ ID NO: 24144 - protein, 85 aa, unidentified
  REGION 1..85: note = Description of Unknown:cds_NC_035460.1_cds_YP_009408119.1_168 target sequence
LHYYVYFKEDIDTVKTLLDNGYDVNKQTQLLLLTPLHYAIIKGNLEMIKLLIKYGADVNIVDIDNHMSIMYCNITEIYNINIVNE

SEQ ID NO: 24145 - protein, 85 aa, unidentified
  REGION 1..85: note = Description of Unknown:cds_NC_035460.1_cds_YP_009408119.1_168 target sequence
ILPKITNINKLSNFAENVIHIFSDTTINTVEILKVLYKAGAKMDEKNISNKTPLFMANAKGNIEVVNFLLNIGVKYFTQCKDNNT

SEQ ID NO: 24146 - protein, 85 aa, unidentified
  REGION 1..85: note = Description of Unknown:cds_NC_035460.1_cds_YP_009408119.1_168 target sequence
LLYWSYNHKHIIELSKLWISKGLDINHKNNYGYTPLHMLCYIEPTYEQIKTFIDNGANANLTDNYHNTPLHTYLTTIKQIEPKII

SEQ ID NO: 24147 - protein, 85 aa, unidentified
  REGION 1..85: note = Description of Unknown:cds_NC_035460.1_cds_YP_009408119.1_168 target sequence
ELLLNNMNNININNIYGYSPFKYISTKKNLSIEVIQMFINKNLDNNNKYLSSILHDLVKNNENVDVVKFWLNTFPNINIYDKTAY

SEQ ID NO: 24148 - protein, 85 aa, unidentified
  REGION 1..85: note = Description of Unknown:cds_NC_035460.1_cds_YP_009408119.1_168 target sequence
RSTLLHLAASNKNINMLKFILTKNIDVNAKNNNGESAIFNAVSSIDKIKLLVSAGADITIINNNGESILFNAVRFCKNVEVVKTL

SEQ ID NO: 24149 - protein, 85 aa, unidentified
  REGION 1..85: note = Description of Unknown:cds_NC_035460.1_cds_YP_009408119.1_168 target sequence
INDYKIDVNIVSNYNHVILSYYNLCGIDANDLVDCYINAKPTLDTLLLCMYNINDYDIKNKLMCEKYLLEILILDIKILKNKKYA

SEQ ID NO: 24150 - protein, 85 aa, unidentified
  REGION 1..85: note = Description of Unknown:cds_NC_035460.1_cds_YP_009408119.1_168 target sequence
FIYNEYKNIIDEIENEITLSKSIKIGNSKYTLYDLIKLNNPDITIRFINNDILLKHTSLKYLGYKVSTILNNANKRKEHINNTIS

SEQ ID NO: 24151 - protein, 85 aa, unidentified
  REGION 1..85: note = Description of Unknown:cds_NZ_WFIY01000004.1_cds_WP_155862784.1_599 target sequence
SENLPFEERYYQPPYKQLYKESLEEPEKFWREMAEGLEWFSPFDKVLDESNAPFYRWFVGGKINITYNALDRQVKVRRNKIAIYW

SEQ ID NO: 24152 - protein, 85 aa, unidentified
  REGION 1..85: note = Description of Unknown:cds_NZ_WFIY01000004.1_cds_WP_155862784.1_599 target sequence
ENEKGESRQLTYGELYNEVNRFAKILQDLGIKKGDRVLIYLPLMPELPISMLACARIGAVHSVVFSGFSTQAVIDRINDAKAKLV

SEQ ID NO: 24153 - protein, 85 aa, unidentified
  REGION 1..85: note = Description of Unknown:cds_NZ_WFIY01000004.1_cds_WP_155862784.1_599 target sequence
ITTSHTMRRGKRVELKRIIDEAVSQTPSVEKVLVIKRDEEIELNEERDVLYQDLIKRTGYKKVEPEETLSTDPLFILYTSGTTGK

SEQ ID NO: 24154 - protein, 85 aa, unidentified
  REGION 1..85: note = Description of Unknown:cds_NZ_WFIY01000004.1_cds_WP_155862784.1_599 target sequence
PKGILHLHGGYGLWTYLTTQWVFDLRDNDVFFNTADIGWITGHSYIVYGPLQNGASVLMYEGVPDYPNPDRWWELVEKYGVTVFY

SEQ ID NO: 24155 - protein, 85 aa, unidentified
  REGION 1..85: note = Description of Unknown:cds_NZ_WFIY01000004.1_cds_WP_155862784.1_599 target sequence
TSPTAIRSLMRYGEEWVKKHDLSTLRILGSVGEPINPEAWRWYFKNVGNSSLPIVDTWWQTETGGIMISATPGLGNYLLKPSANG

SEQ ID NO: 24156 - protein, 85 aa, unidentified
  REGION 1..85: note = Description of Unknown:cds_NZ_WFIY01000004.1_cds_WP_155862784.1_599 target sequence
LPLPGVDADVFTEDGKQVKPREKGYIVIKRPWPGMLAGVWGDPERYVKTYFSKFPGVYYPGDYAVRDEEGFFYILGRADEVLKIA

SEQ ID NO: 24157 - protein, 85 aa, unidentified
  REGION 1..85: note = Description of Unknown:cds_NZ_WFIY01000004.1_cds_WP_155862784.1_599 target sequence
GHRIGTREIEDILISHPAVAESAVIGVPDPVRGEVAVAAVVLKQGYQPSEELRKSLIEYVKNNLGPIVVFGGLYFVSKLPKTRSG

SEQ ID NO: 24158 - protein, 84 aa, unidentified
  REGION 1..84: note = Description of Unknown:cds_NZ_WFIY01000004.1_cds_WP_155862784.1_599 target sequence
RKSLIEYVKNNLGPIVVFGGLYFVSKLPKTRSGKIMRRVVRSVISGQPLGDVSTLEDETSVDELKKVIEEFSKEIQGQQKEGKV

SEQ ID NO: 24159 - protein, 85 aa, unidentified
  REGION 1..85: note = Description of Unknown:cds_NZ_WFIY01000004.1_cds_WP_155862784.1_599 target sequence
KFWREMAEGLEWFSPFDKVLDESNAPFYRWFVGGKINITYNALDRQVKVRRNKIAIYWENEKGESRQLTYGELYNEVNRFAKILQ

SEQ ID NO: 24160 - protein, 85 aa, unidentified
  REGION 1..85: note = Description of Unknown:cds_NZ_WFIY01000004.1_cds_WP_155862784.1_599 target sequence
DLGIKKGDRVLIYLPLMPELPISMLACARIGAVHSVVFSGFSTQAVIDRINDAKAKLVITTSHTMRRGKRVELKRIIDEAVSQTP

SEQ ID NO: 24161 - protein, 85 aa, unidentified
  REGION 1..85: note = Description of Unknown:cds_NZ_WFIY01000004.1_cds_WP_155862784.1_599 target sequence
SVEKVLVIKRDEEIELNEERDVLYQDLIKRTGYKKVEPEETLSTDPLFILYTSGTTGKPKGILHLHGGYGLWTYLTTQWVFDLRD

SEQ ID NO: 24162 - protein, 85 aa, unidentified
  REGION 1..85: note = Description of Unknown:cds_NZ_WFIY01000004.1_cds_WP_155862784.1_599 target sequence
NDVFFNTADIGWITGHSYIVYGPLQNGASVLMYEGVPDYPNPDRWWELVEKYGVTVFYTSPTAIRSLMRYGEEWVKKHDLSTLRI

SEQ ID NO: 24163 - protein, 85 aa, unidentified
  REGION 1..85: note = Description of Unknown:cds_NZ_WFIY01000004.1_cds_WP_155862784.1_599 target sequence
LGSVGEPINPEAWRWYFKNVGNSSLPIVDTWWQTETGGIMISATPGLGNYLLKPSANGLPLPGVDADVFTEDGKQVKPREKGYIV

SEQ ID NO: 24164 - protein, 85 aa, unidentified
  REGION 1..85: note = Description of Unknown:cds_NZ_WFIY01000004.1_cds_WP_155862784.1_599 target sequence
IKRPWPGMLAGVWGDPERYVKTYFSKFPGVYYPGDYAVRDEEGFFYILGRADEVLKIAGHRIGTREIEDILISHPAVAESAVIGV

SEQ ID NO: 24165 - protein, 85 aa, unidentified
  REGION 1..85: note = Description of Unknown:cds_NZ_WFIY01000004.1_cds_WP_155862784.1_599 target sequence
PDPVRGEVAVAAVVLKQGYQPSEELRKSLIEYVKNNLGPIVVFGGLYFVSKLPKTRSGKIMRRVVRSVISGQPLGDVSTLEDETS

SEQ ID NO: 24166 - protein, 85 aa, unidentified
  REGION 1..85: note = Description of Unknown:cds_NZ_WFIY01000004.1_cds_690 target sequence
NKRYIFNDGKVEEYFGKLKTKDNIIGYLATIDGDKIKLSKFPIYDCSKIIFEGKLTLKVGNLGYLFESNESLCLFLGNIDNPIFN

SEQ ID NO: 24167 - protein, 85 aa, unidentified
  REGION 1..85: note = Description of Unknown:cds_NZ_WFIY01000004.1_cds_690 target sequence
ENYLIIKGIVIISRNKRKLLDAMDNYDVIQYALSKYSSDDEVIRQAIIGLSKLGKCSEAISLYTKLDKKYPEESLAVAECYEKIG

SEQ ID NO: 24168 - protein, 85 aa, unidentified
  REGION 1..85: note = Description of Unknown:cds_NZ_WFIY01000004.1_cds_690 target sequence
EELEALKIYSFFSDERYKILEEKLRKKVDKIIEEYDATGNAKILYNALSILPTYDAPALKLGWHFIKKNPEEAVKFFEEAVKRSR

SEQ ID NO: 24169 - protein, 85 aa, unidentified
  REGION 1..85: note = Description of Unknown:cds_NZ_WFIY01000004.1_cds_690 target sequence
SYHNLLMLANAYIKSGKFMDALKIIEEAEKVRRTAGSAFLRGLALESLNAKSEAEKDFLYACKEGIVEACEKVKPGVLYSPKDFY

SEQ ID NO: 24170 - protein, 85 aa, unidentified
  REGION 1..85: note = Description of Unknown:cds_NZ_WFIY01000004.1_cds_690 target sequence
PEQWIGYVIYGYEVKQVLGTGGMGYVLLVERLGKKYAMKIMKKEYNFDEMLNEVAKMQEISKNSKYLVRILANFIDENWVDYYSS

SEQ ID NO: 24171 - protein, 85 aa, unidentified
  REGION 1..85: note = Description of Unknown:cds_NZ_WFIY01000004.1_cds_690 target sequence
PPAIVMEYMGGGDLRDVLAKDEYSTLRHSVIWPQVVSVIFSKLANAIITIHKEGYIHCDIKPSNILFTNPLPNYGEEALEALEKE

SEQ ID NO: 24172 - protein, 85 aa, unidentified
  REGION 1..85: note = Description of Unknown:cds_NZ_WFIY01000004.1_cds_690 target sequence
RVIPKLSDLGSAVKIGTPVIHYTPYYAHPLQRFGQRASTEMDIYSFTVSLYASLTNNFPFPEWLERELEEAVTNPSKREQALKDF

SEQ ID NO: 24173 - protein, 84 aa, unidentified
  REGION 1..84: note = Description of Unknown:cds_NZ_WFIY01000004.1_cds_690 target sequence
SLTNNFPFPEWLERELEEAVTNPSKREQALKDFYSVDPRMDYVPEEFKDIIMRGLRGEITMEEIARDLKDIAMTEYNIPEEVLI

SEQ ID NO: 24174 - protein, 85 aa, unidentified
  REGION 1..85: note = Description of Unknown:cds_NZ_WFIY01000004.1_cds_690 target sequence
LATIDGDKIKLSKFPIYDCSKIIFEGKLTLKVGNLGYLFESNESLCLFLGNIDNPIFNENYLIIKGIVIISRNKRKLLDAMDNYD

SEQ ID NO: 24175 - protein, 85 aa, unidentified
  REGION 1..85: note = Description of Unknown:cds_NZ_WFIY01000004.1_cds_690 target sequence
VIQYALSKYSSDDEVIRQAIIGLSKLGKCSEAISLYTKLDKKYPEESLAVAECYEKIGEELEALKIYSFFSDERYKILEEKLRKK

SEQ ID NO: 24176 - protein, 85 aa, unidentified
  REGION 1..85: note = Description of Unknown:cds_NZ_WFIY01000004.1_cds_690 target sequence
VDKIIEEYDATGNAKILYNALSILPTYDAPALKLGWHFIKKNPEEAVKFFEEAVKRSRSYHNLLMLANAYIKSGKFMDALKIIEE

SEQ ID NO: 24177 - protein, 85 aa, unidentified
  REGION 1..85: note = Description of Unknown:cds_NZ_WFIY01000004.1_cds_690 target sequence
AEKVRRTAGSAFLRGLALESLNAKSEAEKDFLYACKEGIVEACEKVKPGVLYSPKDFYPEQWIGYVIYGYEVKQVLGTGGMGYVL

SEQ ID NO: 24178 - protein, 85 aa, unidentified
  REGION 1..85: note = Description of Unknown:cds_NZ_WFIY01000004.1_cds_690 target sequence
LVERLGKKYAMKIMKKEYNFDEMLNEVAKMQEISKNSKYLVRILANFIDENWVDYYSSPPAIVMEYMGGGDLRDVLAKDEYSTLR

SEQ ID NO: 24179 - protein, 85 aa, unidentified
  REGION 1..85: note = Description of Unknown:cds_NZ_WFIY01000004.1_cds_690 target sequence
HSVIWPQVVSVIFSKLANAIITIHKEGYIHCDIKPSNILFTNPLPNYGEEALEALEKERVIPKLSDLGSAVKIGTPVIHYTPYYA

SEQ ID NO: 24180 - protein, 85 aa, unidentified
  REGION 1..85: note = Description of Unknown:cds_NZ_WFIY01000004.1_cds_690 target sequence
HPLQRFGQRASTEMDIYSFTVSLYASLTNNFPFPEWLERELEEAVTNPSKREQALKDFYSVDPRMDYVPEEFKDIIMRGLRGEIT

SEQ ID NO: 24181 - protein, 85 aa, unidentified
  REGION 1..85: note = Description of Unknown:cds_NC_035460.1_cds_YP_009407979.1_28 target sequence
FTLLNKFCEENNQDFITPTLNEHKGSIVLARTDCGSGIIIYDDNIDQVKLITELEKLEIVAVTEHAAPKPQPFKPISKLFIDESD

SEQ ID NO: 24182 - protein, 85 aa, unidentified
  REGION 1..85: note = Description of Unknown:cds_NC_035460.1_cds_YP_009407979.1_28 target sequence
NENYYFPKTTSSYAYDILCKRSENIPILKNALQKFYLDKNSSITKINEWLCKHYLYKYRFINYKDDRYTNTSTYTFIDEFIITFI

SEQ ID NO: 24183 - protein, 85 aa, unidentified
  REGION 1..85: note = Description of Unknown:cds_NC_035460.1_cds_YP_009407979.1_28 target sequence
GHHAIWVKSKLYSRPEMDVLPYNVEAIALKSNWTKMFSYNKQFLRMFTITINAIITSTGPLIYMISVYPGQTFINFNTKQLILDF

SEQ ID NO: 24184 - protein, 85 aa, unidentified
  REGION 1..85: note = Description of Unknown:cds_NC_035460.1_cds_YP_009407979.1_28 target sequence
ITWIKDAMTNVNSITLVGFMSSFFGFPLLKASWPAHCGWKFVGNDCIISDDGLKIFLVDVAKFACGLSFSSYCEKWEKKSVCYPK

SEQ ID NO: 24185 - protein, 85 aa, unidentified
  REGION 1..85: note = Description of Unknown:cds_NC_035460.1_cds_YP_009407979.1_28 target sequence
DLISKQEAKIMIKSNEKIAYKATELLYKAVNAQVTSMNILLSPLSMFSFNKIEDMFFTRVLTISSAISDKDIYYPVGVDAVNFIY

SEQ ID NO: 24186 - protein, 85 aa, unidentified
  REGION 1..85: note = Description of Unknown:cds_NC_035460.1_cds_YP_009407979.1_28 target sequence
QAIRPKSILTINKIQPKNYDKYKLKSILNCIANGLYPSGKPKFVKTPLENKLYIALCEVNIKNNLKIPIIFMDDVHDSCYTFYTV

SEQ ID NO: 24187 - protein, 85 aa, unidentified
  REGION 1..85: note = Description of Unknown:cds_NC_035460.1_cds_YP_009407979.1_28 target sequence
LTSIDIELARKIGGCKIKEISALQWDESINISINMKETVVSIDKLKSEESDMLLENLLEITELFSNKDNYIPNNLVLFSAFAVSY

SEQ ID NO: 24188 - protein, 84 aa, unidentified
  REGION 1..84: note = Description of Unknown:cds_NC_035460.1_cds_YP_009407979.1_28 target sequence
MLLENLLEITELFSNKDNYIPNNLVLFSAFAVSYCRQKLHSLIAKIDSHFLGDVICNHNYKEFWIKEGCDKILEPIKTEITKLK

SEQ ID NO: 24189 - protein, 85 aa, unidentified
  REGION 1..85: note = Description of Unknown:cds_NC_035460.1_cds_YP_009407979.1_28 target sequence
VLARTDCGSGIIIYDDNIDQVKLITELEKLEIVAVTEHAAPKPQPFKPISKLFIDESDNENYYFPKTTSSYAYDILCKRSENIPI

SEQ ID NO: 24190 - protein, 85 aa, unidentified
  REGION 1..85: note = Description of Unknown:cds_NC_035460.1_cds_YP_009407979.1_28 target sequence
LKNALQKFYLDKNSSITKINEWLCKHYLYKYRFINYKDDRYTNTSTYTFIDEFIITFIGHHAIWVKSKLYSRPEMDVLPYNVEAI

SEQ ID NO: 24191 - protein, 85 aa, unidentified
  REGION 1..85: note = Description of Unknown:cds_NC_035460.1_cds_YP_009407979.1_28 target sequence
ALKSNWTKMFSYNKQFLRMFTITINAIITSTGPLIYMISVYPGQTFINFNTKQLILDFITWIKDAMTNVNSITLVGFMSSFFGFP

SEQ ID NO: 24192 - protein, 85 aa, unidentified
  REGION 1..85: note = Description of Unknown:cds_NC_035460.1_cds_YP_009407979.1_28 target sequence
LLKASWPAHCGWKFVGNDCIISDDGLKIFLVDVAKFACGLSFSSYCEKWEKKSVCYPKDLISKQEAKIMIKSNEKIAYKATELLY

SEQ ID NO: 24193 - protein, 85 aa, unidentified
  REGION 1..85: note = Description of Unknown:cds_NC_035460.1_cds_YP_009407979.1_28 target sequence
KAVNAQVTSMNILLSPLSMFSFNKIEDMFFTRVLTISSAISDKDIYYPVGVDAVNFIYQAIRPKSILTINKIQPKNYDKYKLKSI

SEQ ID NO: 24194 - protein, 85 aa, unidentified
  REGION 1..85: note = Description of Unknown:cds_NC_035460.1_cds_YP_009407979.1_28 target sequence
LNCIANGLYPSGKPKFVKTPLENKLYIALCEVNIKNNLKIPIIFMDDVHDSCYTFYTVLTSIDIELARKIGGCKIKEISALQWDE

SEQ ID NO: 24195 - protein, 85 aa, unidentified
  REGION 1..85: note = Description of Unknown:cds_NC_035460.1_cds_YP_009407979.1_28 target sequence
SINISINMKETVVSIDKLKSEESDMLLENLLEITELFSNKDNYIPNNLVLFSAFAVSYCRQKLHSLIAKIDSHFLGDVICNHNYK

SEQ ID NO: 24196 - protein, 85 aa, unidentified
  REGION 1..85: note = Description of Unknown:cds_NC_030656.1_cds_YP_009268836.1_121 target sequence
DKLEYYIDPLSLWSYDDPKMTSILAFYKIVEGTWGTTITSTTPIPRTAKKAFRNVLRDYIKHAPVCDNSNYDDYRDIDNFPNTLD

SEQ ID NO: 24197 - protein, 85 aa, unidentified
  REGION 1..85: note = Description of Unknown:cds_NC_030656.1_cds_YP_009268836.1_121 target sequence
PHAPFCLVLPTNIVRNVYYVNFMYFKNGFFERHYNNLNTFRDIETLGQLLLFFVVAIMRVEIEQTNENNIVTKFVPLYEFNEVLS

SEQ ID NO: 24198 - protein, 85 aa, unidentified
  REGION 1..85: note = Description of Unknown:cds_NC_030656.1_cds_YP_009268836.1_121 target sequence
TKKDYSSKMTYACSSMLWQLCSIGYYKENPNIVLGLPMYYWYGVNVKTVYDEITKPFTGNGNKLPNTWSKGPLYFTKYILDNHIL

SEQ ID NO: 24199 - protein, 85 aa, unidentified
  REGION 1..85: note = Description of Unknown:cds_NC_030656.1_cds_YP_009268836.1_121 target sequence
NHYQTNCITINYNGYKATFVSSVPEFVLDGLCYTVNDKITKYGNDHVQIYMMPNGCKDGHTYTYLCSNDQGTIVSLPCTGKLFDE

SEQ ID NO: 24200 - protein, 85 aa, unidentified
  REGION 1..85: note = Description of Unknown:cds_NC_030656.1_cds_YP_009268836.1_121 target sequence
YHDQGAIRYQDNDINAKCNGYCFKSLLIMPEDTKVYQFEDSHVKYNNFQNDYYAGPPVFLTKNGVNRTASRGCNWCGNINTRYNS

SEQ ID NO: 24201 - protein, 85 aa, unidentified
  REGION 1..85: note = Description of Unknown:cds_NC_030656.1_cds_YP_009268836.1_121 target sequence
NAIVSPYHICGPQVPPCHTVPPTCPVPPHCPPVNPNCPVVPVPPVPPYYPPHLPYPPYPPHNDRSDCHDGQCTGLIPPPPHCRCI

SEQ ID NO: 24202 - protein, 85 aa, unidentified
  REGION 1..85: note = Description of Unknown:cds_NC_030656.1_cds_YP_009268836.1_121 target sequence
LDSENNCIYYCDYHNNIYPYTINPVDYRLNILKEKIAGYIPLIKHLKDTCKKENDAAKKLEHHIETMRQYMVMASNKVDYHTCRK

SEQ ID NO: 24203 - protein, 84 aa, unidentified
  REGION 1..84: note = Description of Unknown:cds_NC_030656.1_cds_YP_009268836.1_121 target sequence
CKKENDAAKKLEHHIETMRQYMVMASNKVDYHTCRKPTVSVPKHSIDKTYPSIKDSDAWKINRLCYIQPHSMCFRTPPAWMIAH

SEQ ID NO: 24204 - protein, 85 aa, unidentified
  REGION 1..85: note = Description of Unknown:cds_NC_030656.1_cds_YP_009268836.1_121 target sequence
KIVEGTWGTTITSTTPIPRTAKKAFRNVLRDYIKHAPVCDNSNYDDYRDIDNFPNTLDPHAPFCLVLPTNIVRNVYYVNFMYFKN

SEQ ID NO: 24205 - protein, 85 aa, unidentified
  REGION 1..85: note = Description of Unknown:cds_NC_030656.1_cds_YP_009268836.1_121 target sequence
GFFERHYNNLNTFRDIETLGQLLLFFVVAIMRVEIEQTNENNIVTKFVPLYEFNEVLSTKKDYSSKMTYACSSMLWQLCSIGYYK

SEQ ID NO: 24206 - protein, 85 aa, unidentified
  REGION 1..85: note = Description of Unknown:cds_NC_030656.1_cds_YP_009268836.1_121 target sequence
ENPNIVLGLPMYYWYGVNVKTVYDEITKPFTGNGNKLPNTWSKGPLYFTKYILDNHILNHYQTNCITINYNGYKATFVSSVPEFV

SEQ ID NO: 24207 - protein, 85 aa, unidentified
  REGION 1..85: note = Description of Unknown:cds_NC_030656.1_cds_YP_009268836.1_121 target sequence
LDGLCYTVNDKITKYGNDHVQIYMMPNGCKDGHTYTYLCSNDQGTIVSLPCTGKLFDEYHDQGAIRYQDNDINAKCNGYCFKSLL

SEQ ID NO: 24208 - protein, 85 aa, unidentified
  REGION 1..85: note = Description of Unknown:cds_NC_030656.1_cds_YP_009268836.1_121 target sequence
IMPEDTKVYQFEDSHVKYNNFQNDYYAGPPVFLTKNGVNRTASRGCNWCGNINTRYNSNAIVSPYHICGPQVPPCHTVPPTCPVP

SEQ ID NO: 24209 - protein, 85 aa, unidentified
  REGION 1..85: note = Description of Unknown:cds_NC_030656.1_cds_YP_009268836.1_121 target sequence
PHCPPVNPNCPVVPVPPVPPYYPPHLPYPPYPPHNDRSDCHDGQCTGLIPPPPHCRCILDSENNCIYYCDYHNNIYPYTINPVDY

SEQ ID NO: 24210 - protein, 85 aa, unidentified
  REGION 1..85: note = Description of Unknown:cds_NC_030656.1_cds_YP_009268836.1_121 target sequence
RLNILKEKIAGYIPLIKHLKDTCKKENDAAKKLEHHIETMRQYMVMASNKVDYHTCRKPTVSVPKHSIDKTYPSIKDSDAWKINR

SEQ ID NO: 24211 - protein, 85 aa, unidentified
  REGION 1..85: note = Description of Unknown:cds_NC_010495.1_cds_YP_001742082.1_45 target sequence
HKIDKMISEIDIDRLKQSIKLGSIEPYDYQWLVYAKCAEVIRNFGKKPEPSYVTASVSSGKTVMISMLCSRFQDMGWDGLVISRQ

SEQ ID NO: 24212 - protein, 85 aa, unidentified
  REGION 1..85: note = Description of Unknown:cds_NC_010495.1_cds_YP_001742082.1_45 target sequence
GEIAEQNAEMMWECSVKNSLYSASLGRKSTAYPIICGTEGTIVNALFDKKDESSGDVKKGGLSDFAPRFCLCDEGHQVPWQDIIS

SEQ ID NO: 24213 - protein, 85 aa, unidentified
  REGION 1..85: note = Description of Unknown:cds_NC_010495.1_cds_YP_001742082.1_45 target sequence
ENPTTQYGVILTELNRRCKAKHGHEMITIGFTGSPFRGTESMKGAYWKNEIINIDTKYMVDRGFVVPTIFGLHDVDDLHYDLSAF

SEQ ID NO: 24214 - protein, 85 aa, unidentified
  REGION 1..85: note = Description of Unknown:cds_NC_010495.1_cds_YP_001742082.1_45 target sequence
RGSDIDGTQDFTAEQLKQMQEEILEQGTLTQKIMLKVMELTKNRNGVLITCAGKKHCQEAAKYLPEGSYAIVTEDMGQKARRKAL

SEQ ID NO: 24215 - protein, 85 aa, unidentified
  REGION 1..85: note = Description of Unknown:cds_NC_010495.1_cds_YP_001742082.1_45 target sequence
KDAYTGKIKYTFQIAALTTGVNIPLWDTSVILRKIMSLTLLVQLLGRGMRLLKKEQIDAGYHKEDHLVLDFSGAMFELGQLYEDP

SEQ ID NO: 24216 - protein, 85 aa, unidentified
  REGION 1..85: note = Description of Unknown:cds_NC_010495.1_cds_YP_001742082.1_45 target sequence
ILEEAEAQRSKRSGEQVPCPKCGTMNSPYARRCIGKDALSPDGRCEEFFSYIRCGFDKHGIRIFDDGCGTKNDPTARYCRHCDHV

SEQ ID NO: 24217 - protein, 85 aa, unidentified
  REGION 1..85: note = Description of Unknown:cds_NC_010495.1_cds_YP_001742082.1_45 target sequence
LRDPNAALNERAYTDNEWADVMDFKVQLTKDGEGILYRYWINRCDGKEGWANEVFYPYGGATHMKNMFKAKAVFPHLDDKSMAGK

SEQ ID NO: 24218 - protein, 84 aa, unidentified
  REGION 1..84: note = Description of Unknown:cds_NC_010495.1_cds_YP_001742082.1_45 target sequence
WANEVFYPYGGATHMKNMFKAKAVFPHLDDKSMAGKILKCQNAKQFMMYSGLIKAPKRITHRINDKGRDIIHRKDFSGGQSEAA

SEQ ID NO: 24219 - protein, 85 aa, unidentified
  REGION 1..85: note = Description of Unknown:cds_NC_010495.1_cds_YP_001742082.1_45 target sequence
DYQWLVYAKCAEVIRNFGKKPEPSYVTASVSSGKTVMISMLCSRFQDMGWDGLVISRQGEIAEQNAEMMWECSVKNSLYSASLGR

SEQ ID NO: 24220 - protein, 85 aa, unidentified
  REGION 1..85: note = Description of Unknown:cds_NC_010495.1_cds_YP_001742082.1_45 target sequence
KSTAYPIICGTEGTIVNALFDKKDESSGDVKKGGLSDFAPRFCLCDEGHQVPWQDIISENPTTQYGVILTELNRRCKAKHGHEMI

SEQ ID NO: 24221 - protein, 85 aa, unidentified
  REGION 1..85: note = Description of Unknown:cds_NC_010495.1_cds_YP_001742082.1_45 target sequence
TIGFTGSPFRGTESMKGAYWKNEIINIDTKYMVDRGFVVPTIFGLHDVDDLHYDLSAFRGSDIDGTQDFTAEQLKQMQEEILEQG

SEQ ID NO: 24222 - protein, 85 aa, unidentified
  REGION 1..85: note = Description of Unknown:cds_NC_010495.1_cds_YP_001742082.1_45 target sequence
TLTQKIMLKVMELTKNRNGVLITCAGKKHCQEAAKYLPEGSYAIVTEDMGQKARRKALKDAYTGKIKYTFQIAALTTGVNIPLWD

SEQ ID NO: 24223 - protein, 85 aa, unidentified
  REGION 1..85: note = Description of Unknown:cds_NC_010495.1_cds_YP_001742082.1_45 target sequence
TSVILRKIMSLTLLVQLLGRGMRLLKKEQIDAGYHKEDHLVLDFSGAMFELGQLYEDPILEEAEAQRSKRSGEQVPCPKCGTMNS

SEQ ID NO: 24224 - protein, 85 aa, unidentified
  REGION 1..85: note = Description of Unknown:cds_NC_010495.1_cds_YP_001742082.1_45 target sequence
PYARRCIGKDALSPDGRCEEFFSYIRCGFDKHGIRIFDDGCGTKNDPTARYCRHCDHVLRDPNAALNERAYTDNEWADVMDFKVQ

SEQ ID NO: 24225 - protein, 85 aa, unidentified
  REGION 1..85: note = Description of Unknown:cds_NC_010495.1_cds_YP_001742082.1_45 target sequence
LTKDGEGILYRYWINRCDGKEGWANEVFYPYGGATHMKNMFKAKAVFPHLDDKSMAGKILKCQNAKQFMMYSGLIKAPKRITHRI

SEQ ID NO: 24226 - protein, 85 aa, unidentified
  REGION 1..85: note = Description of Unknown:cds_NC_035460.1_cds_YP_009408074.1_123 target sequence
ADLSNLWVDKKNINNNLIDLWQNDDVKKPNVNKPNILQDDDVKKPNVNKPNILQLGAVHKTTSEEDRIIKDFTKLISDTINTKIE

SEQ ID NO: 24227 - protein, 85 aa, unidentified
  REGION 1..85: note = Description of Unknown:cds_NC_035460.1_cds_YP_009408074.1_123 target sequence
VDKKDNKNTDVSTICINRRQRNIIRDVFRSYMLAKPSLTEEEKKKLLTDDKTNTYKPYIDTAPLQWVTESFINSNTFYAKLKKEK

SEQ ID NO: 24228 - protein, 85 aa, unidentified
  REGION 1..85: note = Description of Unknown:cds_NC_035460.1_cds_YP_009408074.1_123 target sequence
YKKNKNENGNIEETLEECYKNIKKTNKIDNAAVFPKPPVYYDTFNKLETLGQFILFFVFDIIEARKFRESISTRYNNNKPITLPV

SEQ ID NO: 24229 - protein, 85 aa, unidentified
  REGION 1..85: note = Description of Unknown:cds_NC_035460.1_cds_YP_009408074.1_123 target sequence
RFKYACEQYLLNQIKVCDKLKSKNLFIGLPMYYWFEINPADVTLIVNNITSHYKYGKQVKMFMRYLSSNGRKYISTTIGKVSLTF

SEQ ID NO: 24230 - protein, 85 aa, unidentified
  REGION 1..85: note = Description of Unknown:cds_NC_035460.1_cds_YP_009408074.1_123 target sequence
LDETWDFHHSVPEIVLFGLSYSVYDHLVKYGKDKLEVFIMEKNKNNKHKDGYKFITVSKNYEGYVEMPYKKAVEHEVINEDIDSR

SEQ ID NO: 24231 - protein, 85 aa, unidentified
  REGION 1..85: note = Description of Unknown:cds_NC_035460.1_cds_YP_009408074.1_123 target sequence
TLNNDVLMLLAADILQKAELAEAIRIIKSSDTPNHHHIHYAKRGILLAAKECKDLEDSPVDANDDGNDKDTSLLTVDSFIYMPIF

SEQ ID NO: 24232 - protein, 85 aa, unidentified
  REGION 1..85: note = Description of Unknown:cds_NC_035460.1_cds_YP_009408074.1_123 target sequence
YPHKDKSTNIRIHLDREIVRRLEDRYNKLSKLCCYTDIVKSLEHNFETMRQYAIILSKKADFQTYTHNDISIPIHSIDYTYPPQK

SEQ ID NO: 24233 - protein, 84 aa, unidentified
  REGION 1..84: note = Description of Unknown:cds_NC_035460.1_cds_YP_009408074.1_123 target sequence
MRQYAIILSKKADFQTYTHNDISIPIHSIDYTYPPQKEHYNNIYKRPNKYNKYNKHNNIYGFGVPIFNYRYPYIFNKYQYKYIF

SEQ ID NO: 24234 - protein, 85 aa, unidentified
  REGION 1..85: note = Description of Unknown:cds_NC_035460.1_cds_YP_009408074.1_123 target sequence
KPNVNKPNILQDDDVKKPNVNKPNILQLGAVHKTTSEEDRIIKDFTKLISDTINTKIEVDKKDNKNTDVSTICINRRQRNIIRDV

SEQ ID NO: 24235 - protein, 85 aa, unidentified
  REGION 1..85: note = Description of Unknown:cds_NC_035460.1_cds_YP_009408074.1_123 target sequence
FRSYMLAKPSLTEEEKKKLLTDDKTNTYKPYIDTAPLQWVTESFINSNTFYAKLKKEKYKKNKNENGNIEETLEECYKNIKKTNK

SEQ ID NO: 24236 - protein, 85 aa, unidentified
  REGION 1..85: note = Description of Unknown:cds_NC_035460.1_cds_YP_009408074.1_123 target sequence
IDNAAVFPKPPVYYDTFNKLETLGQFILFFVFDIIEARKFRESISTRYNNNKPITLPVRFKYACEQYLLNQIKVCDKLKSKNLFI

SEQ ID NO: 24237 - protein, 85 aa, unidentified
  REGION 1..85: note = Description of Unknown:cds_NC_035460.1_cds_YP_009408074.1_123 target sequence
GLPMYYWFEINPADVTLIVNNITSHYKYGKQVKMFMRYLSSNGRKYISTTIGKVSLTFLDETWDFHHSVPEIVLFGLSYSVYDHL

SEQ ID NO: 24238 - protein, 85 aa, unidentified
  REGION 1..85: note = Description of Unknown:cds_NC_035460.1_cds_YP_009408074.1_123 target sequence
VKYGKDKLEVFIMEKNKNNKHKDGYKFITVSKNYEGYVEMPYKKAVEHEVINEDIDSRTLNNDVLMLLAADILQKAELAEAIRII

SEQ ID NO: 24239 - protein, 85 aa, unidentified
  REGION 1..85: note = Description of Unknown:cds_NC_035460.1_cds_YP_009408074.1_123 target sequence
KSSDTPNHHHIHYAKRGILLAAKECKDLEDSPVDANDDGNDKDTSLLTVDSFIYMPIFYPHKDKSTNIRIHLDREIVRRLEDRYN

SEQ ID NO: 24240 - protein, 85 aa, unidentified
  REGION 1..85: note = Description of Unknown:cds_NC_035460.1_cds_YP_009408074.1_123 target sequence
KLSKLCCYTDIVKSLEHNFETMRQYAIILSKKADFQTYTHNDISIPIHSIDYTYPPQKEHYNNIYKRPNKYNKYNKHNNIYGFGV

SEQ ID NO: 24241 - protein, 85 aa, unidentified
  REGION 1..85: note = Description of Unknown:cds_NZ_WFIY01000004.1_cds_WP_155863645.1_1531 target sequence
IVAVDVGGTFTDIVGIDENGKITIYKGLTTPKSPEIGVYEGLKKGNFHDVKEIIHATTIATNAILGQINLELPEVALLTTKGFKD

SEQ ID NO: 24242 - protein, 85 aa, unidentified
  REGION 1..85: note = Description of Unknown:cds_NZ_WFIY01000004.1_cds_WP_155863645.1_1531 target sequence
VIEIGRQNRPELYNPFFDKPAPLVPRDKRYEINERVNAEGKIIQRVNEEEVDNLIKSIKADAIAISFLHSYINPDNEKIVAQIAR

SEQ ID NO: 24243 - protein, 85 aa, unidentified
  REGION 1..85: note = Description of Unknown:cds_NZ_WFIY01000004.1_cds_WP_155863645.1_1531 target sequence
KYFKYVSVSHEIAPEPREYERTSTTVLNAKLMPIVSRYLEALESLLMDFSSPPIFIMASSGGLIDKEEASRRPVQIIESGPAAGV

SEQ ID NO: 24244 - protein, 85 aa, unidentified
  REGION 1..85: note = Description of Unknown:cds_NZ_WFIY01000004.1_cds_WP_155863645.1_1531 target sequence
VGVAYFSELLNIKNAISFDMGGTTAKAGTVVDHKIEITTEYEVGGKAHHGRVIKGSGYPVRFPFVDLSEVSAGGGTIIWKDSAGG

SEQ ID NO: 24245 - protein, 85 aa, unidentified
  REGION 1..85: note = Description of Unknown:cds_NZ_WFIY01000004.1_cds_WP_155863645.1_1531 target sequence
LRVGPLSAGADPGPISYARGGKDPTLTDANVALGRVESLLSGEMKLDKEGAIKGLNRLGDYVEIANEAIKLANMEMGRAIRLVTV

SEQ ID NO: 24246 - protein, 85 aa, unidentified
  REGION 1..85: note = Description of Unknown:cds_NZ_WFIY01000004.1_cds_WP_155863645.1_1531 target sequence
ERGLDPEDFTLFAYGGAGPQYAIDLAEEMGISTVVIPPYPGLFSALGMLFADKKYEARKSYPKDLEKDFEELEAKVKGKYYLRYA

SEQ ID NO: 24247 - protein, 85 aa, unidentified
  REGION 1..85: note = Description of Unknown:cds_NZ_WFIY01000004.1_cds_WP_155863645.1_1531 target sequence
DVRYEGQGWEITIPVSDVKKIKEDFESIHKKIYGFTLDRDIEITTIRVFGIIPSYKVTLPKPKTEGKPSVKFRKVYFEEWIETPI

SEQ ID NO: 24248 - protein, 84 aa, unidentified
  REGION 1..84: note = Description of Unknown:cds_NZ_WFIY01000004.1_cds_WP_155863645.1_1531 target sequence
VFGIIPSYKVTLPKPKTEGKPSVKFRKVYFEEWIETPIYNREELPSNYEIEGPAIIEEYSSTIVIKPNWKAIVDDNGFIKISKV

SEQ ID NO: 24249 - protein, 85 aa, unidentified
  REGION 1..85: note = Description of Unknown:cds_NZ_WFIY01000004.1_cds_WP_155863645.1_1531 target sequence
LTTPKSPEIGVYEGLKKGNFHDVKEIIHATTIATNAILGQINLELPEVALLTTKGFKDVIEIGRQNRPELYNPFFDKPAPLVPRD

SEQ ID NO: 24250 - protein, 85 aa, unidentified
  REGION 1..85: note = Description of Unknown:cds_NZ_WFIY01000004.1_cds_WP_155863645.1_1531 target sequence
KRYEINERVNAEGKIIQRVNEEEVDNLIKSIKADAIAISFLHSYINPDNEKIVAQIARKYFKYVSVSHEIAPEPREYERTSTTVL

SEQ ID NO: 24251 - protein, 85 aa, unidentified
  REGION 1..85: note = Description of Unknown:cds_NZ_WFIY01000004.1_cds_WP_155863645.1_1531 target sequence
NAKLMPIVSRYLEALESLLMDFSSPPIFIMASSGGLIDKEEASRRPVQIIESGPAAGVVGVAYFSELLNIKNAISFDMGGTTAKA

SEQ ID NO: 24252 - protein, 85 aa, unidentified
  REGION 1..85: note = Description of Unknown:cds_NZ_WFIY01000004.1_cds_WP_155863645.1_1531 target sequence
GTVVDHKIEITTEYEVGGKAHHGRVIKGSGYPVRFPFVDLSEVSAGGGTIIWKDSAGGLRVGPLSAGADPGPISYARGGKDPTLT

SEQ ID NO: 24253 - protein, 85 aa, unidentified
  REGION 1..85: note = Description of Unknown:cds_NZ_WFIY01000004.1_cds_WP_155863645.1_1531 target sequence
DANVALGRVESLLSGEMKLDKEGAIKGLNRLGDYVEIANEAIKLANMEMGRAIRLVTVERGLDPEDFTLFAYGGAGPQYAIDLAE

SEQ ID NO: 24254 - protein, 85 aa, unidentified
  REGION 1..85: note = Description of Unknown:cds_NZ_WFIY01000004.1_cds_WP_155863645.1_1531 target sequence
EMGISTVVIPPYPGLFSALGMLFADKKYEARKSYPKDLEKDFEELEAKVKGKYYLRYADVRYEGQGWEITIPVSDVKKIKEDFES

SEQ ID NO: 24255 - protein, 85 aa, unidentified
  REGION 1..85: note = Description of Unknown:cds_NZ_WFIY01000004.1_cds_WP_155863645.1_1531 target sequence
IHKKIYGFTLDRDIEITTIRVFGIIPSYKVTLPKPKTEGKPSVKFRKVYFEEWIETPIYNREELPSNYEIEGPAIIEEYSSTIVI

SEQ ID NO: 24256 - protein, 85 aa, unidentified
  REGION 1..85: note = Description of Unknown:cds_NZ_WFIY01000004.1_cds_WP_155863757.1_1631 target sequence
NGLANSESLYLREASNQPVNWLPWSKDAFEKAKKENKLILVDVGAAWCHWCHVMDEETYSNQEIAKIINENFIAIKVDRDEMPEV

SEQ ID NO: 24257 - protein, 85 aa, unidentified
  REGION 1..85: note = Description of Unknown:cds_NZ_WFIY01000004.1_cds_WP_155863757.1_1631 target sequence
DRKLQLIVSEISGESGWPLTVFMTPEGNVFFGGTFFPPEDSYGRIGFKRLLNEILRIWNTERDKILNSAIPLSIKVKTENEGQLN

SEQ ID NO: 24258 - protein, 85 aa, unidentified
  REGION 1..85: note = Description of Unknown:cds_NZ_WFIY01000004.1_cds_WP_155863757.1_1631 target sequence
KDLIESSFSLLTSAYDLEYGGLGKSMKFPHPKVDEFMLAYSAWTGDDLGKKLNNFTLIKMFEGGIFDQVGGGFHRYTTDREWITP

SEQ ID NO: 24259 - protein, 85 aa, unidentified
  REGION 1..85: note = Description of Unknown:cds_NZ_WFIY01000004.1_cds_WP_155863757.1_1631 target sequence
HFEKLLIDNAELLEDYYVTYLATGKVEFLEAYNLTYEFIKRDLENSIAFSNSIDADSDGIEGGYYTWTEEEIKDALGQEAELAIK

SEQ ID NO: 24260 - protein, 85 aa, unidentified
  REGION 1..85: note = Description of Unknown:cds_NZ_WFIY01000004.1_cds_WP_155863757.1_1631 target sequence
LFGLRKEGGVVEGRKVLRVDLAEAKKLINTDINIILQKLRDLRRRMLEYRQKNRKMPRVDTNSYSYPNYRLAEVLFQSLKIDDGL

SEQ ID NO: 24261 - protein, 85 aa, unidentified
  REGION 1..85: note = Description of Unknown:cds_NZ_WFIY01000004.1_cds_WP_155863757.1_1631 target sequence
KIIKNLTPTVSRRLTGGKEGLLEDYASALLASISAYEVTADERYYSLSLELYNKLKDFLGADGFEEPNGELPYGDMPNESANSLA

SEQ ID NO: 24262 - protein, 85 aa, unidentified
  REGION 1..85: note = Description of Unknown:cds_NZ_WFIY01000004.1_cds_WP_155863757.1_1631 target sequence
VRGILKLSMLYKIDIEIEKILSKLVNSDPSFVSGLLLSAGSIINGIAHVVIVDEKDDKAEDLHKEAMTTYYPLKVVEKISDDIKD

SEQ ID NO: 24263 - protein, 84 aa, unidentified
  REGION 1..84: note = Description of Unknown:cds_NZ_WFIY01000004.1_cds_WP_155863757.1_1631 target sequence
HVVIVDEKDDKAEDLHKEAMTTYYPLKVVEKISDDIKDRLDSTLRSMLNDNRGKSRAYICIGNTCSMPIFDKEKIKLLLKTKLS

SEQ ID NO: 24264 - protein, 85 aa, unidentified
  REGION 1..85: note = Description of Unknown:cds_NZ_WFIY01000004.1_cds_WP_155863757.1_1631 target sequence
AFEKAKKENKLILVDVGAAWCHWCHVMDEETYSNQEIAKIINENFIAIKVDRDEMPEVDRKLQLIVSEISGESGWPLTVFMTPEG

SEQ ID NO: 24265 - protein, 85 aa, unidentified
  REGION 1..85: note = Description of Unknown:cds_NZ_WFIY01000004.1_cds_WP_155863757.1_1631 target sequence
NVFFGGTFFPPEDSYGRIGFKRLLNEILRIWNTERDKILNSAIPLSIKVKTENEGQLNKDLIESSFSLLTSAYDLEYGGLGKSMK

SEQ ID NO: 24266 - protein, 85 aa, unidentified
  REGION 1..85: note = Description of Unknown:cds_NZ_WFIY01000004.1_cds_WP_155863757.1_1631 target sequence
FPHPKVDEFMLAYSAWTGDDLGKKLNNFTLIKMFEGGIFDQVGGGFHRYTTDREWITPHFEKLLIDNAELLEDYYVTYLATGKVE

SEQ ID NO: 24267 - protein, 85 aa, unidentified
  REGION 1..85: note = Description of Unknown:cds_NZ_WFIY01000004.1_cds_WP_155863757.1_1631 target sequence
FLEAYNLTYEFIKRDLENSIAFSNSIDADSDGIEGGYYTWTEEEIKDALGQEAELAIKLFGLRKEGGVVEGRKVLRVDLAEAKKL

SEQ ID NO: 24268 - protein, 85 aa, unidentified
  REGION 1..85: note = Description of Unknown:cds_NZ_WFIY01000004.1_cds_WP_155863757.1_1631 target sequence
INTDINIILQKLRDLRRRMLEYRQKNRKMPRVDTNSYSYPNYRLAEVLFQSLKIDDGLKIIKNLTPTVSRRLTGGKEGLLEDYAS

SEQ ID NO: 24269 - protein, 85 aa, unidentified
  REGION 1..85: note = Description of Unknown:cds_NZ_WFIY01000004.1_cds_WP_155863757.1_1631 target sequence
ALLASISAYEVTADERYYSLSLELYNKLKDFLGADGFEEPNGELPYGDMPNESANSLAVRGILKLSMLYKIDIEIEKILSKLVNS

SEQ ID NO: 24270 - protein, 85 aa, unidentified
  REGION 1..85: note = Description of Unknown:cds_NZ_WFIY01000004.1_cds_WP_155863757.1_1631 target sequence
DPSFVSGLLLSAGSIINGIAHVVIVDEKDDKAEDLHKEAMTTYYPLKVVEKISDDIKDRLDSTLRSMLNDNRGKSRAYICIGNTC

SEQ ID NO: 24271 - protein, 85 aa, unidentified
  REGION 1..85: note = Description of Unknown:hvTR_P03211 target sequence
SDEGPGTGPGNGLGEKGDTSGPEGSGGSGPQRRGGDNHGRGRGRGRGRGGGRPGAPGGSGSGPRHRDGVRRPQKRPSCIGCKGTH

SEQ ID NO: 24272 - protein, 85 aa, unidentified
  REGION 1..85: note = Description of Unknown:hvTR_P03211 target sequence
GGTGAGAGAGGAGAGGAGAGGGAGAGGGAGGAGGAGGAGAGGGAGAGGGAGGAGGAGAGGGAGAGGGAGGAGAGGGAGGAGGAGA

SEQ ID NO: 24273 - protein, 85 aa, unidentified
  REGION 1..85: note = Description of Unknown:hvTR_P03211 target sequence
GGGAGAGGGAGGAGAGGGAGGAGGAGAGGGAGAGGAGGAGGAGAGGAGAGGGAGGAGGAGAGGAGAGGAGAGGAGAGGAGGAGAG

SEQ ID NO: 24274 - protein, 85 aa, unidentified
  REGION 1..85: note = Description of Unknown:hvTR_P03211 target sequence
GAGGAGAGGAGGAGAGGGAGGAGAGGGAGGAGAGGAGGAGAGGAGGAGAGGAGGAGAGGGAGAGGAGAGGGGRGRGGSGGRGRGG

SEQ ID NO: 24275 - protein, 85 aa, unidentified
  REGION 1..85: note = Description of Unknown:hvTR_P03211 target sequence
SGGRGRGGSGGRRGRGRERARGGSRERARGRGRGRGEKRPRSPSSQSSSSGSPPRRPPPGRRPFFHPVGEADYFEYHQEGGPDGE

SEQ ID NO: 24276 - protein, 85 aa, unidentified
  REGION 1..85: note = Description of Unknown:hvTR_P03211 target sequence
PDVPPGAIEQGPADDPGEGPSTGPRGQGDGGRRKKGGWFGKHRGQGGSNPKFENIAEGLRALLARSHVERTTDEGTWVAGVFVYG

SEQ ID NO: 24277 - protein, 85 aa, unidentified
  REGION 1..85: note = Description of Unknown:hvTR_P03211 target sequence
GSKTSLYNLRRGTALAIPQCRLTPLSRLPFGMAPGPGPQPGPLRESIVCYFMVFLQTHIFAEVLKDAIKDLVMTKPAPTCNIRVT

SEQ ID NO: 24278 - protein, 84 aa, unidentified
  REGION 1..84: note = Description of Unknown:hvTR_P03211 target sequence
IVCYFMVFLQTHIFAEVLKDAIKDLVMTKPAPTCNIRVTVCSFDDGVDLPPWFPPMVEGAAAEGDDGDDGDEGGDGDEGEEGQE

SEQ ID NO: 24279 - protein, 85 aa, unidentified
  REGION 1..85: note = Description of Unknown:hvTR_P03211 target sequence
SGPQRRGGDNHGRGRGRGRGRGGGRPGAPGGSGSGPRHRDGVRRPQKRPSCIGCKGTHGGTGAGAGAGGAGAGGAGAGGGAGAGG

SEQ ID NO: 24280 - protein, 85 aa, unidentified
  REGION 1..85: note = Description of Unknown:hvTR_P03211 target sequence
GAGGAGGAGGAGAGGGAGAGGGAGGAGGAGAGGGAGAGGGAGGAGAGGGAGGAGGAGAGGGAGAGGGAGGAGAGGGAGGAGGAGA

SEQ ID NO: 24281 - protein, 85 aa, unidentified
  REGION 1..85: note = Description of Unknown:hvTR_P03211 target sequence
GGGAGAGGAGGAGGAGAGGAGAGGGAGGAGGAGAGGAGAGGAGAGGAGAGGAGGAGAGGAGGAGAGGAGGAGAGGGAGGAGAGGG

SEQ ID NO: 24282 - protein, 85 aa, unidentified
  REGION 1..85: note = Description of Unknown:hvTR_P03211 target sequence
AGGAGAGGAGGAGAGGAGGAGAGGAGGAGAGGGAGAGGAGAGGGGRGRGGSGGRGRGGSGGRGRGGSGGRRGRGRERARGGSRER

SEQ ID NO: 24283 - protein, 85 aa, unidentified
  REGION 1..85: note = Description of Unknown:hvTR_P03211 target sequence
ARGRGRGRGEKRPRSPSSQSSSSGSPPRRPPPGRRPFFHPVGEADYFEYHQEGGPDGEPDVPPGAIEQGPADDPGEGPSTGPRGQ

SEQ ID NO: 24284 - protein, 85 aa, unidentified
  REGION 1..85: note = Description of Unknown:hvTR_P03211 target sequence
GDGGRRKKGGWFGKHRGQGGSNPKFENIAEGLRALLARSHVERTTDEGTWVAGVFVYGGSKTSLYNLRRGTALAIPQCRLTPLSR

SEQ ID NO: 24285 - protein, 85 aa, unidentified
  REGION 1..85: note = Description of Unknown:hvTR_P03211 target sequence
LPFGMAPGPGPQPGPLRESIVCYFMVFLQTHIFAEVLKDAIKDLVMTKPAPTCNIRVTVCSFDDGVDLPPWFPPMVEGAAAEGDD

SEQ ID NO: 24286 - protein, 85 aa, unidentified
  REGION 1..85: note = Description of Unknown:hvTR_A6YGN7 target sequence
DKTLSREEAKQLMQLLCLDMSCWGNLPLMRRQYLVKCKEYHPDKGGNEESMKLLNSLYLKLQDSVSSVHDLNEEEDNIWQSSQIP

SEQ ID NO: 24287 - protein, 85 aa, unidentified
  REGION 1..85: note = Description of Unknown:hvTR_A6YGN7 target sequence
TYGTPDWDEWWSQFNTYWEEELRCNESMPSSPKRSAPEEEPSCSQATPPKKKHAFDASLEFPKELLEFVSHAVFSNKCITCFVVH

SEQ ID NO: 24288 - protein, 85 aa, unidentified
  REGION 1..85: note = Description of Unknown:hvTR_A6YGN7 target sequence
TTREKGEVLYKKLLQKYQCSFISKHAFYNTVLIFFLTPHKHRVSAINNFCKGHCTVSFLFCKGVNNPYGLYSRMCRQPFNLCEEN

SEQ ID NO: 24289 - protein, 85 aa, unidentified
  REGION 1..85: note = Description of Unknown:hvTR_A6YGN7 target sequence
IPGGLKENEFNPEDLFGEPKEPSLSWNQIANFALEFDIDDVYYLLGSYIRFATKPEECEKCSKNDDATHKRVHVQNHENALLLQE

SEQ ID NO: 24290 - protein, 85 aa, unidentified
  REGION 1..85: note = Description of Unknown:hvTR_A6YGN7 target sequence
SKSQKNACTQAIDRVIAERRYNCVTLTRKKLLTKRFKKLFNEMDKIVVGERKILLYMASIAWYTGLNKKIDELVVRFLKLIVDNK

SEQ ID NO: 24291 - protein, 85 aa, unidentified
  REGION 1..85: note = Description of Unknown:hvTR_A6YGN7 target sequence
PKHRYWLFKGPINSGKTTLATALLNLCGGKALNINIPSEKLPFELGVALDQYMVVFEDVKGQIGIEKQLPSGNGVNNLDNLRDYL

SEQ ID NO: 24292 - protein, 85 aa, unidentified
  REGION 1..85: note = Description of Unknown:hvTR_A6YGN7 target sequence
DGCVEVNLEKKHVNKRSQIFPPGIVTMNEYCIPETVAVRFEKTVMFTIKRNLRESLEKTPQLLSQRILHSGIAMLLLLIWYRPVS

SEQ ID NO: 24293 - protein, 84 aa, unidentified
  REGION 1..84: note = Description of Unknown:hvTR_A6YGN7 target sequence
TIKRNLRESLEKTPQLLSQRILHSGIAMLLLLIWYRPVSDFDEEIQSNVVYWKEVLDNYIGLTEFATMQMNVTNGKNILEKWFE

SEQ ID NO: 24294 - protein, 85 aa, unidentified
  REGION 1..85: note = Description of Unknown:hvTR_A6YGN7 target sequence
LMRRQYLVKCKEYHPDKGGNEESMKLLNSLYLKLQDSVSSVHDLNEEEDNIWQSSQIPTYGTPDWDEWWSQFNTYWEEELRCNES

SEQ ID NO: 24295 - protein, 85 aa, unidentified
  REGION 1..85: note = Description of Unknown:hvTR_A6YGN7 target sequence
MPSSPKRSAPEEEPSCSQATPPKKKHAFDASLEFPKELLEFVSHAVFSNKCITCFVVHTTREKGEVLYKKLLQKYQCSFISKHAF

SEQ ID NO: 24296 - protein, 85 aa, unidentified
  REGION 1..85: note = Description of Unknown:hvTR_A6YGN7 target sequence
YNTVLIFFLTPHKHRVSAINNFCKGHCTVSFLFCKGVNNPYGLYSRMCRQPFNLCEENIPGGLKENEFNPEDLFGEPKEPSLSWN

SEQ ID NO: 24297 - protein, 85 aa, unidentified
  REGION 1..85: note = Description of Unknown:hvTR_A6YGN7 target sequence
QIANFALEFDIDDVYYLLGSYIRFATKPEECEKCSKNDDATHKRVHVQNHENALLLQESKSQKNACTQAIDRVIAERRYNCVTLT

SEQ ID NO: 24298 - protein, 85 aa, unidentified
  REGION 1..85: note = Description of Unknown:hvTR_A6YGN7 target sequence
RKKLLTKRFKKLFNEMDKIVVGERKILLYMASIAWYTGLNKKIDELVVRFLKLIVDNKPKHRYWLFKGPINSGKTTLATALLNLC

SEQ ID NO: 24299 - protein, 85 aa, unidentified
  REGION 1..85: note = Description of Unknown:hvTR_A6YGN7 target sequence
GGKALNINIPSEKLPFELGVALDQYMVVFEDVKGQIGIEKQLPSGNGVNNLDNLRDYLDGCVEVNLEKKHVNKRSQIFPPGIVTM

SEQ ID NO: 24300 - protein, 85 aa, unidentified
  REGION 1..85: note = Description of Unknown:hvTR_A6YGN7 target sequence
NEYCIPETVAVRFEKTVMFTIKRNLRESLEKTPQLLSQRILHSGIAMLLLLIWYRPVSDFDEEIQSNVVYWKEVLDNYIGLTEFA

SEQ ID NO: 24301 - protein, 85 aa, unidentified
  REGION 1..85: note = Description of Unknown:cds_NZ_WFIY01000004.1_cds_WP_155863295.1_1253 target sequence
KTICPYCGIGCGVEFEKDRITPTKYTTNKGMMCIKAALLPDTLKSKRLINPTLDGKEIDLDKALSILSTYIRRNIKKFSKNSIAF

SEQ ID NO: 24302 - protein, 85 aa, unidentified
  REGION 1..85: note = Description of Unknown:cds_NZ_WFIY01000004.1_cds_WP_155863295.1_1253 target sequence
YMGAQIPTEDQYLFVKLGKGFIGTGVFDSNVRLCMASAAYALKYSFGYPLPTANYDDIDKAKTLFIIGANPASSYPVLWNRMLHA

SEQ ID NO: 24303 - protein, 85 aa, unidentified
  REGION 1..85: note = Description of Unknown:cds_NZ_WFIY01000004.1_cds_WP_155863295.1_1253 target sequence
KNSDKDKKIIVIDPILTETAEHADYFIKIPPGGDIILLYGLIYYLIFKSRNIDQIENIEDLKNIAMTWYPSKVSQLLSIDEKAIR

SEQ ID NO: 24304 - protein, 85 aa, unidentified
  REGION 1..85: note = Description of Unknown:cds_NZ_WFIY01000004.1_cds_WP_155863295.1_1253 target sequence
DVAERIINTNTVFMWGMGINQRSYGTDLGILIATMAMLTDNVYGEGKGVLPLTGQHNSMGAREIGALAGMLPGLRYVNNEDQVRE

SEQ ID NO: 24305 - protein, 85 aa, unidentified
  REGION 1..85: note = Description of Unknown:cds_NZ_WFIY01000004.1_cds_WP_155863295.1_1253 target sequence
VEDFWQIPRYTISRNYYTITEFYELMEERKIKVLWIIGTNPVISLPRSNKFKELLSYVDLVVTQDAYETETASSSDMVIPVATWS

SEQ ID NO: 24306 - protein, 85 aa, unidentified
  REGION 1..85: note = Description of Unknown:cds_NZ_WFIY01000004.1_cds_WP_155863295.1_1253 target sequence
ERAGIHTTGDRTVSYMPKIRESNLKADYEIARIVGEKLNFNMNRDLKDIFNELVKITENTPVDYKGIKYGEFSGYKQSKYKPIVL

SEQ ID NO: 24307 - protein, 85 aa, unidentified
  REGION 1..85: note = Description of Unknown:cds_NZ_WFIY01000004.1_cds_WP_155863295.1_1253 target sequence
RTKAVEPNYSLQEGFILITGRLLALWNTKYRNNLKLIIINDIEEDEMLISEEDAKELGIKTGDIVEISTRENSLIFRAKTSNRLS

SEQ ID NO: 24308 - protein, 84 aa, unidentified
  REGION 1..84: note = Description of Unknown:cds_NZ_WFIY01000004.1_cds_WP_155863295.1_1253 target sequence
DEMLISEEDAKELGIKTGDIVEISTRENSLIFRAKTSNRLSKGIIFVPFHWGKANSLMDWKIDKISKEPAFKEIIVSSIKVVRS

SEQ ID NO: 24309 - protein, 85 aa, unidentified
  REGION 1..85: note = Description of Unknown:cds_NZ_WFIY01000004.1_cds_WP_155863295.1_1253 target sequence
NKGMMCIKAALLPDTLKSKRLINPTLDGKEIDLDKALSILSTYIRRNIKKFSKNSIAFYMGAQIPTEDQYLFVKLGKGFIGTGVF

SEQ ID NO: 24310 - protein, 85 aa, unidentified
  REGION 1..85: note = Description of Unknown:cds_NZ_WFIY01000004.1_cds_WP_155863295.1_1253 target sequence
DSNVRLCMASAAYALKYSFGYPLPTANYDDIDKAKTLFIIGANPASSYPVLWNRMLHAKNSDKDKKIIVIDPILTETAEHADYFI

SEQ ID NO: 24311 - protein, 85 aa, unidentified
  REGION 1..85: note = Description of Unknown:cds_NZ_WFIY01000004.1_cds_WP_155863295.1_1253 target sequence
KIPPGGDIILLYGLIYYLIFKSRNIDQIENIEDLKNIAMTWYPSKVSQLLSIDEKAIRDVAERIINTNTVFMWGMGINQRSYGTD

SEQ ID NO: 24312 - protein, 85 aa, unidentified
  REGION 1..85: note = Description of Unknown:cds_NZ_WFIY01000004.1_cds_WP_155863295.1_1253 target sequence
LGILIATMAMLTDNVYGEGKGVLPLTGQHNSMGAREIGALAGMLPGLRYVNNEDQVREVEDFWQIPRYTISRNYYTITEFYELME

SEQ ID NO: 24313 - protein, 85 aa, unidentified
  REGION 1..85: note = Description of Unknown:cds_NZ_WFIY01000004.1_cds_WP_155863295.1_1253 target sequence
ERKIKVLWIIGTNPVISLPRSNKFKELLSYVDLVVTQDAYETETASSSDMVIPVATWSERAGIHTTGDRTVSYMPKIRESNLKAD

SEQ ID NO: 24314 - protein, 85 aa, unidentified
  REGION 1..85: note = Description of Unknown:cds_NZ_WFIY01000004.1_cds_WP_155863295.1_1253 target sequence
YEIARIVGEKLNFNMNRDLKDIFNELVKITENTPVDYKGIKYGEFSGYKQSKYKPIVLRTKAVEPNYSLQEGFILITGRLLALWN

SEQ ID NO: 24315 - protein, 85 aa, unidentified
  REGION 1..85: note = Description of Unknown:cds_NZ_WFIY01000004.1_cds_WP_155863295.1_1253 target sequence
TKYRNNLKLIIINDIEEDEMLISEEDAKELGIKTGDIVEISTRENSLIFRAKTSNRLSKGIIFVPFHWGKANSLMDWKIDKISKE

SEQ ID NO: 24316 - protein, 85 aa, unidentified
  REGION 1..85: note = Description of Unknown:hvTR_Q6TVB6 target sequence
TSAHAAYVDYALRRTASMPSEMQGVNGAVRLKDYQLFVARVFLGLDRMHGLLLFHETGVGKTMTAVYVLKHLRDVFTNWTVVVLV

SEQ ID NO: 24317 - protein, 85 aa, unidentified
  REGION 1..85: note = Description of Unknown:hvTR_Q6TVB6 target sequence
KKALIEQPWTSTMMQFAPEVVPNCAFINYDDPRFHHRFFTFIKTSSAGSRICVVIDEFHNFISMSLTKEDGRQRPARTVYNYLAK

SEQ ID NO: 24318 - protein, 85 aa, unidentified
  REGION 1..85: note = Description of Unknown:hvTR_Q6TVB6 target sequence
NIPLVNGKLLCLTATPVVNSVREFAMAMNLLRPGVLGQAALFDGGVLANPEDLVDKLGGVCSYLVNNEASIFDDVDGSAAFARKR

SEQ ID NO: 24319 - protein, 85 aa, unidentified
  REGION 1..85: note = Description of Unknown:hvTR_Q6TVB6 target sequence
VRMMYVDMTAKQTAAYRRAAVMERKSGAAVFRVYRRTAATFAFEDVPDKSVLSKQEYDETVAALFADFARNVGGRTFSEAATKLF

SEQ ID NO: 24320 - protein, 85 aa, unidentified
  REGION 1..85: note = Description of Unknown:hvTR_Q6TVB6 target sequence
RSGETISGDRMTSADVSLLTELRERSCKYTEVCLRILASPGKCLVFEPFVNVTGIEMLLLYFAAFGISHVEFSSRTRDTRAKLVD

SEQ ID NO: 24321 - protein, 85 aa, unidentified
  REGION 1..85: note = Description of Unknown:hvTR_Q6TVB6 target sequence
AFNACDNTDGERIKVCVFSLSGTEGLSFLSINDIFILDMTWNEASLRQIVGRAVRLNSHEMTPAERRYVNVHFVVARQDSGAATV

SEQ ID NO: 24322 - protein, 85 aa, unidentified
  REGION 1..85: note = Description of Unknown:hvTR_Q6TVB6 target sequence
DEDLLDLIKDKSRQFTQLFRVLKRSSLEWVRAAFTDFAPLADDSGWLALVSRPADAREATRAVRLTDGQSVWYSTSAALVTVRKG

SEQ ID NO: 24323 - protein, 84 aa, unidentified
  REGION 1..84: note = Description of Unknown:hvTR_Q6TVB6 target sequence
SGWLALVSRPADAREATRAVRLTDGQSVWYSTSAALVTVRKGFLETGGKLFDDDGNFLAEIGASPTVRVSGGRLVYVVDPAAIA

SEQ ID NO: 24324 - protein, 85 aa, unidentified
  REGION 1..85: note = Description of Unknown:hvTR_Q6TVB6 target sequence
AVRLKDYQLFVARVFLGLDRMHGLLLFHETGVGKTMTAVYVLKHLRDVFTNWTVVVLVKKALIEQPWTSTMMQFAPEVVPNCAFI

SEQ ID NO: 24325 - protein, 85 aa, unidentified
  REGION 1..85: note = Description of Unknown:hvTR_Q6TVB6 target sequence
NYDDPRFHHRFFTFIKTSSAGSRICVVIDEFHNFISMSLTKEDGRQRPARTVYNYLAKNIPLVNGKLLCLTATPVVNSVREFAMA

SEQ ID NO: 24326 - protein, 85 aa, unidentified
  REGION 1..85: note = Description of Unknown:hvTR_Q6TVB6 target sequence
MNLLRPGVLGQAALFDGGVLANPEDLVDKLGGVCSYLVNNEASIFDDVDGSAAFARKRVRMMYVDMTAKQTAAYRRAAVMERKSG

SEQ ID NO: 24327 - protein, 85 aa, unidentified
  REGION 1..85: note = Description of Unknown:hvTR_Q6TVB6 target sequence
AAVFRVYRRTAATFAFEDVPDKSVLSKQEYDETVAALFADFARNVGGRTFSEAATKLFRSGETISGDRMTSADVSLLTELRERSC

SEQ ID NO: 24328 - protein, 85 aa, unidentified
  REGION 1..85: note = Description of Unknown:hvTR_Q6TVB6 target sequence
KYTEVCLRILASPGKCLVFEPFVNVTGIEMLLLYFAAFGISHVEFSSRTRDTRAKLVDAFNACDNTDGERIKVCVFSLSGTEGLS

SEQ ID NO: 24329 - protein, 85 aa, unidentified
  REGION 1..85: note = Description of Unknown:hvTR_Q6TVB6 target sequence
FLSINDIFILDMTWNEASLRQIVGRAVRLNSHEMTPAERRYVNVHFVVARQDSGAATVDEDLLDLIKDKSRQFTQLFRVLKRSSL

SEQ ID NO: 24330 - protein, 85 aa, unidentified
  REGION 1..85: note = Description of Unknown:hvTR_Q6TVB6 target sequence
EWVRAAFTDFAPLADDSGWLALVSRPADAREATRAVRLTDGQSVWYSTSAALVTVRKGFLETGGKLFDDDGNFLAEIGASPTVRV

SEQ ID NO: 24331 - protein, 85 aa, unidentified
  REGION 1..85: note = Description of Unknown:hvTR_Q6TVP8 target sequence
TSAHAAYIDYALRRTAHMPSEMQGVEESVRLKDYQLFVARVFLGLDSMHSLLLFHETGVGKTVTAVYVLKHLRDVFTDWTVVVLV

SEQ ID NO: 24332 - protein, 85 aa, unidentified
  REGION 1..85: note = Description of Unknown:hvTR_Q6TVP8 target sequence
KKALVEQPWTSTMMRFAPEAVPGCTFINYDDPRFHHRFFTLMKTASSSSRVCVVIDEFHNFISMSLTKEDGRQRPARTVYNYLAK

SEQ ID NO: 24333 - protein, 85 aa, unidentified
  REGION 1..85: note = Description of Unknown:hvTR_Q6TVP8 target sequence
NIPMGRGKLLCLTATPVVNSVKEFSMAVNLLRPGVVGQTPLFNGGALANPEDLVDKLGGLCSYLVTNEASIFDDVDGSAAFARKR

SEQ ID NO: 24334 - protein, 85 aa, unidentified
  REGION 1..85: note = Description of Unknown:hvTR_Q6TVP8 target sequence
VRMMYVDMTAKQTEAYRRAAAMERKSGAAVFRVYRRIAATFAFEDAPDKSVLSKQEYDEAVAALFLDFARAVKDRVFSEAAMRLF

SEQ ID NO: 24335 - protein, 85 aa, unidentified
  REGION 1..85: note = Description of Unknown:hvTR_Q6TVP8 target sequence
RSGAPVSGDRMTSADVSLLAELRERSCKYTEVCLRILASPGKCLVFEPFVNVTGIEMLLLYFRAFGVSSVEFSSRTRDTRAKLVD

SEQ ID NO: 24336 - protein, 85 aa, unidentified
  REGION 1..85: note = Description of Unknown:hvTR_Q6TVP8 target sequence
AFNACDNTDGEKIKVCVFSLSGSEGLSFLSINDIFILDMTWNEASLRQIVGRAVRLNSHEMTPPDRRYVNVHFVVARQDSGAATV

SEQ ID NO: 24337 - protein, 85 aa, unidentified
  REGION 1..85: note = Description of Unknown:hvTR_Q6TVP8 target sequence
DEDLLALIRDKSRQFTQLFRVLKRCSLEWVREAFTDFAPLEDDSGWSALVARPADARGPARAARLADGQSVWYSTSTALVTVRKG

SEQ ID NO: 24338 - protein, 84 aa, unidentified
  REGION 1..84: note = Description of Unknown:hvTR_Q6TVP8 target sequence
SGWSALVARPADARGPARAARLADGQSVWYSTSTALVTVRKGFLERGGRLFDDDGNFLTALGDPPTVRVSGGRLVYVVDPASIA

SEQ ID NO: 24339 - protein, 85 aa, unidentified
  REGION 1..85: note = Description of Unknown:hvTR_Q6TVP8 target sequence
SVRLKDYQLFVARVFLGLDSMHSLLLFHETGVGKTVTAVYVLKHLRDVFTDWTVVVLVKKALVEQPWTSTMMRFAPEAVPGCTFI

SEQ ID NO: 24340 - protein, 85 aa, unidentified
  REGION 1..85: note = Description of Unknown:hvTR_Q6TVP8 target sequence
NYDDPRFHHRFFTLMKTASSSSRVCVVIDEFHNFISMSLTKEDGRQRPARTVYNYLAKNIPMGRGKLLCLTATPVVNSVKEFSMA

SEQ ID NO: 24341 - protein, 85 aa, unidentified
  REGION 1..85: note = Description of Unknown:hvTR_Q6TVP8 target sequence
VNLLRPGVVGQTPLFNGGALANPEDLVDKLGGLCSYLVTNEASIFDDVDGSAAFARKRVRMMYVDMTAKQTEAYRRAAAMERKSG

SEQ ID NO: 24342 - protein, 85 aa, unidentified
  REGION 1..85: note = Description of Unknown:hvTR_Q6TVP8 target sequence
AAVFRVYRRIAATFAFEDAPDKSVLSKQEYDEAVAALFLDFARAVKDRVFSEAAMRLFRSGAPVSGDRMTSADVSLLAELRERSC

SEQ ID NO: 24343 - protein, 85 aa, unidentified
  REGION 1..85: note = Description of Unknown:hvTR_Q6TVP8 target sequence
KYTEVCLRILASPGKCLVFEPFVNVTGIEMLLLYFRAFGVSSVEFSSRTRDTRAKLVDAFNACDNTDGEKIKVCVFSLSGSEGLS

SEQ ID NO: 24344 - protein, 85 aa, unidentified
  REGION 1..85: note = Description of Unknown:hvTR_Q6TVP8 target sequence
FLSINDIFILDMTWNEASLRQIVGRAVRLNSHEMTPPDRRYVNVHFVVARQDSGAATVDEDLLALIRDKSRQFTQLFRVLKRCSL

SEQ ID NO: 24345 - protein, 85 aa, unidentified
  REGION 1..85: note = Description of Unknown:hvTR_Q6TVP8 target sequence
EWVREAFTDFAPLEDDSGWSALVARPADARGPARAARLADGQSVWYSTSTALVTVRKGFLERGGRLFDDDGNFLTALGDPPTVRV

SEQ ID NO: 24346 - protein, 85 aa, unidentified; identical to SEQ ID NO: 24331
  REGION 1..85: note = Description of Unknown:hvTR_D3IZL9 target sequence

SEQ ID NO: 24347 - protein, 85 aa, unidentified
  REGION 1..85: note = Description of Unknown:hvTR_D3IZL9 target sequence
KKALVEQPWTSTMMRFAPEAVSGCTFINYDDPRFHHRFFTLMKTSSAGSRICVVIDEFHNFISMSLTKEDGRQRPARTVYNYLAK

SEQ ID NO: 24348 - protein, 85 aa, unidentified
  REGION 1..85: note = Description of Unknown:hvTR_D3IZL9 target sequence
NIPMGRGKLLCLTATPVVNSAKEFTMAVNLLRPGVVGQTPLFNGGVLANPEDLVDKLGGLCSYLVTNEASIFDDVDGSAAFARKR

SEQ ID NO: 24349 - protein, 85 aa, unidentified
  REGION 1..85: note = Description of Unknown:hvTR_D3IZL9 target sequence
VRMMYVDMTAKQTEAYRRAAAMEHKSGAAVFRVYRRIAATFAFEDAPDKSVLSKQEYDEAVAALFLDFARAVKDRVFSEAAMRLF

SEQ ID NO: 24350 - protein, 85 aa, unidentified
  REGION 1..85: note = Description of Unknown:hvTR_D3IZL9 target sequence
RSGAPVSGDRMTSADVSLLAELRERSCKYTEVCLRILASPGKCLVFEPFVNVTGIEMLLLYFRAFGISSVEFSSRTRDTRAKLVD

SEQ ID NO: 24351 - protein, 85 aa, unidentified
  REGION 1..85: note = Description of Unknown:hvTR_D3IZL9 target sequence
AFNACDNTDGERIKVCVFSLSGSEGLSFLSINDIFILDMTWNEASLRQIVGRAVRLNSHEMTPPDRRYVNVHFVVARQDSGAATV

SEQ ID NO: 24352 - protein, 85 aa, unidentified
  REGION 1..85: note = Description of Unknown:hvTR_D3IZL9 target sequence
DEDLLDLIRDKSRQFTQLFRVLKRCSLEWVREAFTDFAPLEDDSGWSALVARPADARGAARAARLADGQSVWYSTSTALVTVRKG

SEQ ID NO: 24353 - protein, 84 aa, unidentified
  REGION 1..84: note = Description of Unknown:hvTR_D3IZL9 target sequence
SGWSALVARPADARGAARAARLADGQSVWYSTSTALVTVRKGFLERGGRLFDDDGNFLTVLGETPTVRVSGGRLVYVVDPASIA

SEQ ID NO: 24354 - protein, 85 aa, unidentified
  REGION 1..85: note = Description of Unknown:hvTR_D3IZL9 target sequence
SVRLKDYQLFVARVFLGLDSMHSLLLFHETGVGKTVTAVYVLKHLRDVFTDWTVVVLVKKALVEQPWTSTMMRFAPEAVSGCTFI

SEQ ID NO: 24355 - protein, 85 aa, unidentified
  REGION 1..85: note = Description of Unknown:hvTR_D3IZL9 target sequence
NYDDPRFHHRFFTLMKTSSAGSRICVVIDEFHNFISMSLTKEDGRQRPARTVYNYLAKNIPMGRGKLLCLTATPVVNSAKEFTMA

SEQ ID NO: 24356 - protein, 85 aa, unidentified
  REGION 1..85: note = Description of Unknown:hvTR_D3IZL9 target sequence
VNLLRPGVVGQTPLFNGGVLANPEDLVDKLGGLCSYLVTNEASIFDDVDGSAAFARKRVRMMYVDMTAKQTEAYRRAAAMEHKSG

SEQ ID NO: 24357 - protein, 85 aa, unidentified
  REGION 1..85: note = Description of Unknown:hvTR_D3IZL9 target sequence
KYTEVCLRILASPGKCLVFEPFVNVTGIEMLLLYFRAFGISSVEFSSRTRDTRAKLVDAFNACDNTDGERIKVCVFSLSGSEGLS

SEQ ID NO: 24358 - protein, 85 aa, unidentified
  REGION 1..85: note = Description of Unknown:hvTR_D3IZL9 target sequence
FLSINDIFILDMTWNEASLRQIVGRAVRLNSHEMTPPDRRYVNVHFVVARQDSGAATVDEDLLDLIRDKSRQFTQLFRVLKRCSL

SEQ ID NO: 24359 - protein, 85 aa, unidentified
  REGION 1..85: note = Description of Unknown:hvTR_D3IZL9 target sequence
EWVREAFTDFAPLEDDSGWSALVARPADARGAARAARLADGQSVWYSTSTALVTVRKGFLERGGRLFDDDGNFLTVLGETPTVRV

SEQ ID NO: 24360 - protein, 85 aa, unidentified
  REGION 1..85: note = Description of Unknown:hvTR_Q76QJ5 target sequence
NTGIIDLFDNHVDSIPTILPHQLATLDYLVRTIIDENRSVLLFHIMGSGKTIIALLFALVASRFKKVYILVPNINILKIFNYNMG

SEQ ID NO: 24361 - protein, 85 aa, unidentified
  REGION 1..85: note = Description of Unknown:hvTR_Q76QJ5 target sequence
VAMNLFNDEFIAENIFIHSTTSFYSLNYNDNVINYNGLSRYNNSIFIVDEAHNIFGNNTGELMTVIKNKNKIPFLLLSGSPITNT

SEQ ID NO: 24362 - protein, 85 aa, unidentified
  REGION 1..85: note = Description of Unknown:hvTR_Q76QJ5 target sequence
PNTLGHIIDLMSEETIDFGEIISRGKKVIQTLLNERGVNVLKDLLKGRISYYEMPDKDLPTIRYHGRKFLDTRVVYCHMSKLQER

SEQ ID NO: 24363 - protein, 85 aa, unidentified
  REGION 1..85: note = Description of Unknown:hvTR_Q76QJ5 target sequence
DYMITRRQLCYHEMFDKNMYNVSMAVLGQLNLMNNLDTLFQEQDKELYPNLKINNGVLYGEELVTLNISSKFKYFINRIQTLNGK

SEQ ID NO: 24364 - protein, 85 aa, unidentified
  REGION 1..85: note = Description of Unknown:hvTR_Q76QJ5 target sequence
HFIYFSNSTYGGLVIKYIMLSNGYSEYNGSQGTNPHMINGKPKTFAIVTSKMKSSLEDLLDVYNSPENDDGSQLMFLFSSNIMSE

SEQ ID NO: 24365 - protein, 85 aa, unidentified
  REGION 1..85: note = Description of Unknown:hvTR_Q76QJ5 target sequence
SYTLKEVRHIWFMTIPDTFSQYNQILGRSIRKFSYADISEPVNVYLLAAVYSDFNDEVTSLNDYTQDELINVLPFDIKKLLYLKF

SEQ ID NO: 24366 - protein, 85 aa, unidentified
  REGION 1..85: note = Description of Unknown:hvTR_Q76QJ5 target sequence
KTKETNRIYSILQEMSETYSLPPHPSIVKVLLGELVRQFFYNNSRIKYNDSKLLKMVTSVIKNKEDARNYIDDIVNGHFFVSNKV

SEQ ID NO: 24367 - protein, 84 aa, unidentified
  REGION 1..84: note = Description of Unknown:hvTR_Q76QJ5 target sequence
NSRIKYNDSKLLKMVTSVIKNKEDARNYIDDIVNGHFFVSNKVFDKSLLYKYENDIITVPFRLSYEPFVWGVNFRKEYNVVSSP

SEQ ID NO: 24368 - protein, 85 aa, unidentified
  REGION 1..85: note = Description of Unknown:hvTR_Q76QJ5 target sequence
YLVRTIIDENRSVLLFHIMGSGKTIIALLFALVASRFKKVYILVPNINILKIFNYNMGVAMNLFNDEFIAENIFIHSTTSFYSLN

SEQ ID NO: 24369 - protein, 85 aa, unidentified
  REGION 1..85: note = Description of Unknown:hvTR_Q76QJ5 target sequence
YNDNVINYNGLSRYNNSIFIVDEAHNIFGNNTGELMTVIKNKNKIPFLLLSGSPITNTPNTLGHIIDLMSEETIDFGEIISRGKK

SEQ ID NO: 24370 - protein, 85 aa, unidentified
  REGION 1..85: note = Description of Unknown:hvTR_Q76QJ5 target sequence
VIQTLLNERGVNVLKDLLKGRISYYEMPDKDLPTIRYHGRKFLDTRVVYCHMSKLQERDYMITRRQLCYHEMFDKNMYNVSMAVL

SEQ ID NO: 24371 - protein, 85 aa, unidentified
  REGION 1..85: note = Description of Unknown:hvTR_Q76QJ5 target sequence
GQLNLMNNLDTLFQEQDKELYPNLKINNGVLYGEELVTLNISSKFKYFINRIQTLNGKHFIYFSNSTYGGLVIKYIMLSNGYSEY

SEQ ID NO: 24372 - protein, 85 aa, unidentified
  REGION 1..85: note = Description of Unknown:hvTR_Q76QJ5 target sequence
NGSQGTNPHMINGKPKTFAIVTSKMKSSLEDLLDVYNSPENDDGSQLMFLFSSNIMSESYTLKEVRHIWFMTIPDTFSQYNQILG

SEQ ID NO: 24373 - protein, 85 aa, unidentified
  REGION 1..85: note = Description of Unknown:hvTR_Q76QJ5 target sequence
RSIRKFSYADISEPVNVYLLAAVYSDFNDEVTSLNDYTQDELINVLPFDIKKLLYLKFKTKETNRIYSILQEMSETYSLPPHPSI

SEQ ID NO: 24374 - protein, 85 aa, unidentified
  REGION 1..85: note = Description of Unknown:hvTR_Q76QJ5 target sequence
VKVLLGELVRQFFYNNSRIKYNDSKLLKMVTSVIKNKEDARNYIDDIVNGHFFVSNKVFDKSLLYKYENDIITVPFRLSYEPFVW

SEQ ID NO: 24375 - protein, 85 aa, unidentified; identical to SEQ ID NO: 24360
  REGION 1..85: note = Description of Unknown:hvTR_Q5IXS2 target sequence

SEQ ID NO: 24376 - protein, 85 aa, unidentified; identical to SEQ ID NO: 24361
  REGION 1..85: note = Description of Unknown:hvTR_Q5IXS2 target sequence

SEQ ID NO: 24377 - protein, 85 aa, unidentified; identical to SEQ ID NO: 24362
  REGION 1..85: note = Description of Unknown:hvTR_Q5IXS2 target sequence

SEQ ID NO: 24378 - protein, 85 aa, unidentified
  REGION 1..85: note = Description of Unknown:hvTR_Q5IXS2 target sequence
DYMITRRQLCYHEMFDKNMYNVSMVVLGQLNLMNNLDTLFQEQDKELYPNLKINNGVLYGEELVTLNISSKFKYFINRIQTLKGK

SEQ ID NO: 24379 - protein, 85 aa, unidentified
  REGION 1..85: note = Description of Unknown:hvTR_Q5IXS2 target sequence
HFIYFSNSTYGGLVIKYIMLSNGYSEYNGSQGTNPHMINDKPKTFAIVTSKMKSSLEDLLDVYNSPENDDGSQLMFLFSSNIMSE

SEQ ID NO: 24380 - protein, 85 aa, unidentified; identical to SEQ ID NO: 24365
  REGION 1..85: note = Description of Unknown:hvTR_Q5IXS2 target sequence

SEQ ID NO: 24381 - protein, 85 aa, unidentified; identical to SEQ ID NO: 24366
  REGION 1..85: note = Description of Unknown:hvTR_Q5IXS2 target sequence

SEQ ID NO: 24382 - protein, 84 aa, unidentified; identical to SEQ ID NO: 24367
  REGION 1..84: note = Description of Unknown:hvTR_Q5IXS2 target sequence

SEQ ID NO: 24383 - protein, 85 aa, unidentified; identical to SEQ ID NO: 24368
  REGION 1..85: note = Description of Unknown:hvTR_Q5IXS2 target sequence

SEQ ID NO: 24384 - protein, 85 aa, unidentified; identical to SEQ ID NO: 24369
  REGION 1..85: note = Description of Unknown:hvTR_Q5IXS2 target sequence

SEQ ID NO: 24385 - protein, 85 aa, unidentified
  REGION 1..85: note = Description of Unknown:hvTR_Q5IXS2 target sequence
VIQTLLNERGVNVLKDLLKGRISYYEMPDKDLPTIRYHGRKFLDTRVVYCHMSKLQERDYMITRRQLCYHEMFDKNMYNVSMVVL

SEQ ID NO: 24386 - protein, 85 aa, unidentified
  REGION 1..85: note = Description of Unknown:hvTR_Q5IXS2 target sequence
GQLNLMNNLDTLFQEQDKELYPNLKINNGVLYGEELVTLNISSKFKYFINRIQTLKGKHFIYFSNSTYGGLVIKYIMLSNGYSEY

SEQ ID NO: 24387 - protein, 85 aa, unidentified
  REGION 1..85: note = Description of Unknown:hvTR_Q5IXS2 target sequence
NGSQGTNPHMINDKPKTFAIVTSKMKSSLEDLLDVYNSPENDDGSQLMFLFSSNIMSESYTLKEVRHIWFMTIPDTFSQYNQILG

SEQ ID NO: 24388 - protein, 85 aa, unidentified; identical to SEQ ID NO: 24373
  REGION 1..85: note = Description of Unknown:hvTR_Q5IXS2 target sequence

SEQ ID NO: 24389 - protein, 85 aa, unidentified; identical to SEQ ID NO: 24360
  REGION 1..85: note = Description of Unknown:hvTR_P04308 target sequence

SEQ ID NO: 24390 - protein, 85 aa, unidentified; identical to SEQ ID NO: 24361
  REGION 1..85: note = Description of Unknown:hvTR_P04308 target sequence

SEQ ID NO: 24391 - protein, 85 aa, unidentified; identical to SEQ ID NO: 24362
  REGION 1..85: note = Description of Unknown:hvTR_P04308 target sequence

SEQ ID NO: 24392 - protein, 85 aa, unidentified; identical to SEQ ID NO: 24363
  REGION 1..85: note = Description of Unknown:hvTR_P04308 target sequence

SEQ ID NO: 24393 - protein, 85 aa, unidentified; identical to SEQ ID NO: 24365
  REGION 1..85: note = Description of Unknown:hvTR_P04308 target sequence

SEQ ID NO: 24394 - protein, 85 aa, unidentified; identical to SEQ ID NO: 24368
  REGION 1..85: note = Description of Unknown:hvTR_P04308 target sequence

SEQ ID NO: 24395 - protein, 85 aa, unidentified; identical to SEQ ID NO: 24369
  REGION 1..85: note = Description of Unknown:hvTR_P04308 target sequence

SEQ ID NO: 24396 - protein, 85 aa, unidentified; identical to SEQ ID NO: 24370
  REGION 1..85: note = Description of Unknown:hvTR_P04308 target sequence

SEQ ID NO: 24397 - protein, 85 aa, unidentified; identical to SEQ ID NO: 24371
  REGION 1..85: note = Description of Unknown:hvTR_P04308 target sequence

SEQ ID NO: 24398 - protein, 85 aa, unidentified; identical to SEQ ID NO: 24372
  REGION 1..85: note = Description of Unknown:hvTR_P04308 target sequence

SEQ ID NO: 24399 - protein, 85 aa, unidentified; identical to SEQ ID NO: 24373
  REGION 1..85: note = Description of Unknown:hvTR_P04308 target sequence

SEQ ID NO: 24400 - protein, 85 aa, unidentified
  REGION 1..85: note = Description of Unknown:hvTR_P0DON9 target sequence
NTGIIDLFDNHVDSIPTILPHQLATLDYLVRTIIDENRSVLLFHIMGSGKTIIALLFALIASRFKKVHILVPNINILKIFNYNMG

SEQ ID NO: 24401 - protein, 85 aa, unidentified; identical to SEQ ID NO: 24361
  REGION 1..85: note = Description of Unknown:hvTR_P0DON9 target sequence

SEQ ID NO: 24402 - protein, 85 aa, unidentified; identical to SEQ ID NO: 24362
  REGION 1..85: note = Description of Unknown:hvTR_P0DON9 target sequence

SEQ ID NO: 24403 - protein, 85 aa, unidentified; identical to SEQ ID NO: 24363
  REGION 1..85: note = Description of Unknown:hvTR_P0DON9 target sequence

SEQ ID NO: 24404 - protein, 85 aa, unidentified; identical to SEQ ID NO: 24364
  REGION 1..85: note = Description of Unknown:hvTR_P0DON9 target sequence

SEQ ID NO: 24405 - protein, 85 aa, unidentified
  REGION 1..85: note = Description of Unknown:hvTR_P0DON9 target sequence
SYTLKEVRHIWFMTIPDTFSQYNQILGRSIRKFSYVDISEPVNVYLLAAVYSDFNDEVTSLNDYTQDELINVLPFDIKKLLYLKF

SEQ ID NO: 24406 - protein, 85 aa, unidentified
  REGION 1..85: note = Description of Unknown:hvTR_P0DON9 target sequence
KTKETNRIYSILQEMSETYSLPPHPSIVKVLLGELVRQFFYNNSRIKYNDAKLLKMVTSVIKNKEDARNYIDDIVNGHFFVSNKV

SEQ ID NO: 24407 - protein, 84 aa, unidentified
  REGION 1..84: note = Description of Unknown:hvTR_P0DON9 target sequence
NSRIKYNDAKLLKMVTSVIKNKEDARNYIDDIVNGHFFVSNKVFDKSLLYKYENDIITVPFRLSYEPFVWGVNFRKEYNVVSSP

SEQ ID NO: 24408 - protein, 85 aa, unidentified
  REGION 1..85: note = Description of Unknown:hvTR_P0DON9 target sequence
YLVRTIIDENRSVLLFHIMGSGKTIIALLFALIASRFKKVHILVPNINILKIFNYNMGVAMNLFNDEFIAENIFIHSTTSFYSLN

SEQ ID NO: 24409 - protein, 85 aa, unidentified; identical to SEQ ID NO: 24369
  REGION 1..85: note = Description of Unknown:hvTR_P0DON9 target sequence

SEQ ID NO: 24410 - protein, 85 aa, unidentified; identical to SEQ ID NO: 24370
  REGION 1..85: note = Description of Unknown:hvTR_P0DON9 target sequence

SEQ ID NO: 24411 - protein, 85 aa, unidentified; identical to SEQ ID NO: 24371
  REGION 1..85: note = Description of Unknown:hvTR_P0DON9 target sequence

SEQ ID NO: 24412 - protein, 85 aa, unidentified
  REGION 1..85: note = Description of Unknown:hvTR_P0DON9 target sequence
RSIRKFSYVDISEPVNVYLLAAVYSDFNDEVTSLNDYTQDELINVLPFDIKKLLYLKFKTKETNRIYSILQEMSETYSLPPHPSI

SEQ ID NO: 24413 - protein, 85 aa, unidentified
  REGION 1..85: note = Description of Unknown:hvTR_P0DON9 target sequence
VKVLLGELVRQFFYNNSRIKYNDAKLLKMVTSVIKNKEDARNYIDDIVNGHFFVSNKVFDKSLLYKYENDIITVPFRLSYEPFVW

SEQ ID NO: 24414 - protein, 85 aa, unidentified
  REGION 1..85: note = Description of Unknown:cds_NZ_WFIY01000004.1_cds_972 target sequence
SRLEILGAIYNGIPKDAGITRIEFEGPEIAVYVKNPNFLTNGGDIIKKIAKEIKKRIVVKADKSVRKDEKEAIEIIKNIVPKEAE

SEQ ID NO: 24415 - protein, 85 aa, unidentified
  REGION 1..85: note = Description of Unknown:cds_NZ_WFIY01000004.1_cds_972 target sequence
ITDIKFDEDLGEVLIKAKKPGLVIGKGGLIQQRIFLETFWKPEIIREPPIKSKTIENVITHIYNETEYRAKILKTFGDRIHREVL

SEQ ID NO: 24416 - protein, 85 aa, unidentified
  REGION 1..85: note = Description of Unknown:cds_NZ_WFIY01000004.1_cds_972 target sequence
FKDRYVRITALGAFQEIGRSAILVETPESRVLLDTGVNPSVNFGERMFPKLDIDQLRLEDLDAVVITHAHLDHCGMVPYLFKYGY

SEQ ID NO: 24417 - protein, 85 aa, unidentified
  REGION 1..85: note = Description of Unknown:cds_NZ_WFIY01000004.1_cds_972 target sequence
EGPVYTTPPTRDVMALMQLDLLDVAEKDGRPLPYSAKEVRKELLHTITLDYEEVTDIAPDIRLTFYNAGHILGSAMVHLHIGEGT

SEQ ID NO: 24418 - protein, 85 aa, unidentified
  REGION 1..85: note = Description of Unknown:cds_NZ_WFIY01000004.1_cds_972 target sequence
HNIVYTGDFKYAKTRLLDRATSEFPKVDTLIMETTYGAQEQTSREESEKQLIDIINNTINRGGKVLIPVLAVGRGQEMMLVINNA

SEQ ID NO: 24419 - protein, 85 aa, unidentified
  REGION 1..85: note = Description of Unknown:cds_NZ_WFIY01000004.1_cds_972 target sequence
LKNKLIPEVPVYVTGLFDEVTAIHTAYPEWLSREVRDAILYKDENPFVSDQFKRIEGYREDIAQGEPSIILATSGMLNGGPAVEF

SEQ ID NO: 24420 - protein, 85 aa, unidentified
  REGION 1..85: note = Description of Unknown:cds_NZ_WFIY01000004.1_cds_972 target sequence
FKAMAPDPKNSIVFVSYQAEGTLGRKVRDGAKEVQIIGRDGRVENIQINMEVKVVDGFSGHSDRRQLLKFLHDLTPKPKNIILDH

SEQ ID NO: 24421 - protein, 84 aa, unidentified
  REGION 1..84: note = Description of Unknown:cds_NZ_WFIY01000004.1_cds_972 target sequence
VENIQINMEVKVVDGFSGHSDRRQLLKFLHDLTPKPKNIILDHGEYNSMMAFKRLIDNPKEKERLGIKGANIYTPAILDSLRVV

SEQ ID NO: 24422 - protein, 85 aa, unidentified
  REGION 1..85: note = Description of Unknown:cds_NZ_WFIY01000004.1_cds_972 target sequence
EIAVYVKNPNFLTNGGDIIKKIAKEIKKRIVVKADKSVRKDEKEAIEIIKNIVPKEAEITDIKFDEDLGEVLIKAKKPGLVIGKG

SEQ ID NO: 24423 - protein, 85 aa, unidentified
  REGION 1..85: note = Description of Unknown:cds_NZ_WFIY01000004.1_cds_972 target sequence
GLIQQRIFLETFWKPEIIREPPIKSKTIENVITHIYNETEYRAKILKTFGDRIHREVLFKDRYVRITALGAFQEIGRSAILVETP

SEQ ID NO: 24424 - protein, 85 aa, unidentified
  REGION 1..85: note = Description of Unknown:cds_NZ_WFIY01000004.1_cds_972 target sequence
ESRVLLDTGVNPSVNFGERMFPKLDIDQLRLEDLDAVVITHAHLDHCGMVPYLFKYGYEGPVYTTPPTRDVMALMQLDLLDVAEK

SEQ ID NO: 24425 - protein, 85 aa, unidentified
  REGION 1..85: note = Description of Unknown:cds_NZ_WFIY01000004.1_cds_972 target sequence
DGRPLPYSAKEVRKELLHTITLDYEEVTDIAPDIRLTFYNAGHILGSAMVHLHIGEGTHNIVYTGDFKYAKTRLLDRATSEFPKV

SEQ ID NO: 24426 - protein, 85 aa, unidentified
  REGION 1..85: note = Description of Unknown:cds_NZ_WFIY01000004.1_cds_972 target sequence
DTLIMETTYGAQEQTSREESEKQLIDIINNTINRGGKVLIPVLAVGRGQEMMLVINNALKNKLIPEVPVYVTGLFDEVTAIHTAY

SEQ ID NO: 24427 - protein, 85 aa, unidentified
  REGION 1..85: note = Description of Unknown:cds_NZ_WFIY01000004.1_cds_972 target sequence
PEWLSREVRDAILYKDENPFVSDQFKRIEGYREDIAQGEPSIILATSGMLNGGPAVEFFKAMAPDPKNSIVFVSYQAEGTLGRKV

SEQ ID NO: 24428 - protein, 85 aa, unidentified
  REGION 1..85: note = Description of Unknown:cds_NZ_WFIY01000004.1_cds_972 target sequence
RDGAKEVQIIGRDGRVENIQINMEVKVVDGFSGHSDRRQLLKFLHDLTPKPKNIILDHGEYNSMMAFKRLIDNPKEKERLGIKGA

SEQ ID NO: 24429 - protein, 85 aa, unidentified
  REGION 1..85: note = Description of Unknown:hvTR_Q98262 target sequence
NLGIVSLFREHVDSIPNILPHQLATLDFLLRSILDENNSVLLFHIMGSGKTIIALLFALIVSKFKKVYILVPNINILKIFTYNMG

SEQ ID NO: 24430 - protein, 85 aa, unidentified
  REGION 1..85: note = Description of Unknown:hvTR_Q98262 target sequence
IAVNLINSDYVLENIHIYSTTSFYSLNYNDNVINYNGLAKYNNAIFIIDEAHNIFGNNTGELMTVIKNKNKVPFLLLSGSPITNT

SEQ ID NO: 24431 - protein, 85 aa, unidentified
  REGION 1..85: note = Description of Unknown:hvTR_Q98262 target sequence
PITLSNIISIMSDEGINFSDIIIQGKKVFQILLNENGVSVLKRILRDKISYYELQDTELPSIVFHGRRFLDTRIVYCHMSKLQER

SEQ ID NO: 24432 - protein, 85 aa, unidentified
  REGION 1..85: note = Description of Unknown:hvTR_Q98262 target sequence
DYINVRKLCNNEMFEKNMNNVSLAVLGPLNLINNLDILFQDQDKELYPNLKISNGVLYGDELVSLNISSKFKYFIARIQSLTGKH

SEQ ID NO: 24433 - protein, 85 aa, unidentified
  REGION 1..85: note = Description of Unknown:hvTR_Q98262 target sequence
FIYFSNSTYGGLIIKYIMLSNGYSEHNGSQGTNPKTIGGRLKTFAIVTSKMKSSLEELLAVYNSPANNDGSRIMFLFSSNIMSES

SEQ ID NO: 24434 - protein, 85 aa, unidentified
  REGION 1..85: note = Description of Unknown:hvTR_Q98262 target sequence
YTLKEVMHIWFMTIPDTFSQYNQILGRSIRKFSYTNIAEPVNVYLLAAIYADFDDDITSLDNYSIDEINVLPFDIKKLLYLKFKT

SEQ ID NO: 24435 - protein, 85 aa, unidentified
  REGION 1..85: note = Description of Unknown:hvTR_Q98262 target sequence
KETKRIYSILKDISVNYTLPPHPQIVDVVLGELTRQFFYHHSRVRADDPELFAAIDRVLCSPDSTRRYLDEITRGHFFVCNRVFE

SEQ ID NO: 24436 - protein, 84 aa, unidentified
  REGION 1..84: note = Description of Unknown:hvTR_Q98262 target sequence
HSRVRADDPELFAAIDRVLCSPDSTRRYLDEITRGHFFVCNRVFEKALLYRHGEDIIVVPFKLSHDQFLWAINFRKEYNVGAPL

SEQ ID NO: 24437 - protein, 85 aa, unidentified
  REGION 1..85: note = Description of Unknown:hvTR_Q98262 target sequence
FLLRSILDENNSVLLFHIMGSGKTIIALLFALIVSKFKKVYILVPNINILKIFTYNMGIAVNLINSDYVLENIHIYSTTSFYSLN

SEQ ID NO: 24438 - protein, 85 aa, unidentified
  REGION 1..85: note = Description of Unknown:hvTR_Q98262 target sequence
YNDNVINYNGLAKYNNAIFIIDEAHNIFGNNTGELMTVIKNKNKVPFLLLSGSPITNTPITLSNIISIMSDEGINFSDIIIQGKK

SEQ ID NO: 24439 - protein, 85 aa, unidentified
  REGION 1..85: note = Description of Unknown:hvTR_Q98262 target sequence
VFQILLNENGVSVLKRILRDKISYYELQDTELPSIVFHGRRFLDTRIVYCHMSKLQERDYINVRKLCNNEMFEKNMNNVSLAVLG

SEQ ID NO: 24440 - protein, 85 aa, unidentified
  REGION 1..85: note = Description of Unknown:hvTR_Q98262 target sequence
PLNLINNLDILFQDQDKELYPNLKISNGVLYGDELVSLNISSKFKYFIARIQSLTGKHFIYFSNSTYGGLIIKYIMLSNGYSEHN

SEQ ID NO: 24441 - protein, 85 aa, unidentified
  REGION 1..85: note = Description of Unknown:hvTR_Q98262 target sequence
GSQGTNPKTIGGRLKTFAIVTSKMKSSLEELLAVYNSPANNDGSRIMFLFSSNIMSESYTLKEVMHIWFMTIPDTFSQYNQILGR

SEQ ID NO: 24442 - protein, 85 aa, unidentified
  REGION 1..85: note = Description of Unknown:hvTR_Q98262 target sequence
SIRKFSYTNIAEPVNVYLLAAIYADFDDDITSLDNYSIDEINVLPFDIKKLLYLKFKTKETKRIYSILKDISVNYTLPPHPQIVD

SEQ ID NO: 24443 - protein, 85 aa, unidentified
  REGION 1..85: note = Description of Unknown:hvTR_Q98262 target sequence
VVLGELTRQFFYHHSRVRADDPELFAAIDRVLCSPDSTRRYLDEITRGHFFVCNRVFEKALLYRHGEDIIVVPFKLSHDQFLWAI

SEQ ID NO: 24444 - protein, 85 aa, unidentified
  REGION 1..85: note = Description of Unknown:hvTR_Q6TVQ1 target sequence
NSDVIKLFAGHDESVPGILPHQLATVDFLIRRVLDDNVSVLLFHIMGSGKTVIALLFAMVASRTKKVYILVPNVNVMNIFNYSMV

SEQ ID NO: 24445 - protein, 85 aa, unidentified
  REGION 1..85: note = Description of Unknown:hvTR_Q6TVQ1 target sequence
MVANLFNAPFVAENIFVYSTTSFYSLNCNDGVVNYNGLSKYENSVFVVDEAHNIFGNNTGELMMVIKNKTRVPFLLLSASPITNT

SEQ ID NO: 24446 - protein, 85 aa, unidentified
  REGION 1..85: note = Description of Unknown:hvTR_Q6TVQ1 target sequence
PLTLSSIISLMSEKDVDVGDIVVQGKKVFQILLNEHGVRVIREVLKGRISYYEMPDTDMPEVLYHGRRFLDTRVVYCRMSRRQED

SEQ ID NO: 24447 - protein, 85 aa, unidentified
  REGION 1..85: note = Description of Unknown:hvTR_Q6TVQ1 target sequence
DYLTVRRLCNNEMFEKNMNNVSMAVLGPLNLVNNLDVLFQAQDKDLYPNLRISNGVLYGNELTKLDISCKFKFFISKVGAMRGKH

SEQ ID NO: 24448 - protein, 85 aa, unidentified
  REGION 1..85: note = Description of Unknown:hvTR_Q6TVQ1 target sequence
FIYFSNSTYGSLVIRNVMLSNGYSEFGGSQSNNPHTTPDGRAKTFAIVTSKMKASLEELLEVYNSAENNDGGELMFLFSSNIMSE

SEQ ID NO: 24449 - protein, 85 aa, unidentified
  REGION 1..85: note = Description of Unknown:hvTR_Q6TVQ1 target sequence
SYTLKEVRHIWFMTIPDTFSQFNQILGRAVRKFSYADVAAPVNVYLMAAVYSDFDEDIVSLEDYSVEDINALPFDVKKLFYLKFK

SEQ ID NO: 24450 - protein, 85 aa, unidentified
  REGION 1..85: note = Description of Unknown:hvTR_Q6TVQ1 target sequence
AKETNRVYAILQELSDAYSARPHPQLVDVVLGEIVRQFFARHCRVPAEDAALVAAVEAVLGTREAAAEYIRAIVDGHFFVTNKTF

SEQ ID NO: 24451 - protein, 84 aa, unidentified
  REGION 1..84: note = Description of Unknown:hvTR_Q6TVQ1 target sequence
RHCRVPAEDAALVAAVEAVLGTREAAAEYIRAIVDGHFFVTNKTFGKCLLFRHERDIVTVPFELEHDPFAWAINFRKEVSVVNI

SEQ ID NO: 24452 - protein, 85 aa, unidentified
  REGION 1..85: note = Description of Unknown:hvTR_Q6TVQ1 target sequence
FLIRRVLDDNVSVLLFHIMGSGKTVIALLFAMVASRTKKVYILVPNVNVMNIFNYSMVMVANLFNAPFVAENIFVYSTTSFYSLN

SEQ ID NO: 24453 - protein, 85 aa, unidentified
  REGION 1..85: note = Description of Unknown:hvTR_Q6TVQ1 target sequence
CNDGVVNYNGLSKYENSVFVVDEAHNIFGNNTGELMMVIKNKTRVPFLLLSASPITNTPLTLSSIISLMSEKDVDVGDIVVQGKK

SEQ ID NO: 24454 - protein, 85 aa, unidentified
  REGION 1..85: note = Description of Unknown:hvTR_Q6TVQ1 target sequence
VFQILLNEHGVRVIREVLKGRISYYEMPDTDMPEVLYHGRRFLDTRVVYCRMSRRQEDDYLTVRRLCNNEMFEKNMNNVSMAVLG

SEQ ID NO: 24455 - protein, 85 aa, unidentified
  REGION 1..85: note = Description of Unknown:hvTR_Q6TVQ1 target sequence
PLNLVNNLDVLFQAQDKDLYPNLRISNGVLYGNELTKLDISCKFKFFISKVGAMRGKHFIYFSNSTYGSLVIRNVMLSNGYSEFG

SEQ ID NO: 24456 - protein, 85 aa, unidentified
  REGION 1..85: note = Description of Unknown:hvTR_Q6TVQ1 target sequence
GSQSNNPHTTPDGRAKTFAIVTSKMKASLEELLEVYNSAENNDGGELMFLFSSNIMSESYTLKEVRHIWFMTIPDTFSQFNQILG

SEQ ID NO: 24457 - protein, 85 aa, unidentified
  REGION 1..85: note = Description of Unknown:hvTR_Q6TVQ1 target sequence
RAVRKFSYADVAAPVNVYLMAAVYSDFDEDIVSLEDYSVEDINALPFDVKKLFYLKFKAKETNRVYAILQELSDAYSARPHPQLV

SEQ ID NO: 24458 - protein, 85 aa, unidentified
  REGION 1..85: note = Description of Unknown:hvTR_Q6TVQ1 target sequence
DVVLGEIVRQFFARHCRVPAEDAALVAAVEAVLGTREAAAEYIRAIVDGHFFVTNKTFGKCLLFRHERDIVTVPFELEHDPFAWA

SEQ ID NO: 24459 - protein, 85 aa, unidentified; identical to SEQ ID NO: 24444
  REGION 1..85: note = Description of Unknown:hvTR_D3IZL6 target sequence

SEQ ID NO: 24460 - protein, 85 aa, unidentified
  REGION 1..85: note = Description of Unknown:hvTR_D3IZL6 target sequence
MVANLFNAPFVAENIFVYSTTSFYSLNCNDGVINYNGLGKYENSVFVVDEAHNIFGNNTGELMMVIKNKTRVPFLLLSASPITNT

SEQ ID NO: 24461 - protein, 85 aa, unidentified
  REGION 1..85: note = Description of Unknown:hvTR_D3IZL6 target sequence
PLTLSSIISLMSEKDVDVGDIVVQGKKVFQILLNEHGVRVIREVLKGRISYYEMPDTDMPEVLYHGRRFLDTRVVYCRMSRLQET

SEQ ID NO: 24462 - protein, 85 aa, unidentified
  REGION 1..85: note = Description of Unknown:hvTR_D3IZL6 target sequence
DYLTVRRLCNNEMFEKNMNNVSMAVLGPLNLVNNLDVLFQAQDKDLYPNLRISNGVLYGNELTKLDISCKFKFFISKAGAMRGKH

SEQ ID NO: 24463 - protein, 85 aa, unidentified
  REGION 1..85: note = Description of Unknown:hvTR_D3IZL6 target sequence
FIYFSNSTYGSLVIRNVMLSNGYSEFGGSQSNNPHTLADGRPKTFAIVTSKMKASLEELLDVYNSAENDDGGELMFLFSSNIMSE

SEQ ID NO: 24464 - protein, 85 aa, unidentified
  REGION 1..85: note = Description of Unknown:hvTR_D3IZL6 target sequence
SYTLKEVRHIWFMTIPDTFAQFNQILGRAVRKFSYADVSAPVNVYLMAAVYSDFDEDIVSLEDYSVEDINALPFDVKKLFYLKFK

SEQ ID NO: 24465 - protein, 85 aa, unidentified
  REGION 1..85: note = Description of Unknown:hvTR_D3IZL6 target sequence
AKETNRVYAILQELSDAYSARPHPQLVDVVLGEIVRQFFAKHCRVPAEDAALVGAVKAVLGTREAALEYIRAVVDGHFFVTNKTF

SEQ ID NO: 24466 - protein, 84 aa, unidentified
  REGION 1..84: note = Description of Unknown:hvTR_D3IZL6 target sequence
KHCRVPAEDAALVGAVKAVLGTREAALEYIRAVVDGHFFVTNKTFGKCLLFRHERDIVTVPFELEHDPFAWAINFRKEVSVVNI

SEQ ID NO: 24467 - protein, 85 aa, unidentified; identical to SEQ ID NO: 24452
  REGION 1..85: note = Description of Unknown:hvTR_D3IZL6 target sequence

SEQ ID NO: 24468 - protein, 85 aa, unidentified
  REGION 1..85: note = Description of Unknown:hvTR_D3IZL6 target sequence
CNDGVINYNGLGKYENSVFVVDEAHNIFGNNTGELMMVIKNKTRVPFLLLSASPITNTPLTLSSIISLMSEKDVDVGDIVVQGKK

SEQ ID NO: 24469 - protein, 85 aa, unidentified
  REGION 1..85: note = Description of Unknown:hvTR_D3IZL6 target sequence
VFQILLNEHGVRVIREVLKGRISYYEMPDTDMPEVLYHGRRFLDTRVVYCRMSRLQETDYLTVRRLCNNEMFEKNMNNVSMAVLG

SEQ ID NO: 24470 - protein, 85 aa, unidentified
  REGION 1..85: note = Description of Unknown:hvTR_D3IZL6 target sequence
PLNLVNNLDVLFQAQDKDLYPNLRISNGVLYGNELTKLDISCKFKFFISKAGAMRGKHFIYFSNSTYGSLVIRNVMLSNGYSEFG

SEQ ID NO: 24471 - protein, 85 aa, unidentified
  REGION 1..85: note = Description of Unknown:hvTR_D3IZL6 target sequence
GSQSNNPHTLADGRPKTFAIVTSKMKASLEELLDVYNSAENDDGGELMFLFSSNIMSESYTLKEVRHIWFMTIPDTFAQFNQILG

SEQ ID NO: 24472 - protein, 85 aa, unidentified
  REGION 1..85: note = Description of Unknown:hvTR_D3IZL6 target sequence
RAVRKFSYADVSAPVNVYLMAAVYSDFDEDIVSLEDYSVEDINALPFDVKKLFYLKFKAKETNRVYAILQELSDAYSARPHPQLV

SEQ ID NO: 24473 - protein, 85 aa, unidentified
  REGION 1..85: note = Description of Unknown:hvTR_D3IZL6 target sequence
DVVLGEIVRQFFAKHCRVPAEDAALVGAVKAVLGTREAALEYIRAVVDGHFFVTNKTFGKCLLFRHERDIVTVPFELEHDPFAWA

SEQ ID NO: 24474 - protein, 85 aa, unidentified
  REGION 1..85: note = Description of Unknown:hvTR_A7XCL0 target sequence
NLEIVDLFNGHVNNIPNILPHQLATLDYLVRSIIDENKSVLLFHIMGSGKTIIALLFALVASRFKKVYILVPNINILKIFNYSMD

SEQ ID NO: 24475 - protein, 85 aa, unidentified
  REGION 1..85: note = Description of Unknown:hvTR_A7XCL0 target sequence
VAVNLFNSEYVLENIFIHSTTSFYSLNYNDNVINYNGLSRYNNAIFIIDEAHNIFGNNTGELMTVIKNKNKIPFLLLSGSPITNT

SEQ ID NO: 24476 - protein, 85 aa, unidentified
  REGION 1..85: note = Description of Unknown:hvTR_A7XCL0 target sequence
PITLSNIISLMSDENINFGDIIIQGKKVFQILLNENGVKVLKSILKGRISYYEMPSTDLPKIHYHGKKFLDTKVVYCHMSKLQEK

SEQ ID NO: 24477 - protein, 85 aa, unidentified
  REGION 1..85: note = Description of Unknown:hvTR_A7XCL0 target sequence
DYNNVRKLCNNEMFEKNMNNVSLAVLGQLNFINNLDILFQEQDKELYPNLKISNGILYGDELTTLNISSKFKYFIGKITSLTGKQ

SEQ ID NO: 24478 - protein, 85 aa, unidentified
  REGION 1..85: note = Description of Unknown:hvTR_A7XCL0 target sequence
FIYFSNSTYGGLIIKYIMLSNGYSEYNGSQGTNPKIINGKPKTFAIVTSKMKSSLEDLLNVYNSQLNEDGSQIMFLFSSNIMSES

SEQ ID NO: 24479 - protein, 85 aa, unidentified
  REGION 1..85: note = Description of Unknown:hvTR_A7XCL0 target sequence
YTLKEVRNIWFMTIPDTFSQYNQILGRSIRKFSYLDINKPVNVYLLATVYSDFNDDITSLEDYSLDEINTLPFDIKKLLYLKFKT

SEQ ID NO: 24480 - protein, 85 aa, unidentified
  REGION 1..85: note = Description of Unknown:hvTR_A7XCL0 target sequence
KETNRIYSILQSISDTYRMPPHPYIVEIVLGEIVRQFFYHHSRISFDSKELINAIQLVLPNIDLAKKYINEIVNGHFFVSNKIFD

SEQ ID NO: 24481 - protein, 84 aa, unidentified
  REGION 1..84: note = Description of Unknown:hvTR_A7XCL0 target sequence
HSRISFDSKELINAIQLVLPNIDLAKKYINEIVNGHFFVSNKIFDKSLLYKHNDDIVTVPFKLSHEPFVWGVNFRKEYNVISSP

SEQ ID NO: 24482 - protein, 85 aa, unidentified
  REGION 1..85: note = Description of Unknown:hvTR_A7XCL0 target sequence
YLVRSIIDENKSVLLFHIMGSGKTIIALLFALVASRFKKVYILVPNINILKIFNYSMDVAVNLFNSEYVLENIFIHSTTSFYSLN

SEQ ID NO: 24483 - protein, 85 aa, unidentified
  REGION 1..85: note = Description of Unknown:hvTR_A7XCL0 target sequence
YNDNVINYNGLSRYNNAIFIIDEAHNIFGNNTGELMTVIKNKNKIPFLLLSGSPITNTPITLSNIISLMSDENINFGDIIIQGKK

SEQ ID NO: 24484 - protein, 85 aa, unidentified
  REGION 1..85: note = Description of Unknown:hvTR_A7XCL0 target sequence
VFQILLNENGVKVLKSILKGRISYYEMPSTDLPKIHYHGKKFLDTKVVYCHMSKLQEKDYNNVRKLCNNEMFEKNMNNVSLAVLG

SEQ ID NO: 24485 - protein, 85 aa, unidentified
  REGION 1..85: note = Description of Unknown:hvTR_A7XCL0 target sequence
QLNFINNLDILFQEQDKELYPNLKISNGILYGDELTTLNISSKFKYFIGKITSLTGKQFIYFSNSTYGGLIIKYIMLSNGYSEYN

SEQ ID NO: 24486 - protein, 85 aa, unidentified
  REGION 1..85: note = Description of Unknown:hvTR_A7XCL0 target sequence
GSQGTNPKIINGKPKTFAIVTSKMKSSLEDLLNVYNSQLNEDGSQIMFLFSSNIMSESYTLKEVRNIWFMTIPDTFSQYNQILGR

SEQ ID NO: 24487 - protein, 85 aa, unidentified
  REGION 1..85: note = Description of Unknown:hvTR_A7XCL0 target sequence
SIRKFSYLDINKPVNVYLLATVYSDFNDDITSLEDYSLDEINTLPFDIKKLLYLKFKTKETNRIYSILQSISDTYRMPPHPYIVE

SEQ ID NO: 24488 - protein, 85 aa, unidentified
  REGION 1..85: note = Description of Unknown:hvTR_A7XCL0 target sequence
IVLGEIVRQFFYHHSRISFDSKELINAIQLVLPNIDLAKKYINEIVNGHFFVSNKIFDKSLLYKHNDDIVTVPFKLSHEPFVWGV

SEQ ID NO: 24489 - protein, 85 aa, unidentified
  REGION 1..85: note = Description of Unknown:hvTR_Q9QB97 target sequence
NLEIVDLFNGHVNSIPNILPHQLATLDYLVRSIIDENKSVLLFHIMGSGKTIIALLFALVASRFKKVYILVPNINILKIFNYSMD

SEQ ID NO: 24490 - protein, 85 aa, unidentified
  REGION 1..85: note = Description of Unknown:hvTR_Q9QB97 target sequence
VAINLFNSEYILENIFIHSTTSFYSLNYNDNVINYNGLSRYNNAIFIIDEAHNIFGNNTGELMTVIKNKNKIPFLLLSGSPITNT

SEQ ID NO: 24491 - protein, 85 aa, unidentified
  REGION 1..85: note = Description of Unknown:hvTR_Q9QB97 target sequence
PITLSNIISLMSDENINFGDIIIQGKKVFQILLNENGVNVLKNILKGRISYYEMPSTDLPKVQYHGKKFLDTRVVYCHMSKLQEK

SEQ ID NO: 24492 - protein, 85 aa, unidentified; identical to SEQ ID NO: 24477
  REGION 1..85: note = Description of Unknown:hvTR_Q9QB97 target sequence

SEQ ID NO: 24493 - protein, 85 aa, unidentified
  REGION 1..85: note = Description of Unknown:hvTR_Q9QB97 target sequence
FIYFSNSTYGGLIIKYIMLSNGYSEYNGSQGTNPKLINGKPKTFAIVTSKMKSSLEDLLNVYNSQLNKDGSQIMFLFSSNIMSES

SEQ ID NO: 24494 - protein, 85 aa, unidentified
  REGION 1..85: note = Description of Unknown:hvTR_Q9QB97 target sequence
YTLKEVRNIWFMTIPDTFSQYNQILGRSIRKFSYFDISKPVNVYLLATVYADFDDDITSLEDYSLDEINTLPFDIKKLLYLKFKT

SEQ ID NO: 24495 - protein, 85 aa, unidentified
  REGION 1..85: note = Description of Unknown:hvTR_Q9QB97 target sequence
KETNRIYSILQNISDTYRMPPHPYIVELVLGEIVRQFFYHHSRISFDSKELINAIQLVLPNIDMAKKYINEVVNGHFFVSNKVFD

SEQ ID NO: 24496 - protein, 84 aa, unidentified
  REGION 1..84: note = Description of Unknown:hvTR_Q9QB97 target sequence
HSRISFDSKELINAIQLVLPNIDMAKKYINEVVNGHFFVSNKVFDKSLLYRYKNDIITVPFKLSHERFVWGVNFRKEYNVVSSP

SEQ ID NO: 24497 - protein, 85 aa, unidentified
  REGION 1..85: note = Description of Unknown:hvTR_Q9QB97 target sequence
YLVRSIIDENKSVLLFHIMGSGKTIIALLFALVASRFKKVYILVPNINILKIFNYSMDVAINLFNSEYILENIFIHSTTSFYSLN

SEQ ID NO: 24498 - protein, 85 aa, unidentified; identical to SEQ ID NO: 24483
  REGION 1..85: note = Description of Unknown:hvTR_Q9QB97 target sequence

SEQ ID NO: 24499 - protein, 85 aa, unidentified
  REGION 1..85: note = Description of Unknown:hvTR_Q9QB97 target sequence
VFQILLNENGVNVLKNILKGRISYYEMPSTDLPKVQYHGKKFLDTRVVYCHMSKLQEKDYNNVRKLCNNEMFEKNMNNVSLAVLG

SEQ ID NO: 24500 - protein, 85 aa, unidentified; identical to SEQ ID NO: 24485
  REGION 1..85: note = Description of Unknown:hvTR_Q9QB97 target sequence

SEQ ID NO: 24501 - protein, 85 aa, unidentified
  REGION 1..85: note = Description of Unknown:hvTR_Q9QB97 target sequence
GSQGTNPKLINGKPKTFAIVTSKMKSSLEDLLNVYNSQLNKDGSQIMFLFSSNIMSESYTLKEVRNIWFMTIPDTFSQYNQILGR

SEQ ID NO: 24502 - protein, 85 aa, unidentified
  REGION 1..85: note = Description of Unknown:hvTR_Q9QB97 target sequence
SIRKFSYFDISKPVNVYLLATVYADFDDDITSLEDYSLDEINTLPFDIKKLLYLKFKTKETNRIYSILQNISDTYRMPPHPYIVE

SEQ ID NO: 24503 - protein, 85 aa, unidentified
  REGION 1..85: note = Description of Unknown:hvTR_Q9QB97 target sequence
LVLGEIVRQFFYHHSRISFDSKELINAIQLVLPNIDMAKKYINEVVNGHFFVSNKVFDKSLLYRYKNDIITVPFKLSHERFVWGV

SEQ ID NO: 24504 - protein, 85 aa, unidentified
  REGION 1..85: note = Description of Unknown:hvTR_Q9DHM9 target sequence
NLEIVDLFNGHINNIPNILPHQLATLDYLVRSIIDENKSVLLFHIMGSGKTIIALLFALVASRFKKVYILVPNINILKIFNYSMD

SEQ ID NO: 24505 - protein, 85 aa, unidentified; identical to SEQ ID NO: 24476
  REGION 1..85: note = Description of Unknown:hvTR_Q9DHM9 target sequence

SEQ ID NO: 24506 - protein, 85 aa, unidentified; identical to SEQ ID NO: 24477
  REGION 1..85: note = Description of Unknown:hvTR_Q9DHM9 target sequence

SEQ ID NO: 24507 - protein, 85 aa, unidentified; identical to SEQ ID NO: 24478
  REGION 1..85: note = Description of Unknown:hvTR_Q9DHM9 target sequence

SEQ ID NO: 24508 - protein, 85 aa, unidentified; identical to SEQ ID NO: 24479
  REGION 1..85: note = Description of Unknown:hvTR_Q9DHM9 target sequence

SEQ ID NO: 24509 - protein, 85 aa, unidentified
  REGION 1..85: note = Description of Unknown:hvTR_Q9DHM9 target sequence
KETNRIYSILQSISDTYRMPPHPYIVEIVLGEIVRQFFYHHSRISFNSKELINAIQLVLPNIDLAKKYINEIVNGHFFVSNKIFD

SEQ ID NO: 24510 - protein, 84 aa, unidentified
  REGION 1..84: note = Description of Unknown:hvTR_Q9DHM9 target sequence
HSRISFNSKELINAIQLVLPNIDLAKKYINEIVNGHFFVSNKIFDKSLLYKHNDDIVTVPFKLSHEPFVWGVNFRKEYNVISSP

SEQ ID NO: 24511 - protein, 85 aa, unidentified; identical to SEQ ID NO: 24482
  REGION 1..85: note = Description of Unknown:hvTR_Q9DHM9 target sequence

SEQ ID NO: 24512 - protein, 85 aa, unidentified; identical to SEQ ID NO: 24483
  REGION 1..85: note = Description of Unknown:hvTR_Q9DHM9 target sequence

SEQ ID NO: 24513 - protein, 85 aa, unidentified; identical to SEQ ID NO: 24484
  REGION 1..85: note = Description of Unknown:hvTR_Q9DHM9 target sequence

SEQ ID NO: 24514 - protein, 85 aa, unidentified; identical to SEQ ID NO: 24485
  REGION 1..85: note = Description of Unknown:hvTR_Q9DHM9 target sequence

SEQ ID NO: 24515 - protein, 85 aa, unidentified; identical to SEQ ID NO: 24486
  REGION 1..85: note = Description of Unknown:hvTR_Q9DHM9 target sequence

SEQ ID NO: 24516 - protein, 85 aa, unidentified; identical to SEQ ID NO: 24487
  REGION 1..85: note = Description of Unknown:hvTR_Q9DHM9 target sequence

SEQ ID NO: 24517 - protein, 85 aa, unidentified
  REGION 1..85: note = Description of Unknown:hvTR_Q9DHM9 target sequence
IVLGEIVRQFFYHHSRISFNSKELINAIQLVLPNIDLAKKYINEIVNGHFFVSNKIFDKSLLYKHNDDIVTVPFKLSHEPFVWGV

SEQ ID NO: 24518 - protein, 85 aa, unidentified
  REGION 1..85: note = Description of Unknown:cds_NZ_WFIY01000004.1_cds_WP_155862463.1_216 target sequence
IDYNKLGLKVGLEIHQQLDTSTKLFCNCPTILSEEYKNTLERYLRPVFSETGEIDVAALFEWEKNKKYVYRIPQQATCLVECDEE

SEQ ID NO: 24519 - protein, 85 aa, unidentified
  REGION 1..85: note = Description of Unknown:cds_NZ_WFIY01000004.1_cds_WP_155862463.1_216 target sequence
PPHRMSEEALLIGLAMTLAFHGTPVDEVYVMRKVVIDGSNTSGFQRTSIVGLGGYIEDEDGKVSIQTIAIEEDAARKIEDTKDSV

SEQ ID NO: 24520 - protein, 85 aa, unidentified
  REGION 1..85: note = Description of Unknown:cds_NZ_WFIY01000004.1_cds_WP_155862463.1_216 target sequence
IYNLDRLGIPLIEISTGPDIHSPEQAKRVALKIGQMLRLTGRVKRGLGTIRQDLNVSITGGVKTEIKGVQELDLIPKLIEYEAMR

SEQ ID NO: 24521 - protein, 85 aa, unidentified
  REGION 1..85: note = Description of Unknown:cds_NZ_WFIY01000004.1_cds_WP_155862463.1_216 target sequence
QLKLLEIKDELIKRGATKENISSGYVVKDLTELFKETKSNVILRELKKGGKVYGIKVPHFKGIFGIELMPNRRFGTEVSDYVKVL

SEQ ID NO: 24522 - protein, 85 aa, unidentified
  REGION 1..85: note = Description of Unknown:cds_NZ_WFIY01000004.1_cds_WP_155862463.1_216 target sequence
AGLGGIFHIDELPNYGISQEEVNKVKDELNVKDDDGFILIVGEKSKLDLAVQVIKDRILYALEGVPKETRGANEDGTTRFLRPQP

SEQ ID NO: 24523 - protein, 85 aa, unidentified
  REGION 1..85: note = Description of Unknown:cds_NZ_WFIY01000004.1_cds_WP_155862463.1_216 target sequence
GAARMYPETDIPPIRITEDLIKKAKEIIPPTPEEKLKSLISLGLSEELAKQVLNSPRLDSFDYFVKKYPKVSPVVIATTLENTIK

SEQ ID NO: 24524 - protein, 85 aa, unidentified
  REGION 1..85: note = Description of Unknown:cds_NZ_WFIY01000004.1_cds_WP_155862463.1_216 target sequence
SLKSQGGDPEAITDYVLDSVFDALNSGKISKDSIPEILLKYSKEKKEGENVNIDKIISSFSSLSEEELEKIVKETIETSKEEITK

SEQ ID NO: 24525 - protein, 84 aa, unidentified
  REGION 1..84: note = Description of Unknown:cds_NZ_WFIY01000004.1_cds_WP_155862463.1_216 target sequence
YSKEKKEGENVNIDKIISSFSSLSEEELEKIVKETIETSKEEITKKRDKAFNILMGKVMSKVRGRADGKRVADLIRRELEKING

SEQ ID NO: 24526 - protein, 85 aa, unidentified
  REGION 1..85: note = Description of Unknown:cds_NZ_WFIY01000004.1_cds_WP_155862463.1_216 target sequence
CPTILSEEYKNTLERYLRPVFSETGEIDVAALFEWEKNKKYVYRIPQQATCLVECDEEPPHRMSEEALLIGLAMTLAFHGTPVDE

SEQ ID NO: 24527 - protein, 85 aa, unidentified
  REGION 1..85: note = Description of Unknown:cds_NZ_WFIY01000004.1_cds_WP_155862463.1_216 target sequence
VYVMRKVVIDGSNTSGFQRTSIVGLGGYIEDEDGKVSIQTIAIEEDAARKIEDTKDSVIYNLDRLGIPLIEISTGPDIHSPEQAK

SEQ ID NO: 24528 - protein, 85 aa, unidentified
  REGION 1..85: note = Description of Unknown:cds_NZ_WFIY01000004.1_cds_WP_155862463.1_216 target sequence
RVALKIGQMLRLTGRVKRGLGTIRQDLNVSITGGVKTEIKGVQELDLIPKLIEYEAMRQLKLLEIKDELIKRGATKENISSGYVV

SEQ ID NO: 24529 - protein, 85 aa, unidentified
  REGION 1..85: note = Description of Unknown:cds_NZ_WFIY01000004.1_cds_WP_155862463.1_216 target sequence
KDLTELFKETKSNVILRELKKGGKVYGIKVPHFKGIFGIELMPNRRFGTEVSDYVKVLAGLGGIFHIDELPNYGISQEEVNKVKD

SEQ ID NO: 24530 - protein, 85 aa, unidentified
  REGION 1..85: note = Description of Unknown:cds_NZ_WFIY01000004.1_cds_WP_155862463.1_216 target sequence
ELNVKDDDGFILIVGEKSKLDLAVQVIKDRILYALEGVPKETRGANEDGTTRFLRPQPGAARMYPETDIPPIRITEDLIKKAKEI

SEQ ID NO: 24531 - protein, 85 aa, unidentified
  REGION 1..85: note = Description of Unknown:cds_NZ_WFIY01000004.1_cds_WP_155862463.1_216 target sequence
IPPTPEEKLKSLISLGLSEELAKQVLNSPRLDSFDYFVKKYPKVSPVVIATTLENTIKSLKSQGGDPEAITDYVLDSVFDALNSG

SEQ ID NO: 24532 - protein, 85 aa, unidentified
  REGION 1..85: note = Description of Unknown:cds_NZ_WFIY01000004.1_cds_WP_155862463.1_216 target sequence
KISKDSIPEILLKYSKEKKEGENVNIDKIISSFSSLSEEELEKIVKETIETSKEEITKKRDKAFNILMGKVMSKVRGRADGKRVA

SEQ ID NO: 24533 - protein, 85 aa, unidentified
  REGION 1..85: note = Description of Unknown:cds_NC_035460.1_cds_YP_009408039.1_88 target sequence
NEAIIDLFKDHVNKIPNILPHQLATLDYLVRSIIDENKSVLLFHIMGSGKTIIALLFALVASKYKKVYILVPNINILKIFNYSMG

SEQ ID NO: 24534 - protein, 85 aa, unidentified
  REGION 1..85: note = Description of Unknown:cds_NC_035460.1_cds_YP_009408039.1_88 target sequence
VVINLFNADYIAENIFIYSTTSFYSLNYNDNVINYNGLSRYNNAIFIIDEAHNIFGNNTGELMTVIKNKNKIPFLLLSGSPITNT

SEQ ID NO: 24535 - protein, 85 aa, unidentified
  REGION 1..85: note = Description of Unknown:cds_NC_035460.1_cds_YP_009408039.1_88 target sequence
PITLSNIISLMSDEDINFGDIIIQGKKVFQILLNEHGVNVLKNILKGRISYYEMPDSDLPTIQYHGKDFLDTKVVYCHMSRLQEK

SEQ ID NO: 24536 - protein, 85 aa, unidentified
  REGION 1..85: note = Description of Unknown:cds_NC_035460.1_cds_YP_009408039.1_88 target sequence
DYINVRKMCNNEMFEKNMNNVSLAVLGQLNFINNLDILFQEQDKELYPNLKISNGVLYGDELVNLNISSKFKFFINKITSLKGKH

SEQ ID NO: 24537 - protein, 85 aa, unidentified
  REGION 1..85: note = Description of Unknown:cds_NC_035460.1_cds_YP_009408039.1_88 target sequence
FIYFSNSTYGGLVIKYIMLSNGYSEYNGSQGTNPKLINSKPKNFAIVTSKMKSSLEDLLTIYNSVENDNGEELMFLFSSNIMSES

SEQ ID NO: 24538 - protein, 85 aa, unidentified
  REGION 1..85: note = Description of Unknown:cds_NC_035460.1_cds_YP_009408039.1_88 target sequence
YTLKEVRNIWFMTIPDTFSQYNQILGRSIRKFSYADISQPVNVYLLAAVYSDFNDNITSLDDYSLDEINILPFDIKKLLYLKFKT

SEQ ID NO: 24539 - protein, 85 aa, unidentified
  REGION 1..85: note = Description of Unknown:cds_NC_035460.1_cds_YP_009408039.1_88 target sequence
KETNRIYSILENISENYSLPPHPYIIEIVLGELVRQFFYHHSRIKYNDSKLLKYIKTVLPNTDAIKKYIHEIVEGHFFVSNKVFN

SEQ ID NO: 24540 - protein, 84 aa, unidentified
  REGION 1..84: note = Description of Unknown:cds_NC_035460.1_cds_YP_009408039.1_88 target sequence
HSRIKYNDSKLLKYIKTVLPNTDAIKKYIHEIVEGHFFVSNKVFNKSLLYKYNDEIITVPFKLSHEPFVWGVNFRKEHNAITSP

SEQ ID NO: 24541 - protein, 85 aa, unidentified
  REGION 1..85: note = Description of Unknown:cds_NC_035460.1_cds_YP_009408039.1_88 target sequence
YLVRSIIDENKSVLLFHIMGSGKTIIALLFALVASKYKKVYILVPNINILKIFNYSMGVVINLFNADYIAENIFIYSTTSFYSLN

SEQ ID NO: 24542 - protein, 85 aa, unidentified
  REGION 1..85: note = Description of Unknown:cds_NC_035460.1_cds_YP_009408039.1_88 target sequence
YNDNVINYNGLSRYNNAIFIIDEAHNIFGNNTGELMTVIKNKNKIPFLLLSGSPITNTPITLSNIISLMSDEDINFGDIIIQGKK

SEQ ID NO: 24543 - protein, 85 aa, unidentified
  REGION 1..85: note = Description of Unknown:cds_NC_035460.1_cds_YP_009408039.1_88 target sequence
VFQILLNEHGVNVLKNILKGRISYYEMPDSDLPTIQYHGKDFLDTKVVYCHMSRLQEKDYINVRKMCNNEMFEKNMNNVSLAVLG

SEQ ID NO: 24544 - protein, 85 aa, unidentified
  REGION 1..85: note = Description of Unknown:cds_NC_035460.1_cds_YP_009408039.1_88 target sequence
QLNFINNLDILFQEQDKELYPNLKISNGVLYGDELVNLNISSKFKFFINKITSLKGKHFIYFSNSTYGGLVIKYIMLSNGYSEYN

SEQ ID NO: 24545 - protein, 85 aa, unidentified
  REGION 1..85: note = Description of Unknown:cds_NC_035460.1_cds_YP_009408039.1_88 target sequence
GSQGTNPKLINSKPKNFAIVTSKMKSSLEDLLTIYNSVENDNGEELMFLFSSNIMSESYTLKEVRNIWFMTIPDTFSQYNQILGR

SEQ ID NO: 24546 - protein, 85 aa, unidentified
  REGION 1..85: note = Description of Unknown:cds_NC_035460.1_cds_YP_009408039.1_88 target sequence
SIRKFSYADISQPVNVYLLAAVYSDFNDNITSLDDYSLDEINILPFDIKKLLYLKFKTKETNRIYSILENISENYSLPPHPYIIE

SEQ ID NO: 24547 - protein, 85 aa, unidentified
  REGION 1..85: note = Description of Unknown:cds_NC_035460.1_cds_YP_009408039.1_88 target sequence
IVLGELVRQFFYHHSRIKYNDSKLLKYIKTVLPNTDAIKKYIHEIVEGHFFVSNKVFNKSLLYKYNDEIITVPFKLSHEPFVWGV

SEQ ID NO: 24548 - protein, 85 aa, unidentified
  REGION 1..85: note = Description of Unknown:cds_NC_035460.1_cds_YP_009408044.1_93 target sequence
SKSHAAYIDYALRRTTSLPIEMASNNDSVKLKDYQHFVARVFLGLDGMHSLLLFQETGVGKTMTTVYMLKHLKDVYTNWTIILLV

SEQ ID NO: 24549 - protein, 85 aa, unidentified
  REGION 1..85: note = Description of Unknown:cds_NC_035460.1_cds_YP_009408044.1_93 target sequence
KKALIEDPWMNTIEKYAPEIIKDCIVINYDDQNFHNKFFTNIKTINTRSRICVVIDECHNFISKSLVKEDGKQRPTKSVYNYLSK

SEQ ID NO: 24550 - protein, 85 aa, unidentified
  REGION 1..85: note = Description of Unknown:cds_NC_035460.1_cds_YP_009408044.1_93 target sequence
NIALHNHKLICLSATPIVNNVREFTMLINLLRPKILQLQSLFENKRLINEKELINKLGGICSYIVNNEFSIFDDVEGSTSFAKKT

SEQ ID NO: 24551 - protein, 85 aa, unidentified
  REGION 1..85: note = Description of Unknown:cds_NC_035460.1_cds_YP_009408044.1_93 target sequence
VHMQYVNMSKKQEANYLKAKAVELKSGTSAFRIHRRMAATFTFDTFPERQGRDVEEFTKEINTLYKDFEKSLSERSFSETALTMF

SEQ ID NO: 24552 - protein, 85 aa, unidentified
  REGION 1..85: note = Description of Unknown:cds_NC_035460.1_cds_YP_009408044.1_93 target sequence
KNGEELNGSSKASDISLFTELREKSCKFTHVCLKILTSPGKCLVFEPFVNQSGISVLLLYFKIFGITFIEFSSRTKDNRIKMVAE

SEQ ID NO: 24553 - protein, 85 aa, unidentified
  REGION 1..85: note = Description of Unknown:cds_NC_035460.1_cds_YP_009408044.1_93 target sequence
FNKESNTDGNYIKVCVFSLSGGEGISFFSINDIFILDMTWNEASLRQIVGRAIRLNSHVFTPPQRRYVNVHFIISRLSDGQPTVD

SEQ ID NO: 24554 - protein, 85 aa, unidentified
  REGION 1..85: note = Description of Unknown:cds_NC_035460.1_cds_YP_009408044.1_93 target sequence
EDLLDIIQTKSKEFFQLFRVFKKTSIEWIYANEKDFAPIDDESGWKSLITRTIDMDVKNKEIVQLLEGQNIWYSYSTRLVTILKG

SEQ ID NO: 24555 - protein, 84 aa, unidentified
  REGION 1..84: note = Description of Unknown:cds_NC_035460.1_cds_YP_009408044.1_93 target sequence
DESGWKSLITRTIDMDVKNKEIVQLLEGQNIWYSYSTRLVTILKGFKSLDGRIFDSDGNFIQDMPKNPIIKIHNKKLVYILTNV

SEQ ID NO: 24556 - protein, 85 aa, unidentified
  REGION 1..85: note = Description of Unknown:cds_NC_035460.1_cds_YP_009408044.1_93 target sequence
SVKLKDYQHFVARVFLGLDGMHSLLLFQETGVGKTMTTVYMLKHLKDVYTNWTIILLVKKALIEDPWMNTIEKYAPEIIKDCIVI

SEQ ID NO: 24557 - protein, 85 aa, unidentified
  REGION 1..85: note = Description of Unknown:cds_NC_035460.1_cds_YP_009408044.1_93 target sequence
NYDDQNFHNKFFTNIKTINTRSRICVVIDECHNFISKSLVKEDGKQRPTKSVYNYLSKNIALHNHKLICLSATPIVNNVREFTML

SEQ ID NO: 24558 - protein, 85 aa, unidentified
  REGION 1..85: note = Description of Unknown:cds_NC_035460.1_cds_YP_009408044.1_93 target sequence
INLLRPKILQLQSLFENKRLINEKELINKLGGICSYIVNNEFSIFDDVEGSTSFAKKTVHMQYVNMSKKQEANYLKAKAVELKSG

SEQ ID NO: 24559 - protein, 85 aa, unidentified
  REGION 1..85: note = Description of Unknown:cds_NC_035460.1_cds_YP_009408044.1_93 target sequence
TSAFRIHRRMAATFTFDTFPERQGRDVEEFTKEINTLYKDFEKSLSERSFSETALTMFKNGEELNGSSKASDISLFTELREKSCK

SEQ ID NO: 24560 - protein, 85 aa, unidentified
  REGION 1..85: note = Description of Unknown:cds_NC_035460.1_cds_YP_009408044.1_93 target sequence
FTHVCLKILTSPGKCLVFEPFVNQSGISVLLLYFKIFGITFIEFSSRTKDNRIKMVAEFNKESNTDGNYIKVCVFSLSGGEGISF

SEQ ID NO: 24561 - protein, 85 aa, unidentified
  REGION 1..85: note = Description of Unknown:cds_NC_035460.1_cds_YP_009408044.1_93 target sequence
FSINDIFILDMTWNEASLRQIVGRAIRLNSHVFTPPQRRYVNVHFIISRLSDGQPTVDEDLLDIIQTKSKEFFQLFRVFKKTSIE

SEQ ID NO: 24562 - protein, 85 aa, unidentified
  REGION 1..85: note = Description of Unknown:cds_NC_035460.1_cds_YP_009408044.1_93 target sequence
WIYANEKDFAPIDDESGWKSLITRTIDMDVKNKEIVQLLEGQNIWYSYSTRLVTILKGFKSLDGRIFDSDGNFIQDMPKNPIIKI

SEQ ID NO: 24563 - protein, 85 aa, unidentified
  REGION 1..85: note = Description of Unknown:hvTR_Q98267 target sequence
NLHAAYIDYALRRSQHMQAEMSGADNVLLKDYQLFVAKVFLGLDSMNSLLLFQETGVGKTVTAVYMLKHLRFLYTSWTVLVLVKK

SEQ ID NO: 24564 - protein, 85 aa, unidentified
  REGION 1..85: note = Description of Unknown:hvTR_Q98267 target sequence
ALVEEPWMNTILRFAPEVAKDCVFMNYDDQNFHNKFFTNIKTVSARSRIFVIIDECHNFISKSLSREDGRARNTKHVYNFLARHI

SEQ ID NO: 24565 - protein, 85 aa, unidentified
  REGION 1..85: note = Description of Unknown:hvTR_Q98267 target sequence
ASSHNKLLCLSATPIVNNVREFALLVNLLRPGVLPPQSLFHNKRLLDEAELVSKLGCICSYLVHHEASIFEDVEGSELFARKRVL

SEQ ID NO: 24566 - protein, 85 aa, unidentified
  REGION 1..85: note = Description of Unknown:hvTR_Q98267 target sequence
LKYVRMSAKQEDIYHKARAAEFRSGIAVFRVHRRMAATFAFDEFPVRKNLTPDEYDALVASLVRDFEALFAGRALSDATRARLRA

SEQ ID NO: 24567 - protein, 85 aa, unidentified
  REGION 1..85: note = Description of Unknown:hvTR_Q98267 target sequence
GEPIECAASAEDLSLYQALYEHSCKYAEVCVAILASPGKCLVFEPFINLSGIRIFVKYLEVFGISYIEFSSRTKDTRTRAVAEFN

SEQ ID NO: 24568 - protein, 85 aa, unidentified
  REGION 1..85: note = Description of Unknown:hvTR_Q98267 target sequence
RVENTNGELIKTCVFSLSGNEGISFLSINDIFILDMTWNEASLKQIIGRAIRLHSHANNPPERRYVNVHFVVAQLGSGAPSVDDD

SEQ ID NO: 24569 - protein, 85 aa, unidentified
  REGION 1..85: note = Description of Unknown:hvTR_Q98267 target sequence
LLEIIQNKAREFSQLYRVLKLASIEWIHQHCREFAPVDDEAGFRALCSRAIDVTRGASTRRALATGENIWYAFSTLMITVHPGFK

SEQ ID NO: 24570 - protein, 84 aa, unidentified
  REGION 1..84: note = Description of Unknown:hvTR_Q98267 target sequence
EAGFRALCSRAIDVTRGASTRRALATGENIWYAFSTLMITVHPGFKTEDGRVYDADGNFLTTMPERPIVRVQGTRLVYIFPELR

SEQ ID NO: 24571 - protein, 85 aa, unidentified
  REGION 1..85: note = Description of Unknown:hvTR_Q98267 target sequence
LLKDYQLFVAKVFLGLDSMNSLLLFQETGVGKTVTAVYMLKHLRFLYTSWTVLVLVKKALVEEPWMNTILRFAPEVAKDCVFMNY

SEQ ID NO: 24572 - protein, 85 aa, unidentified
  REGION 1..85: note = Description of Unknown:hvTR_Q98267 target sequence
DDQNFHNKFFTNIKTVSARSRIFVIIDECHNFISKSLSREDGRARNTKHVYNFLARHIASSHNKLLCLSATPIVNNVREFALLVN

SEQ ID NO: 24573 - protein, 85 aa, unidentified
  REGION 1..85: note = Description of Unknown:hvTR_Q98267 target sequence
LLRPGVLPPQSLFHNKRLLDEAELVSKLGCICSYLVHHEASIFEDVEGSELFARKRVLLKYVRMSAKQEDIYHKARAAEFRSGIA

SEQ ID NO: 24574 - protein, 85 aa, unidentified
  REGION 1..85: note = Description of Unknown:hvTR_Q98267 target sequence
VFRVHRRMAATFAFDEFPVRKNLTPDEYDALVASLVRDFEALFAGRALSDATRARLRAGEPIECAASAEDLSLYQALYEHSCKYA

SEQ ID NO: 24575 - protein, 85 aa, unidentified
  REGION 1..85: note = Description of Unknown:hvTR_Q98267 target sequence
EVCVAILASPGKCLVFEPFINLSGIRIFVKYLEVFGISYIEFSSRTKDTRTRAVAEFNRVENTNGELIKTCVFSLSGNEGISFLS

SEQ ID NO: 24576 - protein, 85 aa, unidentified
  REGION 1..85: note = Description of Unknown:hvTR_Q98267 target sequence
INDIFILDMTWNEASLKQIIGRAIRLHSHANNPPERRYVNVHFVVAQLGSGAPSVDDDLLEIIQNKAREFSQLYRVLKLASIEWI

SEQ ID NO: 24577 - protein, 85 aa, unidentified
  REGION 1..85: note = Description of Unknown:hvTR_Q98267 target sequence
HQHCREFAPVDDEAGFRALCSRAIDVTRGASTRRALATGENIWYAFSTLMITVHPGFKTEDGRVYDADGNFLTTMPERPIVRVQG

SEQ ID NO: 24578 - protein, 85 aa, unidentified
  REGION 1..85: note = Description of Unknown:cds_NC_030656.1_cds_YP_009268806.1_91 target sequence
SAYASYIDYALRRTKDMPSEMASVDSTVKLKDYQMFVARVFLGLDKMHSLLLFHETGVGKTITSVYILKHLKDIYTTWTIIVLVK

SEQ ID NO: 24579 - protein, 85 aa, unidentified
  REGION 1..85: note = Description of Unknown:cds_NC_030656.1_cds_YP_009268806.1_91 target sequence
KALIDEPWRTTILKFAPEIVNDCIFINYDDHNFHNKFFTVIKTISSRTRVCVVIDECHNFISMSLSKENGKIRPTKRVYNFLLKN

SEQ ID NO: 24580 - protein, 85 aa, unidentified
  REGION 1..85: note = Description of Unknown:cds_NC_030656.1_cds_YP_009268806.1_91 target sequence
IPQHNHKLLCLSATPIVNSSREFTMLVNLLRPNVLQPVPLFEQGYLVGKDELINKLGCMCSYLVYNEASIFENVEGSSTFAKKTV

SEQ ID NO: 24581 - protein, 85 aa, unidentified
  REGION 1..85: note = Description of Unknown:cds_NC_030656.1_cds_YP_009268806.1_91 target sequence
KMLYVNMSPKQEAVYQRAKIAEIKSKTAVFKIHRRMAAMFAFDEFPDKKDKTIDEYESIVSALVKDFEKSIQGKRFSEAAINAFK

SEQ ID NO: 24582 - protein, 85 aa, unidentified
  REGION 1..85: note = Description of Unknown:cds_NC_030656.1_cds_YP_009268806.1_91 target sequence
NGNYLDNTASASDVSLYTELRERSCKYTEVCVRILASKGKCLVFEPFVNLSGIKILLKYFSIFNITSIEFSSRTKDVRNQLVNDF

SEQ ID NO: 24583 - protein, 85 aa, unidentified
  REGION 1..85: note = Description of Unknown:cds_NC_030656.1_cds_YP_009268806.1_91 target sequence
NSEDNTNGNIIKVCVFSLSGGEGLSFYSINDIFILDITWNEASLRQIVGRAIRLNSHALNAPDRRYVNVYFVIARLSSGAPTVDE

SEQ ID NO: 24584 - protein, 85 aa, unidentified
  REGION 1..85: note = Description of Unknown:cds_NC_030656.1_cds_YP_009268806.1_91 target sequence
DLLEVIQNKTREFSQLFSVYKQTSIEWIYEHYTAFSPINDESAWQSLISRPMLVTTTENVNKTVNGENIWYARSTAMITIYNGFK

SEQ ID NO: 24585 - protein, 84 aa, unidentified
  REGION 1..84: note = Description of Unknown:cds_NC_030656.1_cds_YP_009268806.1_91 target sequence
DESAWQSLISRPMLVTTTENVNKTVNGENIWYARSTAMITIYNGFKTSDGKVYDKDGIFLLNMPADPIIKINNNKLVYIFPNLR

SEQ ID NO: 24586 - protein, 85 aa, unidentified
  REGION 1..85: note = Description of Unknown:cds_NC_030656.1_cds_YP_009268806.1_91 target sequence
VKLKDYQMFVARVFLGLDKMHSLLLFHETGVGKTITSVYILKHLKDIYTTWTIIVLVKKALIDEPWRTTILKFAPEIVNDCIFIN

SEQ ID NO: 24587 - protein, 85 aa, unidentified
  REGION 1..85: note = Description of Unknown:cds_NC_030656.1_cds_YP_009268806.1_91 target sequence
YDDHNFHNKFFTVIKTISSRTRVCVVIDECHNFISMSLSKENGKIRPTKRVYNFLLKNIPQHNHKLLCLSATPIVNSSREFTMLV

SEQ ID NO: 24588 - protein, 85 aa, unidentified
  REGION 1..85: note = Description of Unknown:cds_NC_030656.1_cds_YP_009268806.1_91 target sequence
NLLRPNVLQPVPLFEQGYLVGKDELINKLGCMCSYLVYNEASIFENVEGSSTFAKKTVKMLYVNMSPKQEAVYQRAKIAEIKSKT

SEQ ID NO: 24589 - protein, 85 aa, unidentified
  REGION 1..85: note = Description of Unknown:cds_NC_030656.1_cds_YP_009268806.1_91 target sequence
AVFKIHRRMAAMFAFDEFPDKKDKTIDEYESIVSALVKDFEKSIQGKRFSEAAINAFKNGNYLDNTASASDVSLYTELRERSCKY

SEQ ID NO: 24590 - protein, 85 aa, unidentified
  REGION 1..85: note = Description of Unknown:cds_NC_030656.1_cds_YP_009268806.1_91 target sequence
TEVCVRILASKGKCLVFEPFVNLSGIKILLKYFSIFNITSIEFSSRTKDVRNQLVNDFNSEDNTNGNIIKVCVFSLSGGEGLSFY

SEQ ID NO: 24591 - protein, 85 aa, unidentified
  REGION 1..85: note = Description of Unknown:cds_NC_030656.1_cds_YP_009268806.1_91 target sequence
SINDIFILDITWNEASLRQIVGRAIRLNSHALNAPDRRYVNVYFVIARLSSGAPTVDEDLLEVIQNKTREFSQLFSVYKQTSIEW

SEQ ID NO: 24592 - protein, 85 aa, unidentified
  REGION 1..85: note = Description of Unknown:cds_NC_030656.1_cds_YP_009268806.1_91 target sequence
IYEHYTAFSPINDESAWQSLISRPMLVTTTENVNKTVNGENIWYARSTAMITIYNGFKTSDGKVYDKDGIFLLNMPADPIIKINN

SEQ ID NO: 24593 - protein, 85 aa, unidentified
  REGION 1..85: note = Description of Unknown:hvTR_Q0NPW0 target sequence
SKSHAAYIDYALRRTTNMPVEMMGSDVVRLKDYQHFVARVFLGLDSMHSLLLFHETGVGKTMTTVYILKHLKDIYTNWAIILLVK

SEQ ID NO: 24594 - protein, 85 aa, unidentified
  REGION 1..85: note = Description of Unknown:hvTR_Q0NPW0 target sequence
KALIEDPWMNTILRYAPEITKDCIFINYDDQNFRNKFFTNIKTINSKSRICVIIDECHNFISKSLIKEDGKIRPTRSVYNFLSKT

SEQ ID NO: 24595 - protein, 85 aa, unidentified
  REGION 1..85: note = Description of Unknown:hvTR_Q0NPW0 target sequence
IALKNHKMICLSATPIVNSVQEFTMLVNLLRPGSLQHQSLFENKRLVDEKELVSKLGGLCSYIVNNEFSIFDDVEGSASFAKKTV

SEQ ID NO: 24596 - protein, 85 aa, unidentified
  REGION 1..85: note = Description of Unknown:hvTR_Q0NPW0 target sequence
LMRYVNMSKKQEEIYQKAKLTEIKTGISSFRILRRMATTFTFDSFPERQNRDPGEYAQEIATLYNDFKNSLRDREFSKSALDTFK

SEQ ID NO: 24597 - protein, 85 aa, unidentified
  REGION 1..85: note = Description of Unknown:hvTR_Q0NPW0 target sequence
RGELLGGDASAADISLFTELKEKSVKFIDVCLGILASHGKCLVFEPFVNQSGIEILLLYFKVFGISNIEFSSRTKDTRIKAVAEF

SEQ ID NO: 24598 - protein, 85 aa, unidentified
  REGION 1..85: note = Description of Unknown:hvTR_Q0NPW0 target sequence
NQESNTNGECIKTCVFSSSGGEGISFFSINDIFILDMTWNEASLRQIVGRAIRLNSHVLTPPERRYVNVHFIMARLSNGMPTVDE

SEQ ID NO: 24599 - protein, 85 aa, unidentified
  REGION 1..85: note = Description of Unknown:hvTR_Q0NPW0 target sequence
DLFEIIQSKSKEFVQLFRVFKHTSLEWIHANEKDFSPIDNESGWKTLVSRAIDLSSKKNITNKLIEGTNIWYSNSNRLMSINRGF

SEQ ID NO: 24600 - protein, 84 aa, unidentified
  REGION 1..84: note = Description of Unknown:hvTR_Q0NPW0 target sequence
PIDNESGWKTLVSRAIDLSSKKNITNKLIEGTNIWYSNSNRLMSINRGFKGVDGRVYDVDGNYLHDMPDNPVIKIHDGKLIYIF

SEQ ID NO: 24601 - protein, 85 aa, unidentified
  REGION 1..85: note = Description of Unknown:hvTR_Q0NPW0 target sequence
VRLKDYQHFVARVFLGLDSMHSLLLFHETGVGKTMTTVYILKHLKDIYTNWAIILLVKKALIEDPWMNTILRYAPEITKDCIFIN

SEQ ID NO: 24602 - protein, 85 aa, unidentified
  REGION 1..85: note = Description of Unknown:hvTR_Q0NPW0 target sequence
YDDQNFRNKFFTNIKTINSKSRICVIIDECHNFISKSLIKEDGKIRPTRSVYNFLSKTIALKNHKMICLSATPIVNSVQEFTMLV

SEQ ID NO: 24603 - protein, 85 aa, unidentified
  REGION 1..85: note = Description of Unknown:hvTR_Q0NPW0 target sequence
NLLRPGSLQHQSLFENKRLVDEKELVSKLGGLCSYIVNNEFSIFDDVEGSASFAKKTVLMRYVNMSKKQEEIYQKAKLTEIKTGI

SEQ ID NO: 24604 - protein, 85 aa, unidentified
  REGION 1..85: note = Description of Unknown:hvTR_Q0NPW0 target sequence
SSFRILRRMATTFTFDSFPERQNRDPGEYAQEIATLYNDFKNSLRDREFSKSALDTFKRGELLGGDASAADISLFTELKEKSVKF

SEQ ID NO: 24605 - protein, 85 aa, unidentified
  REGION 1..85: note = Description of Unknown:hvTR_Q0NPW0 target sequence
IDVCLGILASHGKCLVFEPFVNQSGIEILLLYFKVFGISNIEFSSRTKDTRIKAVAEFNQESNTNGECIKTCVFSSSGGEGISFF

SEQ ID NO: 24606 - protein, 85 aa, unidentified
  REGION 1..85: note = Description of Unknown:hvTR_Q0NPW0 target sequence
SINDIFILDMTWNEASLRQIVGRAIRLNSHVLTPPERRYVNVHFIMARLSNGMPTVDEDLFEIIQSKSKEFVQLFRVFKHTSLEW

SEQ ID NO: 24607 - protein, 85 aa, unidentified
  REGION 1..85: note = Description of Unknown:hvTR_Q0NPW0 target sequence
IHANEKDFSPIDNESGWKTLVSRAIDLSSKKNITNKLIEGTNIWYSNSNRLMSINRGFKGVDGRVYDVDGNYLHDMPDNPVIKIH

SEQ ID NO: 24608 - protein, 85 aa, unidentified; identical to SEQ ID NO: 24593
  REGION 1..85: note = Description of Unknown:hvTR_Q3I8Q6 target sequence

SEQ ID NO: 24609 - protein, 85 aa, unidentified
  REGION 1..85: note = Description of Unknown:hvTR_Q3I8Q6 target sequence
KALIEDPWINTILRYAPEITKDCIFINYDDQNFRNKFFTNIKTINSKSRICVIIDECHNFISKSLIKEDGKIRPTRSVYNFLSKT

SEQ ID NO: 24610 - protein, 85 aa, unidentified
  REGION 1..85: note = Description of Unknown:hvTR_Q3I8Q6 target sequence
TALKNHKMICLSATPIVNSVQEFTMLVNLLRPGSLQHQSLFENKRLVDEKELVSKLGGLCSYIVNNEFSIFDDVEGSASFAKKTV

SEQ ID NO: 24611 - protein, 85 aa, unidentified
  REGION 1..85: note = Description of Unknown:hvTR_Q3I8Q6 target sequence
LMRYVNMSKKQEEIYQKAKLAEIKTGISSFRILRRMATTFTFDSFPERQNRDPGEYTQEIATLYNDFKNSLRDREFSKSALDTFK

SEQ ID NO: 24612 - protein, 85 aa, unidentified
  REGION 1..85: note = Description of Unknown:hvTR_Q3I8Q6 target sequence
KGELLGGDAIAADISLFTELKEKSVKFIDVCLGILASHGKCLVFEPFVNQSGIEILLLYFKVFGISNIEFSSRTKDTRIKAVAEF

SEQ ID NO: 24613 - protein, 85 aa, unidentified
  REGION 1..85: note = Description of Unknown:hvTR_Q3I8Q6 target sequence
NQESNTNGEYIKTCVFSSSGGEGISFFSINDIFILDMTWNEASLRQIVGRAIRLNSHVLTPPERRYVNVHFIMARLSNGMPTVDE

SEQ ID NO: 24614 - protein, 85 aa, unidentified
  REGION 1..85: note = Description of Unknown:hvTR_Q3I8Q6 target sequence
DLFEIIQNKSKEFVQLFRVFKHTSLEWIHANEKDFSPIDNESGWKTLVSRAIDLSSKKNITNKLIEGTNIWYSNSNRLISINRGF

SEQ ID NO: 24615 - protein, 84 aa, unidentified
  REGION 1..84: note = Description of Unknown:hvTR_Q3I8Q6 target sequence
PIDNESGWKTLVSRAIDLSSKKNITNKLIEGTNIWYSNSNRLISINRGFKGVDGRVYDVDGNYLHDMPDNPVIKIHDGKLIYIF

SEQ ID NO: 24616 - protein, 85 aa, unidentified
  REGION 1..85: note = Description of Unknown:hvTR_Q3I8Q6 target sequence
VRLKDYQHFVARVFLGLDSMHSLLLFHETGVGKTMTTVYILKHLKDIYTNWAIILLVKKALIEDPWINTILRYAPEITKDCIFIN

SEQ ID NO: 24617 - protein, 85 aa, unidentified
  REGION 1..85: note = Description of Unknown:hvTR_Q3I8Q6 target sequence
YDDQNFRNKFFTNIKTINSKSRICVIIDECHNFISKSLIKEDGKIRPTRSVYNFLSKTTALKNHKMICLSATPIVNSVQEFTMLV

SEQ ID NO: 24618 - protein, 85 aa, unidentified
  REGION 1..85: note = Description of Unknown:hvTR_Q3I8Q6 target sequence
NLLRPGSLQHQSLFENKRLVDEKELVSKLGGLCSYIVNNEFSIFDDVEGSASFAKKTVLMRYVNMSKKQEEIYQKAKLAEIKTGI

SEQ ID NO: 24619 - protein, 85 aa, unidentified
  REGION 1..85: note = Description of Unknown:hvTR_Q3I8Q6 target sequence
SSFRILRRMATTFTFDSFPERQNRDPGEYTQEIATLYNDFKNSLRDREFSKSALDTFKKGELLGGDAIAADISLFTELKEKSVKF

SEQ ID NO: 24620 - protein, 85 aa, unidentified
  REGION 1..85: note = Description of Unknown:hvTR_Q3I8Q6 target sequence
IDVCLGILASHGKCLVFEPFVNQSGIEILLLYFKVFGISNIEFSSRTKDTRIKAVAEFNQESNTNGEYIKTCVFSSSGGEGISFF

SEQ ID NO: 24621 - protein, 85 aa, unidentified
  REGION 1..85: note = Description of Unknown:hvTR_Q3I8Q6 target sequence
SINDIFILDMTWNEASLRQIVGRAIRLNSHVLTPPERRYVNVHFIMARLSNGMPTVDEDLFEIIQNKSKEFVQLFRVFKHTSLEW

SEQ ID NO: 24622 - protein, 85 aa, unidentified
  REGION 1..85: note = Description of Unknown:hvTR_Q3I8Q6 target sequence
IHANEKDFSPIDNESGWKTLVSRAIDLSSKKNITNKLIEGTNIWYSNSNRLISINRGFKGVDGRVYDVDGNYLHDMPDNPVIKIH

SEQ ID NO: 24623 - protein, 85 aa, unidentified
  REGION 1..85: note = Description of Unknown:hvTR_A7XCL5 target sequence
STQHAAYIDYALNRMESMPIEMLGSDTITLKPYQHFVAKVFLGLDTMHSILLFHDTGVGKTITTVFILKHLKDIYTNWTILLLVK

SEQ ID NO: 24624 - protein, 85 aa, unidentified
  REGION 1..85: note = Description of Unknown:hvTR_A7XCL5 target sequence
KALVEDPWMNTIIKYSPEIIKNCIFINYDDKNFHNKFFTNIKTISSRSRICVVIDECHNFISKSLVKEDGKQRPTKSVYNYLSKN

SEQ ID NO: 24625 - protein, 85 aa, unidentified
  REGION 1..85: note = Description of Unknown:hvTR_A7XCL5 target sequence
ILLNNNKMICLSATPIVNNVREFTMIVNLLRPKIIQFQSLFENKNLVNEKELIDKLGGICSYIVNNEFSIFDDVEGSQSFAKKTV

SEQ ID NO: 24626 - protein, 85 aa, unidentified
  REGION 1..85: note = Description of Unknown:hvTR_A7XCL5 target sequence
YMHYVNMTKQQENIYQKAKMAEIKSGITSFRIYRRMAATFSFDFFPDRKKKTIDEINLELNTLYKDFVNYIDQKSFSDNAIKLFK

SEQ ID NO: 24627 - protein, 85 aa, unidentified
  REGION 1..85: note = Description of Unknown:hvTR_A7XCL5 target sequence
AGKGLTGDSNPLDISLLSELKQKSCKFTEVCLKILASPGKCLVFEPFINQSGIEILIIYFSVFRITSIEFSSRTKDTRIRNVFEF

SEQ ID NO: 24628 - protein, 85 aa, unidentified
  REGION 1..85: note = Description of Unknown:hvTR_A7XCL5 target sequence
NKESNTNGDQIKVCVFSISGGEGISFFSINDIFILDMTWNEASLKQIVGRAIRLNSHANTPPNRRYVNVYFIIARLSNGEPTVDE

SEQ ID NO: 24629 - protein, 85 aa, unidentified
  REGION 1..85: note = Description of Unknown:hvTR_A7XCL5 target sequence
DLINIIKTKSKEFLQLFKVFKESSIEWIYENKKNFYPVNDESGWRALTSRIVDVNVKSKKIVQVVQGQNIWFSNSSRMITIHKGF

SEQ ID NO: 24630 - protein, 84 aa, unidentified
  REGION 1..84: note = Description of Unknown:hvTR_A7XCL5 target sequence
PVNDESGWRALTSRIVDVNVKSKKIVQVVQGQNIWFSNSSRMITIHKGFKTLDGKIFDVDGNFIQNMPVNPVIKIHNNKLVYII

SEQ ID NO: 24631 - protein, 85 aa, unidentified
  REGION 1..85: note = Description of Unknown:hvTR_A7XCL5 target sequence
ITLKPYQHFVAKVFLGLDTMHSILLFHDTGVGKTITTVFILKHLKDIYTNWTILLLVKKALVEDPWMNTIIKYSPEIIKNCIFIN

SEQ ID NO: 24632 - protein, 85 aa, unidentified
  REGION 1..85: note = Description of Unknown:hvTR_A7XCL5 target sequence
YDDKNFHNKFFTNIKTISSRSRICVVIDECHNFISKSLVKEDGKQRPTKSVYNYLSKNILLNNNKMICLSATPIVNNVREFTMIV

SEQ ID NO: 24633 - protein, 85 aa, unidentified
  REGION 1..85: note = Description of Unknown:hvTR_A7XCL5 target sequence
NLLRPKIIQFQSLFENKNLVNEKELIDKLGGICSYIVNNEFSIFDDVEGSQSFAKKTVYMHYVNMTKQQENIYQKAKMAEIKSGI

SEQ ID NO: 24634 - protein, 85 aa, unidentified
  REGION 1..85: note = Description of Unknown:hvTR_A7XCL5 target sequence
TSFRIYRRMAATFSFDFFPDRKKKTIDEINLELNTLYKDFVNYIDQKSFSDNAIKLFKAGKGLTGDSNPLDISLLSELKQKSCKF

SEQ ID NO: 24635 - protein, 85 aa, unidentified
  REGION 1..85: note = Description of Unknown:hvTR_A7XCL5 target sequence
TEVCLKILASPGKCLVFEPFINQSGIEILIIYFSVFRITSIEFSSRTKDTRIRNVFEFNKESNTNGDQIKVCVFSISGGEGISFF

SEQ ID NO: 24636 - protein, 85 aa, unidentified
  REGION 1..85: note = Description of Unknown:hvTR_A7XCL5 target sequence
SINDIFILDMTWNEASLKQIVGRAIRLNSHANTPPNRRYVNVYFIIARLSNGEPTVDEDLINIIKTKSKEFLQLFKVFKESSIEW

SEQ ID NO: 24637 - protein, 85 aa, unidentified
  REGION 1..85: note = Description of Unknown:hvTR_A7XCL5 target sequence
IYENKKNFYPVNDESGWRALTSRIVDVNVKSKKIVQVVQGQNIWFSNSSRMITIHKGFKTLDGKIFDVDGNFIQNMPVNPVIKIH

SEQ ID NO: 24638 - protein, 85 aa, unidentified
  REGION 1..85: note = Description of Unknown:hvTR_Q1PIT3 target sequence
SKSHAAYIDYALRRTTNMPVEMMGTDVVRLKDYQHFVARVFLGLDSMHSLLLFHETGVGKTMTTVYILKHLKDIYTNWAIILLVK

SEQ ID NO: 24639 - protein, 85 aa, unidentified; identical to SEQ ID NO: 24594
  REGION 1..85: note = Description of Unknown:hvTR_Q1PIT3 target sequence

SEQ ID NO: 24640 - protein, 85 aa, unidentified; identical to SEQ ID NO: 24595
  REGION 1..85: note = Description of Unknown:hvTR_Q1PIT3 target sequence

SEQ ID NO: 24641 - protein, 85 aa, unidentified
  REGION 1..85: note = Description of Unknown:hvTR_Q1PIT3 target sequence
LMRYVNMSKKQEEIYQKAKLAEIKTGISSFRILRRMATTFTFDSFPERQNRDPGEYAQEIATLYNDFKNSLRDREFSKSALDTFK

SEQ ID NO: 24642 - protein, 85 aa, unidentified
  REGION 1..85: note = Description of Unknown:hvTR_Q1PIT3 target sequence
KGELLKGDASAADISLFTELKEKSVKFIDVCLGILASHGKCLVFEPFVNQSGIEILLLYFKVFGISNIEFSSRTKDTRIKAVAEF

SEQ ID NO: 24643 - protein, 85 aa, unidentified; identical to SEQ ID NO: 24598
  REGION 1..85: note = Description of Unknown:hvTR_Q1PIT3 target sequence

SEQ ID NO: 24644 - protein, 85 aa, unidentified; identical to SEQ ID NO: 24599
  REGION 1..85: note = Description of Unknown:hvTR_Q1PIT3 target sequence

SEQ ID NO: 24645 - protein, 84 aa, unidentified; identical to SEQ ID NO: 24600
  REGION 1..84: note = Description of Unknown:hvTR_Q1PIT3 target sequence

SEQ ID NO: 24646 - protein, 85 aa, unidentified; identical to SEQ ID NO: 24601
  REGION 1..85: note = Description of Unknown:hvTR_Q1PIT3 target sequence

SEQ ID NO: 24647 - protein, 85 aa, unidentified; identical to SEQ ID NO: 24602
  REGION 1..85: note = Description of Unknown:hvTR_Q1PIT3 target sequence

SEQ ID NO: 24648 - protein, 85 aa, unidentified; identical to SEQ ID NO: 24618
  REGION 1..85: note = Description of Unknown:hvTR_Q1PIT3 target sequence

SEQ ID NO: 24649 - protein, 85 aa, unidentified
  REGION 1..85: note = Description of Unknown:hvTR_Q1PIT3 target sequence
SSFRILRRMATTFTFDSFPERQNRDPGEYAQEIATLYNDFKNSLRDREFSKSALDTFKKGELLKGDASAADISLFTELKEKSVKF

SEQ ID NO: 24650 - protein, 85 aa, unidentified; identical to SEQ ID NO: 24605
  REGION 1..85: note = Description of Unknown:hvTR_Q1PIT3 target sequence

SEQ ID NO: 24651 - protein, 85 aa, unidentified; identical to SEQ ID NO: 24606
  REGION 1..85: note = Description of Unknown:hvTR_Q1PIT3 target sequence

SEQ ID NO: 24652 - protein, 85 aa, unidentified; identical to SEQ ID NO: 24607
  REGION 1..85: note = Description of Unknown:hvTR_Q1PIT3 target sequence

SEQ ID NO: 24653 - protein, 85 aa, unidentified; identical to SEQ ID NO: 24638
  REGION 1..85: note = Description of Unknown:hvTR_P0DOQ3.2 target sequence

SEQ ID NO: 24654 - protein, 85 aa, unidentified; identical to SEQ ID NO: 24594
  REGION 1..85: note = Description of Unknown:hvTR_P0DOQ3.2 target sequence

SEQ ID NO: 24655 - protein, 85 aa, unidentified
  REGION 1..85: note = Description of Unknown:hvTR_P0DOQ3.2 target sequence
IALKNHKMICLSATPIVNSVQEFTMLVNLLRPGSLQHQSLFENKRLVNEKELVSKLGGLCSYIVNNEFSIFDDVEGSASFAKKTV

SEQ ID NO: 24656 - protein, 85 aa, unidentified
  REGION 1..85: note = Description of Unknown:hvTR_P0DOQ3.2 target sequence
LMRYVNMSKKQEEIYQKAKLTEIKTGISSFRILRRMATTFTFDSFPERQNRDPGEYAQEIATLYNDFKRSLRDREFSKSALDTFK

SEQ ID NO: 24657 - protein, 85 aa, unidentified
  REGION 1..85: note = Description of Unknown:hvTR_P0DOQ3.2 target sequence
KGELLGGDASAADISLFTELKEKSAKFIDVCLGILASHGKCLVFEPFVNQSGIEILLLYFKVFGISNIEFSSRTKDTRIKAVAEF

SEQ ID NO: 24658 - protein, 85 aa, unidentified; identical to SEQ ID NO: 24598
  REGION 1..85: note = Description of Unknown:hvTR_P0DOQ3.2 target sequence

SEQ ID NO: 24659 - protein, 85 aa, unidentified; identical to SEQ ID NO: 24599
  REGION 1..85: note = Description of Unknown:hvTR_P0DOQ3.2 target sequence

SEQ ID NO: 24660 - protein, 84 aa, unidentified; identical to SEQ ID NO: 24600
  REGION 1..84: note = Description of Unknown:hvTR_P0DOQ3.2 target sequence

SEQ ID NO: 24661 - protein, 85 aa, unidentified; identical to SEQ ID NO: 24601
  REGION 1..85: note = Description of Unknown:hvTR_P0DOQ3.2 target sequence

SEQ ID NO: 24662 - protein, 85 aa, unidentified; identical to SEQ ID NO: 24602
  REGION 1..85: note = Description of Unknown:hvTR_P0DOQ3.2 target sequence

SEQ ID NO: 24663 - protein, 85 aa, unidentified
  REGION 1..85: note = Description of Unknown:hvTR_P0DOQ3.2 target sequence
NLLRPGSLQHQSLFENKRLVNEKELVSKLGGLCSYIVNNEFSIFDDVEGSASFAKKTVLMRYVNMSKKQEEIYQKAKLTEIKTGI

SEQ ID NO: 24664 - protein, 85 aa, unidentified
  REGION 1..85: note = Description of Unknown:hvTR_P0DOQ3.2 target sequence
SSFRILRRMATTFTFDSFPERQNRDPGEYAQEIATLYNDFKRSLRDREFSKSALDTFKKGELLGGDASAADISLFTELKEKSAKF

SEQ ID NO: 24665 - protein, 85 aa, unidentified; identical to SEQ ID NO: 24605
  REGION 1..85: note = Description of Unknown:hvTR_P0DOQ3.2 target sequence

SEQ ID NO: 24666 - protein, 85 aa, unidentified; identical to SEQ ID NO: 24606
  REGION 1..85: note = Description of Unknown:hvTR_P0DOQ3.2 target sequence

SEQ ID NO: 24667 - protein, 85 aa, unidentified; identical to SEQ ID NO: 24607
  REGION 1..85: note = Description of Unknown:hvTR_P0DOQ3.2 target sequence

SEQ ID NO: 24668 - protein, 85 aa, unidentified
  REGION 1..85: note = Description of Unknown:hvTR_Q9QB93 target sequence
SRQHAAYIDYALNRMKKMPIEMLGSDTITLKPYQHFVAKVFLGLDTMHSILLFHDTGVGKTITTVFILKHLKDIYTNWTILLLVK

SEQ ID NO: 24669 - protein, 85 aa, unidentified
  REGION 1..85: note = Description of Unknown:hvTR_Q9QB93 target sequence
KALVEDPWMNTILKYSPEIIKNCIFINYDDKNFHNKFFTNIKTISSRSRVCVVLDECHNFISKSLIKEDGKQRPTKSVYNYLSKN

SEQ ID NO: 24670 - protein, 85 aa, unidentified
  REGION 1..85: note = Description of Unknown:hvTR_Q9QB93 target sequence
ISLNNNKMICLSATPIVNNVREFTMIVNLLRPKIIQFQSLFENKNLVNEKELIDKLGGICSYIVNDEFSIFDDVEGSQSFAKKTV

SEQ ID NO: 24671 - protein, 85 aa, unidentified
  REGION 1..85: note = Description of Unknown:hvTR_Q9QB93 target sequence
YMHYVNMTKQQEIIYQKAKIAEIKSGIASFRIYRRMAATFSFDSFPDKKKKTIDEITLELGALYKDFVNYVNKKSFSNNAIKLFK

SEQ ID NO: 24672 - protein, 85 aa, unidentified
  REGION 1..85: note = Description of Unknown:hvTR_Q9QB93 target sequence
SGKGLTGDSNPLDISLLSELRQKSCKFTEVCLKILASPGKCLVFEPFINQSGIEVLLVYFSVFCITSVEFSSRTKDTRIKNVFEF

SEQ ID NO: 24673 - protein, 85 aa, unidentified
  REGION 1..85: note = Description of Unknown:hvTR_Q9QB93 target sequence
NKESNTNGEQIKVCVFSISGGEGISFFSINDIFILDMTWNEASLKQIVGRAIRLNSHANTPPNRRYVNVYFIIARLSSGEPTVDE

SEQ ID NO: 24674 - protein, 85 aa, unidentified
  REGION 1..85: note = Description of Unknown:hvTR_Q9QB93 target sequence
DLINIIKTKSKEFFQLFKVFKESSIEWIYKNKKDFYPINDESGWRALTSRVVDVNVKSKRTVQLAQGQNIWFSNSSRMVTIHKGF

SEQ ID NO: 24675 - protein, 84 aa, unidentified
  REGION 1..84: note = Description of Unknown:hvTR_Q9QB93 target sequence
PINDESGWRALTSRVVDVNVKSKRTVQLAQGQNIWFSNSSRMVTIHKGFKTSDGKIFDVDGNFIQNMPINPIIKIHNDKLVYII

SEQ ID NO: 24676 - protein, 85 aa, unidentified
  REGION 1..85: note = Description of Unknown:hvTR_Q9QB93 target sequence
ITLKPYQHFVAKVFLGLDTMHSILLFHDTGVGKTITTVFILKHLKDIYTNWTILLLVKKALVEDPWMNTILKYSPEIIKNCIFIN

SEQ ID NO: 24677 - protein, 85 aa, unidentified
  REGION 1..85: note = Description of Unknown:hvTR_Q9QB93 target sequence
YDDKNFHNKFFTNIKTISSRSRVCVVLDECHNFISKSLIKEDGKQRPTKSVYNYLSKNISLNNNKMICLSATPIVNNVREFTMIV

SEQ ID NO: 24678 - protein, 85 aa, unidentified
  REGION 1..85: note = Description of Unknown:hvTR_Q9QB93 target sequence
NLLRPKIIQFQSLFENKNLVNEKELIDKLGGICSYIVNDEFSIFDDVEGSQSFAKKTVYMHYVNMTKQQEIIYQKAKIAEIKSGI

SEQ ID NO: 24679 - protein, 85 aa, unidentified
  REGION 1..85: note = Description of Unknown:hvTR_Q9QB93 target sequence
ASFRIYRRMAATFSFDSFPDKKKKTIDEITLELGALYKDFVNYVNKKSFSNNAIKLFKSGKGLTGDSNPLDISLLSELRQKSCKF

SEQ ID NO: 24680 - protein, 85 aa, unidentified
  REGION 1..85: note = Description of Unknown:hvTR_Q9QB93 target sequence
TEVCLKILASPGKCLVFEPFINQSGIEVLLVYFSVFCITSVEFSSRTKDTRIKNVFEFNKESNTNGEQIKVCVFSISGGEGISFF

SEQ ID NO: 24681 - protein, 85 aa, unidentified
  REGION 1..85: note = Description of Unknown:hvTR_Q9QB93 target sequence
SINDIFILDMTWNEASLKQIVGRAIRLNSHANTPPNRRYVNVYFIIARLSSGEPTVDEDLINIIKTKSKEFFQLFKVFKESSIEW

SEQ ID NO: 24682 - protein, 85 aa, unidentified
  REGION 1..85: note = Description of Unknown:hvTR_Q9QB93 target sequence
IYKNKKDFYPINDESGWRALTSRVVDVNVKSKRTVQLAQGQNIWFSNSSRMVTIHKGFKTSDGKIFDVDGNFIQNMPINPIIKIH

SEQ ID NO: 24683 - protein, 85 aa, unidentified; identical to SEQ ID NO: 24623
  REGION 1..85: note = Description of Unknown:hvTR_Q9DHM5 target sequence

SEQ ID NO: 24684 - protein, 85 aa, unidentified; identical to SEQ ID NO: 24624
  REGION 1..85: note = Description of Unknown:hvTR_Q9DHM5 target sequence

SEQ ID NO: 24685 - protein, 85 aa, unidentified; identical to SEQ ID NO: 24625
  REGION 1..85: note = Description of Unknown:hvTR_Q9DHM5 target sequence

SEQ ID NO: 24686 - protein, 85 aa, unidentified
  REGION 1..85: note = Description of Unknown:hvTR_Q9DHM5 target sequence
YMHYVNMTKQQENIYQKAKMAEIKSGITSFRIYRRMAATFSFDFFPDRKKKTIDEINLELNTLYKDFVNYINQKSFSDNAIKLFK

SEQ ID NO: 24687 - protein, 85 aa, unidentified; identical to SEQ ID NO: 24627
  REGION 1..85: note = Description of Unknown:hvTR_Q9DHM5 target sequence

SEQ ID NO: 24688 - protein, 85 aa, unidentified; identical to SEQ ID NO: 24628
  REGION 1..85: note = Description of Unknown:hvTR_Q9DHM5 target sequence

SEQ ID NO: 24689 - protein, 85 aa, unidentified; identical to SEQ ID NO: 24629
  REGION 1..85: note = Description of Unknown:hvTR_Q9DHM5 target sequence

SEQ ID NO: 24690 - protein, 84 aa, unidentified; identical to SEQ ID NO: 24630
  REGION 1..84: note = Description of Unknown:hvTR_Q9DHM5 target sequence

SEQ ID NO: 24691 - protein, 85 aa, unidentified; identical to SEQ ID NO: 24631
  REGION 1..85: note = Description of Unknown:hvTR_Q9DHM5 target sequence

SEQ ID NO: 24692 - protein, 85 aa, unidentified; identical to SEQ ID NO: 24632
  REGION 1..85: note = Description of Unknown:hvTR_Q9DHM5 target sequence

SEQ ID NO: 24693 - protein, 85 aa, unidentified; identical to SEQ ID NO: 24633
  REGION 1..85: note = Description of Unknown:hvTR_Q9DHM5 target sequence

SEQ ID NO: 24694 - protein, 85 aa, unidentified
  REGION 1..85: note = Description of Unknown:hvTR_Q9DHM5 target sequence
TSFRIYRRMAATFSFDFFPDRKKKTIDEINLELNTLYKDFVNYINQKSFSDNAIKLFKAGKGLTGDSNPLDISLLSELKQKSCKF

SEQ ID NO: 24695 - protein, 85 aa, unidentified; identical to SEQ ID NO: 24635
  REGION 1..85: note = Description of Unknown:hvTR_Q9DHM5 target sequence

SEQ ID NO: 24696 - protein, 85 aa, unidentified; identical to SEQ ID NO: 24636
  REGION 1..85: note = Description of Unknown:hvTR_Q9DHM5 target sequence

SEQ ID NO: 24697 - protein, 85 aa, unidentified; identical to SEQ ID NO: 24637
  REGION 1..85: note = Description of Unknown:hvTR_Q9DHM5 target sequence

SEQ ID NO: 24698 - protein, 85 aa, unidentified
  REGION 1..85: note = Description of Unknown:cds_NZ_WFIY01000004.1_cds_WP_155864074.1_2013 target sequence
NNFLLLFGIAFSMLVVMIYVIYEVEKWKSERRVLTALYIEGMMLTMNIGAYLYIAYHCLFYFLIINGAYAFLGLYSILSIKSIRR

SEQ ID NO: 24699 - protein, 85 aa, unidentified
  REGION 1..85: note = Description of Unknown:cds_NZ_WFIY01000004.1_cds_WP_155864074.1_2013 target sequence
RGVIYAIFSLFMVISEFFMGSLFVVLQTGKPVTIDSSVENVWFVSVMLAEMSFTFYLSFRKLDKITRNYLLSLLLLMPWFPALFP

SEQ ID NO: 24700 - protein, 85 aa, unidentified
  REGION 1..85: note = Description of Unknown:cds_NZ_WFIY01000004.1_cds_WP_155864074.1_2013 target sequence
NVVIPFWASAIIMIGATIMIYETLYNQRLRANQETFTTMELMAIYMLMMLGEFLYFIYSTLVVFDVSMMIAMSWFIFRSLAGPNS

SEQ ID NO: 24701 - protein, 85 aa, unidentified
  REGION 1..85: note = Description of Unknown:cds_NZ_WFIY01000004.1_cds_WP_155864074.1_2013 target sequence
IKGNYLRNSKLAFGIIFLTFVMEFFMGGTLDFVEGVFSPGISGFISSLSLPWLPLNNVQGAIWDFIDIVGSVLGSVWFLIMMGIE

SEQ ID NO: 24702 - protein, 85 aa, unidentified
  REGION 1..85: note = Description of Unknown:cds_NZ_WFIY01000004.1_cds_WP_155864074.1_2013 target sequence
MGFLAFKKMMEMHVREVRVRMMLMIIAYAIYSIYIPTFSPISSISQYVPYLWSMGIGTIAPVSNSVLVGLIGTYVVYAILSFLFG

SEQ ID NO: 24703 - protein, 85 aa, unidentified
  REGION 1..85: note = Description of Unknown:cds_NZ_WFIY01000004.1_cds_WP_155864074.1_2013 target sequence
SRNLCAVTCTAPLMYQGNFYDALKVYNRTSRLGKKTLTSKLSPWYKAIALGVSIFVLASAVISYLNSEGVIHFTVYGVDITLLIY

SEQ ID NO: 24704 - protein, 85 aa, unidentified
  REGION 1..85: note = Description of Unknown:cds_NZ_WFIY01000004.1_cds_WP_155864074.1_2013 target sequence
FIWFDIMWYILFISIPFLGTFACVTTGYCYWGVFNQAVSRIGLFRLKVKDPQQCLNCKTVDCANACPVGLTDMRAYFIKNGEFKS

SEQ ID NO: 24705 - protein, 84 aa, unidentified
  REGION 1..84: note = Description of Unknown:cds_NZ_WFIY01000004.1_cds_WP_155864074.1_2013 target sequence
AVSRIGLFRLKVKDPQQCLNCKTVDCANACPVGLTDMRAYFIKNGEFKSMKCIGIGECVNACPYDNIMFYDVRHWLREKFGKSK

SEQ ID NO: 24706 - protein, 85 aa, unidentified
  REGION 1..85: note = Description of Unknown:cds_NZ_WFIY01000004.1_cds_WP_155864074.1_2013 target sequence
KSERRVLTALYIEGMMLTMNIGAYLYIAYHCLFYFLIINGAYAFLGLYSILSIKSIRRRGVIYAIFSLFMVISEFFMGSLFVVLQ

SEQ ID NO: 24707 - protein, 85 aa, unidentified
  REGION 1..85: note = Description of Unknown:cds_NZ_WFIY01000004.1_cds_WP_155864074.1_2013 target sequence
TGKPVTIDSSVENVWFVSVMLAEMSFTFYLSFRKLDKITRNYLLSLLLLMPWFPALFPNVVIPFWASAIIMIGATIMIYETLYNQ

SEQ ID NO: 24708 - protein, 85 aa, unidentified
  REGION 1..85: note = Description of Unknown:cds_NZ_WFIY01000004.1_cds_WP_155864074.1_2013 target sequence
RLRANQETFTTMELMAIYMLMMLGEFLYFIYSTLVVFDVSMMIAMSWFIFRSLAGPNSIKGNYLRNSKLAFGIIFLTFVMEFFMG

SEQ ID NO: 24709 - protein, 85 aa, unidentified
  REGION 1..85: note = Description of Unknown:cds_NZ_WFIY01000004.1_cds_WP_155864074.1_2013 target sequence
GTLDFVEGVFSPGISGFISSLSLPWLPLNNVQGAIWDFIDIVGSVLGSVWFLIMMGIEMGFLAFKKMMEMHVREVRVRMMLMIIA

SEQ ID NO: 24710 - protein, 85 aa, unidentified
  REGION 1..85: note = Description of Unknown:cds_NZ_WFIY01000004.1_cds_WP_155864074.1_2013 target sequence
YAIYSIYIPTFSPISSISQYVPYLWSMGIGTIAPVSNSVLVGLIGTYVVYAILSFLFGSRNLCAVTCTAPLMYQGNFYDALKVYN

SEQ ID NO: 24711 - protein, 85 aa, unidentified
  REGION 1..85: note = Description of Unknown:cds_NZ_WFIY01000004.1_cds_WP_155864074.1_2013 target sequence
RTSRLGKKTLTSKLSPWYKAIALGVSIFVLASAVISYLNSEGVIHFTVYGVDITLLIYFIWFDIMWYILFISIPFLGTFACVTTG

SEQ ID NO: 24712 - protein, 85 aa, unidentified
  REGION 1..85: note = Description of Unknown:cds_NZ_WFIY01000004.1_cds_WP_155864074.1_2013 target sequence
YCYWGVFNQAVSRIGLFRLKVKDPQQCLNCKTVDCANACPVGLTDMRAYFIKNGEFKSMKCIGIGECVNACPYDNIMFYDVRHWL

SEQ ID NO: 24713 - protein, 85 aa, unidentified
  REGION 1..85: note = Description of Unknown:cds_NC_025805.1_cds_YP_009110700.1_6 target sequence
SLSWGDRPIAISTSSQSAATVRAASASFMASSTPMSTQRRSVLFKFVSGGDLVMTSGHLSPMDDWLADHQAALNSAAALLSDRDS

SEQ ID NO: 24714 - protein, 85 aa, unidentified
  REGION 1..85: note = Description of Unknown:cds_NC_025805.1_cds_YP_009110700.1_6 target sequence
LAHLEHPEKYLLRREHQPSEIVNRIRLYMSDVMKKSLSPETIPELVAHISTPATVVDAPSSVQTQVSDVIVTGPVPITVSETPAR

SEQ ID NO: 24715 - protein, 85 aa, unidentified
  REGION 1..85: note = Description of Unknown:cds_NC_025805.1_cds_YP_009110700.1_6 target sequence
YDEEEYNAARGKFLTHGVADLSTDTPGLSSFIREYWETVPTSTNGQWDSASKTGLLIRAPEDPLDSQTLFSLSWEKDLLLLSVSG

SEQ ID NO: 24716 - protein, 85 aa, unidentified
  REGION 1..85: note = Description of Unknown:cds_NC_025805.1_cds_YP_009110700.1_6 target sequence
VTVASFDVRDVSVLAPEHQRNGDNSEYARLTSTKHSVVFFTPRAIRWMIDNDCSDSMVSPRHIRVCLGFDPVFARWTGDGVSECA

SEQ ID NO: 24717 - protein, 85 aa, unidentified
  REGION 1..85: note = Description of Unknown:cds_NC_025805.1_cds_YP_009110700.1_6 target sequence
MLMDDRLKSIGKQRMVKRCLGYLRDSPSLLLVGACLGGAADRFINQYSPSAVDRCGYSLAPLPHSTPAPSEEVQRLNDEIQLLKA

SEQ ID NO: 24718 - protein, 85 aa, unidentified
  REGION 1..85: note = Description of Unknown:cds_NC_025805.1_cds_YP_009110700.1_6 target sequence
KLSASAEMIKSSSQAASTPSKLLSRISELTRQNKELLLRQSDFERSGSAQLLSYLEAHVCVNAKPFECDLLTKVGLDSMDVTRIR

SEQ ID NO: 24719 - protein, 85 aa, unidentified
  REGION 1..85: note = Description of Unknown:cds_NC_025805.1_cds_YP_009110700.1_6 target sequence
  MOD_RES 1: note = Any amino acid
XEREMNRVRFERRLSSAAIAEMKPEMDSLKAQLETQQSELEEVIDQCLFKDKTISDLESQVTSLKEELRVMSNRAVALNAENHRL

SEQ ID NO: 24720 - protein, 84 aa, unidentified
  REGION 1..84: note = Description of Unknown:cds_NC_025805.1_cds_YP_009110700.1_6 target sequence
QSELEEVIDQCLFKDKTISDLESQVTSLKEELRVMSNRAVALNAENHRLSVTTKTDAGWATPTDQPAYETPTRLPSKFDLVDEL

SEQ ID NO: 24721 - protein, 85 aa, unidentified
  REGION 1..85: note = Description of Unknown:cds_NC_025805.1_cds_YP_009110700.1_6 target sequence
FMASSTPMSTQRRSVLFKFVSGGDLVMTSGHLSPMDDWLADHQAALNSAAALLSDRDSLAHLEHPEKYLLRREHQPSEIVNRIRL

SEQ ID NO: 24722 - protein, 85 aa, unidentified
  REGION 1..85: note = Description of Unknown:cds_NC_025805.1_cds_YP_009110700.1_6 target sequence
YMSDVMKKSLSPETIPELVAHISTPATVVDAPSSVQTQVSDVIVTGPVPITVSETPARYDEEEYNAARGKFLTHGVADLSTDTPG

SEQ ID NO: 24723 - protein, 85 aa, unidentified
  REGION 1..85: note = Description of Unknown:cds_NC_025805.1_cds_YP_009110700.1_6 target sequence
LSSFIREYWETVPTSTNGQWDSASKTGLLIRAPEDPLDSQTLFSLSWEKDLLLLSVSGVTVASFDVRDVSVLAPEHQRNGDNSEY

SEQ ID NO: 24724 - protein, 85 aa, unidentified
  REGION 1..85: note = Description of Unknown:cds_NC_025805.1_cds_YP_009110700.1_6 target sequence
ARLTSTKHSVVFFTPRAIRWMIDNDCSDSMVSPRHIRVCLGFDPVFARWTGDGVSECAMLMDDRLKSIGKQRMVKRCLGYLRDSP

SEQ ID NO: 24725 - protein, 85 aa, unidentified
  REGION 1..85: note = Description of Unknown:cds_NC_025805.1_cds_YP_009110700.1_6 target sequence
SLLLVGACLGGAADRFINQYSPSAVDRCGYSLAPLPHSTPAPSEEVQRLNDEIQLLKAKLSASAEMIKSSSQAASTPSKLLSRIS

SEQ ID NO: 24726 - protein, 85 aa, unidentified
  REGION 1..85: note = Description of Unknown:cds_NC_025805.1_cds_YP_009110700.1_6 target sequence
  MOD_RES 59: note = Any amino acid
ELTRQNKELLLRQSDFERSGSAQLLSYLEAHVCVNAKPFECDLLTKVGLDSMDVTRIRXEREMNRVRFERRLSSAAIAEMKPEMD

SEQ ID NO: 24727 - protein, 85 aa, unidentified
  REGION 1..85: note = Description of Unknown:cds_NC_025805.1_cds_YP_009110700.1_6 target sequence
SLKAQLETQQSELEEVIDQCLFKDKTISDLESQVTSLKEELRVMSNRAVALNAENHRLSVTTKTDAGWATPTDQPAYETPTRLPS

SEQ ID NO: 24728 - protein, 85 aa, unidentified; identical to SEQ ID NO: 24713
  REGION 1..85: note = Description of Unknown:cds_NC_038666.1_cds_YP_009507784.1_6 target sequence

SEQ ID NO: 24729 - protein, 85 aa, unidentified
  REGION 1..85: note = Description of Unknown:cds_NC_038666.1_cds_YP_009507784.1_6 target sequence
LARLEHPEKYLLRREHQPSEIVNRIRLYMSDVMKKPLSPETIPELVAHISTPATVVDAPSSAQTQVSDVVVTGPVPITVSETPAR

SEQ ID NO: 24730 - protein, 85 aa, unidentified; identical to SEQ ID NO: 24715
  REGION 1..85: note = Description of Unknown:cds_NC_038666.1_cds_YP_009507784.1_6 target sequence

SEQ ID NO: 24731 - protein, 85 aa, unidentified
  REGION 1..85: note = Description of Unknown:cds_NC_038666.1_cds_YP_009507784.1_6 target sequence
VTVASFDVRDVSVLAPEHQRNGDNSEYARLTSTKHSVVFFTPRAIRWMIDNDCSDSMVSPRYIRVCLGFDPVFARWTGDGVSECA

SEQ ID NO: 24732 - protein, 85 aa, unidentified
  REGION 1..85: note = Description of Unknown:cds_NC_038666.1_cds_YP_009507784.1_6 target sequence
MLMDDRLKSIGKQRMVKRCLGYLRDSPSLLLVGACLGGAADRFINQYSPSAVDRCGYSLAPLPHSTPVPSEEIQRLNDEIQLLKA

SEQ ID NO: 24733 - protein, 85 aa, unidentified
  REGION 1..85: note = Description of Unknown:cds_NC_038666.1_cds_YP_009507784.1_6 target sequence
KLSASAEMIKSSSQVASTPSKLLSRISELTRQNKELLLRQSDFERSGSAQLLSYLEAHVCVNAKPFECDLLTKVGLDSMDVTRIR

SEQ ID NO: 24734 - protein, 85 aa, unidentified
  REGION 1..85: note = Description of Unknown:cds_NC_038666.1_cds_YP_009507784.1_6 target sequence
TEREMNRVRFERRLSSAAIAEMKPEMDSLKAQLETQQSELEEVIDQCLFKDKTISDLESQVTALKEELRVMSNRAVALNAENHRL

SEQ ID NO: 24735 - protein, 84 aa, unidentified
  REGION 1..84: note = Description of Unknown:cds_NC_038666.1_cds_YP_009507784.1_6 target sequence
QSELEEVIDQCLFKDKTISDLESQVTALKEELRVMSNRAVALNAENHRLSVTTKTDAGWATPTDQPAYETPTRPPSKFDLVDEL

SEQ ID NO: 24736 - protein, 85 aa, unidentified
  REGION 1..85: note = Description of Unknown:cds_NC_038666.1_cds_YP_009507784.1_6 target sequence
FMASSTPMSTQRRSVLFKFVSGGDLVMTSGHLSPMDDWLADHQAALNSAAALLSDRDSLARLEHPEKYLLRREHQPSEIVNRIRL

SEQ ID NO: 24737 - protein, 85 aa, unidentified
  REGION 1..85: note = Description of Unknown:cds_NC_038666.1_cds_YP_009507784.1_6 target sequence
YMSDVMKKPLSPETIPELVAHISTPATVVDAPSSAQTQVSDVVVTGPVPITVSETPARYDEEEYNAARGKFLTHGVADLSTDTPG

SEQ ID NO: 24738 - protein, 85 aa, unidentified; identical to SEQ ID NO: 24723
  REGION 1..85: note = Description of Unknown:cds_NC_038666.1_cds_YP_009507784.1_6 target sequence

SEQ ID NO: 24739 - protein, 85 aa, unidentified
  REGION 1..85: note = Description of Unknown:cds_NC_038666.1_cds_YP_009507784.1_6 target sequence
ARLTSTKHSVVFFTPRAIRWMIDNDCSDSMVSPRYIRVCLGFDPVFARWTGDGVSECAMLMDDRLKSIGKQRMVKRCLGYLRDSP

SEQ ID NO: 24740 - protein, 85 aa, unidentified
  REGION 1..85: note = Description of Unknown:cds_NC_038666.1_cds_YP_009507784.1_6 target sequence
SLLLVGACLGGAADRFINQYSPSAVDRCGYSLAPLPHSTPVPSEEIQRLNDEIQLLKAKLSASAEMIKSSSQVASTPSKLLSRIS

SEQ ID NO: 24741 - protein, 85 aa, unidentified
  REGION 1..85: note = Description of Unknown:cds_NC_038666.1_cds_YP_009507784.1_6 target sequence
ELTRQNKELLLRQSDFERSGSAQLLSYLEAHVCVNAKPFECDLLTKVGLDSMDVTRIRTEREMNRVRFERRLSSAAIAEMKPEMD

SEQ ID NO: 24742 - protein, 85 aa, unidentified
  REGION 1..85: note = Description of Unknown:cds_NC_038666.1_cds_YP_009507784.1_6 target sequence
SLKAQLETQQSELEEVIDQCLFKDKTISDLESQVTALKEELRVMSNRAVALNAENHRLSVTTKTDAGWATPTDQPAYETPTRPPS

SEQ ID NO: 24743 - protein, 85 aa, unidentified
  REGION 1..85: note = Description of Unknown:hvTR_Q5Y0P4 target sequence
EPSRGLGAPGRSSAQAAGDALLDEELLMLSRYFFPDSSDDDSDVDDDDDGGRDRPASDADTDAELCEPGPASRGPRAPSPPPPPR

SEQ ID NO: 24744 - protein, 85 aa, unidentified
  REGION 1..85: note = Description of Unknown:hvTR_Q5Y0P4 target sequence
EVCAVCTERIDETQLCAAFPCLHRFCIPCLKTWLPMRNSCPLCNAVVAYLIVGVKPDGSYSTIPVINDPRTRAEAEEAVRAGTAV

SEQ ID NO: 24745 - protein, 85 aa, unidentified
  REGION 1..85: note = Description of Unknown:hvTR_Q5Y0P4 target sequence
DFIWTHRLPGEAAPASVTLGGRTVRALSPPARMGQPAPRGGAAARAPRAAARVARPPPADSPILIADSPPASPRRPPAVSGPPVA

SEQ ID NO: 24746 - protein, 85 aa, unidentified
  REGION 1..85: note = Description of Unknown:hvTR_Q5Y0P4 target sequence
PVAPRPRAAMPRPPAQARPPALTQAQAQTQARSQARAQAALAQALAQALGRAPPRPAPPQHAHTQTPPRAQAQTQTQTPTQARAQ

SEQ ID NO: 24747 - protein, 85 aa, unidentified
  REGION 1..85: note = Description of Unknown:hvTR_Q5Y0P4 target sequence
TRAQTQAQTQTQAQAQAQAQAQTQTQTQARPETQTQAQTQARAQTQTQTQARKRPASGAGGASGSRGPKRASLPAPPDAPARPAQ

SEQ ID NO: 24748 - protein, 85 aa, unidentified
  REGION 1..85: note = Description of Unknown:hvTR_Q5Y0P4 target sequence
LPPAPPLAAAAPPPAPPPPPASSAPRGSAAPPPPAAPPPAERAHGSSLGPRPAERGPRKCARKTHHVDADRAPAASGPTRYLPIS

SEQ ID NO: 24749 - protein, 85 aa, unidentified
  REGION 1..85: note = Description of Unknown:hvTR_Q5Y0P4 target sequence
GVSSVVAMAPYLNKTVTGDCLPVLDMETGAIGAYVVLVGRDCNLARCLADAEPQWARRSRLPEAAPGCVSPPEYPGDPAHGLWMT

SEQ ID NO: 24750 - protein, 84 aa, unidentified
  REGION 1..84: note = Description of Unknown:hvTR_Q5Y0P4 target sequence
VLVGRDCNLARCLADAEPQWARRSRLPEAAPGCVSPPEYPGDPAHGLWMTPVGGMLFEQGALLGGRSFHSLDSRHPWTPAEGDP

SEQ ID NO: 24751 - protein, 85 aa, unidentified
  REGION 1..85: note = Description of Unknown:hvTR_Q5Y0P4 target sequence
MLSRYFFPDSSDDDSDVDDDDDGGRDRPASDADTDAELCEPGPASRGPRAPSPPPPPREVCAVCTERIDETQLCAAFPCLHRFCI

SEQ ID NO: 24752 - protein, 85 aa, unidentified
  REGION 1..85: note = Description of Unknown:hvTR_Q5Y0P4 target sequence
PCLKTWLPMRNSCPLCNAVVAYLIVGVKPDGSYSTIPVINDPRTRAEAEEAVRAGTAVDFIWTHRLPGEAAPASVTLGGRTVRAL

SEQ ID NO: 24753 - protein, 85 aa, unidentified
  REGION 1..85: note = Description of Unknown:hvTR_Q5Y0P4 target sequence
SPPARMGQPAPRGGAAARAPRAAARVARPPPADSPILIADSPPASPRRPPAVSGPPVAPVAPRPRAAMPRPPAQARPPALTQAQA

SEQ ID NO: 24754 - protein, 85 aa, unidentified
  REGION 1..85: note = Description of Unknown:hvTR_Q5Y0P4 target sequence
QTQARSQARAQAALAQALAQALGRAPPRPAPPQHAHTQTPPRAQAQTQTQTPTQARAQTRAQTQAQTQTQAQAQAQAQAQTQTQT

SEQ ID NO: 24755 - protein, 85 aa, unidentified
  REGION 1..85: note = Description of Unknown:hvTR_Q5Y0P4 target sequence
QARPETQTQAQTQARAQTQTQTQARKRPASGAGGASGSRGPKRASLPAPPDAPARPAQLPPAPPLAAAAPPPAPPPPPASSAPRG

SEQ ID NO: 24756 - protein, 85 aa, unidentified
  REGION 1..85: note = Description of Unknown:hvTR_Q5Y0P4 target sequence
SAAPPPPAAPPPAERAHGSSLGPRPAERGPRKCARKTHHVDADRAPAASGPTRYLPISGVSSVVAMAPYLNKTVTGDCLPVLDME

SEQ ID NO: 24757 - protein, 85 aa, unidentified
  REGION 1..85: note = Description of Unknown:hvTR_Q5Y0P4 target sequence
TGAIGAYVVLVGRDCNLARCLADAEPQWARRSRLPEAAPGCVSPPEYPGDPAHGLWMTPVGGMLFEQGALLGGRSFHSLDSRHPW

SEQ ID NO: 24758 - protein, 85 aa, unidentified
  REGION 1..85: note = Description of Unknown:cds_NC_030656.1_cds_YP_009268802.1_87 target sequence
NANIVKLFKNHVDNIPSILPHQLGTLDFLVRTVLENNNSVLLFHIMGSGKTIIALLFALVASRTKKVYILVPNINIMKIFTYSLD

SEQ ID NO: 24759 - protein, 85 aa, unidentified
  REGION 1..85: note = Description of Unknown:cds_NC_030656.1_cds_YP_009268802.1_87 target sequence
IAINLFSDEFILENIFIYSTTNFYSLNCTDNVINYNGLTRYENSIFIIDEAHNIFGNNTGDLMTVIKNKSQVPFLLLTASPITNT

SEQ ID NO: 24760 - protein, 85 aa, unidentified
  REGION 1..85: note = Description of Unknown:cds_NC_030656.1_cds_YP_009268802.1_87 target sequence
PITLSNIISLMSNEEIDFGDIVIQGRKVFQILLNERGVEILRKVLKGRISYYEMPDTDMPEVIYHGKKFLDTRVVYCHMSSLQEK

SEQ ID NO: 24761 - protein, 85 aa, unidentified
  REGION 1..85: note = Description of Unknown:cds_NC_030656.1_cds_YP_009268802.1_87 target sequence
DYINVRKLCNNEMFEKNMNNVSLAVLGPLNFINNLDVLFQVQDKDLYPNLKINNGVLYGDELINLNISSKFKYFISKVPSLSGKH

SEQ ID NO: 24762 - protein, 85 aa, unidentified
  REGION 1..85: note = Description of Unknown:cds_NC_030656.1_cds_YP_009268802.1_87 target sequence
FIYFSNSTYGGVVIKYIMLSNGYVEYTGLEPSSRSGNKKTFAIVTSKMKSSLEQLLELFNSPSNNDGSQIMFLFSSNIMAESYTL

SEQ ID NO: 24763 - protein, 85 aa, unidentified
  REGION 1..85: note = Description of Unknown:cds_NC_030656.1_cds_YP_009268802.1_87 target sequence
KEVRNIWFMTIPDTFSQYNQILGRALRKFSYNDVSKPVNVFLLAAVYSDFNMNIDTLDDFNLDEINMLPFDIKKLLYLKFKTKET

SEQ ID NO: 24764 - protein, 85 aa, unidentified
  REGION 1..85: note = Description of Unknown:cds_NC_030656.1_cds_YP_009268802.1_87 target sequence
NRIYSILKDISKSYSAPPHESITNIVLGEIVRQFFYHKTRVSYSDSKLRSIIKEVVDDGNSVSNYIDDISTKHFFVTNKVFNKAL

SEQ ID NO: 24765 - protein, 84 aa, unidentified
  REGION 1..84: note = Description of Unknown:cds_NC_030656.1_cds_YP_009268802.1_87 target sequence
YHKTRVSYSDSKLRSIIKEVVDDGNSVSNYIDDISTKHFFVTNKVFNKALLYKYKKDIITVPFKISHEPFTWALNFRKEQSIIE

SEQ ID NO: 24766 - protein, 85 aa, unidentified
  REGION 1..85: note = Description of Unknown:cds_NC_030656.1_cds_YP_009268802.1_87 target sequence
FLVRTVLENNNSVLLFHIMGSGKTIIALLFALVASRTKKVYILVPNINIMKIFTYSLDIAINLFSDEFILENIFIYSTTNFYSLN

SEQ ID NO: 24767 - protein, 85 aa, unidentified
  REGION 1..85: note = Description of Unknown:cds_NC_030656.1_cds_YP_009268802.1_87 target sequence
CTDNVINYNGLTRYENSIFIIDEAHNIFGNNTGDLMTVIKNKSQVPFLLLTASPITNTPITLSNIISLMSNEEIDFGDIVIQGRK

SEQ ID NO: 24768 - protein, 85 aa, unidentified
  REGION 1..85: note = Description of Unknown:cds_NC_030656.1_cds_YP_009268802.1_87 target sequence
VFQILLNERGVEILRKVLKGRISYYEMPDTDMPEVIYHGKKFLDTRVVYCHMSSLQEKDYINVRKLCNNEMFEKNMNNVSLAVLG

SEQ ID NO: 24769 - protein, 85 aa, unidentified
  REGION 1..85: note = Description of Unknown:cds_NC_030656.1_cds_YP_009268802.1_87 target sequence
PLNFINNLDVLFQVQDKDLYPNLKINNGVLYGDELINLNISSKFKYFISKVPSLSGKHFIYFSNSTYGGVVIKYIMLSNGYVEYT

SEQ ID NO: 24770 - protein, 85 aa, unidentified
  REGION 1..85: note = Description of Unknown:cds_NC_030656.1_cds_YP_009268802.1_87 target sequence
GLEPSSRSGNKKTFAIVTSKMKSSLEQLLELFNSPSNNDGSQIMFLFSSNIMAESYTLKEVRNIWFMTIPDTFSQYNQILGRALR

SEQ ID NO: 24771 - protein, 85 aa, unidentified
  REGION 1..85: note = Description of Unknown:cds_NC_030656.1_cds_YP_009268802.1_87 target sequence
KFSYNDVSKPVNVFLLAAVYSDFNMNIDTLDDFNLDEINMLPFDIKKLLYLKFKTKETNRIYSILKDISKSYSAPPHESITNIVL

SEQ ID NO: 24772 - protein, 85 aa, unidentified
  REGION 1..85: note = Description of Unknown:cds_NC_030656.1_cds_YP_009268802.1_87 target sequence
GEIVRQFFYHKTRVSYSDSKLRSIIKEVVDDGNSVSNYIDDISTKHFFVTNKVFNKALLYKYKKDIITVPFKISHEPFTWALNFR

SEQ ID NO: 24773 - protein, 85 aa, unidentified
  REGION 1..85: note = Description of Unknown:cds_NZ_WFIY01000004.1_cds_WP_155863365.1_1337 target sequence
SNPLTMKIDPITRVAGHLGLTATVDPNTRQVINNQAYTYVTMFRGFEVFLRGRQPPDAVHITSRSCGVCGAAHANASVRANDMAL

SEQ ID NO: 24774 - protein, 85 aa, unidentified
  REGION 1..85: note = Description of Unknown:cds_NZ_WFIY01000004.1_cds_WP_155863365.1_1337 target sequence
GAVPYPLGQALRNLAYAMTDTIYDHSIILNVLEGPDFSAEVMQQYYPSCWQAAQQTQAEYSDIHGFSTIADIMTALNPFTGWLWQ

SEQ ID NO: 24775 - protein, 85 aa, unidentified
  REGION 1..85: note = Description of Unknown:cds_NZ_WFIY01000004.1_cds_WP_155863365.1_1337 target sequence
KSVKYQIIAREAGVLIYGRHSHPPMLIPGGIGTDLSVGESLFTQYMYRLTKLTAWTKVVIAAWMDLANFLIDNCDYEKQGLTYAA

SEQ ID NO: 24776 - protein, 85 aa, unidentified
  REGION 1..85: note = Description of Unknown:cds_NZ_WFIY01000004.1_cds_WP_155863365.1_1337 target sequence
PTYISSYGFESPVLYSNLGDNYQDIYKNYDSLANTAEEGPQTVFRATIVRDGEFLSNSFIDLNVSQLEFVNSSFYHDWAKITSPF

SEQ ID NO: 24777 - protein, 85 aa, unidentified
  REGION 1..85: note = Description of Unknown:cds_NZ_WFIY01000004.1_cds_WP_155863365.1_1337 target sequence
TETDPIGNTLAWGLQDSDGVNLYMYHPWNKTTIPNPMAPNFMDKYSWDAEPRLVWKDGGMWAYETGPWARLHAVAKYHPHSPIVK

SEQ ID NO: 24778 - protein, 85 aa, unidentified
  REGION 1..85: note = Description of Unknown:cds_NZ_WFIY01000004.1_cds_WP_155863365.1_1337 target sequence
NGEISIELPTISELPSDLPSGAGPAWTVEWMPPDYSSTLSRILGRAVDMAAAIFTAWDNLEYALEVYMKNQSNPQTSRPWKQPSF

SEQ ID NO: 24779 - protein, 85 aa, unidentified
  REGION 1..85: note = Description of Unknown:cds_NZ_WFIY01000004.1_cds_WP_155863365.1_1337 target sequence
SLGVGQYEVPRGTSRHWMVVKDYTIANYQYHAPTTANVSPRDNNCNGPWCINGQAIGPFEMAVINTKIMEEVPPDQWVGYDFLRA

SEQ ID NO: 24780 - protein, 84 aa, unidentified
  REGION 1..84: note = Description of Unknown:cds_NZ_WFIY01000004.1_cds_WP_155863365.1_1337 target sequence
TANVSPRDNNCNGPWCINGQAIGPFEMAVINTKIMEEVPPDQWVGYDFLRAIRSFDPCLVCAAHFEIKGRNKKLEHIITPVCNS

SEQ ID NO: 24781 - protein, 85 aa, unidentified
  REGION 1..85: note = Description of Unknown:cds_NZ_WFIY01000004.1_cds_WP_155863365.1_1337 target sequence
TRQVINNQAYTYVTMFRGFEVFLRGRQPPDAVHITSRSCGVCGAAHANASVRANDMALGAVPYPLGQALRNLAYAMTDTIYDHSI

SEQ ID NO: 24782 - protein, 85 aa, unidentified
  REGION 1..85: note = Description of Unknown:cds_NZ_WFIY01000004.1_cds_WP_155863365.1_1337 target sequence
ILNVLEGPDFSAEVMQQYYPSCWQAAQQTQAEYSDIHGFSTIADIMTALNPFTGWLWQKSVKYQIIAREAGVLIYGRHSHPPMLI

SEQ ID NO: 24783 - protein, 85 aa, unidentified
  REGION 1..85: note = Description of Unknown:cds_NZ_WFIY01000004.1_cds_WP_155863365.1_1337 target sequence
PGGIGTDLSVGESLFTQYMYRLTKLTAWTKVVIAAWMDLANFLIDNCDYEKQGLTYAAPTYISSYGFESPVLYSNLGDNYQDIYK

SEQ ID NO: 24784 - protein, 85 aa, unidentified
  REGION 1..85: note = Description of Unknown:cds_NZ_WFIY01000004.1_cds_WP_155863365.1_1337 target sequence
NYDSLANTAEEGPQTVFRATIVRDGEFLSNSFIDLNVSQLEFVNSSFYHDWAKITSPFTETDPIGNTLAWGLQDSDGVNLYMYHP

SEQ ID NO: 24785 - protein, 85 aa, unidentified
  REGION 1..85: note = Description of Unknown:cds_NZ_WFIY01000004.1_cds_WP_155863365.1_1337 target sequence
WNKTTIPNPMAPNFMDKYSWDAEPRLVWKDGGMWAYETGPWARLHAVAKYHPHSPIVKNGEISIELPTISELPSDLPSGAGPAWT

SEQ ID NO: 24786 - protein, 85 aa, unidentified
  REGION 1..85: note = Description of Unknown:cds_NZ_WFIY01000004.1_cds_WP_155863365.1_1337 target sequence
VEWMPPDYSSTLSRILGRAVDMAAAIFTAWDNLEYALEVYMKNQSNPQTSRPWKQPSFSLGVGQYEVPRGTSRHWMVVKDYTIAN

SEQ ID NO: 24787 - protein, 85 aa, unidentified
  REGION 1..85: note = Description of Unknown:cds_NZ_WFIY01000004.1_cds_WP_155863365.1_1337 target sequence
YQYHAPTTANVSPRDNNCNGPWCINGQAIGPFEMAVINTKIMEEVPPDQWVGYDFLRAIRSFDPCLVCAAHFEIKGRNKKLEHII

SEQ ID NO: 24788 - protein, 85 aa, unidentified
  REGION 1..85: note = Description of Unknown:cds_NZ_WFIY01000004.1_cds_WP_155864022.1_1953 target sequence
SSSKVGGAKDYGTTSDKLLRRSLNKWELLFLSVGGVIGSGWLFGALYTAAYAGGAGILSWIIAGVLVMFVGLAYGELGAAIPKSG

SEQ ID NO: 24789 - protein, 85 aa, unidentified
  REGION 1..85: note = Description of Unknown:cds_NZ_WFIY01000004.1_cds_WP_155864022.1_1953 target sequence
GIVRYPHYTHGGVTGYIITWAYFLSASSVPAIEATATITYLSALVPGLIYPNGVLTPLGILSAYIILILFFLLQYAGVGILGKVT

SEQ ID NO: 24790 - protein, 85 aa, unidentified
  REGION 1..85: note = Description of Unknown:cds_NZ_WFIY01000004.1_cds_WP_155864022.1_1953 target sequence
HGVGWWKLIVPVLTVIFLMAFYFHPANFTMGGGFFPSASMNASGFSGFAPVLYAIPTTGVIFSYLGFRQAIEYGGEGKNPQKDIP

SEQ ID NO: 24791 - protein, 85 aa, unidentified
  REGION 1..85: note = Description of Unknown:cds_NZ_WFIY01000004.1_cds_WP_155864022.1_1953 target sequence
FAVIGALVIGLIIYTLLQVAFTGAIDWSSVTVQAGNKTEPVTPGNWTALTHSNLVSGPYYAIFTTANVFGPIATLFAVWSYILLI

SEQ ID NO: 24792 - protein, 85 aa, unidentified
  REGION 1..85: note = Description of Unknown:cds_NZ_WFIY01000004.1_cds_WP_155864022.1_1953 target sequence
DAVLSPSGTGWIYIGTAGRTVYGFATNGYLPGLFLKIGRTKVPVIALITATIIAAIFMLPFPSWESLVGFISSATVFTYIMGGIG

SEQ ID NO: 24793 - protein, 85 aa, unidentified
  REGION 1..85: note = Description of Unknown:cds_NZ_WFIY01000004.1_cds_WP_155864022.1_1953 target sequence
LETLRKTAPDLKRNFKLPAAKVIAPIATLASGLIVYWSGFATLFYVVTAIFLGFPLFFGYYAVRLGVPKKLAYSLGIIDLAVILL

SEQ ID NO: 24794 - protein, 85 aa, unidentified
  REGION 1..85: note = Description of Unknown:cds_NZ_WFIY01000004.1_cds_WP_155864022.1_1953 target sequence
TAYDFDLATSGLSAGNTIALILYTLIMIGVSLSNVVVLWSFSNDDVKKEIKASYWIFAFIFAIFLLSYFGALGLDPIIPFPTDVI

SEQ ID NO: 24795 - protein, 84 aa, unidentified
  REGION 1..84: note = Description of Unknown:cds_NZ_WFIY01000004.1_cds_WP_155864022.1_1953 target sequence
VVVLWSFSNDDVKKEIKASYWIFAFIFAIFLLSYFGALGLDPIIPFPTDVIIAAIVVLIFHYIAVKSGFRTEAIDEILEETREP

SEQ ID NO: 24796 - protein, 85 aa, unidentified
  REGION 1..85: note = Description of Unknown:cds_NZ_WFIY01000004.1_cds_WP_155864022.1_1953 target sequence
LLFLSVGGVIGSGWLFGALYTAAYAGGAGILSWIIAGVLVMFVGLAYGELGAAIPKSGGIVRYPHYTHGGVTGYIITWAYFLSAS

SEQ ID NO: 24797 - protein, 85 aa, unidentified
  REGION 1..85: note = Description of Unknown:cds_NZ_WFIY01000004.1_cds_WP_155864022.1_1953 target sequence
SVPAIEATATITYLSALVPGLIYPNGVLTPLGILSAYIILILFFLLQYAGVGILGKVTHGVGWWKLIVPVLTVIFLMAFYFHPAN

SEQ ID NO: 24798 - protein, 85 aa, unidentified
  REGION 1..85: note = Description of Unknown:cds_NZ_WFIY01000004.1_cds_WP_155864022.1_1953 target sequence
FTMGGGFFPSASMNASGFSGFAPVLYAIPTTGVIFSYLGFRQAIEYGGEGKNPQKDIPFAVIGALVIGLIIYTLLQVAFTGAIDW

SEQ ID NO: 24799 - protein, 85 aa, unidentified
  REGION 1..85: note = Description of Unknown:cds_NZ_WFIY01000004.1_cds_WP_155864022.1_1953 target sequence
SSVTVQAGNKTEPVTPGNWTALTHSNLVSGPYYAIFTTANVFGPIATLFAVWSYILLIDAVLSPSGTGWIYIGTAGRTVYGFATN

SEQ ID NO: 24800 - protein, 85 aa, unidentified
  REGION 1..85: note = Description of Unknown:cds_NZ_WFIY01000004.1_cds_WP_155864022.1_1953 target sequence
GYLPGLFLKIGRTKVPVIALITATIIAAIFMLPFPSWESLVGFISSATVFTYIMGGIGLETLRKTAPDLKRNFKLPAAKVIAPIA

SEQ ID NO: 24801 - protein, 85 aa, unidentified
  REGION 1..85: note = Description of Unknown:cds_NZ_WFIY01000004.1_cds_WP_155864022.1_1953 target sequence
TLASGLIVYWSGFATLFYVVTAIFLGFPLFFGYYAVRLGVPKKLAYSLGIIDLAVILLTAYDFDLATSGLSAGNTIALILYTLIM

SEQ ID NO: 24802 - protein, 85 aa, unidentified
  REGION 1..85: note = Description of Unknown:cds_NZ_WFIY01000004.1_cds_WP_155864022.1_1953 target sequence
IGVSLSNVVVLWSFSNDDVKKEIKASYWIFAFIFAIFLLSYFGALGLDPIIPFPTDVIIAAIVVLIFHYIAVKSGFRTEAIDEIL

SEQ ID NO: 24803 - protein, 85 aa, unidentified
  REGION 1..85: note = Description of Unknown:cds_NZ_WFIY01000004.1_cds_WP_155863121.1_1040 target sequence
VNYTLENIEDTIYLKTDSIRQPEIVLFPEVSIGKEPWVIQKGNKLIQIDGKEEVLEETQGDFLGVTYINVEGVYEKILQIKENEY

SEQ ID NO: 24804 - protein, 85 aa, unidentified
  REGION 1..85: note = Description of Unknown:cds_NZ_WFIY01000004.1_cds_WP_155863121.1_1040 target sequence
IFRGNKYNEFLKYFNTCILENSKKITLIYDNMEINREKPKYYIVNKNAISLVYDGYTEIISKSGSFRINEEKILLGKQGNKLVFQ

SEQ ID NO: 24805 - protein, 85 aa, unidentified
  REGION 1..85: note = Description of Unknown:cds_NZ_WFIY01000004.1_cds_WP_155863121.1_1040 target sequence
TLDGKILLEDEVIGFCENKAELLGVIGNGVVISCVDRVKYFNDGIWQEIEINVNPFLSFVNSNFIILTTNIHTLVYDKNLFLIYK

SEQ ID NO: 24806 - protein, 85 aa, unidentified
  REGION 1..85: note = Description of Unknown:cds_NZ_WFIY01000004.1_cds_WP_155863121.1_1040 target sequence
FLSSASSATTRYIVLFTNPFVGVVDSLDNEEVMKVEKTVLDESSPIKILIRKNYDIEYQNVIEVNRKDTNSNYYQVEVEPKLLGD

SEQ ID NO: 24807 - protein, 85 aa, unidentified
  REGION 1..85: note = Description of Unknown:cds_NZ_WFIY01000004.1_cds_WP_155863121.1_1040 target sequence
YEAKFKLISPFFSLNVNIPIISEKPKIYAKGSIIRTNGEVLGTKMNSYLNITINAKIVTNIPYTIRIRFRNQSFDIIFDKKEINK

SEQ ID NO: 24808 - protein, 85 aa, unidentified
  REGION 1..85: note = Description of Unknown:cds_NZ_WFIY01000004.1_cds_WP_155863121.1_1040 target sequence
ELKIPVNIFNQKESNEIIKIEVIRNNTIQTSMELLVPIIFVEPPSEWKSKIIDHGNYIEKILYTSRGDISWTKVYHYPMHKKALL

SEQ ID NO: 24809 - protein, 85 aa, unidentified
  REGION 1..85: note = Description of Unknown:cds_NZ_WFIY01000004.1_cds_WP_155863121.1_1040 target sequence
VKEGLKEGVKVSGDKVIVNLEDPIISLYYTVDYPYLVLIPNMRYYYPIEVFYGTHSYRGLPEKIIFPLDPAYNEIFFRVYVGDKI

SEQ ID NO: 24810 - protein, 84 aa, unidentified
  REGION 1..84: note = Description of Unknown:cds_NZ_WFIY01000004.1_cds_WP_155863121.1_1040 target sequence
YLVLIPNMRYYYPIEVFYGTHSYRGLPEKIIFPLDPAYNEIFFRVYVGDKIIKRTYKIPKEIYFKVAASSKCKLEELLKTFGIV

SEQ ID NO: 24811 - protein, 85 aa, unidentified
  REGION 1..85: note = Description of Unknown:cds_NZ_WFIY01000004.1_cds_WP_155863121.1_1040 target sequence
PEVSIGKEPWVIQKGNKLIQIDGKEEVLEETQGDFLGVTYINVEGVYEKILQIKENEYIFRGNKYNEFLKYFNTCILENSKKITL

SEQ ID NO: 24812 - protein, 85 aa, unidentified
  REGION 1..85: note = Description of Unknown:cds_NZ_WFIY01000004.1_cds_WP_155863121.1_1040 target sequence
IYDNMEINREKPKYYIVNKNAISLVYDGYTEIISKSGSFRINEEKILLGKQGNKLVFQTLDGKILLEDEVIGFCENKAELLGVIG

SEQ ID NO: 24813 - protein, 85 aa, unidentified
  REGION 1..85: note = Description of Unknown:cds_NZ_WFIY01000004.1_cds_WP_155863121.1_1040 target sequence
NGVVISCVDRVKYFNDGIWQEIEINVNPFLSFVNSNFIILTTNIHTLVYDKNLFLIYKFLSSASSATTRYIVLFTNPFVGVVDSL

SEQ ID NO: 24814 - protein, 85 aa, unidentified
  REGION 1..85: note = Description of Unknown:cds_NZ_WFIY01000004.1_cds_WP_155863121.1_1040 target sequence
DNEEVMKVEKTVLDESSPIKILIRKNYDIEYQNVIEVNRKDTNSNYYQVEVEPKLLGDYEAKFKLISPFFSLNVNIPIISEKPKI

SEQ ID NO: 24815 - protein, 85 aa, unidentified
  REGION 1..85: note = Description of Unknown:cds_NZ_WFIY01000004.1_cds_WP_155863121.1_1040 target sequence
YAKGSIIRTNGEVLGTKMNSYLNITINAKIVTNIPYTIRIRFRNQSFDIIFDKKEINKELKIPVNIFNQKESNEIIKIEVIRNNT

SEQ ID NO: 24816 - protein, 85 aa, unidentified
  REGION 1..85: note = Description of Unknown:cds_NZ_WFIY01000004.1_cds_WP_155863121.1_1040 target sequence
IQTSMELLVPIIFVEPPSEWKSKIIDHGNYIEKILYTSRGDISWTKVYHYPMHKKALLVKEGLKEGVKVSGDKVIVNLEDPIISL

SEQ ID NO: 24817 - protein, 85 aa, unidentified
  REGION 1..85: note = Description of Unknown:cds_NZ_WFIY01000004.1_cds_WP_155863121.1_1040 target sequence
YYTVDYPYLVLIPNMRYYYPIEVFYGTHSYRGLPEKIIFPLDPAYNEIFFRVYVGDKIIKRTYKIPKEIYFKVAASSKCKLEELL

SEQ ID NO: 24818 - protein, 85 aa, unidentified
  REGION 1..85: note = Description of Unknown:cds_NZ_WFIY01000004.1_cds_WP_155863863.1_1766 target sequence
KYVTTIMIVMILLISFIPLMGNSEVSYNITGYAKVEGLIAPGESEVPITFTLINTGGTLYNVNITPISIYPFEVYSGYYNSTSIV

SEQ ID NO: 24819 - protein, 85 aa, unidentified
  REGION 1..85: note = Description of Unknown:cds_NZ_WFIY01000004.1_cds_WP_155863863.1_1766 target sequence
NIPELQTGQEINVTFLYNIAQSAKDGIYKIQLKINSAELNKTISFTVPILGYVQISAQSTWGTPSSPIIVTAGERDVPLTIILIN

SEQ ID NO: 24820 - protein, 85 aa, unidentified
  REGION 1..85: note = Description of Unknown:cds_NZ_WFIY01000004.1_cds_WP_155863863.1_1766 target sequence
QGNVIATNVSLCLPSTYPVDFLEKNVKVGYLPVGEEIPVTVYASIFNNATTGVFYVPIKVKYFISSCCIVNLPVIISGYENFSIS

SEQ ID NO: 24821 - protein, 85 aa, unidentified
  REGION 1..85: note = Description of Unknown:cds_NZ_WFIY01000004.1_cds_WP_155863863.1_1766 target sequence
TIWGTTSSPITASPGSVQLPLTFIVRNLGDVTATNVSIQIVRSYPLILSQNIIYIGIVPAGEYNLNTITASVYPNATPGIYYIKA

SEQ ID NO: 24822 - protein, 85 aa, unidentified
  REGION 1..85: note = Description of Unknown:cds_NZ_WFIY01000004.1_cds_WP_155863863.1_1766 target sequence
VVHYFDTSSTEYIPVLISAPQLSLNAITIPPQIFPGYFDVRVEAIILNHGSGTAQNAYVYLKSPFEVISQNNISLGAIPPGIPIN

SEQ ID NO: 24823 - protein, 85 aa, unidentified
  REGION 1..85: note = Description of Unknown:cds_NZ_WFIY01000004.1_cds_WP_155863863.1_1766 target sequence
ATFLINVPNSTKPGEYNLTFIIKYDGGEIEKTINVTVYNKANIVIEKIIYPTINSGSSAVPITIVLKNVGNATACNVKVILGSSN

SEQ ID NO: 24824 - protein, 85 aa, unidentified
  REGION 1..85: note = Description of Unknown:cds_NZ_WFIY01000004.1_cds_WP_155863863.1_1766 target sequence
VITPHVSTSNPLEALTASEQEIGDLKPGEEINVTYIVDISSGASPGYYPISIILVWNQTGSIYPLVQTDESTIYISPSLLSQITS

SEQ ID NO: 24825 - protein, 84 aa, unidentified
  REGION 1..84: note = Description of Unknown:cds_NZ_WFIY01000004.1_cds_WP_155863863.1_1766 target sequence
TYIVDISSGASPGYYPISIILVWNQTGSIYPLVQTDESTIYISPSLLSQITSYDVVSIPLIYIAIIVVIIIILIVIAVARRGKK

SEQ ID NO: 24826 - protein, 85 aa, unidentified
  REGION 1..85: note = Description of Unknown:cds_NZ_WFIY01000004.1_cds_WP_155863863.1_1766 target sequence
NITGYAKVEGLIAPGESEVPITFTLINTGGTLYNVNITPISIYPFEVYSGYYNSTSIVNIPELQTGQEINVTFLYNIAQSAKDGI

SEQ ID NO: 24827 - protein, 85 aa, unidentified
  REGION 1..85: note = Description of Unknown:cds_NZ_WFIY01000004.1_cds_WP_155863863.1_1766 target sequence
YKIQLKINSAELNKTISFTVPILGYVQISAQSTWGTPSSPIIVTAGERDVPLTIILINQGNVIATNVSLCLPSTYPVDFLEKNVK

SEQ ID NO: 24828 - protein, 85 aa, unidentified
  REGION 1..85: note = Description of Unknown:cds_NZ_WFIY01000004.1_cds_WP_155863863.1_1766 target sequence
VGYLPVGEEIPVTVYASIFNNATTGVFYVPIKVKYFISSCCIVNLPVIISGYENFSISTIWGTTSSPITASPGSVQLPLTFIVRN

SEQ ID NO: 24829 - protein, 85 aa, unidentified
  REGION 1..85: note = Description of Unknown:cds_NZ_WFIY01000004.1_cds_WP_155863863.1_1766 target sequence
LGDVTATNVSIQIVRSYPLILSQNIIYIGIVPAGEYNLNTITASVYPNATPGIYYIKAVVHYFDTSSTEYIPVLISAPQLSLNAI

SEQ ID NO: 24830 - protein, 85 aa, unidentified
  REGION 1..85: note = Description of Unknown:cds_NZ_WFIY01000004.1_cds_WP_155863863.1_1766 target sequence
TIPPQIFPGYFDVRVEAIILNHGSGTAQNAYVYLKSPFEVISQNNISLGAIPPGIPINATFLINVPNSTKPGEYNLTFIIKYDGG

SEQ ID NO: 24831 - protein, 85 aa, unidentified
  REGION 1..85: note = Description of Unknown:cds_NZ_WFIY01000004.1_cds_WP_155863863.1_1766 target sequence
EIEKTINVTVYNKANIVIEKIIYPTINSGSSAVPITIVLKNVGNATACNVKVILGSSNVITPHVSTSNPLEALTASEQEIGDLKP

SEQ ID NO: 24832 - protein, 85 aa, unidentified
  REGION 1..85: note = Description of Unknown:cds_NZ_WFIY01000004.1_cds_WP_155863863.1_1766 target sequence
GEEINVTYIVDISSGASPGYYPISIILVWNQTGSIYPLVQTDESTIYISPSLLSQITSYDVVSIPLIYIAIIVVIIIILIVIAVA

SEQ ID NO: 24833 - protein, 85 aa, unidentified
  REGION 1..85: note = Description of Unknown:cds_NZ_WFIY01000004.1_cds_WP_155863234.1_1181 target sequence
DKRKKRIVEVIILFFVLLLSFPGFFVIGASSESCHSNPYYPSYLLLSNWKNISVWIPTGIQVINRELNGFPQYNASIRNIFLGGI

SEQ ID NO: 24834 - protein, 85 aa, unidentified
  REGION 1..85: note = Description of Unknown:cds_NZ_WFIY01000004.1_cds_WP_155863234.1_1181 target sequence
GILNLTVCLGINTTKAYLQLNNTALLECNNSICIILPPYTSYLLLILGVKTPFNITIKSNSSWLAQDNEFKNNISWLISNGSVII

SEQ ID NO: 24835 - protein, 85 aa, unidentified
  REGION 1..85: note = Description of Unknown:cds_NZ_WFIY01000004.1_cds_WP_155863234.1_1181 target sequence
KRTNLILSFQKTGVYYVEISLLVPPYENVSHLLLLNNKVVKSWLNKSVIPKYLPKSLLREYYLSLLLIKDDQNPYLGDFAASPSP

SEQ ID NO: 24836 - protein, 85 aa, unidentified
  REGION 1..85: note = Description of Unknown:cds_NZ_WFIY01000004.1_cds_WP_155863234.1_1181 target sequence
IYLYSWVRDSSFAALALQESGHYYSALKYWLWMANATSMGNGTWYTRYNFYSGKPCIGFGIPELDSLGLFEIGVYNFYILTHNVS

SEQ ID NO: 24837 - protein, 85 aa, unidentified
  REGION 1..85: note = Description of Unknown:cds_NZ_WFIY01000004.1_cds_WP_155863234.1_1181 target sequence
FLYEVKPRLCEIIKYQTYEILESKFHLVPEDLSVWEDRLAYHFWTQSFNDLGLYDMEKLGFNVSYEEKLLNESILKYFWKNGYFA

SEQ ID NO: 24838 - protein, 85 aa, unidentified
  REGION 1..85: note = Description of Unknown:cds_NZ_WFIY01000004.1_cds_WP_155863234.1_1181 target sequence
SALGESVLYEENGEVEVLCPLPPAIDSSTLLPLDMGYLPLDSNYTNQDFNSVVSNLTVNGGLSRFPDDLYHYSESLYDSCEPSPP

SEQ ID NO: 24839 - protein, 85 aa, unidentified
  REGION 1..85: note = Description of Unknown:cds_NZ_WFIY01000004.1_cds_WP_155863234.1_1181 target sequence
WVITTLFEALYYAEKGEINSSIRLLCWAYNHSQQGLLPEAVAPVKGYPLPTTSPLTWSSAMFIIVSLSLKSQTSATIKECPKEFI

SEQ ID NO: 24840 - protein, 84 aa, unidentified
  REGION 1..84: note = Description of Unknown:cds_NZ_WFIY01000004.1_cds_WP_155863234.1_1181 target sequence
YNHSQQGLLPEAVAPVKGYPLPTTSPLTWSSAMFIIVSLSLKSQTSATIKECPKEFILSSITILVIFTISVIINRKIILHSGHS

SEQ ID NO: 24841 - protein, 85 aa, unidentified
  REGION 1..85: note = Description of Unknown:cds_NZ_WFIY01000004.1_cds_WP_155863234.1_1181 target sequence
GASSESCHSNPYYPSYLLLSNWKNISVWIPTGIQVINRELNGFPQYNASIRNIFLGGIGILNLTVCLGINTTKAYLQLNNTALLE

SEQ ID NO: 24842 - protein, 85 aa, unidentified
  REGION 1..85: note = Description of Unknown:cds_NZ_WFIY01000004.1_cds_WP_155863234.1_1181 target sequence
CNNSICIILPPYTSYLLLILGVKTPFNITIKSNSSWLAQDNEFKNNISWLISNGSVIIKRTNLILSFQKTGVYYVEISLLVPPYE

SEQ ID NO: 24843 - protein, 85 aa, unidentified
  REGION 1..85: note = Description of Unknown:cds_NZ_WFIY01000004.1_cds_WP_155863234.1_1181 target sequence
NVSHLLLLNNKVVKSWLNKSVIPKYLPKSLLREYYLSLLLIKDDQNPYLGDFAASPSPIYLYSWVRDSSFAALALQESGHYYSAL

SEQ ID NO: 24844 - protein, 85 aa, unidentified
  REGION 1..85: note = Description of Unknown:cds_NZ_WFIY01000004.1_cds_WP_155863234.1_1181 target sequence
KYWLWMANATSMGNGTWYTRYNFYSGKPCIGFGIPELDSLGLFEIGVYNFYILTHNVSFLYEVKPRLCEIIKYQTYEILESKFHL

SEQ ID NO: 24845 - protein, 85 aa, unidentified
  REGION 1..85: note = Description of Unknown:cds_NZ_WFIY01000004.1_cds_WP_155863234.1_1181 target sequence
VPEDLSVWEDRLAYHFWTQSFNDLGLYDMEKLGFNVSYEEKLLNESILKYFWKNGYFASALGESVLYEENGEVEVLCPLPPAIDS

SEQ ID NO: 24846 - protein, 85 aa, unidentified
  REGION 1..85: note = Description of Unknown:cds_NZ_WFIY01000004.1_cds_WP_155863234.1_1181 target sequence
STLLPLDMGYLPLDSNYTNQDFNSVVSNLTVNGGLSRFPDDLYHYSESLYDSCEPSPPWVITTLFEALYYAEKGEINSSIRLLCW

SEQ ID NO: 24847 - protein, 85 aa, unidentified
  REGION 1..85: note = Description of Unknown:cds_NZ_WFIY01000004.1_cds_WP_155863234.1_1181 target sequence
AYNHSQQGLLPEAVAPVKGYPLPTTSPLTWSSAMFIIVSLSLKSQTSATIKECPKEFILSSITILVIFTISVIINRKIILHSGHS

SEQ ID NO: 24848 - protein, 85 aa, unidentified
  REGION 1..85: note = Description of Unknown:cds_NC_025351.1_cds_YP_009094086.1_6 target sequence
LSQLQKNYLDNSNQQGDKMNNPDKKLSVNFNPLELDKGQKDLNKSYYVKNKNYNVSNLLNESLHDIKFCIYCIFSLLIIITIINI

SEQ ID NO: 24849 - protein, 85 aa, unidentified
  REGION 1..85: note = Description of Unknown:cds_NC_025351.1_cds_YP_009094086.1_6 target sequence
ITISIVITRLKVHEENNGMESPNLQSIQDSLSSLTNMINTEITPRIGILVTATSVTLSSSINYVGTKTNQLVNELKDYITKSCGF

SEQ ID NO: 24850 - protein, 85 aa, unidentified
  REGION 1..85: note = Description of Unknown:cds_NC_025351.1_cds_YP_009094086.1_6 target sequence
KVPELKLHECNISCADPKISKSAMYSTNAYAELAGPPKIFCKSVSKDPDFRLKQIDYVIPVQQDRSICMNNPLLDISDGFFTYIH

SEQ ID NO: 24851 - protein, 85 aa, unidentified
  REGION 1..85: note = Description of Unknown:cds_NC_025351.1_cds_YP_009094086.1_6 target sequence
YEGINSCKKSDSFKVLLSHGEIVDRGDYRPSLYLLSSHYHPYSMQVINCVPVTCNQSSFVFCHISNNTKTLDNSDYSSDEYYITY

SEQ ID NO: 24852 - protein, 85 aa, unidentified
  REGION 1..85: note = Description of Unknown:cds_NC_025351.1_cds_YP_009094086.1_6 target sequence
FNGIDRPKTKKIPINNMTADNRYIHFTFSGGGGVCLGEEFIIPVTTVINTDVFTHDYCESFNCSVQTGKSLKEICSESLRSPTNS

SEQ ID NO: 24853 - protein, 85 aa, unidentified
  REGION 1..85: note = Description of Unknown:cds_NC_025351.1_cds_YP_009094086.1_6 target sequence
SRYNLNGIMIISQNNMTDFKIQLNGITYNKLSFGSPGRLSKTLGQVLYYQSSMSWDTYLKAGFVEKWKPFTPNWMNNTVISRPNQ

SEQ ID NO: 24854 - protein, 85 aa, unidentified
  REGION 1..85: note = Description of Unknown:cds_NC_025351.1_cds_YP_009094086.1_6 target sequence
GNCPRYHKCPEICYGGTYNDIAPLDLGKDMYVSVILDSDQLAENPEITVFNSTTILYKERVSKDELNTRSTTTSCFLFLDEPWCI

SEQ ID NO: 24855 - protein, 84 aa, unidentified
  REGION 1..84: note = Description of Unknown:cds_NC_025351.1_cds_YP_009094086.1_6 target sequence
KDMYVSVILDSDQLAENPEITVFNSTTILYKERVSKDELNTRSTTTSCFLFLDEPWCISVLETNRFNGKSIRPEIYSYKIPKYC

SEQ ID NO: 24856 - protein, 85 aa, unidentified
  REGION 1..85: note = Description of Unknown:cds_NC_025351.1_cds_YP_009094086.1_6 target sequence
VNFNPLELDKGQKDLNKSYYVKNKNYNVSNLLNESLHDIKFCIYCIFSLLIIITIINIITISIVITRLKVHEENNGMESPNLQSI

SEQ ID NO: 24857 - protein, 85 aa, unidentified
  REGION 1..85: note = Description of Unknown:cds_NC_025351.1_cds_YP_009094086.1_6 target sequence
QDSLSSLTNMINTEITPRIGILVTATSVTLSSSINYVGTKTNQLVNELKDYITKSCGFKVPELKLHECNISCADPKISKSAMYST

SEQ ID NO: 24858 - protein, 85 aa, unidentified
  REGION 1..85: note = Description of Unknown:cds_NC_025351.1_cds_YP_009094086.1_6 target sequence
NAYAELAGPPKIFCKSVSKDPDFRLKQIDYVIPVQQDRSICMNNPLLDISDGFFTYIHYEGINSCKKSDSFKVLLSHGEIVDRGD

SEQ ID NO: 24859 - protein, 85 aa, unidentified
  REGION 1..85: note = Description of Unknown:cds_NC_025351.1_cds_YP_009094086.1_6 target sequence
YRPSLYLLSSHYHPYSMQVINCVPVTCNQSSFVFCHISNNTKTLDNSDYSSDEYYITYFNGIDRPKTKKIPINNMTADNRYIHFT

SEQ ID NO: 24860 - protein, 85 aa, unidentified
  REGION 1..85: note = Description of Unknown:cds_NC_025351.1_cds_YP_009094086.1_6 target sequence
FSGGGGVCLGEEFIIPVTTVINTDVFTHDYCESFNCSVQTGKSLKEICSESLRSPTNSSRYNLNGIMIISQNNMTDFKIQLNGIT

SEQ ID NO: 24861 - protein, 85 aa, unidentified
  REGION 1..85: note = Description of Unknown:cds_NC_025351.1_cds_YP_009094086.1_6 target sequence
YNKLSFGSPGRLSKTLGQVLYYQSSMSWDTYLKAGFVEKWKPFTPNWMNNTVISRPNQGNCPRYHKCPEICYGGTYNDIAPLDLG

SEQ ID NO: 24862 - protein, 85 aa, unidentified
  REGION 1..85: note = Description of Unknown:cds_NZ_WFIY01000004.1_cds_WP_155864465.1_1887 target sequence
LKAKGISVYVSPLKALSREVYEDIRDKRDTKYVDSDVYEDDLRNFKSKTLLSTYEKFDSSIRHRYAWLRKVEVIVIDEIHNVESN

SEQ ID NO: 24863 - protein, 85 aa, unidentified
  REGION 1..85: note = Description of Unknown:cds_NZ_WFIY01000004.1_cds_WP_155864465.1_1887 target sequence
RGLAIENIVLWAKKNGVQIIGLSATLPSVKNYANWLKAEVIEYNKRTVPLHECVAYPYVIRCYDNDFTIPLEPLNGIRSEKLEIL

SEQ ID NO: 24864 - protein, 85 aa, unidentified
  REGION 1..85: note = Description of Unknown:cds_NZ_WFIY01000004.1_cds_WP_155864465.1_1887 target sequence
IPTLRYIIKQGKNALVFVRSRKSAESLSETLRKFGFNASHYHSGVPLEERRQIVDMLKKGEINVVVSTTALGQGVNLPVYATIFY

SEQ ID NO: 24865 - protein, 85 aa, unidentified
  REGION 1..85: note = Description of Unknown:cds_NZ_WFIY01000004.1_cds_WP_155864465.1_1887 target sequence
DTVLPESDEKGNLKGWRDLSLMEFKQMAGRAGRPSFDKEGMSIIISTSMRKAEEFRRKYFSSTYEEEKNTYTLDDLSLGVISWRE

SEQ ID NO: 24866 - protein, 85 aa, unidentified
  REGION 1..85: note = Description of Unknown:cds_NZ_WFIY01000004.1_cds_WP_155864465.1_1887 target sequence
GYSKEDLQSILKCSLKYNKITEEEFLKSLNTLREVNLIEEDGGGIFLTPLGKAVSLSYIDISLLKGFQIISSDLLTTVVSSNAVA

SEQ ID NO: 24867 - protein, 85 aa, unidentified
  REGION 1..85: note = Description of Unknown:cds_NZ_WFIY01000004.1_cds_WP_155864465.1_1887 target sequence
QELRGCKCGRELLKRWSNGEDFSSLCKNLSAKDINEVISNARWISFALYRVLKALGKNDEAKEALRLYYQIKYGVPFEGVRLAKL

SEQ ID NO: 24868 - protein, 85 aa, unidentified
  REGION 1..85: note = Description of Unknown:cds_NZ_WFIY01000004.1_cds_WP_155864465.1_1887 target sequence
GLDRGTVMKLLVDKKIKDEKDLCIKIFTPPLKVLIKERGYDPAGVCREVYSKDLDVYEMARVVTKYYGKEFEGKKIDKEILEKLI

SEQ ID NO: 24869 - protein, 84 aa, unidentified
  REGION 1..84: note = Description of Unknown:cds_NZ_WFIY01000004.1_cds_WP_155864465.1_1887 target sequence
PPLKVLIKERGYDPAGVCREVYSKDLDVYEMARVVTKYYGKEFEGKKIDKEILEKLISLGIVEKRIRKEKDGNEKVVYFIQPFS

SEQ ID NO: 24870 - protein, 85 aa, unidentified
  REGION 1..85: note = Description of Unknown:cds_NZ_WFIY01000004.1_cds_WP_155864465.1_1887 target sequence
RDTKYVDSDVYEDDLRNFKSKTLLSTYEKFDSSIRHRYAWLRKVEVIVIDEIHNVESNRGLAIENIVLWAKKNGVQIIGLSATLP

SEQ ID NO: 24871 - protein, 85 aa, unidentified
  REGION 1..85: note = Description of Unknown:cds_NZ_WFIY01000004.1_cds_WP_155864465.1_1887 target sequence
SVKNYANWLKAEVIEYNKRTVPLHECVAYPYVIRCYDNDFTIPLEPLNGIRSEKLEILIPTLRYIIKQGKNALVFVRSRKSAESL

SEQ ID NO: 24872 - protein, 85 aa, unidentified
  REGION 1..85: note = Description of Unknown:cds_NZ_WFIY01000004.1_cds_WP_155864465.1_1887 target sequence
SETLRKFGFNASHYHSGVPLEERRQIVDMLKKGEINVVVSTTALGQGVNLPVYATIFYDTVLPESDEKGNLKGWRDLSLMEFKQM

SEQ ID NO: 24873 - protein, 85 aa, unidentified
  REGION 1..85: note = Description of Unknown:cds_NZ_WFIY01000004.1_cds_WP_155864465.1_1887 target sequence
AGRAGRPSFDKEGMSIIISTSMRKAEEFRRKYFSSTYEEEKNTYTLDDLSLGVISWREGYSKEDLQSILKCSLKYNKITEEEFLK

SEQ ID NO: 24874 - protein, 85 aa, unidentified
  REGION 1..85: note = Description of Unknown:cds_NZ_WFIY01000004.1_cds_WP_155864465.1_1887 target sequence
SLNTLREVNLIEEDGGGIFLTPLGKAVSLSYIDISLLKGFQIISSDLLTTVVSSNAVAQELRGCKCGRELLKRWSNGEDFSSLCK

SEQ ID NO: 24875 - protein, 85 aa, unidentified
  REGION 1..85: note = Description of Unknown:cds_NZ_WFIY01000004.1_cds_WP_155864465.1_1887 target sequence
NLSAKDINEVISNARWISFALYRVLKALGKNDEAKEALRLYYQIKYGVPFEGVRLAKLGLDRGTVMKLLVDKKIKDEKDLCIKIF

SEQ ID NO: 24876 - protein, 85 aa, unidentified
  REGION 1..85: note = Description of Unknown:cds_NZ_WFIY01000004.1_cds_WP_155864465.1_1887 target sequence
TPPLKVLIKERGYDPAGVCREVYSKDLDVYEMARVVTKYYGKEFEGKKIDKEILEKLISLGIVEKRIRKEKDGNEKVVYFIQPFS

SEQ ID NO: 24877 - protein, 85 aa, unidentified
  REGION 1..85: note = Description of Unknown:cds_NZ_WFIY01000004.1_cds_WP_155864038.1_1972 target sequence
NKKKIIPILSSLLFFVLIFSIVVPSTAETAPEIYKPVFPLNITISKSAIPFTQDPAFYSFEAYHIIPPNVTPIVVTIAKNLIFND

SEQ ID NO: 24878 - protein, 85 aa, unidentified
  REGION 1..85: note = Description of Unknown:cds_NZ_WFIY01000004.1_cds_WP_155864038.1_1972 target sequence
TGLKPYYERVYIPPGNYSLEILNVTIREFNGAQYDRCAYVYADGIPIFWGSTQEINNSTAEADVTLFENLLQGNVTFELVIQNYY

SEQ ID NO: 24879 - protein, 85 aa, unidentified
  REGION 1..85: note = Description of Unknown:cds_NZ_WFIY01000004.1_cds_WP_155864038.1_1972 target sequence
DAKIGITGLYEMNVTLYLYPGQKPQGLPNGFIPIFVNATCEHICYNYSYVILYPGMPAKTQEIQIPNGTYRMMALIYEKGGGNDE

SEQ ID NO: 24880 - protein, 85 aa, unidentified
  REGION 1..85: note = Description of Unknown:cds_NZ_WFIY01000004.1_cds_WP_155864038.1_1972 target sequence
FWYACEPATRPILVYYDNLLAGVVNPYETIYTGGIDLFYWKPLTSINTLSFHSPYIIDLTPFLALGNKANITVCVYNLITAYEIT

SEQ ID NO: 24881 - protein, 85 aa, unidentified
  REGION 1..85: note = Description of Unknown:cds_NZ_WFIY01000004.1_cds_WP_155864038.1_1972 target sequence
QSMAHDWDIAGVILLWVNESNPMICGKLNVAKHEFIDSGPMFFPVFFGECYLEDGHYYLDYSAELKFEHGTENSQVIQKGFYCAR

SEQ ID NO: 24882 - protein, 85 aa, unidentified
  REGION 1..85: note = Description of Unknown:cds_NZ_WFIY01000004.1_cds_WP_155864038.1_1972 target sequence
QKLSFVYEYAFLDEKFMEKAVESGMYNATLCYDVNYPITLNFDAVEVPITNPHVIPFNLTYEQNGTISLGLDYYMKWTFGDYCHE

SEQ ID NO: 24883 - protein, 85 aa, unidentified
  REGION 1..85: note = Description of Unknown:cds_NZ_WFIY01000004.1_cds_WP_155864038.1_1972 target sequence
VNTIESLYSIGGFGGIIEIINSYGGAVLVKLTSNYAMTVKNLTSNWLVNGEGFKETFSAEGLQNSTVNLNGYYVYVKESFSSIGS

SEQ ID NO: 24884 - protein, 84 aa, unidentified
  REGION 1..84: note = Description of Unknown:cds_NZ_WFIY01000004.1_cds_WP_155864038.1_1972 target sequence
LVKLTSNYAMTVKNLTSNWLVNGEGFKETFSAEGLQNSTVNLNGYYVYVKESFSSIGSSDPPLQYNIANEIIQIINYRLLELEI

SEQ ID NO: 24885 - protein, 85 aa, unidentified
  REGION 1..85: note = Description of Unknown:cds_NZ_WFIY01000004.1_cds_WP_155864038.1_1972 target sequence
ETAPEIYKPVFPLNITISKSAIPFTQDPAFYSFEAYHIIPPNVTPIVVTIAKNLIFNDTGLKPYYERVYIPPGNYSLEILNVTIR

SEQ ID NO: 24886 - protein, 85 aa, unidentified
  REGION 1..85: note = Description of Unknown:cds_NZ_WFIY01000004.1_cds_WP_155864038.1_1972 target sequence
EFNGAQYDRCAYVYADGIPIFWGSTQEINNSTAEADVTLFENLLQGNVTFELVIQNYYDAKIGITGLYEMNVTLYLYPGQKPQGL

SEQ ID NO: 24887 - protein, 85 aa, unidentified
  REGION 1..85: note = Description of Unknown:cds_NZ_WFIY01000004.1_cds_WP_155864038.1_1972 target sequence
PNGFIPIFVNATCEHICYNYSYVILYPGMPAKTQEIQIPNGTYRMMALIYEKGGGNDEFWYACEPATRPILVYYDNLLAGVVNPY

SEQ ID NO: 24888 - protein, 85 aa, unidentified
  REGION 1..85: note = Description of Unknown:cds_NZ_WFIY01000004.1_cds_WP_155864038.1_1972 target sequence
ETIYTGGIDLFYWKPLTSINTLSFHSPYIIDLTPFLALGNKANITVCVYNLITAYEITQSMAHDWDIAGVILLWVNESNPMICGK

SEQ ID NO: 24889 - protein, 85 aa, unidentified
  REGION 1..85: note = Description of Unknown:cds_NZ_WFIY01000004.1_cds_WP_155864038.1_1972 target sequence
LNVAKHEFIDSGPMFFPVFFGECYLEDGHYYLDYSAELKFEHGTENSQVIQKGFYCARQKLSFVYEYAFLDEKFMEKAVESGMYN

SEQ ID NO: 24890 - protein, 85 aa, unidentified
  REGION 1..85: note = Description of Unknown:cds_NZ_WFIY01000004.1_cds_WP_155864038.1_1972 target sequence
ATLCYDVNYPITLNFDAVEVPITNPHVIPFNLTYEQNGTISLGLDYYMKWTFGDYCHEVNTIESLYSIGGFGGIIEIINSYGGAV

SEQ ID NO: 24891 - protein, 85 aa, unidentified
  REGION 1..85: note = Description of Unknown:hvTR_Q89268 target sequence
PGFYEIVIKVPSDLDGHLPGISDSFVNWVAEKEWELPPDSDMDLNLIEQAPLTVAEKLQRDFLTEWRRVSKAPEALFFVQFEKGE

SEQ ID NO: 24892 - protein, 85 aa, unidentified
  REGION 1..85: note = Description of Unknown:hvTR_Q89268 target sequence
SYFHMHVLVETTGVKSMVLGRFLSQIREKLIQRIYRGIEPTLPNWFAVTKTRNGAGGGNKVVDECYIPNYLLPKTQPELQWAWTN

SEQ ID NO: 24893 - protein, 85 aa, unidentified
  REGION 1..85: note = Description of Unknown:hvTR_Q89268 target sequence
MEQYLSACLNLTERKRLVAQHLTHVSQTQEQNKENQNPNSDAPVIRSKTSARYMELVGWLVDKGITSEKQWIQEDQASYISFNAA

SEQ ID NO: 24894 - protein, 85 aa, unidentified
  REGION 1..85: note = Description of Unknown:hvTR_Q89268 target sequence
SNSRSQIKAALDNAGKIMSLTKTAPDYLVGQQPVEDISSNRIYKILELNGYDPQYAASVFLGWATKKFGKRNTIWLFGPATTGKT

SEQ ID NO: 24895 - protein, 85 aa, unidentified
  REGION 1..85: note = Description of Unknown:hvTR_Q89268 target sequence
NIAEAIAHTVPFYGCVNWTNENFPFNDCVDKMVIWWEEGKMTAKVVESAKAILGGSKVRVDQKCKSSAQIDPTPVIVTSNTNMCA

SEQ ID NO: 24896 - protein, 85 aa, unidentified
  REGION 1..85: note = Description of Unknown:hvTR_Q89268 target sequence
VIDGNSTTFEHQQPLQDRMFKFELTRRLDHDFGKVTKQEVKDFFRWAKDHVVEVEHEFYVKKGGAKKRPAPSDADISEPKRVRES

SEQ ID NO: 24897 - protein, 85 aa, unidentified
  REGION 1..85: note = Description of Unknown:hvTR_Q89268 target sequence
VAQPSTSDAEASINYADRYQNKCSRHVGMNLMLFPCRQCERMNQNSNICFTHGQKDCLECFPVSESQPVSVVKKAYQKLCYIHHI

SEQ ID NO: 24898 - protein, 84 aa, unidentified
  REGION 1..84: note = Description of Unknown:hvTR_Q89268 target sequence
VGMNLMLFPCRQCERMNQNSNICFTHGQKDCLECFPVSESQPVSVVKKAYQKLCYIHHIMGKVPDACTACDLVNVDLDDCIFEQ

SEQ ID NO: 24899 - protein, 85 aa, unidentified
  REGION 1..85: note = Description of Unknown:hvTR_Q89268 target sequence
WVAEKEWELPPDSDMDLNLIEQAPLTVAEKLQRDFLTEWRRVSKAPEALFFVQFEKGESYFHMHVLVETTGVKSMVLGRFLSQIR

SEQ ID NO: 24900 - protein, 85 aa, unidentified
  REGION 1..85: note = Description of Unknown:hvTR_Q89268 target sequence
EKLIQRIYRGIEPTLPNWFAVTKTRNGAGGGNKVVDECYIPNYLLPKTQPELQWAWTNMEQYLSACLNLTERKRLVAQHLTHVSQ

SEQ ID NO: 24901 - protein, 85 aa, unidentified
  REGION 1..85: note = Description of Unknown:hvTR_Q89268 target sequence
TQEQNKENQNPNSDAPVIRSKTSARYMELVGWLVDKGITSEKQWIQEDQASYISFNAASNSRSQIKAALDNAGKIMSLTKTAPDY

SEQ ID NO: 24902 - protein, 85 aa, unidentified
  REGION 1..85: note = Description of Unknown:hvTR_Q89268 target sequence
LVGQQPVEDISSNRIYKILELNGYDPQYAASVFLGWATKKFGKRNTIWLFGPATTGKTNIAEAIAHTVPFYGCVNWTNENFPFND

SEQ ID NO: 24903 - protein, 85 aa, unidentified
  REGION 1..85: note = Description of Unknown:hvTR_Q89268 target sequence
CVDKMVIWWEEGKMTAKVVESAKAILGGSKVRVDQKCKSSAQIDPTPVIVTSNTNMCAVIDGNSTTFEHQQPLQDRMFKFELTRR

SEQ ID NO: 24904 - protein, 85 aa, unidentified
  REGION 1..85: note = Description of Unknown:hvTR_Q89268 target sequence
LDHDFGKVTKQEVKDFFRWAKDHVVEVEHEFYVKKGGAKKRPAPSDADISEPKRVRESVAQPSTSDAEASINYADRYQNKCSRHV

SEQ ID NO: 24905 - protein, 85 aa, unidentified
  REGION 1..85: note = Description of Unknown:cds_NZ_WFIY01000004.1_cds_1250 target sequence
SLKRDKKAVSVPDLGAVTDLQMRKSLNKLELLFLSLQGVIGSGWLFASLYTAAYTGGSAIIAWIIGGLMLLPIALTYSEIASIIP

SEQ ID NO: 24906 - protein, 7 aa, unidentified
  REGION 1..7: note = Description of Unknown:cds_NZ_WFIY01000004.1_cds_1250 target sequence
KSGGVIR

SEQ ID NO: 24907 - protein, 85 aa, unidentified
  REGION 1..85: note = Description of Unknown:cds_NZ_WFIY01000004.1_cds_1250 target sequence
VAHGVGWWKLIIPSIAVILLLSFYYNPSNFTAGGGLFPSPSNLATSYYGMAAVLYSIPATGILFAYTGFRQAIEYGSEAKNPKKD

SEQ ID NO: 24908 - protein, 85 aa, unidentified
  REGION 1..85: note = Description of Unknown:cds_NZ_WFIY01000004.1_cds_1250 target sequence
IPFAVVGAVLISIVLYTLLQVAFIGAINWSAINVKVGDWGGIQNSILSYGPFYEIFSTADVSGLVRLIFISFAFLLLIDAVVSPS

SEQ ID NO: 24909 - protein, 85 aa, unidentified
  REGION 1..85: note = Description of Unknown:cds_NZ_WFIY01000004.1_cds_1250 target sequence
GTTLVGMGSGTRVLYGLASNGYFPEIFLKLGKTRVPVVSLITVTVLGSIFLLPFPAWIALVGIVSSAAVFTYIMGGVSLEVLRKK

SEQ ID NO: 24910 - protein, 85 aa, unidentified
  REGION 1..85: note = Description of Unknown:cds_NZ_WFIY01000004.1_cds_1250 target sequence
APDVNRQFKVPFSKVIAPLSTISALLIVYWSGFITLFEVVTIIFSGIPIFIGYYARKFWNIKKSILIPSLAVNISGIVIGTALFY

SEQ ID NO: 24911 - protein, 85 aa, unidentified
  REGION 1..85: note = Description of Unknown:cds_NZ_WFIY01000004.1_cds_1250 target sequence
ILTSGLSTTNNLGFAIYIATLSAVALFDFVVAYKYGNSGEAKAGGLMLFLILASLVLSYFSFGRYPIIPFPEDLIPVTALGLAFH

SEQ ID NO: 24912 - protein, 84 aa, unidentified
  REGION 1..84: note = Description of Unknown:cds_NZ_WFIY01000004.1_cds_1250 target sequence
FDFVVAYKYGNSGEAKAGGLMLFLILASLVLSYFSFGRYPIIPFPEDLIPVTALGLAFHYSAIKNSLGEEEIREIIKRTTEGLI

SEQ ID NO: 24913 - protein, 65 aa, unidentified
  REGION 1..65: note = Description of Unknown:cds_NZ_WFIY01000004.1_cds_1250 target sequence
KLELLFLSLQGVIGSGWLFASLYTAAYTGGSAIIAWIIGGLMLLPIALTYSEIASIIPKSGGVIR

SEQ ID NO: 24914 - protein, 85 aa, unidentified
  REGION 1..85: note = Description of Unknown:cds_NZ_WFIY01000004.1_cds_1250 target sequence
AGATVPAIEATAVVTYLSSLFPQLTVNGYLTTYGILLAYGLIFLFFIINYLGVSILGKVAHGVGWWKLIIPSIAVILLLSFYYNP

SEQ ID NO: 24915 - protein, 85 aa, unidentified
  REGION 1..85: note = Description of Unknown:cds_NZ_WFIY01000004.1_cds_1250 target sequence
SNFTAGGGLFPSPSNLATSYYGMAAVLYSIPATGILFAYTGFRQAIEYGSEAKNPKKDIPFAVVGAVLISIVLYTLLQVAFIGAI

SEQ ID NO: 24916 - protein, 85 aa, unidentified
  REGION 1..85: note = Description of Unknown:cds_NZ_WFIY01000004.1_cds_1250 target sequence
NWSAINVKVGDWGGIQNSILSYGPFYEIFSTADVSGLVRLIFISFAFLLLIDAVVSPSGTTLVGMGSGTRVLYGLASNGYFPEIF

SEQ ID NO: 24917 - protein, 85 aa, unidentified
  REGION 1..85: note = Description of Unknown:cds_NZ_WFIY01000004.1_cds_1250 target sequence
LKLGKTRVPVVSLITVTVLGSIFLLPFPAWIALVGIVSSAAVFTYIMGGVSLEVLRKKAPDVNRQFKVPFSKVIAPLSTISALLI

SEQ ID NO: 24918 - protein, 85 aa, unidentified
  REGION 1..85: note = Description of Unknown:cds_NZ_WFIY01000004.1_cds_1250 target sequence
VYWSGFITLFEVVTIIFSGIPIFIGYYARKFWNIKKSILIPSLAVNISGIVIGTALFYILTSGLSTTNNLGFAIYIATLSAVALF

SEQ ID NO: 24919 - protein, 85 aa, unidentified
  REGION 1..85: note = Description of Unknown:cds_NZ_WFIY01000004.1_cds_WP_155863843.1_1739 target sequence
RYASIGNGRLLVNLDEFGRIVDFYFPYIGMENQTAGTPIRYSFWVDNKVILDTDLITSLSYLDDSNIIQIESKKDWLSVSSFAFI

SEQ ID NO: 24920 - protein, 85 aa, unidentified
  REGION 1..85: note = Description of Unknown:cds_NZ_WFIY01000004.1_cds_WP_155863843.1_1739 target sequence
DPDSPTYYLIMKILNNSGENKRIKIFFTHDFNIYSNPFGDTAFFDPYTSSIIHYKSKRYIGIKLLSAGSFDVEYNTTKGNPLDDI

SEQ ID NO: 24921 - protein, 85 aa, unidentified
  REGION 1..85: note = Description of Unknown:cds_NZ_WFIY01000004.1_cds_WP_155863843.1_1739 target sequence
YDGKLDQNPIAHGNVQSSIGMEIKVNSSSSSKIYYVITADRNLDDLRKKLTRLNTAEIESNFVTTYMFWKSWVNKGSKERNSLNK

SEQ ID NO: 24922 - protein, 85 aa, unidentified
  REGION 1..85: note = Description of Unknown:cds_NZ_WFIY01000004.1_cds_WP_155863843.1_1739 target sequence
LYNVSLFVIKNHMDINGSFIASSDFSFVNLYGDSYQYCWPRDCAYAAYALDIAGYGELAVRHFNFIKDLVSPEGFLYHKYNPNKT

SEQ ID NO: 24923 - protein, 85 aa, unidentified
  REGION 1..85: note = Description of Unknown:cds_NZ_WFIY01000004.1_cds_WP_155863843.1_1739 target sequence
LASSWHPWIYRGKGIYPIQEDETALEIWAIGSHYERYKDLDELSEIYKKFVKPGLQFIMDFMEDGLPKYSFDLWEERYGIHIYTV

SEQ ID NO: 24924 - protein, 85 aa, unidentified
  REGION 1..85: note = Description of Unknown:cds_NZ_WFIY01000004.1_cds_WP_155863843.1_1739 target sequence
ATVYGALTKGSILAEGMGDETLAEDSIEVAKTLKDEVKKRMVYNGRFIRRIDENGNKDLTIDASMYAPYFFGMFDPADEIVRNTM

SEQ ID NO: 24925 - protein, 85 aa, unidentified
  REGION 1..85: note = Description of Unknown:cds_NZ_WFIY01000004.1_cds_WP_155863843.1_1739 target sequence
ELIAQKLNVSDGIIRYENDYYQRRKQLPNPWIITTLWLAEYYIDIGKISEAEKLINWVINRATKSGLLPEQVDPETFESVSVIPL

SEQ ID NO: 24926 - protein, 84 aa, unidentified
  REGION 1..84: note = Description of Unknown:cds_NZ_WFIY01000004.1_cds_WP_155863843.1_1739 target sequence
LPNPWIITTLWLAEYYIDIGKISEAEKLINWVINRATKSGLLPEQVDPETFESVSVIPLVWSHAEYIIALNKYESIKKKEYDKP

SEQ ID NO: 24927 - protein, 85 aa, unidentified
  REGION 1..85: note = Description of Unknown:cds_NZ_WFIY01000004.1_cds_WP_155863843.1_1739 target sequence
IGMENQTAGTPIRYSFWVDNKVILDTDLITSLSYLDDSNIIQIESKKDWLSVSSFAFIDPDSPTYYLIMKILNNSGENKRIKIFF

SEQ ID NO: 24928 - protein, 85 aa, unidentified
  REGION 1..85: note = Description of Unknown:cds_NZ_WFIY01000004.1_cds_WP_155863843.1_1739 target sequence
THDFNIYSNPFGDTAFFDPYTSSIIHYKSKRYIGIKLLSAGSFDVEYNTTKGNPLDDIYDGKLDQNPIAHGNVQSSIGMEIKVNS

SEQ ID NO: 24929 - protein, 85 aa, unidentified
  REGION 1..85: note = Description of Unknown:cds_NZ_WFIY01000004.1_cds_WP_155863843.1_1739 target sequence
SSSSKIYYVITADRNLDDLRKKLTRLNTAEIESNFVTTYMFWKSWVNKGSKERNSLNKLYNVSLFVIKNHMDINGSFIASSDFSF

SEQ ID NO: 24930 - protein, 85 aa, unidentified
  REGION 1..85: note = Description of Unknown:cds_NZ_WFIY01000004.1_cds_WP_155863843.1_1739 target sequence
VNLYGDSYQYCWPRDCAYAAYALDIAGYGELAVRHFNFIKDLVSPEGFLYHKYNPNKTLASSWHPWIYRGKGIYPIQEDETALEI

SEQ ID NO: 24931 - protein, 85 aa, unidentified
  REGION 1..85: note = Description of Unknown:cds_NZ_WFIY01000004.1_cds_WP_155863843.1_1739 target sequence
WAIGSHYERYKDLDELSEIYKKFVKPGLQFIMDFMEDGLPKYSFDLWEERYGIHIYTVATVYGALTKGSILAEGMGDETLAEDSI

SEQ ID NO: 24932 - protein, 85 aa, unidentified
  REGION 1..85: note = Description of Unknown:cds_NZ_WFIY01000004.1_cds_WP_155863843.1_1739 target sequence
EVAKTLKDEVKKRMVYNGRFIRRIDENGNKDLTIDASMYAPYFFGMFDPADEIVRNTMELIAQKLNVSDGIIRYENDYYQRRKQL

SEQ ID NO: 24933 - protein, 85 aa, unidentified
  REGION 1..85: note = Description of Unknown:cds_NZ_WFIY01000004.1_cds_WP_155864225.1_2194 target sequence
VWKIYSLHQIRSMARVAIEDPSNFWRDKANYITWFKAPEKILEGDPPKDKWFPGGITNISYNAVDRHLPKLRNKVAFYWVNENLD

SEQ ID NO: 24934 - protein, 85 aa, unidentified
  REGION 1..85: note = Description of Unknown:cds_NZ_WFIY01000004.1_cds_WP_155864225.1_2194 target sequence
HEKEISYYDLYQEVNKASYVLNQLGVKKNDVVSILMPSIPEAVYFSLAVHRLGAVLAIHYVGLSEETLSYRFNDCGSKILITSSK

SEQ ID NO: 24935 - protein, 85 aa, unidentified
  REGION 1..85: note = Description of Unknown:cds_NZ_WFIY01000004.1_cds_WP_155864225.1_2194 target sequence
AFRNGNEIRIKDFVDNVLKSHTTPIQKVLVVSRGFSDFNVIGNRDIIYEDIKPKGKVYVKPTGVEANEPATIYYTSGTTGRPKGL

SEQ ID NO: 24936 - protein, 85 aa, unidentified
  REGION 1..85: note = Description of Unknown:cds_NZ_WFIY01000004.1_cds_WP_155864225.1_2194 target sequence
YHTNGGYIIALNWAFKAIFNPTENDTWWTISELGWPVWPMANLYVIPVMGLTGVLFEGYIAHKRDLFSKIIEKFNVSLVWSSTTT

SEQ ID NO: 24937 - protein, 85 aa, unidentified
  REGION 1..85: note = Description of Unknown:cds_NZ_WFIY01000004.1_cds_WP_155864225.1_2194 target sequence
LYTLKSLGDESVKSGDTSSLREILNTGEPLNAGAWSWLSENLPHVKIADAYWMTEHLYPIAATPYGLGEIPYKPGSAGIQFPGSY

SEQ ID NO: 24938 - protein, 85 aa, unidentified
  REGION 1..85: note = Description of Unknown:cds_NZ_WFIY01000004.1_cds_WP_155864225.1_2194 target sequence
FLVVDDEGKQLPPRQKGYIVLKPLNPAEAKMWNDHNYEKLLKQYWSRFPGYFYTGDYGYVDEEGYLYVLGRADDVIRSAEERIGT

SEQ ID NO: 24939 - protein, 85 aa, unidentified
  REGION 1..85: note = Description of Unknown:cds_NZ_WFIY01000004.1_cds_WP_155864225.1_2194 target sequence
LEVESVIVSHPQVAEAAVIGHGNNIIALVVPKQGVMVEEGLRNDIKNYCRNAGYLVDKIIFVKRLPKTKSGKIMRRLLRAIINNE

SEQ ID NO: 24940 - protein, 84 aa, unidentified
  REGION 1..84: note = Description of Unknown:cds_NZ_WFIY01000004.1_cds_WP_155864225.1_2194 target sequence
ALVVPKQGVMVEEGLRNDIKNYCRNAGYLVDKIIFVKRLPKTKSGKIMRRLLRAIINNENPGDISTLDDMKVLEELKEALKEQL

SEQ ID NO: 24941 - protein, 85 aa, unidentified
  REGION 1..85: note = Description of Unknown:cds_NZ_WFIY01000004.1_cds_WP_155864225.1_2194 target sequence
KANYITWFKAPEKILEGDPPKDKWFPGGITNISYNAVDRHLPKLRNKVAFYWVNENLDHEKEISYYDLYQEVNKASYVLNQLGVK

SEQ ID NO: 24942 - protein, 85 aa, unidentified
  REGION 1..85: note = Description of Unknown:cds_NZ_WFIY01000004.1_cds_WP_155864225.1_2194 target sequence
KNDVVSILMPSIPEAVYFSLAVHRLGAVLAIHYVGLSEETLSYRFNDCGSKILITSSKAFRNGNEIRIKDFVDNVLKSHTTPIQK

SEQ ID NO: 24943 - protein, 85 aa, unidentified
  REGION 1..85: note = Description of Unknown:cds_NZ_WFIY01000004.1_cds_WP_155864225.1_2194 target sequence
VLVVSRGFSDFNVIGNRDIIYEDIKPKGKVYVKPTGVEANEPATIYYTSGTTGRPKGLYHTNGGYIIALNWAFKAIFNPTENDTW

SEQ ID NO: 24944 - protein, 85 aa, unidentified
  REGION 1..85: note = Description of Unknown:cds_NZ_WFIY01000004.1_cds_WP_155864225.1_2194 target sequence
WTISELGWPVWPMANLYVIPVMGLTGVLFEGYIAHKRDLFSKIIEKFNVSLVWSSTTTLYTLKSLGDESVKSGDTSSLREILNTG

SEQ ID NO: 24945 - protein, 85 aa, unidentified
  REGION 1..85: note = Description of Unknown:cds_NZ_WFIY01000004.1_cds_WP_155864225.1_2194 target sequence
EPLNAGAWSWLSENLPHVKIADAYWMTEHLYPIAATPYGLGEIPYKPGSAGIQFPGSYFLVVDDEGKQLPPRQKGYIVLKPLNPA

SEQ ID NO: 24946 - protein, 85 aa, unidentified
  REGION 1..85: note = Description of Unknown:cds_NZ_WFIY01000004.1_cds_WP_155864225.1_2194 target sequence
EAKMWNDHNYEKLLKQYWSRFPGYFYTGDYGYVDEEGYLYVLGRADDVIRSAEERIGTLEVESVIVSHPQVAEAAVIGHGNNIIA

SEQ ID NO: 24947 - protein, 85 aa, unidentified
  REGION 1..85: note = Description of Unknown:cds_NZ_WFIY01000004.1_cds_WP_155863727.1_1592 target sequence
ESLESLFYSSIISKNIDKYIKITKEEDIKNLPNNVNAKYELLRGNVTSNIVADLSELKGVEDLGDSIKVLAGTKWRDVISYSPEL

SEQ ID NO: 24948 - protein, 85 aa, unidentified
  REGION 1..85: note = Description of Unknown:cds_NZ_WFIY01000004.1_cds_WP_155863727.1_1592 target sequence
WSVMDFSVGGTISLGDEGFGYNEFGELANRVTVEAYLNGEKYTGKYRGGIIYAIYIKKENKPLIFKQYSGSEDIVLSKVKSLLSE

SEQ ID NO: 24949 - protein, 85 aa, unidentified
  REGION 1..85: note = Description of Unknown:cds_NZ_WFIY01000004.1_cds_WP_155863727.1_1592 target sequence
NVLPFRDISLIKDNNGTRLVVSYTQVREILVRRYISGFSEAPHLYPQLSSIGKFIYIGKTDLLNISSDLLKNTKYAYFTFRGNSA

SEQ ID NO: 24950 - protein, 85 aa, unidentified
  REGION 1..85: note = Description of Unknown:cds_NZ_WFIY01000004.1_cds_WP_155863727.1_1592 target sequence
YYVVSSDIKLDITSISQEYSIEKFNGCILCGKCVDTCPHSYQRNSPVFSPLGFFVLSTIGKETYVSNCHLCGICEEVCPVDLNIV

SEQ ID NO: 24951 - protein, 85 aa, unidentified
  REGION 1..85: note = Description of Unknown:cds_NZ_WFIY01000004.1_cds_WP_155863727.1_1592 target sequence
DLIKQKSTLNSKVPNVQLTFPSKKSIILTAISDNLLEDALKLIKYFSLRGIKLGVITLPEPLEKIVKGQINLENARKLLENVDEI

SEQ ID NO: 24952 - protein, 85 aa, unidentified
  REGION 1..85: note = Description of Unknown:cds_NZ_WFIY01000004.1_cds_WP_155863727.1_1592 target sequence
ITLTPEEARYLIVLKSVKILDITFAYSILENIIRPLMEGKRIHFPCFYSEKEFYGCSYEMLNLANNEGYGENKINAEITLCPLAA

SEQ ID NO: 24953 - protein, 85 aa, unidentified
  REGION 1..85: note = Description of Unknown:cds_NZ_WFIY01000004.1_cds_WP_155863727.1_1592 target sequence
KRLGIKSYIDLLNINLDISDVYKLHTEISETLSTLDRVLEDAEWYKEIEPKIYEKIFLDAIDKVLLSKNYFEIFYYYLNIDKLEF

SEQ ID NO: 24954 - protein, 84 aa, unidentified
  REGION 1..84: note = Description of Unknown:cds_NZ_WFIY01000004.1_cds_WP_155863727.1_1592 target sequence
HTEISETLSTLDRVLEDAEWYKEIEPKIYEKIFLDAIDKVLLSKNYFEIFYYYLNIDKLEFKNERIKSSVKNEIEKLLRSSNKD

SEQ ID NO: 24955 - protein, 85 aa, unidentified
  REGION 1..85: note = Description of Unknown:cds_NZ_WFIY01000004.1_cds_WP_155863727.1_1592 target sequence
IKNLPNNVNAKYELLRGNVTSNIVADLSELKGVEDLGDSIKVLAGTKWRDVISYSPELWSVMDFSVGGTISLGDEGFGYNEFGEL

SEQ ID NO: 24956 - protein, 85 aa, unidentified
  REGION 1..85: note = Description of Unknown:cds_NZ_WFIY01000004.1_cds_WP_155863727.1_1592 target sequence
ANRVTVEAYLNGEKYTGKYRGGIIYAIYIKKENKPLIFKQYSGSEDIVLSKVKSLLSENVLPFRDISLIKDNNGTRLVVSYTQVR

SEQ ID NO: 24957 - protein, 85 aa, unidentified
  REGION 1..85: note = Description of Unknown:cds_NZ_WFIY01000004.1_cds_WP_155863727.1_1592 target sequence
EILVRRYISGFSEAPHLYPQLSSIGKFIYIGKTDLLNISSDLLKNTKYAYFTFRGNSAYYVVSSDIKLDITSISQEYSIEKFNGC

SEQ ID NO: 24958 - protein, 85 aa, unidentified
  REGION 1..85: note = Description of Unknown:cds_NZ_WFIY01000004.1_cds_WP_155863727.1_1592 target sequence
ILCGKCVDTCPHSYQRNSPVFSPLGFFVLSTIGKETYVSNCHLCGICEEVCPVDLNIVDLIKQKSTLNSKVPNVQLTFPSKKSII

SEQ ID NO: 24959 - protein, 85 aa, unidentified
  REGION 1..85: note = Description of Unknown:cds_NZ_WFIY01000004.1_cds_WP_155863727.1_1592 target sequence
LTAISDNLLEDALKLIKYFSLRGIKLGVITLPEPLEKIVKGQINLENARKLLENVDEIITLTPEEARYLIVLKSVKILDITFAYS

SEQ ID NO: 24960 - protein, 85 aa, unidentified
  REGION 1..85: note = Description of Unknown:cds_NZ_WFIY01000004.1_cds_WP_155863727.1_1592 target sequence
ILENIIRPLMEGKRIHFPCFYSEKEFYGCSYEMLNLANNEGYGENKINAEITLCPLAAKRLGIKSYIDLLNINLDISDVYKLHTE

SEQ ID NO: 24961 - protein, 85 aa, unidentified
  REGION 1..85: note = Description of Unknown:cds_NZ_WFIY01000004.1_cds_WP_155862614.1_393 target sequence
SIRYPLIKLTANYCNLYEKIILMILNSILVYILSLNLHFIYNYNLEIISIVAVISFFLPEIVSPALTILFTIYLAYTELNLNQLS

SEQ ID NO: 24962 - protein, 85 aa, unidentified
  REGION 1..85: note = Description of Unknown:cds_NZ_WFIY01000004.1_cds_WP_155862614.1_393 target sequence
GMIEIISIIILNILVPMLIEIKYGSMQGFMSSEAIIGFPISSLLLLSGIAEKRNLTANVLSSLPLFFIIFNHFDTIYSTNVLFII

SEQ ID NO: 24963 - protein, 85 aa, unidentified
  REGION 1..85: note = Description of Unknown:cds_NZ_WFIY01000004.1_cds_WP_155862614.1_393 target sequence
ILGIISLIIASILFSLKQLISISGIIFSFIGLSTLLYLTPLPHPIPLNLIYTIIVAAIVNAIFTGFYELKIRKQMKEKIQEELSL

SEQ ID NO: 24964 - protein, 85 aa, unidentified
  REGION 1..85: note = Description of Unknown:cds_NZ_WFIY01000004.1_cds_WP_155862614.1_393 target sequence
IKKEIDSSIISLGRIRSYAELEDSLSNIIAEDEKSILEISKKADQCKSLDCINSIYNEFISAKKNIEDKLSHYIFDTIIEYNNVI

SEQ ID NO: 24965 - protein, 85 aa, unidentified
  REGION 1..85: note = Description of Unknown:cds_NZ_WFIY01000004.1_cds_WP_155862614.1_393 target sequence
KELKKNGIILEEISIPSEKIILSEDDIDKIQKILSTINKNISLGVSEINSIIDSIEKISGIKLNRFYITEYSSIVSAIDYLKKIN

SEQ ID NO: 24966 - protein, 85 aa, unidentified
  REGION 1..85: note = Description of Unknown:cds_NZ_WFIY01000004.1_cds_WP_155862614.1_393 target sequence
VLTYVNQCISYDRDILTKLEFYGFENRKLEIARKLNEYYGREILLSDIKNIERESNQLLIIINEYLNNIKNELEKIWKISKLNNI

SEQ ID NO: 24967 - protein, 85 aa, unidentified
  REGION 1..85: note = Description of Unknown:cds_NZ_WFIY01000004.1_cds_WP_155862614.1_393 target sequence
KNKIEVIDGLINELNKDDAILKKLSNVLTAIPEISNAEKIIEEKDNIYALFTILRENEDIIREKLNQEQCIELEELGINSNLSSY

SEQ ID NO: 24968 - protein, 84 aa, unidentified
  REGION 1..84: note = Description of Unknown:cds_NZ_WFIY01000004.1_cds_WP_155862614.1_393 target sequence
LSNVLTAIPEISNAEKIIEEKDNIYALFTILRENEDIIREKLNQEQCIELEELGINSNLSSYVIEYLKERNINVKLDTNKICLS

SEQ ID NO: 24969 - protein, 85 aa, unidentified
  REGION 1..85: note = Description of Unknown:cds_NZ_WFIY01000004.1_cds_WP_155862614.1_393 target sequence
ILVYILSLNLHFIYNYNLEIISIVAVISFFLPEIVSPALTILFTIYLAYTELNLNQLSGMIEIISIIILNILVPMLIEIKYGSMQ

SEQ ID NO: 24970 - protein, 85 aa, unidentified
  REGION 1..85: note = Description of Unknown:cds_NZ_WFIY01000004.1_cds_WP_155862614.1_393 target sequence
GFMSSEAIIGFPISSLLLLSGIAEKRNLTANVLSSLPLFFIIFNHFDTIYSTNVLFIIILGIISLIIASILFSLKQLISISGIIF

SEQ ID NO: 24971 - protein, 85 aa, unidentified
  REGION 1..85: note = Description of Unknown:cds_NZ_WFIY01000004.1_cds_WP_155862614.1_393 target sequence
SFIGLSTLLYLTPLPHPIPLNLIYTIIVAAIVNAIFTGFYELKIRKQMKEKIQEELSLIKKEIDSSIISLGRIRSYAELEDSLSN

SEQ ID NO: 24972 - protein, 85 aa, unidentified
  REGION 1..85: note = Description of Unknown:cds_NZ_WFIY01000004.1_cds_WP_155862614.1_393 target sequence
IIAEDEKSILEISKKADQCKSLDCINSIYNEFISAKKNIEDKLSHYIFDTIIEYNNVIKELKKNGIILEEISIPSEKIILSEDDI

SEQ ID NO: 24973 - protein, 85 aa, unidentified
  REGION 1..85: note = Description of Unknown:cds_NZ_WFIY01000004.1_cds_WP_155862614.1_393 target sequence
DKIQKILSTINKNISLGVSEINSIIDSIEKISGIKLNRFYITEYSSIVSAIDYLKKINVLTYVNQCISYDRDILTKLEFYGFENR

SEQ ID NO: 24974 - protein, 85 aa, unidentified
  REGION 1..85: note = Description of Unknown:cds_NZ_WFIY01000004.1_cds_WP_155862614.1_393 target sequence
KLEIARKLNEYYGREILLSDIKNIERESNQLLIIINEYLNNIKNELEKIWKISKLNNIKNKIEVIDGLINELNKDDAILKKLSNV

SEQ ID NO: 24975 - protein, 85 aa, unidentified
  REGION 1..85: note = Description of Unknown:cds_NZ_WFIY01000004.1_cds_WP_155864436.1_1562 target sequence
IGGAQGLGVDTSATIFGNAVARAGYYLYGNREYYSNIKGRHSYFQVVFSEKPIHSISSTVNVLATFDAETIFQHFTEVTDFIIYD

SEQ ID NO: 24976 - protein, 85 aa, unidentified
  REGION 1..85: note = Description of Unknown:cds_NZ_WFIY01000004.1_cds_WP_155864436.1_1562 target sequence
KGVEGTNVDMVRSMEPEIAERIRELLSKNGLGDTVKDVISYLEKKGVKAIPINYLELLKKVADAYKLPLSVVERAKNIIAVAASM

SEQ ID NO: 24977 - protein, 85 aa, unidentified
  REGION 1..85: note = Description of Unknown:cds_NZ_WFIY01000004.1_cds_WP_155864436.1_1562 target sequence
SLFGFKLDYLKQAISSLFKNDLFIKFNTMAAELGYSLTENHYKLQEIPVSKPRIQVDGNTISAIGKLAAGLRFQSYYPITPASDE

SEQ ID NO: 24978 - protein, 85 aa, unidentified
  REGION 1..85: note = Description of Unknown:cds_NZ_WFIY01000004.1_cds_WP_155864436.1_1562 target sequence
STYIEANQNLDMIVEAGELRKGGAVVVQAEDELAAINMAIGATLTGARAATATSGPGFALMAEGISWAGMNEAPVVITYYMRGAP

SEQ ID NO: 24979 - protein, 85 aa, unidentified
  REGION 1..85: note = Description of Unknown:cds_NZ_WFIY01000004.1_cds_WP_155864436.1_1562 target sequence
STGLPTRSGQGDLKFALNVGHGEFPRIVIASGDHEEIFWDAIWAFNLAEKYQTPVIHIIEKTLANAYSVFDEDRILGKKIPIERG

SEQ ID NO: 24980 - protein, 85 aa, unidentified
  REGION 1..85: note = Description of Unknown:cds_NZ_WFIY01000004.1_cds_WP_155864436.1_1562 target sequence
KIVKPSEDFFRRFEITEDGISPRAFLGEASMFYAGDEHNEEGHITEGTENRIKMYEKRMKKLETADKEIPEELRVNIVGDGNIVL

SEQ ID NO: 24981 - protein, 85 aa, unidentified
  REGION 1..85: note = Description of Unknown:cds_NZ_WFIY01000004.1_cds_WP_155864436.1_1562 target sequence
LTWGSPKGAIIDAMDELKDVMMIQVKMFNPYPKNLMRKLLQGKSKIIAVENNYEAQGAQILTENTGIFPTNYILKWTGRAITREE

SEQ ID NO: 24982 - protein, 84 aa, unidentified
  REGION 1..84: note = Description of Unknown:cds_NZ_WFIY01000004.1_cds_WP_155864436.1_1562 target sequence
QVKMFNPYPKNLMRKLLQGKSKIIAVENNYEAQGAQILTENTGIFPTNYILKWTGRAITREEIIEGVKQIVEKGEKRVVLSAGA

SEQ ID NO: 24983 - protein, 85 aa, unidentified
  REGION 1..85: note = Description of Unknown:cds_NZ_WFIY01000004.1_cds_WP_155864436.1_1562 target sequence
YGNREYYSNIKGRHSYFQVVFSEKPIHSISSTVNVLATFDAETIFQHFTEVTDFIIYDKGVEGTNVDMVRSMEPEIAERIRELLS

SEQ ID NO: 24984 - protein, 85 aa, unidentified
  REGION 1..85: note = Description of Unknown:cds_NZ_WFIY01000004.1_cds_WP_155864436.1_1562 target sequence
KNGLGDTVKDVISYLEKKGVKAIPINYLELLKKVADAYKLPLSVVERAKNIIAVAASMSLFGFKLDYLKQAISSLFKNDLFIKFN

SEQ ID NO: 24985 - protein, 85 aa, unidentified
  REGION 1..85: note = Description of Unknown:cds_NZ_WFIY01000004.1_cds_WP_155864436.1_1562 target sequence
TMAAELGYSLTENHYKLQEIPVSKPRIQVDGNTISAIGKLAAGLRFQSYYPITPASDESTYIEANQNLDMIVEAGELRKGGAVVV

SEQ ID NO: 24986 - protein, 85 aa, unidentified
  REGION 1..85: note = Description of Unknown:cds_NZ_WFIY01000004.1_cds_WP_155864436.1_1562 target sequence
QAEDELAAINMAIGATLTGARAATATSGPGFALMAEGISWAGMNEAPVVITYYMRGAPSTGLPTRSGQGDLKFALNVGHGEFPRI

SEQ ID NO: 24987 - protein, 85 aa, unidentified
  REGION 1..85: note = Description of Unknown:cds_NZ_WFIY01000004.1_cds_WP_155864436.1_1562 target sequence
VIASGDHEEIFWDAIWAFNLAEKYQTPVIHIIEKTLANAYSVFDEDRILGKKIPIERGKIVKPSEDFFRRFEITEDGISPRAFLG

SEQ ID NO: 24988 - protein, 85 aa, unidentified
  REGION 1..85: note = Description of Unknown:cds_NZ_WFIY01000004.1_cds_WP_155864436.1_1562 target sequence
EASMFYAGDEHNEEGHITEGTENRIKMYEKRMKKLETADKEIPEELRVNIVGDGNIVLLTWGSPKGAIIDAMDELKDVMMIQVKM

SEQ ID NO: 24989 - protein, 85 aa, unidentified
  REGION 1..85: note = Description of Unknown:cds_NC_007409.1_cds_YP_319897.1_66 target sequence
SQQPSGQGISEKIQNLASKYGQMLNELDKAVVGRYDSKTAVLLGLMTGFPTLLVGDRGVAKTMLIELLPKVIEGLNDKDVFVVQV

SEQ ID NO: 24990 - protein, 85 aa, unidentified
  REGION 1..85: note = Description of Unknown:cds_NC_007409.1_cds_YP_319897.1_66 target sequence
SEYTDPSEIFGVPDIQKLVNGEGFDLKTDGFLPSAKVAFIDEIFYTSEKVRSTLLRAINEKKINVFGKEIKLPWIAFYAAANKVD

SEQ ID NO: 24991 - protein, 85 aa, unidentified
  REGION 1..85: note = Description of Unknown:cds_NC_007409.1_cds_YP_319897.1_66 target sequence
LENPSDLALLDRFNIRGFILDIPFIMDNVDKLADETMQVMSASENPELKKVITLNDVEETRKVLDQMVRDFFNSKEALDLLKKVY

SEQ ID NO: 24992 - protein, 85 aa, unidentified
  REGION 1..85: note = Description of Unknown:cds_NC_007409.1_cds_YP_319897.1_66 target sequence
YVIGDILASLKDTDAYESFYRSADEDYTHISTRARKRLNYVAASIALVRGATKPTYLDYLLALLFTLPVDVQSFKIVRDKIRDEW

SEQ ID NO: 24993 - protein, 85 aa, unidentified
  REGION 1..85: note = Description of Unknown:cds_NC_007409.1_cds_YP_319897.1_66 target sequence
NKAVSGQEDTDATKVILDYLNDRLLTEAFIKASKMFDTSRNAIENLGKKIPLAQPFENREPTLVSSLPKIVEFLTRPEPISYSIW

SEQ ID NO: 24994 - protein, 85 aa, unidentified
  REGION 1..85: note = Description of Unknown:cds_NC_007409.1_cds_YP_319897.1_66 target sequence
LMTKDKNGKINVGREKTGELSGNPLQKLEELLKLLESYRKVLDEADSPEERKTLILGLSKLVVNFGSTSSYQNGYKVPFLTLLDA

SEQ ID NO: 24995 - protein, 85 aa, unidentified
  REGION 1..85: note = Description of Unknown:cds_NC_007409.1_cds_YP_319897.1_66 target sequence
ISLFINNLKSTDVQKVIEQVVNDAKNNALKSISNGAPEVSGWEVFAPLLEQYGMKVPGILEAKRQIEDRAKGLSKNLDNTVTEIM

SEQ ID NO: 24996 - protein, 84 aa, unidentified
  REGION 1..84: note = Description of Unknown:cds_NC_007409.1_cds_YP_319897.1_66 target sequence
AKNNALKSISNGAPEVSGWEVFAPLLEQYGMKVPGILEAKRQIEDRAKGLSKNLDNTVTEIMNAGEKIMEMDDEMTKTFISLAS

SEQ ID NO: 24997 - protein, 85 aa, unidentified
  REGION 1..85: note = Description of Unknown:cds_NC_007409.1_cds_YP_319897.1_66 target sequence
DKAVVGRYDSKTAVLLGLMTGFPTLLVGDRGVAKTMLIELLPKVIEGLNDKDVFVVQVSEYTDPSEIFGVPDIQKLVNGEGFDLK

SEQ ID NO: 24998 - protein, 85 aa, unidentified
  REGION 1..85: note = Description of Unknown:cds_NC_007409.1_cds_YP_319897.1_66 target sequence
TDGFLPSAKVAFIDEIFYTSEKVRSTLLRAINEKKINVFGKEIKLPWIAFYAAANKVDLENPSDLALLDRFNIRGFILDIPFIMD

SEQ ID NO: 24999 - protein, 85 aa, unidentified
  REGION 1..85: note = Description of Unknown:cds_NC_007409.1_cds_YP_319897.1_66 target sequence
NVDKLADETMQVMSASENPELKKVITLNDVEETRKVLDQMVRDFFNSKEALDLLKKVYYVIGDILASLKDTDAYESFYRSADEDY

SEQ ID NO: 25000 - protein, 85 aa, unidentified
  REGION 1..85: note = Description of Unknown:cds_NC_007409.1_cds_YP_319897.1_66 target sequence
THISTRARKRLNYVAASIALVRGATKPTYLDYLLALLFTLPVDVQSFKIVRDKIRDEWNKAVSGQEDTDATKVILDYLNDRLLTE

SEQ ID NO: 25001 - protein, 85 aa, unidentified
  REGION 1..85: note = Description of Unknown:cds_NC_007409.1_cds_YP_319897.1_66 target sequence
AFIKASKMFDTSRNAIENLGKKIPLAQPFENREPTLVSSLPKIVEFLTRPEPISYSIWLMTKDKNGKINVGREKTGELSGNPLQK

SEQ ID NO: 25002 - protein, 85 aa, unidentified
  REGION 1..85: note = Description of Unknown:cds_NC_007409.1_cds_YP_319897.1_66 target sequence
LEELLKLLESYRKVLDEADSPEERKTLILGLSKLVVNFGSTSSYQNGYKVPFLTLLDAISLFINNLKSTDVQKVIEQVVNDAKNN

SEQ ID NO: 25003 - protein, 85 aa, unidentified
  REGION 1..85: note = Description of Unknown:cds_NZ_WFIY01000004.1_cds_WP_155864223.1_2192 target sequence
VFEPDKELIENSNVYRFMTEKNLSTLEEFIKYTNENPKFWEEFVDFINLRFYKRHERILDLSNGKQWPKWFVGGKLNIGDQIPES

SEQ ID NO: 25004 - protein, 85 aa, unidentified
  REGION 1..85: note = Description of Unknown:cds_NZ_WFIY01000004.1_cds_WP_155864223.1_2192 target sequence
SEVFIKWMDENLNSREVTYNQVLYEAKAVSSWLKKIGLKKGDRVAIYMPMIPEIISVMLGVIRAGMVIVPLFSGFGPEPIRIRVE

SEQ ID NO: 25005 - protein, 85 aa, unidentified
  REGION 1..85: note = Description of Unknown:cds_NZ_WFIY01000004.1_cds_WP_155864223.1_2192 target sequence
DSEAKVIFTVDKSIRKGKELNMINNLEGLNISKVVLNRSGTKGDFYDFEEVIRTAGDGLEYTESEDPMMIIYTSGTTGKPKGCVH

SEQ ID NO: 25006 - protein, 85 aa, unidentified
  REGION 1..85: note = Description of Unknown:cds_NZ_WFIY01000004.1_cds_WP_155864223.1_2192 target sequence
THDGFPIKASADIYFQFDMKKGETLMWISDMGWMMGPWTVFGSLLLKGKIGIIEGYTDGKVISKFMEDMKVDIFGLSASLVRLLR

SEQ ID NO: 25007 - protein, 85 aa, unidentified
  REGION 1..85: note = Description of Unknown:cds_NZ_WFIY01000004.1_cds_WP_155864223.1_2192 target sequence
SEEDNIKLDVRLTGNTGEPIDPESWYWLFHHSGNKPVINYSGGTEISGGILGNYVIKKIKPSSFNGEAPGIKASVFTEDGKEAPP

SEQ ID NO: 25008 - protein, 85 aa, unidentified
  REGION 1..85: note = Description of Unknown:cds_NZ_WFIY01000004.1_cds_WP_155864223.1_2192 target sequence
NTEGELVVLSVWPGMTRGFWRNPERYLETYWSKWENVWVHGDLAYKDNEGYFYIVGRSDDTIKVSGKRIGPAEIESVINSHPEVI

SEQ ID NO: 25009 - protein, 85 aa, unidentified
  REGION 1..85: note = Description of Unknown:cds_NZ_WFIY01000004.1_cds_WP_155864223.1_2192 target sequence
ESACIGVPDPIKGEKIVCLAVTRKKDVSEKELLRYAEEKLGKALSPSEVKVVEELPKTRNAKIMRRLIKAIYLNKPLGDISSLEN

SEQ ID NO: 25010 - protein, 84 aa, unidentified
  REGION 1..84: note = Description of Unknown:cds_NZ_WFIY01000004.1_cds_WP_155864223.1_2192 target sequence
RKKDVSEKELLRYAEEKLGKALSPSEVKVVEELPKTRNAKIMRRLIKAIYLNKPLGDISSLENPSSLEAIKKVIKKEEDMQKEN

SEQ ID NO: 25011 - protein, 85 aa, unidentified
  REGION 1..85: note = Description of Unknown:cds_NZ_WFIY01000004.1_cds_WP_155864223.1_2192 target sequence
EFIKYTNENPKFWEEFVDFINLRFYKRHERILDLSNGKQWPKWFVGGKLNIGDQIPESSEVFIKWMDENLNSREVTYNQVLYEAK

SEQ ID NO: 25012 - protein, 85 aa, unidentified
  REGION 1..85: note = Description of Unknown:cds_NZ_WFIY01000004.1_cds_WP_155864223.1_2192 target sequence
AVSSWLKKIGLKKGDRVAIYMPMIPEIISVMLGVIRAGMVIVPLFSGFGPEPIRIRVEDSEAKVIFTVDKSIRKGKELNMINNLE

SEQ ID NO: 25013 - protein, 85 aa, unidentified
  REGION 1..85: note = Description of Unknown:cds_NZ_WFIY01000004.1_cds_WP_155864223.1_2192 target sequence
GLNISKVVLNRSGTKGDFYDFEEVIRTAGDGLEYTESEDPMMIIYTSGTTGKPKGCVHTHDGFPIKASADIYFQFDMKKGETLMW

SEQ ID NO: 25014 - protein, 85 aa, unidentified
  REGION 1..85: note = Description of Unknown:cds_NZ_WFIY01000004.1_cds_WP_155864223.1_2192 target sequence
ISDMGWMMGPWTVFGSLLLKGKIGIIEGYTDGKVISKFMEDMKVDIFGLSASLVRLLRSEEDNIKLDVRLTGNTGEPIDPESWYW

SEQ ID NO: 25015 - protein, 85 aa, unidentified
  REGION 1..85: note = Description of Unknown:cds_NZ_WFIY01000004.1_cds_WP_155864223.1_2192 target sequence
LFHHSGNKPVINYSGGTEISGGILGNYVIKKIKPSSFNGEAPGIKASVFTEDGKEAPPNTEGELVVLSVWPGMTRGFWRNPERYL

SEQ ID NO: 25016 - protein, 85 aa, unidentified
  REGION 1..85: note = Description of Unknown:cds_NZ_WFIY01000004.1_cds_WP_155864223.1_2192 target sequence
ETYWSKWENVWVHGDLAYKDNEGYFYIVGRSDDTIKVSGKRIGPAEIESVINSHPEVIESACIGVPDPIKGEKIVCLAVTRKKDV

SEQ ID NO: 25017 - protein, 85 aa, unidentified
  REGION 1..85: note = Description of Unknown:cds_NZ_WFIY01000004.1_cds_WP_155863377.1_1350 target sequence
VIIPEPMLKVYMLFPNDLREQISACIVKLGDFQPEEGKYFERTSYIEQVSFVNGMLDEISKIINFFNIGYKKEGIVEFNGIEKNL

SEQ ID NO: 25018 - protein, 85 aa, unidentified
  REGION 1..85: note = Description of Unknown:cds_NZ_WFIY01000004.1_cds_WP_155863377.1_1350 target sequence
EDFKKDEGKFIDSVYQKIQTYSKYLDDRARLYDEIEETRSEEKLIELDKVLREISELHKELNAERKVIEKRIMEDYNKLLTLKEI

SEQ ID NO: 25019 - protein, 85 aa, unidentified
  REGION 1..85: note = Description of Unknown:cds_NZ_WFIY01000004.1_cds_WP_155863377.1_1350 target sequence
LKILTSVRFSKYYAYLEGYIREKKKDEFIKIISKYALVVFERPKRFGSKEIPPTYSSVPHFMRPFESLVGIYGTPSYWEVDPTFL

SEQ ID NO: 25020 - protein, 85 aa, unidentified
  REGION 1..85: note = Description of Unknown:cds_NZ_WFIY01000004.1_cds_WP_155863377.1_1350 target sequence
FAITFPLFFALMFPDAGDGLVLLLFSVLFYRYAKNRNNQQLKDISIVLAYSSALSMMIGMLLRELFGPLFVEGTKELVPQSNEST

SEQ ID NO: 25021 - protein, 85 aa, unidentified
  REGION 1..85: note = Description of Unknown:cds_NZ_WFIY01000004.1_cds_WP_155863377.1_1350 target sequence
IGPLYYYWPVPPDVSKIFSSIIPFGQYSQPLYGIQNAIIISILIGIILTLIANSLGIYNSHLKNAKEDILYNRIPNFIVYLSPTI

SEQ ID NO: 25022 - protein, 85 aa, unidentified
  REGION 1..85: note = Description of Unknown:cds_NZ_WFIY01000004.1_cds_WP_155863377.1_1350 target sequence
IFIYGFYNPYKYFINTYNLLGALLYTVMHLYSPIFYGYYLVSFISIIIFFIGEIYGWISHIYINIREGLKNALLKGFIEGFFSPL

SEQ ID NO: 25023 - protein, 85 aa, unidentified
  REGION 1..85: note = Description of Unknown:cds_NZ_WFIY01000004.1_cds_WP_155863377.1_1350 target sequence
LLVISNVISFIRLLVLGLSHYYILYAFSFIAVMLAGTLDTWRILSNPVSLIILIIGNILVIGLEGFVAVIQAIRLNLYELGGKFC

SEQ ID NO: 25024 - protein, 84 aa, unidentified
  REGION 1..84: note = Description of Unknown:cds_NZ_WFIY01000004.1_cds_WP_155863377.1_1350 target sequence
YILYAFSFIAVMLAGTLDTWRILSNPVSLIILIIGNILVIGLEGFVAVIQAIRLNLYELGGKFCECEGRPFENVKEYAVIKNKC

SEQ ID NO: 25025 - protein, 85 aa, unidentified
  REGION 1..85: note = Description of Unknown:cds_NZ_WFIY01000004.1_cds_WP_155863377.1_1350 target sequence
KLGDFQPEEGKYFERTSYIEQVSFVNGMLDEISKIINFFNIGYKKEGIVEFNGIEKNLEDFKKDEGKFIDSVYQKIQTYSKYLDD

SEQ ID NO: 25026 - protein, 85 aa, unidentified
  REGION 1..85: note = Description of Unknown:cds_NZ_WFIY01000004.1_cds_WP_155863377.1_1350 target sequence
RARLYDEIEETRSEEKLIELDKVLREISELHKELNAERKVIEKRIMEDYNKLLTLKEILKILTSVRFSKYYAYLEGYIREKKKDE

SEQ ID NO: 25027 - protein, 85 aa, unidentified
  REGION 1..85: note = Description of Unknown:cds_NZ_WFIY01000004.1_cds_WP_155863377.1_1350 target sequence
FIKIISKYALVVFERPKRFGSKEIPPTYSSVPHFMRPFESLVGIYGTPSYWEVDPTFLFAITFPLFFALMFPDAGDGLVLLLFSV

SEQ ID NO: 25028 - protein, 85 aa, unidentified
  REGION 1..85: note = Description of Unknown:cds_NZ_WFIY01000004.1_cds_WP_155863377.1_1350 target sequence
LFYRYAKNRNNQQLKDISIVLAYSSALSMMIGMLLRELFGPLFVEGTKELVPQSNESTIGPLYYYWPVPPDVSKIFSSIIPFGQY

SEQ ID NO: 25029 - protein, 85 aa, unidentified
  REGION 1..85: note = Description of Unknown:cds_NZ_WFIY01000004.1_cds_WP_155863377.1_1350 target sequence
SQPLYGIQNAIIISILIGIILTLIANSLGIYNSHLKNAKEDILYNRIPNFIVYLSPTIIFIYGFYNPYKYFINTYNLLGALLYTV

SEQ ID NO: 25030 - protein, 85 aa, unidentified
  REGION 1..85: note = Description of Unknown:cds_NZ_WFIY01000004.1_cds_WP_155863377.1_1350 target sequence
MHLYSPIFYGYYLVSFISIIIFFIGEIYGWISHIYINIREGLKNALLKGFIEGFFSPLLLVISNVISFIRLLVLGLSHYYILYAF

SEQ ID NO: 25031 - protein, 85 aa, unidentified
  REGION 1..85: note = Description of Unknown:cds_NZ_WFIY01000004.1_cds_WP_155864345.1_2358 target sequence
DFLTINVDKVTVEGGSSEYLGFKLRKFQEEVKDSIEGKEKVVLQTPTGSGKTFSLLLSKHSVGLYPVLELLEDQYRSVSSLFKDV

SEQ ID NO: 25032 - protein, 85 aa, unidentified
  REGION 1..85: note = Description of Unknown:cds_NZ_WFIY01000004.1_cds_WP_155864345.1_2358 target sequence
EYQDEFIKIVRAGGEKLALIKFSATLAKGKEVKLNVLEDRKVDRKIVFTTPDSFHIYNQMLTYPSHTALAVIYGNPEVDELLNVD

SEQ ID NO: 25033 - protein, 85 aa, unidentified
  REGION 1..85: note = Description of Unknown:cds_NZ_WFIY01000004.1_cds_WP_155864345.1_2358 target sequence
IKRKEIIKRLGLFLNLFKGDMIFVDEFHLYDNYQLSSLIITLKIIKRIHDHDFSLILSSATPSEEKIKKIEDGLKVEYGGNFHFK

SEQ ID NO: 25034 - protein, 85 aa, unidentified
  REGION 1..85: note = Description of Unknown:cds_NZ_WFIY01000004.1_cds_WP_155864345.1_2358 target sequence
RINARKGNVLVRGRAKVRLIFVDSKGKTKLSRFVNAGDEIPDLIHKGLLDNVYNELKEKKQRGIIVVDKVSQALEIAKALHDRFG

SEQ ID NO: 25035 - protein, 85 aa, unidentified
  REGION 1..85: note = Description of Unknown:cds_NZ_WFIY01000004.1_cds_WP_155864345.1_2358 target sequence
IRVVCKTSIKGEYCGEDDVFVVGSSAITQGVDYPNVSYGLIARFFSEAVIQAIGRVGRKMEECKIDLVLPKVGNGLKDGMTYEEF

SEQ ID NO: 25036 - protein, 85 aa, unidentified
  REGION 1..85: note = Description of Unknown:cds_NZ_WFIY01000004.1_cds_WP_155864345.1_2358 target sequence
VEWIIKTYPSINEIDYGDQSFREFLLINSAIAVYERLTGHQMNMESWNKGIPYIGDISSLSLLYYFRFTGPQVKYKLGSISSEAD

SEQ ID NO: 25037 - protein, 85 aa, unidentified
  REGION 1..85: note = Description of Unknown:cds_NZ_WFIY01000004.1_cds_WP_155864345.1_2358 target sequence
LGTIMRNFSFEVENNIFELKGVGRSAVVANCDQKKLEGLANKIVSSTFLELLGCKFEDENGNPVSIGKQLFLVVRDEKLSDYIIN

SEQ ID NO: 25038 - protein, 84 aa, unidentified
  REGION 1..84: note = Description of Unknown:cds_NZ_WFIY01000004.1_cds_WP_155864345.1_2358 target sequence
KGVGRSAVVANCDQKKLEGLANKIVSSTFLELLGCKFEDENGNPVSIGKQLFLVVRDEKLSDYIINTGRGIGVKNSDKYCLAFI

SEQ ID NO: 25039 - protein, 85 aa, unidentified
  REGION 1..85: note = Description of Unknown:cds_NZ_WFIY01000004.1_cds_WP_155864345.1_2358 target sequence
QEEVKDSIEGKEKVVLQTPTGSGKTFSLLLSKHSVGLYPVLELLEDQYRSVSSLFKDVEYQDEFIKIVRAGGEKLALIKFSATLA

SEQ ID NO: 25040 - protein, 85 aa, unidentified
  REGION 1..85: note = Description of Unknown:cds_NZ_WFIY01000004.1_cds_WP_155864345.1_2358 target sequence
KGKEVKLNVLEDRKVDRKIVFTTPDSFHIYNQMLTYPSHTALAVIYGNPEVDELLNVDIKRKEIIKRLGLFLNLFKGDMIFVDEF

SEQ ID NO: 25041 - protein, 85 aa, unidentified
  REGION 1..85: note = Description of Unknown:cds_NZ_WFIY01000004.1_cds_WP_155864345.1_2358 target sequence
HLYDNYQLSSLIITLKIIKRIHDHDFSLILSSATPSEEKIKKIEDGLKVEYGGNFHFKRINARKGNVLVRGRAKVRLIFVDSKGK

SEQ ID NO: 25042 - protein, 85 aa, unidentified
  REGION 1..85: note = Description of Unknown:cds_NZ_WFIY01000004.1_cds_WP_155864345.1_2358 target sequence
TKLSRFVNAGDEIPDLIHKGLLDNVYNELKEKKQRGIIVVDKVSQALEIAKALHDRFGIRVVCKTSIKGEYCGEDDVFVVGSSAI

SEQ ID NO: 25043 - protein, 85 aa, unidentified
  REGION 1..85: note = Description of Unknown:cds_NZ_WFIY01000004.1_cds_WP_155864345.1_2358 target sequence
TQGVDYPNVSYGLIARFFSEAVIQAIGRVGRKMEECKIDLVLPKVGNGLKDGMTYEEFVEWIIKTYPSINEIDYGDQSFREFLLI

SEQ ID NO: 25044 - protein, 85 aa, unidentified
  REGION 1..85: note = Description of Unknown:cds_NZ_WFIY01000004.1_cds_WP_155864345.1_2358 target sequence
NSAIAVYERLTGHQMNMESWNKGIPYIGDISSLSLLYYFRFTGPQVKYKLGSISSEADLGTIMRNFSFEVENNIFELKGVGRSAV

SEQ ID NO: 25045 - protein, 85 aa, unidentified
  REGION 1..85: note = Description of Unknown:cds_NZ_WFIY01000004.1_cds_WP_155862328.1_54 target sequence
AKARDLGTESDQKLSKSLSRMELFYIGLGGIIGSGWLFATLYAAEDAGGASILSWIIGGVLISFIALAYAEISSAIPKSGGIARY

SEQ ID NO: 25046 - protein, 85 aa, unidentified
  REGION 1..85: note = Description of Unknown:cds_NZ_WFIY01000004.1_cds_WP_155862328.1_54 target sequence
PHYTHGGLVGFIMTWAYLISTSISAAAEATASVTYLSSLVPSLACKGVLTPLGIGIDYVFLVAFFFINYFGVKFLGRVSHGVGWW

SEQ ID NO: 25047 - protein, 85 aa, unidentified
  REGION 1..85: note = Description of Unknown:cds_NZ_WFIY01000004.1_cds_WP_155862328.1_54 target sequence
KLLIPSATIVILLVFYFHPTNFTVDFIPSSSYTCHGYGGFSAVLFAIPNAGILFSYLGFRQPIDYSGEAKNPKKNLPFAVIGSLL

SEQ ID NO: 25048 - protein, 85 aa, unidentified
  REGION 1..85: note = Description of Unknown:cds_NZ_WFIY01000004.1_cds_WP_155862328.1_54 target sequence
VGIIIYVLLQVAFIGGLNWSTIGVTPGDWKALASTSLSNGPFFCLFRESKVFGLVFLIFYIWSIILLLDAVVSPSGTGWIYMGTA

SEQ ID NO: 25049 - protein, 85 aa, unidentified
  REGION 1..85: note = Description of Unknown:cds_NZ_WFIY01000004.1_cds_WP_155862328.1_54 target sequence
SRTIYAFSANGYLPEIFLKIGKTKVPTPSLILTLIIGSIFLLPFPAWVTLTSILSSASVFTYMMGGIGMETLRKLAPDLCRPYVA

SEQ ID NO: 25050 - protein, 85 aa, unidentified
  REGION 1..85: note = Description of Unknown:cds_NZ_WFIY01000004.1_cds_WP_155862328.1_54 target sequence
PAGKILAPLATLSAGLLVYWSGFHILFYVVTAIFVGLPLFFSYYAHKILEVKKKVAISLGIADVILIPLTSYFYLVQSDYLVENN

SEQ ID NO: 25051 - protein, 85 aa, unidentified
  REGION 1..85: note = Description of Unknown:cds_NZ_WFIY01000004.1_cds_WP_155862328.1_54 target sequence
LIAFIIYIISMAIIVSSNIVAVYMSSPAEGKEEIRAGIWLISFIFAMILLSYLGGFGPAKLIPFPEDTIVIGIVTLIFHYLAVKS

SEQ ID NO: 25052 - protein, 84 aa, unidentified
  REGION 1..84: note = Description of Unknown:cds_NZ_WFIY01000004.1_cds_WP_155862328.1_54 target sequence
IVAVYMSSPAEGKEEIRAGIWLISFIFAMILLSYLGGFGPAKLIPFPEDTIVIGIVTLIFHYLAVKSGIKTKALEELERGVSVS

SEQ ID NO: 25053 - protein, 85 aa, unidentified
  REGION 1..85: note = Description of Unknown:cds_NZ_WFIY01000004.1_cds_WP_155862328.1_54 target sequence
LGGIIGSGWLFATLYAAEDAGGASILSWIIGGVLISFIALAYAEISSAIPKSGGIARYPHYTHGGLVGFIMTWAYLISTSISAAA

SEQ ID NO: 25054 - protein, 85 aa, unidentified
  REGION 1..85: note = Description of Unknown:cds_NZ_WFIY01000004.1_cds_WP_155862328.1_54 target sequence
EATASVTYLSSLVPSLACKGVLTPLGIGIDYVFLVAFFFINYFGVKFLGRVSHGVGWWKLLIPSATIVILLVFYFHPTNFTVDFI

SEQ ID NO: 25055 - protein, 85 aa, unidentified
  REGION 1..85: note = Description of Unknown:cds_NZ_WFIY01000004.1_cds_WP_155862328.1_54 target sequence
PSSSYTCHGYGGFSAVLFAIPNAGILFSYLGFRQPIDYSGEAKNPKKNLPFAVIGSLLVGIIIYVLLQVAFIGGLNWSTIGVTPG

SEQ ID NO: 25056 - protein, 85 aa, unidentified
  REGION 1..85: note = Description of Unknown:cds_NZ_WFIY01000004.1_cds_WP_155862328.1_54 target sequence
DWKALASTSLSNGPFFCLFRESKVFGLVFLIFYIWSIILLLDAVVSPSGTGWIYMGTASRTIYAFSANGYLPEIFLKIGKTKVPT

SEQ ID NO: 25057 - protein, 85 aa, unidentified
  REGION 1..85: note = Description of Unknown:cds_NZ_WFIY01000004.1_cds_WP_155862328.1_54 target sequence
PSLILTLIIGSIFLLPFPAWVTLTSILSSASVFTYMMGGIGMETLRKLAPDLCRPYVAPAGKILAPLATLSAGLLVYWSGFHILF

SEQ ID NO: 25058 - protein, 85 aa, unidentified
  REGION 1..85: note = Description of Unknown:cds_NZ_WFIY01000004.1_cds_WP_155862328.1_54 target sequence
YVVTAIFVGLPLFFSYYAHKILEVKKKVAISLGIADVILIPLTSYFYLVQSDYLVENNLIAFIIYIISMAIIVSSNIVAVYMSSP

SEQ ID NO: 25059 - protein, 85 aa, unidentified
  REGION 1..85: note = Description of Unknown:cds_NZ_WFIY01000004.1_cds_WP_155863215.1_1159 target sequence
LSVNKNFVEERNLDEEGIIKDLENKLNAAEEDARKNGEIIGRVTRYRTVRLEEKELIGVDISFKDYMRSNVSRGQYLAIRTILRP

SEQ ID NO: 25060 - protein, 85 aa, unidentified
  REGION 1..85: note = Description of Unknown:cds_NZ_WFIY01000004.1_cds_WP_155863215.1_1159 target sequence
VVIVGQVVSISRSDILAEIGIREVNSRRDPASIITDTFLGIDPISELDEEKNIVRPAVTPIDPQSPVFIPTPSLLEKVLRIPEEG

SEQ ID NO: 25061 - protein, 85 aa, unidentified
  REGION 1..85: note = Description of Unknown:cds_NZ_WFIY01000004.1_cds_WP_155863215.1_1159 target sequence
ITIGRIFSGGEETDAKVRLDENTLVHHTLVLGTTGSGKTTLLKSILYSKDLDKQTMVFDRQGDFVNFLISKKEKFTVLMPVTSKM

SEQ ID NO: 25062 - protein, 85 aa, unidentified
  REGION 1..85: note = Description of Unknown:cds_NZ_WFIY01000004.1_cds_WP_155863215.1_1159 target sequence
GNSAKDFLDTFASTYGCKVLEYESGALICNDTEVDVIPYSINFFDNIRNFHKLTPYFTPKASMYWEPIIDKTLELLKSSLNKIFN

SEQ ID NO: 25063 - protein, 85 aa, unidentified
  REGION 1..85: note = Description of Unknown:cds_NZ_WFIY01000004.1_cds_WP_155863215.1_1159 target sequence
NSIDDNILNKILRDKVTPGSLAEIGNKISISPTLLNELNLKSNSKNISTSFVSFSQGNLTISLNKVFQDVMEGLDIFPSTKDAII

SEQ ID NO: 25064 - protein, 85 aa, unidentified
  REGION 1..85: note = Description of Unknown:cds_NZ_WFIY01000004.1_cds_WP_155863215.1_1159 target sequence
RTLKAYDGYGIFTVKGTVDFDPEKAFKLNDKIIVDLSFVMNYSASIEAVATIAYKILEDLFKWKTELYSKKSPENKLTLIIMDEA

SEQ ID NO: 25065 - protein, 85 aa, unidentified
  REGION 1..85: note = Description of Unknown:cds_NZ_WFIY01000004.1_cds_WP_155863215.1_1159 target sequence
HEYFPQGNSEAVAKDIIEELINKIMRLGRVRRIGVILATHMPDDLNPLVLQLTNTKIVMRNDINVIKKMGMENYEDFLLHATPGL

SEQ ID NO: 25066 - protein, 84 aa, unidentified
  REGION 1..84: note = Description of Unknown:cds_NZ_WFIY01000004.1_cds_WP_155863215.1_1159 target sequence
LINKIMRLGRVRRIGVILATHMPDDLNPLVLQLTNTKIVMRNDINVIKKMGMENYEDFLLHATPGLAIINSLNFAGIQLKTLIP

SEQ ID NO: 25067 - protein, 85 aa, unidentified
  REGION 1..85: note = Description of Unknown:cds_NZ_WFIY01000004.1_cds_WP_155863215.1_1159 target sequence
AAEEDARKNGEIIGRVTRYRTVRLEEKELIGVDISFKDYMRSNVSRGQYLAIRTILRPVVIVGQVVSISRSDILAEIGIREVNSR

SEQ ID NO: 25068 - protein, 85 aa, unidentified
  REGION 1..85: note = Description of Unknown:cds_NZ_WFIY01000004.1_cds_WP_155863215.1_1159 target sequence
RDPASIITDTFLGIDPISELDEEKNIVRPAVTPIDPQSPVFIPTPSLLEKVLRIPEEGITIGRIFSGGEETDAKVRLDENTLVHH

SEQ ID NO: 25069 - protein, 85 aa, unidentified
  REGION 1..85: note = Description of Unknown:cds_NZ_WFIY01000004.1_cds_WP_155863215.1_1159 target sequence
TLVLGTTGSGKTTLLKSILYSKDLDKQTMVFDRQGDFVNFLISKKEKFTVLMPVTSKMGNSAKDFLDTFASTYGCKVLEYESGAL

SEQ ID NO: 25070 - protein, 85 aa, unidentified
  REGION 1..85: note = Description of Unknown:cds_NZ_WFIY01000004.1_cds_WP_155863215.1_1159 target sequence
ICNDTEVDVIPYSINFFDNIRNFHKLTPYFTPKASMYWEPIIDKTLELLKSSLNKIFNNSIDDNILNKILRDKVTPGSLAEIGNK

SEQ ID NO: 25071 - protein, 85 aa, unidentified
  REGION 1..85: note = Description of Unknown:cds_NZ_WFIY01000004.1_cds_WP_155863215.1_1159 target sequence
ISISPTLLNELNLKSNSKNISTSFVSFSQGNLTISLNKVFQDVMEGLDIFPSTKDAIIRTLKAYDGYGIFTVKGTVDFDPEKAFK

SEQ ID NO: 25072 - protein, 85 aa, unidentified
  REGION 1..85: note = Description of Unknown:cds_NZ_WFIY01000004.1_cds_WP_155863215.1_1159 target sequence
LNDKIIVDLSFVMNYSASIEAVATIAYKILEDLFKWKTELYSKKSPENKLTLIIMDEAHEYFPQGNSEAVAKDIIEELINKIMRL

SEQ ID NO: 25073 - protein, 85 aa, unidentified
  REGION 1..85: note = Description of Unknown:cds_NZ_WFIY01000004.1_cds_WP_205737133.1_682 target sequence
NPIYSRMREIHEYSLMYPEKFWDAVARELFWYKLYEKVIESHHPYYYWFKGGKINITYNILDIRKNSNKIALYWESENGENISLS

SEQ ID NO: 25074 - protein, 85 aa, unidentified
  REGION 1..85: note = Description of Unknown:cds_NZ_WFIY01000004.1_cds_WP_205737133.1_682 target sequence
YKQLYNLVSSFAGALTQLGLKKGDVVTIYMPMIPEAMVAMLACARIGVIHNVVFAGFGEKALRERIEIAGSKAIITADVGYRRGK

SEQ ID NO: 25075 - protein, 85 aa, unidentified
  REGION 1..85: note = Description of Unknown:cds_NZ_WFIY01000004.1_cds_WP_205737133.1_682 target sequence
EISYLDVVENATKDLSLIKITVPRGGKVVGHSFYDLLDAKKVDAVPMDSQDPLFILFTSGTTGKPKGVVHSVGPYTVWAYYHVKW

SEQ ID NO: 25076 - protein, 85 aa, unidentified
  REGION 1..85: note = Description of Unknown:cds_NZ_WFIY01000004.1_cds_WP_205737133.1_682 target sequence
LLNFDDTSTFFSTSDIGWINGHSYSTYGTLLNNGTLLWYEGVPDYPDPQVWWRLVEEYKVTDIWTAPTAIRLLMKYGSKIDHDIS

SEQ ID NO: 25077 - protein, 85 aa, unidentified
  REGION 1..85: note = Description of Unknown:cds_NZ_WFIY01000004.1_cds_WP_205737133.1_682 target sequence
SLRMIASAGEILGEEAWKWLVEITSNKVYVIETWGQTENSGFITSPGGFYIGGIYYKKGSVGYPLPGINIAIYDDNGRELPPNTK

SEQ ID NO: 25078 - protein, 85 aa, unidentified
  REGION 1..85: note = Description of Unknown:cds_NZ_WFIY01000004.1_cds_WP_205737133.1_682 target sequence
GNIVIKSSAPAFMSSLWHDDERYRKYYEKFGVYLTGDYGYMDEEGYLYILGRIDDVIKVAGHRISPAEIENIVLSNEEIADAAVV

SEQ ID NO: 25079 - protein, 85 aa, unidentified
  REGION 1..85: note = Description of Unknown:cds_NZ_WFIY01000004.1_cds_WP_205737133.1_682 target sequence
GKKDEIKGNVLVVFASLKHGFLPSEELKNKIMSEIKKNYGGIAVIDDIIFVDKLPKTRTGKIMRRVLRALINNEELGDLSTLEER

SEQ ID NO: 25080 - protein, 84 aa, unidentified
  REGION 1..84: note = Description of Unknown:cds_NZ_WFIY01000004.1_cds_WP_205737133.1_682 target sequence
KHGFLPSEELKNKIMSEIKKNYGGIAVIDDIIFVDKLPKTRTGKIMRRVLRALINNEELGDLSTLEEREAIEDLRKRLGEKIGK

SEQ ID NO: 25081 - protein, 85 aa, unidentified
  REGION 1..85: note = Description of Unknown:cds_NZ_WFIY01000004.1_cds_WP_205737133.1_682 target sequence
ELFWYKLYEKVIESHHPYYYWFKGGKINITYNILDIRKNSNKIALYWESENGENISLSYKQLYNLVSSFAGALTQLGLKKGDVVT

SEQ ID NO: 25082 - protein, 85 aa, unidentified
  REGION 1..85: note = Description of Unknown:cds_NZ_WFIY01000004.1_cds_WP_205737133.1_682 target sequence
IYMPMIPEAMVAMLACARIGVIHNVVFAGFGEKALRERIEIAGSKAIITADVGYRRGKEISYLDVVENATKDLSLIKITVPRGGK

SEQ ID NO: 25083 - protein, 85 aa, unidentified
  REGION 1..85: note = Description of Unknown:cds_NZ_WFIY01000004.1_cds_WP_205737133.1_682 target sequence
VVGHSFYDLLDAKKVDAVPMDSQDPLFILFTSGTTGKPKGVVHSVGPYTVWAYYHVKWLLNFDDTSTFFSTSDIGWINGHSYSTY

SEQ ID NO: 25084 - protein, 85 aa, unidentified
  REGION 1..85: note = Description of Unknown:cds_NZ_WFIY01000004.1_cds_WP_205737133.1_682 target sequence
GTLLNNGTLLWYEGVPDYPDPQVWWRLVEEYKVTDIWTAPTAIRLLMKYGSKIDHDISSLRMIASAGEILGEEAWKWLVEITSNK

SEQ ID NO: 25085 - protein, 85 aa, unidentified
  REGION 1..85: note = Description of Unknown:cds_NZ_WFIY01000004.1_cds_WP_205737133.1_682 target sequence
VYVIETWGQTENSGFITSPGGFYIGGIYYKKGSVGYPLPGINIAIYDDNGRELPPNTKGNIVIKSSAPAFMSSLWHDDERYRKYY

SEQ ID NO: 25086 - protein, 85 aa, unidentified
  REGION 1..85: note = Description of Unknown:cds_NZ_WFIY01000004.1_cds_WP_205737133.1_682 target sequence
EKFGVYLTGDYGYMDEEGYLYILGRIDDVIKVAGHRISPAEIENIVLSNEEIADAAVVGKKDEIKGNVLVVFASLKHGFLPSEEL

SEQ ID NO: 25087 - protein, 85 aa, unidentified
  REGION 1..85: note = Description of Unknown:cds_NZ_WFIY01000004.1_cds_WP_205737140.1_1272 target sequence
LSNWKDISIWIPTGIQVINRELDCFPLYNASIRNIYLGGTGILNLTVCLGINTTKAYLQLNNTVLLECNNSVCIILPPYTNYLIL

SEQ ID NO: 25088 - protein, 85 aa, unidentified
  REGION 1..85: note = Description of Unknown:cds_NZ_WFIY01000004.1_cds_WP_205737140.1_1272 target sequence
MVNVKSPFNITIESNSSWLIQDNAYTNNVAWVISNGSVIINDSNLIISFQEVGKYYAEISILTPPFKNIPYLLTLNNNEVNSWLS

SEQ ID NO: 25089 - protein, 85 aa, unidentified
  REGION 1..85: note = Description of Unknown:cds_NZ_WFIY01000004.1_cds_WP_205737140.1_1272 target sequence
KSVIPKNLPKSLLGEYYLSLLLIKDSQNPYLGVFASSPSPLYLYSWVRDSSFMAMALQEAGHYNTALKYWLWMANATSMGNGTWY

SEQ ID NO: 25090 - protein, 85 aa, unidentified
  REGION 1..85: note = Description of Unknown:cds_NZ_WFIY01000004.1_cds_WP_205737140.1_1272 target sequence
TRYNFYTGEPCTTYAIPDLDSLGLFEIGVYNFYNLTHNLEFIYKIKPRLCEIIKYQTCEILKSPYHLIPKDLGPWETRLAYHFWT

SEQ ID NO: 25091 - protein, 85 aa, unidentified
  REGION 1..85: note = Description of Unknown:cds_NZ_WFIY01000004.1_cds_WP_205737140.1_1272 target sequence
EALNDLGLYYMEKLGFNVSYETKLLNESILKYFWENGYFASALGSFGNVLYPLQPAIDSSTLLPLAMGYLPLDSNYTEKNLNTVV

SEQ ID NO: 25092 - protein, 85 aa, unidentified
  REGION 1..85: note = Description of Unknown:cds_NZ_WFIY01000004.1_cds_WP_205737140.1_1272 target sequence
SNLTVNGGLSRFANDVYHYSVLLYDSCEPSPPWVVTTMFEALYYAKTGEINSSIRLLCWAYNHSQQGLLPEAVAPVKGYPLPTTS

SEQ ID NO: 25093 - protein, 85 aa, unidentified
  REGION 1..85: note = Description of Unknown:cds_NZ_WFIY01000004.1_cds_WP_205737140.1_1272 target sequence
PHAWSSAMFIIVSLSLKPKTVSQSQTTQCYESGQTCAQTQTSSQFQTQSHTVQSRTTCPSAESQTQSFTNKELISPLIIILAIIV

SEQ ID NO: 25094 - protein, 84 aa, unidentified
  REGION 1..84: note = Description of Unknown:cds_NZ_WFIY01000004.1_cds_WP_205737140.1_1272 target sequence
KTVSQSQTTQCYESGQTCAQTQTSSQFQTQSHTVQSRTTCPSAESQTQSFTNKELISPLIIILAIIVISIIIVVVLAVLVCKKR

SEQ ID NO: 25095 - protein, 85 aa, unidentified
  REGION 1..85: note = Description of Unknown:cds_NZ_WFIY01000004.1_cds_WP_205737140.1_1272 target sequence
YNASIRNIYLGGTGILNLTVCLGINTTKAYLQLNNTVLLECNNSVCIILPPYTNYLILMVNVKSPFNITIESNSSWLIQDNAYTN

SEQ ID NO: 25096 - protein, 85 aa, unidentified
  REGION 1..85: note = Description of Unknown:cds_NZ_WFIY01000004.1_cds_WP_205737140.1_1272 target sequence
NVAWVISNGSVIINDSNLIISFQEVGKYYAEISILTPPFKNIPYLLTLNNNEVNSWLSKSVIPKNLPKSLLGEYYLSLLLIKDSQ

SEQ ID NO: 25097 - protein, 85 aa, unidentified
  REGION 1..85: note = Description of Unknown:cds_NZ_WFIY01000004.1_cds_WP_205737140.1_1272 target sequence
NPYLGVFASSPSPLYLYSWVRDSSFMAMALQEAGHYNTALKYWLWMANATSMGNGTWYTRYNFYTGEPCTTYAIPDLDSLGLFEI

SEQ ID NO: 25098 - protein, 85 aa, unidentified
  REGION 1..85: note = Description of Unknown:cds_NZ_WFIY01000004.1_cds_WP_205737140.1_1272 target sequence
GVYNFYNLTHNLEFIYKIKPRLCEIIKYQTCEILKSPYHLIPKDLGPWETRLAYHFWTEALNDLGLYYMEKLGFNVSYETKLLNE

SEQ ID NO: 25099 - protein, 85 aa, unidentified
  REGION 1..85: note = Description of Unknown:cds_NZ_WFIY01000004.1_cds_WP_205737140.1_1272 target sequence
SILKYFWENGYFASALGSFGNVLYPLQPAIDSSTLLPLAMGYLPLDSNYTEKNLNTVVSNLTVNGGLSRFANDVYHYSVLLYDSC

SEQ ID NO: 25100 - protein, 85 aa, unidentified
  REGION 1..85: note = Description of Unknown:cds_NZ_WFIY01000004.1_cds_WP_205737140.1_1272 target sequence
EPSPPWVVTTMFEALYYAKTGEINSSIRLLCWAYNHSQQGLLPEAVAPVKGYPLPTTSPHAWSSAMFIIVSLSLKPKTVSQSQTT

SEQ ID NO: 25101 - protein, 85 aa, unidentified
  REGION 1..85: note = Description of Unknown:cds_NZ_WFIY01000004.1_cds_WP_155863919.1_1832 target sequence
AVGLKKKNNDAITLPKQYQLPIYASLVKLGIVKSMAKSYEQKLLMSGSSEDPQLFAAKIFFYLLLSSVLSVVLIGFGLFIIIKFY

SEQ ID NO: 25102 - protein, 85 aa, unidentified
  REGION 1..85: note = Description of Unknown:cds_NZ_WFIY01000004.1_cds_WP_155863919.1_1832 target sequence
LVFRLAKYLALSFMMIIFGLIIPPVTYLANIATLSQKIESRRIGVDAELSAFTSVFTIFLRSGLTPRLMFDKLSSSSAFHYINSI

SEQ ID NO: 25103 - protein, 85 aa, unidentified
  REGION 1..85: note = Description of Unknown:cds_NZ_WFIY01000004.1_cds_WP_155863919.1_1832 target sequence
TLYVSKRIRYLGESVEDAMLHASQISPSKLLKDFFLAYVTAVRTGAPVINTIEAKAKDILDQLQLRASIAADRLSGIAESYVIWL

SEQ ID NO: 25104 - protein, 85 aa, unidentified
  REGION 1..85: note = Description of Unknown:cds_NZ_WFIY01000004.1_cds_WP_155863919.1_1832 target sequence
SSGYIMFFLMMVLEAIFPVGGTSIIPILGAIAVTVIPLVNIIFIYGVEQTQLRFPEKKLNYNLFVIFLTIGMIVMFVLLVLEKQI

SEQ ID NO: 25105 - protein, 85 aa, unidentified
  REGION 1..85: note = Description of Unknown:cds_NZ_WFIY01000004.1_cds_WP_155863919.1_1832 target sequence
FYFLTLSGGTDNITPTVIAMTIGLLIASVPPAIILTKELKEGTGYDPYVVGFMRAIAEGLRAGLPPETIIKNIKDSKEMGKFGKV

SEQ ID NO: 25106 - protein, 85 aa, unidentified
  REGION 1..85: note = Description of Unknown:cds_NZ_WFIY01000004.1_cds_WP_155863919.1_1832 target sequence
LNEIYAYITLGYPLKDAFRKGAERIMDFTSKISLVSLADMMEIGSMTPETIESIARQIESQIKIKRDYESKVKILLVTPYMGVIL

SEQ ID NO: 25107 - protein, 85 aa, unidentified
  REGION 1..85: note = Description of Unknown:cds_NZ_WFIY01000004.1_cds_WP_155863919.1_1832 target sequence
SLIASVLLGSAILSLLLGQKISYAVGPLIEASVLLPRAIYITAISSIFNSFMAGLLVGKLGSGKIATGLIHSAILVIITAVMLLV

SEQ ID NO: 25108 - protein, 84 aa, unidentified
  REGION 1..84: note = Description of Unknown:cds_NZ_WFIY01000004.1_cds_WP_155863919.1_1832 target sequence
GQKISYAVGPLIEASVLLPRAIYITAISSIFNSFMAGLLVGKLGSGKIATGLIHSAILVIITAVMLLVLLHVHFAFYKPSTPTI

SEQ ID NO: 25109 - protein, 85 aa, unidentified
  REGION 1..85: note = Description of Unknown:cds_NZ_WFIY01000004.1_cds_WP_155863919.1_1832 target sequence
KLGIVKSMAKSYEQKLLMSGSSEDPQLFAAKIFFYLLLSSVLSVVLIGFGLFIIIKFYLVFRLAKYLALSFMMIIFGLIIPPVTY

SEQ ID NO: 25110 - protein, 85 aa, unidentified
  REGION 1..85: note = Description of Unknown:cds_NZ_WFIY01000004.1_cds_WP_155863919.1_1832 target sequence
LANIATLSQKIESRRIGVDAELSAFTSVFTIFLRSGLTPRLMFDKLSSSSAFHYINSITLYVSKRIRYLGESVEDAMLHASQISP

SEQ ID NO: 25111 - protein, 85 aa, unidentified
  REGION 1..85: note = Description of Unknown:cds_NZ_WFIY01000004.1_cds_WP_155863919.1_1832 target sequence
SKLLKDFFLAYVTAVRTGAPVINTIEAKAKDILDQLQLRASIAADRLSGIAESYVIWLSSGYIMFFLMMVLEAIFPVGGTSIIPI

SEQ ID NO: 25112 - protein, 85 aa, unidentified
  REGION 1..85: note = Description of Unknown:cds_NZ_WFIY01000004.1_cds_WP_155863919.1_1832 target sequence
LGAIAVTVIPLVNIIFIYGVEQTQLRFPEKKLNYNLFVIFLTIGMIVMFVLLVLEKQIFYFLTLSGGTDNITPTVIAMTIGLLIA

SEQ ID NO: 25113 - protein, 85 aa, unidentified
  REGION 1..85: note = Description of Unknown:cds_NZ_WFIY01000004.1_cds_WP_155863919.1_1832 target sequence
SVPPAIILTKELKEGTGYDPYVVGFMRAIAEGLRAGLPPETIIKNIKDSKEMGKFGKVLNEIYAYITLGYPLKDAFRKGAERIMD

SEQ ID NO: 25114 - protein, 85 aa, unidentified
  REGION 1..85: note = Description of Unknown:cds_NZ_WFIY01000004.1_cds_WP_155863919.1_1832 target sequence
FTSKISLVSLADMMEIGSMTPETIESIARQIESQIKIKRDYESKVKILLVTPYMGVILSLIASVLLGSAILSLLLGQKISYAVGP

SEQ ID NO: 25115 - protein, 85 aa, unidentified
  REGION 1..85: note = Description of Unknown:cds_NZ_WFIY01000004.1_cds_WP_155863842.1_1738 target sequence
ISPEECEDREWIIPTGTGGYSSSTICGINSRTYHGYLIVPKNPPHFRHLVLSKFEDFYIQNGIEYPISTNRYNFQVYYPEGYKFL

SEQ ID NO: 25116 - protein, 85 aa, unidentified
  REGION 1..85: note = Description of Unknown:cds_NZ_WFIY01000004.1_cds_WP_155863842.1_1738 target sequence
NRFILGSNFVVWEYNFENSLVRKTLVVNKGTNSVTITYESDKGLFKICPLITYRSHHVALKERPGFFDFQTQGNTIVITLNDNKI

SEQ ID NO: 25117 - protein, 85 aa, unidentified
  REGION 1..85: note = Description of Unknown:cds_NZ_WFIY01000004.1_cds_WP_155863842.1_1738 target sequence
LNFKIEGEFNIENTGYWYYNFFYKLDYERGSNYLEDLYNPFCIITKNNEITITAYVDSFVKSTKIHLRKDVLQMLSSAGRDFVVK

SEQ ID NO: 25118 - protein, 85 aa, unidentified
  REGION 1..85: note = Description of Unknown:cds_NZ_WFIY01000004.1_cds_WP_155863842.1_1738 target sequence
GKDGWAIIAGYHWFDEWGRDSFISMEGLVLLNGEYSIAKDIISRYLEYEEKGFLPNGFLHNGEPIYKGVDVSLWAIYAIYKYYLY

SEQ ID NO: 25119 - protein, 85 aa, unidentified
  REGION 1..85: note = Description of Unknown:cds_NZ_WFIY01000004.1_cds_WP_155863842.1_1738 target sequence
SRDLDFIRKIFPKLIEIVDWYWKGNGIVETINGLLFHTGSPRTWMDAEFDTTVVTPREGAAVEINALWYNALKIMNFLSKELKMN

SEQ ID NO: 25120 - protein, 85 aa, unidentified
  REGION 1..85: note = Description of Unknown:cds_NZ_WFIY01000004.1_cds_WP_155863842.1_1738 target sequence
TDEFEIKAEKVKAQFIEKFVSPWGLYDYLNPDLTPDTSIRPNQLFAFSLPFNVVDENIGKRIVNTVEKELLRPYGLSTLSKSDKK

SEQ ID NO: 25121 - protein, 85 aa, unidentified
  REGION 1..85: note = Description of Unknown:cds_NZ_WFIY01000004.1_cds_WP_155863842.1_1738 target sequence
YIPFYRGDRRSRDLAYHNGPIWPWLIGSYIDAKIKLERGNIIGIKKLINYLQPLINVAMENNGYIPELFEDIPPYKWGGCIAQAW

SEQ ID NO: 25122 - protein, 84 aa, unidentified
  REGION 1..84: note = Description of Unknown:cds_NZ_WFIY01000004.1_cds_WP_155863842.1_1738 target sequence
HNGPIWPWLIGSYIDAKIKLERGNIIGIKKLINYLQPLINVAMENNGYIPELFEDIPPYKWGGCIAQAWSVAEVFRSLNNIISS

SEQ ID NO: 25123 - protein, 85 aa, unidentified
  REGION 1..85: note = Description of Unknown:cds_NZ_WFIY01000004.1_cds_WP_155863842.1_1738 target sequence
INSRTYHGYLIVPKNPPHFRHLVLSKFEDFYIQNGIEYPISTNRYNFQVYYPEGYKFLNRFILGSNFVVWEYNFENSLVRKTLVV

SEQ ID NO: 25124 - protein, 85 aa, unidentified
  REGION 1..85: note = Description of Unknown:cds_NZ_WFIY01000004.1_cds_WP_155863842.1_1738 target sequence
NKGTNSVTITYESDKGLFKICPLITYRSHHVALKERPGFFDFQTQGNTIVITLNDNKILNFKIEGEFNIENTGYWYYNFFYKLDY

SEQ ID NO: 25125 - protein, 85 aa, unidentified
  REGION 1..85: note = Description of Unknown:cds_NZ_WFIY01000004.1_cds_WP_155863842.1_1738 target sequence
ERGSNYLEDLYNPFCIITKNNEITITAYVDSFVKSTKIHLRKDVLQMLSSAGRDFVVKGKDGWAIIAGYHWFDEWGRDSFISMEG

SEQ ID NO: 25126 - protein, 85 aa, unidentified
  REGION 1..85: note = Description of Unknown:cds_NZ_WFIY01000004.1_cds_WP_155863842.1_1738 target sequence
LVLLNGEYSIAKDIISRYLEYEEKGFLPNGFLHNGEPIYKGVDVSLWAIYAIYKYYLYSRDLDFIRKIFPKLIEIVDWYWKGNGI

SEQ ID NO: 25127 - protein, 85 aa, unidentified
  REGION 1..85: note = Description of Unknown:cds_NZ_WFIY01000004.1_cds_WP_155863842.1_1738 target sequence
VETINGLLFHTGSPRTWMDAEFDTTVVTPREGAAVEINALWYNALKIMNFLSKELKMNTDEFEIKAEKVKAQFIEKFVSPWGLYD

SEQ ID NO: 25128 - protein, 85 aa, unidentified
  REGION 1..85: note = Description of Unknown:cds_NZ_WFIY01000004.1_cds_WP_155863842.1_1738 target sequence
YLNPDLTPDTSIRPNQLFAFSLPFNVVDENIGKRIVNTVEKELLRPYGLSTLSKSDKKYIPFYRGDRRSRDLAYHNGPIWPWLIG

SEQ ID NO: 25129 - protein, 85 aa, unidentified
  REGION 1..85: note = Description of Unknown:cds_NZ_WFIY01000004.1_cds_WP_155863092.1_1005 target sequence
RIMGIDINPGSSPANLLDAKYSVVILDENGNIVQKYDEIGISKIIRLAWEYEVSIVATDNIYELGENDKQVIKIISLFPDNVELV

SEQ ID NO: 25130 - protein, 85 aa, unidentified
  REGION 1..85: note = Description of Unknown:cds_NZ_WFIY01000004.1_cds_WP_155863092.1_1005 target sequence
QVTYNDGRFMDIREVAKNMGIEIQGKPNPSKTAYLAAYLALKGAGTKIKLTENKTKIIISRGRHLGPGGMSSNRYKRHIRGLILR

SEQ ID NO: 25131 - protein, 85 aa, unidentified
  REGION 1..85: note = Description of Unknown:cds_NZ_WFIY01000004.1_cds_WP_155863092.1_1005 target sequence
VFKEVKETLDRNNIDYDVILRKSKSGLENATFIVYAPRERLYGLVKKMSGHDVNLEIRPVYKTKIDFETNKKIEKKPIIVGIDPG

SEQ ID NO: 25132 - protein, 85 aa, unidentified
  REGION 1..85: note = Description of Unknown:cds_NZ_WFIY01000004.1_cds_WP_155863092.1_1005 target sequence
IFVGISAIDIHGNPVILESKKGIDREEIINILSEKGSAIIIATDVNPVPDAVKKIAGILKAKLYVPDKSLSVDEKQKLLQEYSEK

SEQ ID NO: 25133 - protein, 85 aa, unidentified
  REGION 1..85: note = Description of Unknown:cds_NZ_WFIY01000004.1_cds_WP_155863092.1_1005 target sequence
YNLNITDPHIRDSLAAALKAYKELENKLSQAFSTIRKLDLDIDEYAVYRCIIEGKTAAECIEKQIENEIAEDENREIIKVEKTET

SEQ ID NO: 25134 - protein, 85 aa, unidentified
  REGION 1..85: note = Description of Unknown:cds_NZ_WFIY01000004.1_cds_WP_155863092.1_1005 target sequence
KEKQPENKTFTENSELKHEIFRLRRTITRLLNEKYELEKKLYEIKTQFNAEVERDRRLYRLKTELEERNKSILKLQEIIKDYSDK

SEQ ID NO: 25135 - protein, 85 aa, unidentified
  REGION 1..85: note = Description of Unknown:cds_NZ_WFIY01000004.1_cds_WP_155863092.1_1005 target sequence
INKLEGIINDLVEGRVNIIKSNSLIEISDYKVKILGEEVNPSIFNYVGKDFIICKSNILDDIRKLSKEKEIQKEIDINDIKNIIE

SEQ ID NO: 25136 - protein, 84 aa, unidentified
  REGION 1..84: note = Description of Unknown:cds_NZ_WFIY01000004.1_cds_WP_155863092.1_1005 target sequence
VNIIKSNSLIEISDYKVKILGEEVNPSIFNYVGKDFIICKSNILDDIRKLSKEKEIQKEIDINDIKNIIEEYRRQKLKHGNFAI

SEQ ID NO: 25137 - protein, 85 aa, unidentified
  REGION 1..85: note = Description of Unknown:cds_NZ_WFIY01000004.1_cds_WP_155863092.1_1005 target sequence
ENGNIVQKYDEIGISKIIRLAWEYEVSIVATDNIYELGENDKQVIKIISLFPDNVELVQVTYNDGRFMDIREVAKNMGIEIQGKP

SEQ ID NO: 25138 - protein, 85 aa, unidentified
  REGION 1..85: note = Description of Unknown:cds_NZ_WFIY01000004.1_cds_WP_155863092.1_1005 target sequence
NPSKTAYLAAYLALKGAGTKIKLTENKTKIIISRGRHLGPGGMSSNRYKRHIRGLILRVFKEVKETLDRNNIDYDVILRKSKSGL

SEQ ID NO: 25139 - protein, 85 aa, unidentified
  REGION 1..85: note = Description of Unknown:cds_NZ_WFIY01000004.1_cds_WP_155863092.1_1005 target sequence
ENATFIVYAPRERLYGLVKKMSGHDVNLEIRPVYKTKIDFETNKKIEKKPIIVGIDPGIFVGISAIDIHGNPVILESKKGIDREE

SEQ ID NO: 25140 - protein, 85 aa, unidentified
  REGION 1..85: note = Description of Unknown:cds_NZ_WFIY01000004.1_cds_WP_155863092.1_1005 target sequence
IINILSEKGSAIIIATDVNPVPDAVKKIAGILKAKLYVPDKSLSVDEKQKLLQEYSEKYNLNITDPHIRDSLAAALKAYKELENK

SEQ ID NO: 25141 - protein, 85 aa, unidentified
  REGION 1..85: note = Description of Unknown:cds_NZ_WFIY01000004.1_cds_WP_155863092.1_1005 target sequence
LSQAFSTIRKLDLDIDEYAVYRCIIEGKTAAECIEKQIENEIAEDENREIIKVEKTETKEKQPENKTFTENSELKHEIFRLRRTI

SEQ ID NO: 25142 - protein, 85 aa, unidentified
  REGION 1..85: note = Description of Unknown:cds_NZ_WFIY01000004.1_cds_WP_155863092.1_1005 target sequence
TRLLNEKYELEKKLYEIKTQFNAEVERDRRLYRLKTELEERNKSILKLQEIIKDYSDKINKLEGIINDLVEGRVNIIKSNSLIEI

SEQ ID NO: 25143 - protein, 85 aa, unidentified
  REGION 1..85: note = Description of Unknown:cds_NZ_WFIY01000004.1_cds_222 target sequence
LSNVLNVDKEKVLNSIEYPAKEQIADLALPLPSVTKKFDIEIRREYKGRLIKEVWKDGLFINARLNEKELLKEIFTNFSENYGII

SEQ ID NO: 25144 - protein, 85 aa, unidentified
  REGION 1..85: note = Description of Unknown:cds_NZ_WFIY01000004.1_cds_222 target sequence
KTERPLRIVVEHTSANPIHPLHIGHLRNAILGDTLARMLKARGHEVNVRFYVNDSGRQVALLIYGLSKLGYPDPPSGEKKDQWLG

SEQ ID NO: 25145 - protein, 85 aa, unidentified
  REGION 1..85: note = Description of Unknown:cds_NZ_WFIY01000004.1_cds_222 target sequence
LIYAMTNVILEIKKINEELKSTTNDSEYKEKIARRDELLISASELSKRNQEYFNKLSDQIMKDKDPEGEISKIIEKYEKGEEEIK

SEQ ID NO: 25146 - protein, 85 aa, unidentified
  REGION 1..85: note = Description of Unknown:cds_NZ_WFIY01000004.1_cds_222 target sequence
KIVRKYVDFALEGFKESLEKLHITFDNFDYESDLLWNNDVKLVLDFALTSVAKINYKGTVALDLQNYIDDDIRKEIRIPKGLEIP

SEQ ID NO: 25147 - protein, 85 aa, unidentified
  REGION 1..85: note = Description of Unknown:cds_NZ_WFIY01000004.1_cds_222 target sequence
PLVLMRSDGTTLYTVRDIAYTIYKFRQFNADEVINVIAEQQSVPQMQLRAALYILGWKKFAINLIHFSYGMVTLQGMKMSGRLGK

SEQ ID NO: 25148 - protein, 85 aa, unidentified
  REGION 1..85: note = Description of Unknown:cds_NZ_WFIY01000004.1_cds_222 target sequence
YISLDEVYDKVAEVVKAKIEEKKGILDNLNEIVNSAIRYAIISVSANKPVSFDVKRVANFEENSGPYLQYTYARAYNILSKSTEN

SEQ ID NO: 25149 - protein, 85 aa, unidentified
  REGION 1..85: note = Description of Unknown:cds_NZ_WFIY01000004.1_cds_222 target sequence
LDISKIDENELKNEKRTLLLMIAKFPDIFINSVDHLQPEVLTVFLRRLADVFNSWYDKERVLQEPDESKRITRLFIVKGVETVLR

SEQ ID NO: 25150 - protein, 84 aa, unidentified
  REGION 1..84: note = Description of Unknown:cds_NZ_WFIY01000004.1_cds_222 target sequence
RTLLLMIAKFPDIFINSVDHLQPEVLTVFLRRLADVFNSWYDKERVLQEPDESKRITRLFIVKGVETVLRNGLNTLGIASLTRM

SEQ ID NO: 25151 - protein, 85 aa, unidentified
  REGION 1..85: note = Description of Unknown:cds_NZ_WFIY01000004.1_cds_222 target sequence
ALPLPSVTKKFDIEIRREYKGRLIKEVWKDGLFINARLNEKELLKEIFTNFSENYGIIKTERPLRIVVEHTSANPIHPLHIGHLR

SEQ ID NO: 25152 - protein, 85 aa, unidentified
  REGION 1..85: note = Description of Unknown:cds_NZ_WFIY01000004.1_cds_222 target sequence
NAILGDTLARMLKARGHEVNVRFYVNDSGRQVALLIYGLSKLGYPDPPSGEKKDQWLGLIYAMTNVILEIKKINEELKSTTNDSE

SEQ ID NO: 25153 - protein, 85 aa, unidentified
  REGION 1..85: note = Description of Unknown:cds_NZ_WFIY01000004.1_cds_222 target sequence
YKEKIARRDELLISASELSKRNQEYFNKLSDQIMKDKDPEGEISKIIEKYEKGEEEIKKIVRKYVDFALEGFKESLEKLHITFDN

SEQ ID NO: 25154 - protein, 85 aa, unidentified
  REGION 1..85: note = Description of Unknown:cds_NZ_WFIY01000004.1_cds_222 target sequence
FDYESDLLWNNDVKLVLDFALTSVAKINYKGTVALDLQNYIDDDIRKEIRIPKGLEIPPLVLMRSDGTTLYTVRDIAYTIYKFRQ

SEQ ID NO: 25155 - protein, 85 aa, unidentified
  REGION 1..85: note = Description of Unknown:cds_NZ_WFIY01000004.1_cds_222 target sequence
FNADEVINVIAEQQSVPQMQLRAALYILGWKKFAINLIHFSYGMVTLQGMKMSGRLGKYISLDEVYDKVAEVVKAKIEEKKGILD

SEQ ID NO: 25156 - protein, 85 aa, unidentified
  REGION 1..85: note = Description of Unknown:cds_NZ_WFIY01000004.1_cds_222 target sequence
NLNEIVNSAIRYAIISVSANKPVSFDVKRVANFEENSGPYLQYTYARAYNILSKSTENLDISKIDENELKNEKRTLLLMIAKFPD

SEQ ID NO: 25157 - protein, 85 aa, unidentified
  REGION 1..85: note = Description of Unknown:cds_NZ_WFIY01000004.1_cds_WP_155863242.1_1190 target sequence
KITWMIGGAQGTGVDTSANIFGNAIARAGYYIYGNREYYSNIKGRHSYFNLTISDEKARSISHKVDILASFDAETVFQHYQDVQK

SEQ ID NO: 25158 - protein, 85 aa, unidentified
  REGION 1..85: note = Description of Unknown:cds_NZ_WFIY01000004.1_cds_WP_155863242.1_1190 target sequence
VIIYNKGVLNVEKDRIQSIEPETAERIPFKTVKEVIDYLQSKGVTTIGIDYDEILKKVAEEMKLPLSVVDRARNTVAISASYDLL

SEQ ID NO: 25159 - protein, 85 aa, unidentified
  REGION 1..85: note = Description of Unknown:cds_NZ_WFIY01000004.1_cds_WP_155863242.1_1190 target sequence
GLRKDYLYEALKRTFKQETFVKLNLSAADKVKLSPIFDLKELPQKKRRVQIDGNTAVAIGKIYAGIGFQSYYPITPASDESTFIE

SEQ ID NO: 25160 - protein, 85 aa, unidentified
  REGION 1..85: note = Description of Unknown:cds_NZ_WFIY01000004.1_cds_WP_155863242.1_1190 target sequence
AHQEVLYVDPVTGDKRKRTIVVVQAEDELAAVNMASGAALTGVRAATATSGPGFSLMTEGIGWAGMNEVPIVITYYMRGGPSTGQ

SEQ ID NO: 25161 - protein, 85 aa, unidentified
  REGION 1..85: note = Description of Unknown:cds_NZ_WFIY01000004.1_cds_WP_155863242.1_1190 target sequence
PTRTSQADLLFAMHVSHGEFPRIVIASGDHVEALKDAIWAFNLAEKYQTPVIHLVEKALANAYSIVDMDELGGDIEIERSVIGDD

SEQ ID NO: 25162 - protein, 85 aa, unidentified
  REGION 1..85: note = Description of Unknown:cds_NZ_WFIY01000004.1_cds_WP_155863242.1_1190 target sequence
NERFKFTDSGISPRLLLGESTVYYTGDEHNTFGHISEDPVNRVKMYEKRMRKLETADKEIPEEKRYNVYGDLDSKYAIVTWGSPK

SEQ ID NO: 25163 - protein, 85 aa, unidentified
  REGION 1..85: note = Description of Unknown:cds_NZ_WFIY01000004.1_cds_WP_155863242.1_1190 target sequence
GAVLDAVEELDQKFAVIQLRMFNPFPKSVKKLLEDKDLIIDVEGNYEAQAGTLLKLHGVEVTNYILKWNGRPMGRDEVKDGILSA

SEQ ID NO: 25164 - protein, 84 aa, unidentified
  REGION 1..84: note = Description of Unknown:cds_NZ_WFIY01000004.1_cds_WP_155863242.1_1190 target sequence
AVIQLRMFNPFPKSVKKLLEDKDLIIDVEGNYEAQAGTLLKLHGVEVTNYILKWNGRPMGRDEVKDGILSAIKGEKRVVLNAGS

SEQ ID NO: 25165 - protein, 85 aa, unidentified
  REGION 1..85: note = Description of Unknown:cds_NZ_WFIY01000004.1_cds_WP_155863242.1_1190 target sequence
AGYYIYGNREYYSNIKGRHSYFNLTISDEKARSISHKVDILASFDAETVFQHYQDVQKVIIYNKGVLNVEKDRIQSIEPETAERI

SEQ ID NO: 25166 - protein, 85 aa, unidentified
  REGION 1..85: note = Description of Unknown:cds_NZ_WFIY01000004.1_cds_WP_155863242.1_1190 target sequence
PFKTVKEVIDYLQSKGVTTIGIDYDEILKKVAEEMKLPLSVVDRARNTVAISASYDLLGLRKDYLYEALKRTFKQETFVKLNLSA

SEQ ID NO: 25167 - protein, 85 aa, unidentified
  REGION 1..85: note = Description of Unknown:cds_NZ_WFIY01000004.1_cds_WP_155863242.1_1190 target sequence
ADKVKLSPIFDLKELPQKKRRVQIDGNTAVAIGKIYAGIGFQSYYPITPASDESTFIEAHQEVLYVDPVTGDKRKRTIVVVQAED

SEQ ID NO: 25168 - protein, 85 aa, unidentified
  REGION 1..85: note = Description of Unknown:cds_NZ_WFIY01000004.1_cds_WP_155863242.1_1190 target sequence
ELAAVNMASGAALTGVRAATATSGPGFSLMTEGIGWAGMNEVPIVITYYMRGGPSTGQPTRTSQADLLFAMHVSHGEFPRIVIAS

SEQ ID NO: 25169 - protein, 85 aa, unidentified
  REGION 1..85: note = Description of Unknown:cds_NZ_WFIY01000004.1_cds_WP_155863242.1_1190 target sequence
GDHVEALKDAIWAFNLAEKYQTPVIHLVEKALANAYSIVDMDELGGDIEIERSVIGDDNERFKFTDSGISPRLLLGESTVYYTGD

SEQ ID NO: 25170 - protein, 85 aa, unidentified
  REGION 1..85: note = Description of Unknown:cds_NZ_WFIY01000004.1_cds_WP_155863242.1_1190 target sequence
EHNTFGHISEDPVNRVKMYEKRMRKLETADKEIPEEKRYNVYGDLDSKYAIVTWGSPKGAVLDAVEELDQKFAVIQLRMFNPFPK

SEQ ID NO: 25171 - protein, 85 aa, unidentified
  REGION 1..85: note = Description of Unknown:cds_NC_035460.1_cds_YP_009407962.1_11 target sequence
EQSMTFDNVITNRNIVMSKIDEYAHIYPLHACIFYKESMRVAKHIITKQNRGINTATNFNNITALHYAVYCNNFEMVKFLIEECG

SEQ ID NO: 25172 - protein, 85 aa, unidentified
  REGION 1..85: note = Description of Unknown:cds_NC_035460.1_cds_YP_009407962.1_11 target sequence
ENINNVDSENYNAIAYAFFGKGYENVELLEYLIKKGINMDSCNLLLHMVVNTKNDTSFLVEFLVKHGACVNCKNLYGVSPIMLAT

SEQ ID NO: 25173 - protein, 85 aa, unidentified
  REGION 1..85: note = Description of Unknown:cds_NC_035460.1_cds_YP_009407962.1_11 target sequence
YNGNITLVKLLIKLGANINDVDVNGNTLFHMLRLHPTTINLVKLFLEKGLDINAQNKNEDTPLHVLCSKTLLNTHVKFYIDNGAN

SEQ ID NO: 25174 - protein, 85 aa, unidentified
  REGION 1..85: note = Description of Unknown:cds_NC_035460.1_cds_YP_009407962.1_11 target sequence
VNAQNKNGDTPLHVYFKSNTNKNIFKNIIKVFTDSNIDLSIVNTNNQSALTQYIIDARMASLNIIEMLCKKEFDVNYKYGLGKIP

SEQ ID NO: 25175 - protein, 85 aa, unidentified
  REGION 1..85: note = Description of Unknown:cds_NC_035460.1_cds_YP_009407962.1_11 target sequence
MLSILIHKCLYDSVKFWLSKYPDTINVQDGDGNYPIHYAALHFKSNILKLFIDLKNDINVTNNIGETPLHLAVYYNNIKNVQLLL

SEQ ID NO: 25176 - protein, 85 aa, unidentified
  REGION 1..85: note = Description of Unknown:cds_NC_035460.1_cds_YP_009407962.1_11 target sequence
NHGARCTTTNDGHSVLMYAAKSVCGTPLQNFKNLFNEDMSAVTESGYSTFAYVALNDLEHVEYIISLNPTLETMLISTETVYKNI

SEQ ID NO: 25177 - protein, 85 aa, unidentified
  REGION 1..85: note = Description of Unknown:cds_NC_035460.1_cds_YP_009407962.1_11 target sequence
KMCTRMKSVLRYVLLYYPEFYTLFTPYKTDIECTKYIDKCNKELNNMKQIQVTNDYTLYDIVRNKYTNTCDKIVTTFDSFDEYNF

SEQ ID NO: 25178 - protein, 84 aa, unidentified
  REGION 1..84: note = Description of Unknown:cds_NC_035460.1_cds_YP_009407962.1_11 target sequence
LYYPEFYTLFTPYKTDIECTKYIDKCNKELNNMKQIQVTNDYTLYDIVRNKYTNTCDKIVTTFDSFDEYNFIIKRAIARYRYNK

SEQ ID NO: 25179 - protein, 85 aa, unidentified
  REGION 1..85: note = Description of Unknown:cds_NC_035460.1_cds_YP_009407962.1_11 target sequence
PLHACIFYKESMRVAKHIITKQNRGINTATNFNNITALHYAVYCNNFEMVKFLIEECGENINNVDSENYNAIAYAFFGKGYENVE

SEQ ID NO: 25180 - protein, 85 aa, unidentified
  REGION 1..85: note = Description of Unknown:cds_NC_035460.1_cds_YP_009407962.1_11 target sequence
LLEYLIKKGINMDSCNLLLHMVVNTKNDTSFLVEFLVKHGACVNCKNLYGVSPIMLATYNGNITLVKLLIKLGANINDVDVNGNT

SEQ ID NO: 25181 - protein, 85 aa, unidentified
  REGION 1..85: note = Description of Unknown:cds_NC_035460.1_cds_YP_009407962.1_11 target sequence
LFHMLRLHPTTINLVKLFLEKGLDINAQNKNEDTPLHVLCSKTLLNTHVKFYIDNGANVNAQNKNGDTPLHVYFKSNTNKNIFKN

SEQ ID NO: 25182 - protein, 85 aa, unidentified
  REGION 1..85: note = Description of Unknown:cds_NC_035460.1_cds_YP_009407962.1_11 target sequence
IIKVFTDSNIDLSIVNTNNQSALTQYIIDARMASLNIIEMLCKKEFDVNYKYGLGKIPMLSILIHKCLYDSVKFWLSKYPDTINV

SEQ ID NO: 25183 - protein, 85 aa, unidentified
  REGION 1..85: note = Description of Unknown:cds_NC_035460.1_cds_YP_009407962.1_11 target sequence
QDGDGNYPIHYAALHFKSNILKLFIDLKNDINVTNNIGETPLHLAVYYNNIKNVQLLLNHGARCTTTNDGHSVLMYAAKSVCGTP

SEQ ID NO: 25184 - protein, 85 aa, unidentified
  REGION 1..85: note = Description of Unknown:cds_NC_035460.1_cds_YP_009407962.1_11 target sequence
LQNFKNLFNEDMSAVTESGYSTFAYVALNDLEHVEYIISLNPTLETMLISTETVYKNIKMCTRMKSVLRYVLLYYPEFYTLFTPY

SEQ ID NO: 25185 - protein, 85 aa, unidentified
  REGION 1..85: note = Description of Unknown:hvTR_P03209 target sequence
RPKKDGLEDFLRLTPEIKKQLGSLVSDYCNVLNKEFTAGSVEITLRSYKICKAFINEAKAHGREWGGLMATLNICNFWAILRNNR

SEQ ID NO: 25186 - protein, 85 aa, unidentified
  REGION 1..85: note = Description of Unknown:hvTR_P03209 target sequence
VRRRAENAGNDACSIACPIVMRYVLDHLIVVTDRFFIQAPSNRVMIPATIGTAMYKLLKHSRVRAYTYSKVLGVDRAAIMASGKQ

SEQ ID NO: 25187 - protein, 85 aa, unidentified
  REGION 1..85: note = Description of Unknown:hvTR_P03209 target sequence
VVEHLNRMEKEGLLSSKFKAFCKWVFTYPVLEEMFQTMVSSKTGHLTDDVKDVRALIKTLPRASYSSHAGQRSYVSGVLPACLLS

SEQ ID NO: 25188 - protein, 85 aa, unidentified
  REGION 1..85: note = Description of Unknown:hvTR_P03209 target sequence
TKSKAVETPILVSGADRMDEELMGNDGGASHTEARYSESGQFHAFTDELESLPSPTMPLKPGAQSADCGDSSSSSSDSGNSDTEQ

SEQ ID NO: 25189 - protein, 85 aa, unidentified
  REGION 1..85: note = Description of Unknown:hvTR_P03209 target sequence
SEREEARAEAPRLRAPKSRRTSRPNRGQTPCPSNAAEPEQPWIAAVHQESDERPIFPHPSKPTFLPPVKRKKGLRDSREGMFLPK

SEQ ID NO: 25190 - protein, 85 aa, unidentified
  REGION 1..85: note = Description of Unknown:hvTR_P03209 target sequence
PEAGSAISDVFEGREVCQPKRIRPFHPPGSPWANRPLPASLAPTPTGPVHEPVGSLTPAPVPQPLDPAPAVTPEASHLLEDPDEE

SEQ ID NO: 25191 - protein, 85 aa, unidentified
  REGION 1..85: note = Description of Unknown:hvTR_P03209 target sequence
TSQAVKALREMADTVIPQKEEAAICGQMDLSHPPPRGHLDELTTTLESMTEDLNLDSPLTPELNEILDTFLNDECLLHAMHISTG

SEQ ID NO: 25192 - protein, 84 aa, unidentified
  REGION 1..84: note = Description of Unknown:hvTR_P03209 target sequence
MADTVIPQKEEAAICGQMDLSHPPPRGHLDELTTTLESMTEDLNLDSPLTPELNEILDTFLNDECLLHAMHISTGLSIFDTSLF

SEQ ID NO: 25193 - protein, 85 aa, unidentified
  REGION 1..85: note = Description of Unknown:hvTR_P03209 target sequence
YCNVLNKEFTAGSVEITLRSYKICKAFINEAKAHGREWGGLMATLNICNFWAILRNNRVRRRAENAGNDACSIACPIVMRYVLDH

SEQ ID NO: 25194 - protein, 85 aa, unidentified
  REGION 1..85: note = Description of Unknown:hvTR_P03209 target sequence
LIVVTDRFFIQAPSNRVMIPATIGTAMYKLLKHSRVRAYTYSKVLGVDRAAIMASGKQVVEHLNRMEKEGLLSSKFKAFCKWVFT

SEQ ID NO: 25195 - protein, 85 aa, unidentified
  REGION 1..85: note = Description of Unknown:hvTR_P03209 target sequence
YPVLEEMFQTMVSSKTGHLTDDVKDVRALIKTLPRASYSSHAGQRSYVSGVLPACLLSTKSKAVETPILVSGADRMDEELMGNDG

SEQ ID NO: 25196 - protein, 85 aa, unidentified
  REGION 1..85: note = Description of Unknown:hvTR_P03209 target sequence
GASHTEARYSESGQFHAFTDELESLPSPTMPLKPGAQSADCGDSSSSSSDSGNSDTEQSEREEARAEAPRLRAPKSRRTSRPNRG

SEQ ID NO: 25197 - protein, 85 aa, unidentified
  REGION 1..85: note = Description of Unknown:hvTR_P03209 target sequence
QTPCPSNAAEPEQPWIAAVHQESDERPIFPHPSKPTFLPPVKRKKGLRDSREGMFLPKPEAGSAISDVFEGREVCQPKRIRPFHP

SEQ ID NO: 25198 - protein, 85 aa, unidentified
  REGION 1..85: note = Description of Unknown:hvTR_P03209 target sequence
PGSPWANRPLPASLAPTPTGPVHEPVGSLTPAPVPQPLDPAPAVTPEASHLLEDPDEETSQAVKALREMADTVIPQKEEAAICGQ

SEQ ID NO: 25199 - protein, 85 aa, unidentified
  REGION 1..85: note = Description of Unknown:cds_NZ_WFIY01000004.1_cds_70 target sequence
VDYGALGISLLLSLVLAFILTKLKLSPIIAYLIGGIIASTYLGVNFNSPDFSLITSLALNLLAFEIGTGFDLTKARELFTRAIFV

SEQ ID NO: 25200 - protein, 85 aa, unidentified
  REGION 1..85: note = Description of Unknown:cds_NZ_WFIY01000004.1_cds_70 target sequence
ALAELTLILTISYYTGIYILHLGSVGSIFLVLASIDSSTSIIYKLTEGKTIRDKDLLIAVASIEDIEVFLIYSVIVALGGNFSFI

SEQ ID NO: 25201 - protein, 85 aa, unidentified
  REGION 1..85: note = Description of Unknown:cds_NZ_WFIY01000004.1_cds_70 target sequence
KITTVIIEVVLASMILYVVARFLFQRVLFSPSKVEDESIIILLPIALVFIFSYISSITGVPTTLTMILAGIAFSSVSGSEKVIKT

SEQ ID NO: 25202 - protein, 85 aa, unidentified
  REGION 1..85: note = Description of Unknown:cds_NZ_WFIY01000004.1_cds_70 target sequence
IAPVREFALIFFFLAVGGLLKINEDLIGFLAISLLIISIKYFSFSTAYWLTGTNFVQSYTNGIYMIPLSEFGIIVTLDALEEGVN

SEQ ID NO: 25203 - protein, 85 aa, unidentified
  REGION 1..85: note = Description of Unknown:cds_NZ_WFIY01000004.1_cds_70 target sequence
VYTIYLISITVVIASSIIAAVLAQRVQKISTFISEIYSRLRILPQLDSAIIWLNRTVIGQITPFSKSEISRVSLRLIVIMLLPFV

SEQ ID NO: 25204 - protein, 85 aa, unidentified
  REGION 1..85: note = Description of Unknown:cds_NZ_WFIY01000004.1_cds_70 target sequence
IFPLFHRFSSFIPSNLGFLFYMIFIVESVIASLFLYNFSLSSMRIYYIIVGEILIRIQKVKSRSFKEFWRGILDFAGIGSVFFLI

SEQ ID NO: 25205 - protein, 85 aa, unidentified
  REGION 1..85: note = Description of Unknown:cds_NZ_WFIY01000004.1_cds_70 target sequence
LSSLFYLFLEMSPLLAYDPPIISLPIQLVSLVIIIIYISRRDFKKISKFSIYSRRKPSYKKVIKMTSIAIQKYKKESDNNKEKEK

SEQ ID NO: 25206 - protein, 84 aa, unidentified
  REGION 1..84: note = Description of Unknown:cds_NZ_WFIY01000004.1_cds_70 target sequence
SPLLAYDPPIISLPIQLVSLVIIIIYISRRDFKKISKFSIYSRRKPSYKKVIKMTSIAIQKYKKESDNNKEKEKILGIINIRVK

SEQ ID NO: 25207 - protein, 85 aa, unidentified
  REGION 1..85: note = Description of Unknown:cds_NZ_WFIY01000004.1_cds_70 target sequence
IIAYLIGGIIASTYLGVNFNSPDFSLITSLALNLLAFEIGTGFDLTKARELFTRAIFVALAELTLILTISYYTGIYILHLGSVGS

SEQ ID NO: 25208 - protein, 85 aa, unidentified
  REGION 1..85: note = Description of Unknown:cds_NZ_WFIY01000004.1_cds_70 target sequence
IFLVLASIDSSTSIIYKLTEGKTIRDKDLLIAVASIEDIEVFLIYSVIVALGGNFSFIKITTVIIEVVLASMILYVVARFLFQRV

SEQ ID NO: 25209 - protein, 85 aa, unidentified
  REGION 1..85: note = Description of Unknown:cds_NZ_WFIY01000004.1_cds_70 target sequence
LFSPSKVEDESIIILLPIALVFIFSYISSITGVPTTLTMILAGIAFSSVSGSEKVIKTIAPVREFALIFFFLAVGGLLKINEDLI

SEQ ID NO: 25210 - protein, 85 aa, unidentified
  REGION 1..85: note = Description of Unknown:cds_NZ_WFIY01000004.1_cds_70 target sequence
GFLAISLLIISIKYFSFSTAYWLTGTNFVQSYTNGIYMIPLSEFGIIVTLDALEEGVNVYTIYLISITVVIASSIIAAVLAQRVQ

SEQ ID NO: 25211 - protein, 85 aa, unidentified
  REGION 1..85: note = Description of Unknown:cds_NZ_WFIY01000004.1_cds_70 target sequence
KISTFISEIYSRLRILPQLDSAIIWLNRTVIGQITPFSKSEISRVSLRLIVIMLLPFVIFPLFHRFSSFIPSNLGFLFYMIFIVE

SEQ ID NO: 25212 - protein, 85 aa, unidentified
  REGION 1..85: note = Description of Unknown:cds_NZ_WFIY01000004.1_cds_70 target sequence
SVIASLFLYNFSLSSMRIYYIIVGEILIRIQKVKSRSFKEFWRGILDFAGIGSVFFLILSSLFYLFLEMSPLLAYDPPIISLPIQ

SEQ ID NO: 25213 - protein, 85 aa, unidentified
  REGION 1..85: note = Description of Unknown:cds_NZ_WFIY01000004.1_cds_WP_155863897.1_1803 target sequence
NLSYTYDIIILFILLSIIGIILMGIFKRFTTNFMTSEKATQLQLKGKKKGEDEERKISWDDIGGYEDVKKEIIEYVEFPLKNKEL

SEQ ID NO: 25214 - protein, 85 aa, unidentified
  REGION 1..85: note = Description of Unknown:cds_NZ_WFIY01000004.1_cds_WP_155863897.1_1803 target sequence
ALKYGLRPPKGILLFGPPGCGKTLMMRALASDAKLNFIYVNVSDIMSKWYGESEARLRELFANARKNAPCLLFFDEIDTIGTKRE

SEQ ID NO: 25215 - protein, 85 aa, unidentified
  REGION 1..85: note = Description of Unknown:cds_NZ_WFIY01000004.1_cds_WP_155863897.1_1803 target sequence
SHTGDSVTPRLLSLMLSEIDGLNSEDGVIIVGSTNVPQLLDKALLRAGRFDKLIYVGPPNKEARKEILKIHCKNKPLAEDVDLDK

SEQ ID NO: 25216 - protein, 85 aa, unidentified
  REGION 1..85: note = Description of Unknown:cds_NZ_WFIY01000004.1_cds_WP_155863897.1_1803 target sequence
IADMTERYSGADLANICQEAARKAAIEAMQTGKDVKITMKDFMEIIQRYKPSITLQMIEDFEKFRLDFERRSRKGEDLESEIEDK

SEQ ID NO: 25217 - protein, 85 aa, unidentified
  REGION 1..85: note = Description of Unknown:cds_NZ_WFIY01000004.1_cds_WP_155863897.1_1803 target sequence
ITLDDIGGYTKVKTELKELLELQLKYSKLMEQMRVPPIRGILLYGPPGVGKTMMAKALAKTLDVKLISVSVAEIMYKGYEGAVSI

SEQ ID NO: 25218 - protein, 85 aa, unidentified
  REGION 1..85: note = Description of Unknown:cds_NZ_WFIY01000004.1_cds_WP_155863897.1_1803 target sequence
LKEVFNRARENKPSIILLDELDAIASKRSQKDGNDSSKIVNQLLTEMDGIRNLKEVVVIGTTNRVKTIDPALLRPGRFDIIVHMD

SEQ ID NO: 25219 - protein, 85 aa, unidentified
  REGION 1..85: note = Description of Unknown:cds_NZ_WFIY01000004.1_cds_WP_155863897.1_1803 target sequence
LPNEEERLDILQKYLGKDVCDRVDCREIAKRTEGYTGADLAAVAREAKIRVLKDIIRGNKDRVITKEDIEIALNKIKPSIKNRKK

SEQ ID NO: 25220 - protein, 84 aa, unidentified
  REGION 1..84: note = Description of Unknown:cds_NZ_WFIY01000004.1_cds_WP_155863897.1_1803 target sequence
LQKYLGKDVCDRVDCREIAKRTEGYTGADLAAVAREAKIRVLKDIIRGNKDRVITKEDIEIALNKIKPSIKNRKKKSSGTQNQK

SEQ ID NO: 25221 - protein, 85 aa, unidentified
  REGION 1..85: note = Description of Unknown:cds_NZ_WFIY01000004.1_cds_WP_155863897.1_1803 target sequence
RFTTNFMTSEKATQLQLKGKKKGEDEERKISWDDIGGYEDVKKEIIEYVEFPLKNKELALKYGLRPPKGILLFGPPGCGKTLMMR

SEQ ID NO: 25222 - protein, 85 aa, unidentified
  REGION 1..85: note = Description of Unknown:cds_NZ_WFIY01000004.1_cds_WP_155863897.1_1803 target sequence
ALASDAKLNFIYVNVSDIMSKWYGESEARLRELFANARKNAPCLLFFDEIDTIGTKRESHTGDSVTPRLLSLMLSEIDGLNSEDG

SEQ ID NO: 25223 - protein, 85 aa, unidentified
  REGION 1..85: note = Description of Unknown:cds_NZ_WFIY01000004.1_cds_WP_155863897.1_1803 target sequence
VIIVGSTNVPQLLDKALLRAGRFDKLIYVGPPNKEARKEILKIHCKNKPLAEDVDLDKIADMTERYSGADLANICQEAARKAAIE

SEQ ID NO: 25224 - protein, 85 aa, unidentified
  REGION 1..85: note = Description of Unknown:cds_NZ_WFIY01000004.1_cds_WP_155863897.1_1803 target sequence
AMQTGKDVKITMKDFMEIIQRYKPSITLQMIEDFEKFRLDFERRSRKGEDLESEIEDKITLDDIGGYTKVKTELKELLELQLKYS

SEQ ID NO: 25225 - protein, 85 aa, unidentified
  REGION 1..85: note = Description of Unknown:cds_NZ_WFIY01000004.1_cds_WP_155863897.1_1803 target sequence
KLMEQMRVPPIRGILLYGPPGVGKTMMAKALAKTLDVKLISVSVAEIMYKGYEGAVSILKEVFNRARENKPSIILLDELDAIASK

SEQ ID NO: 25226 - protein, 85 aa, unidentified
  REGION 1..85: note = Description of Unknown:cds_NZ_WFIY01000004.1_cds_WP_155863897.1_1803 target sequence
RSQKDGNDSSKIVNQLLTEMDGIRNLKEVVVIGTTNRVKTIDPALLRPGRFDIIVHMDLPNEEERLDILQKYLGKDVCDRVDCRE

SEQ ID NO: 25227 - protein, 85 aa, unidentified
  REGION 1..85: note = Description of Unknown:cds_NC_035460.1_cds_YP_009408130.1_179 target sequence
EMLKDIDAHTYKRVSAISKLSKQSYEYPLHACIFNKEGIDKAKSIIKQGNVINSCTKLYNMTALHYAVYCNDFEMVKFLIEECGE

SEQ ID NO: 25228 - protein, 85 aa, unidentified
  REGION 1..85: note = Description of Unknown:cds_NC_035460.1_cds_YP_009408130.1_179 target sequence
NINNVDSDNYNALMYTIFGNCYDNVKMLEYLIQKGINITNINNNGDSLLHIIANTKHNTSKLIKLLVNNGLSVNHKNIYEITPIM

SEQ ID NO: 25229 - protein, 85 aa, unidentified
  REGION 1..85: note = Description of Unknown:cds_NC_035460.1_cds_YP_009408130.1_179 target sequence
IVTYNGNINLIKLFVELGANIHDITVHGSLFHLIPICSTTVEIAQLFIINGININSLNYENDTPLHILCSKSPKKDHVKFYIDNG

SEQ ID NO: 25230 - protein, 85 aa, unidentified
  REGION 1..85: note = Description of Unknown:cds_NC_035460.1_cds_YP_009408130.1_179 target sequence
ANVNAQNKNGDTPLHVYFILSYIINKDIVNIFTNNNIDLTIINNNNHNVLSQYIYRNDNVYKAIIRLLCTQNFDITYKYGNDKLP

SEQ ID NO: 25231 - protein, 85 aa, unidentified
  REGION 1..85: note = Description of Unknown:cds_NC_035460.1_cds_YP_009408130.1_179 target sequence
ILIKLIKLCTYRSIDFWLSKYYETINIPDNDGNYPIHYAASNVDSTILELLLKYNINTNIKNNNGETPLHKAVCTNINNVNMLIN

SEQ ID NO: 25232 - protein, 85 aa, unidentified
  REGION 1..85: note = Description of Unknown:cds_NC_035460.1_cds_YP_009408130.1_179 target sequence
YGTKFTTTNDGHTVLMYAAKYKYIHILEKLINLNNENISSVTKTGNSVFSYIALHKNQKEMLYILKLHPTLESIIISVKKVYDSI

SEQ ID NO: 25233 - protein, 85 aa, unidentified
  REGION 1..85: note = Description of Unknown:cds_NC_035460.1_cds_YP_009408130.1_179 target sequence
NMCSRMQTVLSTVLLYYTDFHNYFVPYHTDYKCKEYIDQCIKEINLMKQTKINNITLYNIVINEYKNIYNQYINTISFNIYQHII

SEQ ID NO: 25234 - protein, 84 aa, unidentified
  REGION 1..84: note = Description of Unknown:cds_NC_035460.1_cds_YP_009408130.1_179 target sequence
LSTVLLYYTDFHNYFVPYHTDYKCKEYIDQCIKEINLMKQTKINNITLYNIVINEYKNIYNQYINTISFNIYQHIITQAINKKF

SEQ ID NO: 25235 - protein, 85 aa, unidentified
  REGION 1..85: note = Description of Unknown:cds_NC_035460.1_cds_YP_009408130.1_179 target sequence
PLHACIFNKEGIDKAKSIIKQGNVINSCTKLYNMTALHYAVYCNDFEMVKFLIEECGENINNVDSDNYNALMYTIFGNCYDNVKM

SEQ ID NO: 25236 - protein, 85 aa, unidentified
  REGION 1..85: note = Description of Unknown:cds_NC_035460.1_cds_YP_009408130.1_179 target sequence
LEYLIQKGINITNINNNGDSLLHIIANTKHNTSKLIKLLVNNGLSVNHKNIYEITPIMIVTYNGNINLIKLFVELGANIHDITVH

SEQ ID NO: 25237 - protein, 85 aa, unidentified
  REGION 1..85: note = Description of Unknown:cds_NC_035460.1_cds_YP_009408130.1_179 target sequence
GSLFHLIPICSTTVEIAQLFIINGININSLNYENDTPLHILCSKSPKKDHVKFYIDNGANVNAQNKNGDTPLHVYFILSYIINKD

SEQ ID NO: 25238 - protein, 85 aa, unidentified
  REGION 1..85: note = Description of Unknown:cds_NC_035460.1_cds_YP_009408130.1_179 target sequence
IVNIFTNNNIDLTIINNNNHNVLSQYIYRNDNVYKAIIRLLCTQNFDITYKYGNDKLPILIKLIKLCTYRSIDFWLSKYYETINI

SEQ ID NO: 25239 - protein, 85 aa, unidentified
  REGION 1..85: note = Description of Unknown:cds_NC_035460.1_cds_YP_009408130.1_179 target sequence
PDNDGNYPIHYAASNVDSTILELLLKYNINTNIKNNNGETPLHKAVCTNINNVNMLINYGTKFTTTNDGHTVLMYAAKYKYIHIL

SEQ ID NO: 25240 - protein, 85 aa, unidentified
  REGION 1..85: note = Description of Unknown:cds_NC_035460.1_cds_YP_009408130.1_179 target sequence
EKLINLNNENISSVTKTGNSVFSYIALHKNQKEMLYILKLHPTLESIIISVKKVYDSINMCSRMQTVLSTVLLYYTDFHNYFVPY

SEQ ID NO: 25241 - protein, 85 aa, unidentified
  REGION 1..85: note = Description of Unknown:cds_NC_001906.3_cds_NP_047112.2_7 target sequence
MADSKLVSLNNNLSGKIKDQGKVIKNYYGTMDIKKINDGLLDSKILGAFNTVIALLGSIIIIVMNIMIIQNYTRTTDNQALIKES

SEQ ID NO: 25242 - protein, 85 aa, unidentified
  REGION 1..85: note = Description of Unknown:cds_NC_001906.3_cds_NP_047112.2_7 target sequence
LQSVQQQIKALTDKIGTEIGPKVSLIDTSSTITIPANIGLLGSKISQSTSSINENVNDKCKFTLPPLKIHECNISCPNPLPFREY

SEQ ID NO: 25243 - protein, 85 aa, unidentified
  REGION 1..85: note = Description of Unknown:cds_NC_001906.3_cds_NP_047112.2_7 target sequence
RPISQGVSDLVGLPNQICLQKTTSTILKPRLISYTLPINTREGVCITDPLLAVDNGFFAYSHLEKIGSCTRGIAKQRIIGVGEVL

SEQ ID NO: 25244 - protein, 85 aa, unidentified
  REGION 1..85: note = Description of Unknown:cds_NC_001906.3_cds_NP_047112.2_7 target sequence
DRGDKVPSMFMTNVWTPPNPSTIHHCSSTYHEDFYYTLCAVSHVGDPILNSTSWTESLSLIRLAVRPKSDSGDYNQKYIAITKVE

SEQ ID NO: 25245 - protein, 85 aa, unidentified
  REGION 1..85: note = Description of Unknown:cds_NC_001906.3_cds_NP_047112.2_7 target sequence
RGKYDKVMPYGPSGIKQGDTLYFPAVGFLPRTEFQYNDSNCPIIHCKYSKAENCRLSMGVNSKSHYILRSGLLKYNLSLGGDIIL

SEQ ID NO: 25246 - protein, 85 aa, unidentified
  REGION 1..85: note = Description of Unknown:cds_NC_001906.3_cds_NP_047112.2_7 target sequence
QFIEIADNRLTIGSPSKIYNSLGQPVFYQASYSWDTMIKLGDVDTVDPLRVQWRNNSVISRPGQSQCPRFNVCPEVCWEGTYNDA

SEQ ID NO: 25247 - protein, 85 aa, unidentified
  REGION 1..85: note = Description of Unknown:cds_NC_001906.3_cds_NP_047112.2_7 target sequence
FLIDRLNWVSAGVYLNSNQTAENPVFAVFKDNEILYQVPLAEDDTNAQKTITDCFLLENVIWCISLVEIYDTGDSVIRPKLFAVK

SEQ ID NO: 25248 - protein, 84 aa, unidentified
  REGION 1..84: note = Description of Unknown:cds_NC_001906.3_cds_NP_047112.2_7 target sequence
SAGVYLNSNQTAENPVFAVFKDNEILYQVPLAEDDTNAQKTITDCFLLENVIWCISLVEIYDTGDSVIRPKLFAVKIPAQCSES

SEQ ID NO: 25249 - protein, 85 aa, unidentified
  REGION 1..85: note = Description of Unknown:cds_NC_001906.3_cds_NP_047112.2_7 target sequence
YGTMDIKKINDGLLDSKILGAFNTVIALLGSIIIIVMNIMIIQNYTRTTDNQALIKESLQSVQQQIKALTDKIGTEIGPKVSLID

SEQ ID NO: 25250 - protein, 85 aa, unidentified
  REGION 1..85: note = Description of Unknown:cds_NC_001906.3_cds_NP_047112.2_7 target sequence
TSSTITIPANIGLLGSKISQSTSSINENVNDKCKFTLPPLKIHECNISCPNPLPFREYRPISQGVSDLVGLPNQICLQKTTSTIL

SEQ ID NO: 25251 - protein, 85 aa, unidentified
  REGION 1..85: note = Description of Unknown:cds_NC_001906.3_cds_NP_047112.2_7 target sequence
KPRLISYTLPINTREGVCITDPLLAVDNGFFAYSHLEKIGSCTRGIAKQRIIGVGEVLDRGDKVPSMFMTNVWTPPNPSTIHHCS

SEQ ID NO: 25252 - protein, 85 aa, unidentified
  REGION 1..85: note = Description of Unknown:cds_NC_001906.3_cds_NP_047112.2_7 target sequence
STYHEDFYYTLCAVSHVGDPILNSTSWTESLSLIRLAVRPKSDSGDYNQKYIAITKVERGKYDKVMPYGPSGIKQGDTLYFPAVG

SEQ ID NO: 25253 - protein, 85 aa, unidentified
  REGION 1..85: note = Description of Unknown:cds_NC_001906.3_cds_NP_047112.2_7 target sequence
FLPRTEFQYNDSNCPIIHCKYSKAENCRLSMGVNSKSHYILRSGLLKYNLSLGGDIILQFIEIADNRLTIGSPSKIYNSLGQPVF

SEQ ID NO: 25254 - protein, 85 aa, unidentified
  REGION 1..85: note = Description of Unknown:cds_NC_001906.3_cds_NP_047112.2_7 target sequence
YQASYSWDTMIKLGDVDTVDPLRVQWRNNSVISRPGQSQCPRFNVCPEVCWEGTYNDAFLIDRLNWVSAGVYLNSNQTAENPVFA

SEQ ID NO: 25255 - protein, 85 aa, unidentified
  REGION 1..85: note = Description of Unknown:hvTR_P06162.2 target sequence
ESDAKNYQIMDSWEEEPRDKSTNISSALNIIEFILSTDPQEDLSENDTINTRTQQLSATICQPEIKPTETSEKVSGSTDKNRQSG

SEQ ID NO: 25256 - protein, 85 aa, unidentified
  REGION 1..85: note = Description of Unknown:hvTR_P06162.2 target sequence
SSHECTTEAKDRNIDQETVQGGSGRRSSSDSRAETVVSGGISGSITDSKNGTQNTENIDLNEIRKMDKDSIERKMRQSADVPSEI

SEQ ID NO: 25257 - protein, 85 aa, unidentified
  REGION 1..85: note = Description of Unknown:hvTR_P06162.2 target sequence
SGSDVIFTTEQSRNSDHGRSLEPISTPDTRSMSVVTAATPDDEEEILMKNSRMKKSSSTHQEDDKRIKKGGGKGKDWFKKSRDTD

SEQ ID NO: 25258 - protein, 85 aa, unidentified
  REGION 1..85: note = Description of Unknown:hvTR_P06162.2 target sequence
NQTSTSDHKPTSKGQKKISKTTTTNTDTKGQTETQTESSETQSPSWNPIIDNNTDRTERTSTTPPTTTPRSTRTKESIRTNSESK

SEQ ID NO: 25259 - protein, 85 aa, unidentified
  REGION 1..85: note = Description of Unknown:hvTR_P06162.2 target sequence
PKTQKTIGKERKDTEESNRFTERAITLLQNLGVIQSTSKLDLYQDKRVVCVANVLNNVDTASKIDFLAGLVIGVSMDNDTKLIQI

SEQ ID NO: 25260 - protein, 85 aa, unidentified
  REGION 1..85: note = Description of Unknown:hvTR_P06162.2 target sequence
QNEMLNLKADLKRMDESHRRLIENQREQLSLITSLISNLKIMTERGGKKDQNESNERVSMIKTKLKEEKIKKTRFDPLMEAQGID

SEQ ID NO: 25261 - protein, 85 aa, unidentified
  REGION 1..85: note = Description of Unknown:hvTR_P06162.2 target sequence
KNIPDLYRHAGNTLENDVQVKSEILSSYNESNATRLIPRKVSSTMRSLVAVINNSNLPQSTKQSYINELKHCKSDEEVSELMDMF

SEQ ID NO: 25262 - protein, 84 aa, unidentified
  REGION 1..84: note = Description of Unknown:hvTR_P06162.2 target sequence
HAGNTLENDVQVKSEILSSYNESNATRLIPRKVSSTMRSLVAVINNSNLPQSTKQSYINELKHCKSDEEVSELMDMFNEDVNNC

SEQ ID NO: 25263 - protein, 85 aa, unidentified
  REGION 1..85: note = Description of Unknown:hvTR_P06162.2 target sequence
LNIIEFILSTDPQEDLSENDTINTRTQQLSATICQPEIKPTETSEKVSGSTDKNRQSGSSHECTTEAKDRNIDQETVQGGSGRRS

SEQ ID NO: 25264 - protein, 85 aa, unidentified
  REGION 1..85: note = Description of Unknown:hvTR_P06162.2 target sequence
SSDSRAETVVSGGISGSITDSKNGTQNTENIDLNEIRKMDKDSIERKMRQSADVPSEISGSDVIFTTEQSRNSDHGRSLEPISTP

SEQ ID NO: 25265 - protein, 85 aa, unidentified
  REGION 1..85: note = Description of Unknown:hvTR_P06162.2 target sequence
DTRSMSVVTAATPDDEEEILMKNSRMKKSSSTHQEDDKRIKKGGGKGKDWFKKSRDTDNQTSTSDHKPTSKGQKKISKTTTTNTD

SEQ ID NO: 25266 - protein, 85 aa, unidentified
  REGION 1..85: note = Description of Unknown:hvTR_P06162.2 target sequence
TKGQTETQTESSETQSPSWNPIIDNNTDRTERTSTTPPTTTPRSTRTKESIRTNSESKPKTQKTIGKERKDTEESNRFTERAITL

SEQ ID NO: 25267 - protein, 85 aa, unidentified
  REGION 1..85: note = Description of Unknown:hvTR_P06162.2 target sequence
LQNLGVIQSTSKLDLYQDKRVVCVANVLNNVDTASKIDFLAGLVIGVSMDNDTKLIQIQNEMLNLKADLKRMDESHRRLIENQRE

SEQ ID NO: 25268 - protein, 85 aa, unidentified
  REGION 1..85: note = Description of Unknown:hvTR_P06162.2 target sequence
QLSLITSLISNLKIMTERGGKKDQNESNERVSMIKTKLKEEKIKKTRFDPLMEAQGIDKNIPDLYRHAGNTLENDVQVKSEILSS

SEQ ID NO: 25269 - protein, 85 aa, unidentified
  REGION 1..85: note = Description of Unknown:cds_NZ_WFIY01000004.1_cds_WP_155863189.1_1121 target sequence
LTSDELINNIKDRVDKAKALAITLGSIIGKVSPNSPNKIDEENYTVNVIVDPYTYYKYSFLGRIGVFLGAIDIKTLYFILLRVIG

SEQ ID NO: 25270 - protein, 85 aa, unidentified
  REGION 1..85: note = Description of Unknown:cds_NZ_WFIY01000004.1_cds_WP_155863189.1_1121 target sequence
YERSDVKSFLFDNNFMSNVEEETPGTLINNVTLKCEMLTKIDILSSSEPSPADIVIEPQSPVILPNADLIERSLSLNRGLLKVGT

SEQ ID NO: 25271 - protein, 85 aa, unidentified
  REGION 1..85: note = Description of Unknown:cds_NZ_WFIY01000004.1_cds_WP_155863189.1_1121 target sequence
LDYLDLDVKVSLSLDDLNYHALIIGTTGAGKTSFIKDLISGLYMIGEEGTKVFILDATGDYYHIFLPPDFTDKGVKKGIAEFEKL

SEQ ID NO: 25272 - protein, 85 aa, unidentified
  REGION 1..85: note = Description of Unknown:cds_NZ_WFIY01000004.1_cds_WP_155863189.1_1121 target sequence
YGKLNKLETDVIFPITKTWVRKYAKSGKIESITSAYHELYVKPLLEYLDMKGLKVYSSVLGNQIILSNSQWNSKINLHPFFFRYR

SEQ ID NO: 25273 - protein, 85 aa, unidentified
  REGION 1..85: note = Description of Unknown:cds_NZ_WFIY01000004.1_cds_WP_155863189.1_1121 target sequence
DVRKILYKLNPYFSEQASHFLKIFSSSKEAKECKTLEKLIDLLNDSEFDKFKLHKSTRENILRGLYLLRETELFDLKAQRDLLVN

SEQ ID NO: 25274 - protein, 85 aa, unidentified
  REGION 1..85: note = Description of Unknown:cds_NZ_WFIY01000004.1_cds_WP_155863189.1_1121 target sequence
VVKNSGSLIIFDIYNGELDDLSQKILTYYFLDRLFAYRERQMREGNIKGRFLIIIDEAHRFFPSSKGGEEDTNYVKRVAGKIATM

SEQ ID NO: 25275 - protein, 85 aa, unidentified
  REGION 1..85: note = Description of Unknown:cds_NZ_WFIY01000004.1_cds_WP_155863189.1_1121 target sequence
MRLGRRRKIGFIFSTHNPSDLSDIIVQLANTKFIFRISKEIAEQLGLTPTEAKMLSWERNGVAYLISPWLRQGKVKIKVPVPPPI

SEQ ID NO: 25276 - protein, 84 aa, unidentified
  REGION 1..84: note = Description of Unknown:cds_NZ_WFIY01000004.1_cds_WP_155863189.1_1121 target sequence
GFIFSTHNPSDLSDIIVQLANTKFIFRISKEIAEQLGLTPTEAKMLSWERNGVAYLISPWLRQGKVKIKVPVPPPIGHYDLSKT

SEQ ID NO: 25277 - protein, 85 aa, unidentified
  REGION 1..85: note = Description of Unknown:cds_NZ_WFIY01000004.1_cds_WP_155863189.1_1121 target sequence
IGKVSPNSPNKIDEENYTVNVIVDPYTYYKYSFLGRIGVFLGAIDIKTLYFILLRVIGYERSDVKSFLFDNNFMSNVEEETPGTL

SEQ ID NO: 25278 - protein, 85 aa, unidentified
  REGION 1..85: note = Description of Unknown:cds_NZ_WFIY01000004.1_cds_WP_155863189.1_1121 target sequence
INNVTLKCEMLTKIDILSSSEPSPADIVIEPQSPVILPNADLIERSLSLNRGLLKVGTLDYLDLDVKVSLSLDDLNYHALIIGTT

SEQ ID NO: 25279 - protein, 85 aa, unidentified
  REGION 1..85: note = Description of Unknown:cds_NZ_WFIY01000004.1_cds_WP_155863189.1_1121 target sequence
GAGKTSFIKDLISGLYMIGEEGTKVFILDATGDYYHIFLPPDFTDKGVKKGIAEFEKLYGKLNKLETDVIFPITKTWVRKYAKSG

SEQ ID NO: 25280 - protein, 85 aa, unidentified
  REGION 1..85: note = Description of Unknown:cds_NZ_WFIY01000004.1_cds_WP_155863189.1_1121 target sequence
KIESITSAYHELYVKPLLEYLDMKGLKVYSSVLGNQIILSNSQWNSKINLHPFFFRYRDVRKILYKLNPYFSEQASHFLKIFSSS

SEQ ID NO: 25281 - protein, 85 aa, unidentified
  REGION 1..85: note = Description of Unknown:cds_NZ_WFIY01000004.1_cds_WP_155863189.1_1121 target sequence
KEAKECKTLEKLIDLLNDSEFDKFKLHKSTRENILRGLYLLRETELFDLKAQRDLLVNVVKNSGSLIIFDIYNGELDDLSQKILT

SEQ ID NO: 25282 - protein, 85 aa, unidentified
  REGION 1..85: note = Description of Unknown:cds_NZ_WFIY01000004.1_cds_WP_155863189.1_1121 target sequence
YYFLDRLFAYRERQMREGNIKGRFLIIIDEAHRFFPSSKGGEEDTNYVKRVAGKIATMMRLGRRRKIGFIFSTHNPSDLSDIIVQ

SEQ ID NO: 25283 - protein, 85 aa, unidentified
  REGION 1..85: note = Description of Unknown:hvTR_P06162.1 target sequence
SGSDVIFTTEQSRNSDHGRSLEPISTNDTRSMSVVTAATPDDEEEILMKNSRMKKSSSTHQEDDKRIKKGGKGKDWFKKSRDTDN

SEQ ID NO: 25284 - protein, 85 aa, unidentified
  REGION 1..85: note = Description of Unknown:hvTR_P06162.1 target sequence
QTSTSDHKPTSKGQKKISKTTTTNTDTKGQTETQTESSETQSPSWNPIIDNNTDRTEQTSTTPPTTTPRSTRTKESIRTNSESKP

SEQ ID NO: 25285 - protein, 85 aa, unidentified
  REGION 1..85: note = Description of Unknown:hvTR_P06162.1 target sequence
KTQKTIGKERKDTEESNRFTERAITLLQNLGVIQSTSKLDLYQDKRVVCVANVLNNVDTASKIDFLAGLVIGVSMDNDTKLIQIQ

SEQ ID NO: 25286 - protein, 85 aa, unidentified
  REGION 1..85: note = Description of Unknown:hvTR_P06162.1 target sequence
NEMLNLKADLKRMDESHRRLIENQREQLSLITSLISNLKIMTERGGKKDQNESNERVSMIKTKLKEEKIKKTRFDPLMEAQGIDK

SEQ ID NO: 25287 - protein, 85 aa, unidentified
  REGION 1..85: note = Description of Unknown:hvTR_P06162.1 target sequence
NIPDLYRHAGNTLENDVQVKSEILSSYNESNATRLIPRKVSSTMRSLVAVINNSNLPQSTKQSYINELKHSKSDEEVSELMDMFN

SEQ ID NO: 25288 - protein, 84 aa, unidentified
  REGION 1..84: note = Description of Unknown:hvTR_P06162.1 target sequence
HAGNTLENDVQVKSEILSSYNESNATRLIPRKVSSTMRSLVAVINNSNLPQSTKQSYINELKHSKSDEEVSELMDMFNEDVNNC

SEQ ID NO: 25289 - protein, 85 aa, unidentified
  REGION 1..85: note = Description of Unknown:hvTR_P06162.1 target sequence
SSDSRAETVVSGGISGSITDSKNGTQNTENIDLNEIRKMDKDSIERKMRQSADVPSEISGSDVIFTTEQSRNSDHGRSLEPISTN

SEQ ID NO: 25290 - protein, 85 aa, unidentified
  REGION 1..85: note = Description of Unknown:hvTR_P06162.1 target sequence
DTRSMSVVTAATPDDEEEILMKNSRMKKSSSTHQEDDKRIKKGGKGKDWFKKSRDTDNQTSTSDHKPTSKGQKKISKTTTTNTDT

SEQ ID NO: 25291 - protein, 85 aa, unidentified
  REGION 1..85: note = Description of Unknown:hvTR_P06162.1 target sequence
KGQTETQTESSETQSPSWNPIIDNNTDRTEQTSTTPPTTTPRSTRTKESIRTNSESKPKTQKTIGKERKDTEESNRFTERAITLL

SEQ ID NO: 25292 - protein, 85 aa, unidentified
  REGION 1..85: note = Description of Unknown:hvTR_P06162.1 target sequence
QNLGVIQSTSKLDLYQDKRVVCVANVLNNVDTASKIDFLAGLVIGVSMDNDTKLIQIQNEMLNLKADLKRMDESHRRLIENQREQ

SEQ ID NO: 25293 - protein, 85 aa, unidentified
  REGION 1..85: note = Description of Unknown:hvTR_P06162.1 target sequence
LSLITSLISNLKIMTERGGKKDQNESNERVSMIKTKLKEEKIKKTRFDPLMEAQGIDKNIPDLYRHAGNTLENDVQVKSEILSSY

SEQ ID NO: 25294 - protein, 85 aa, unidentified
  REGION 1..85: note = Description of Unknown:cds_NC_002728.1_cds_NP_112027.1_8 target sequence
PAENKKVRFENTTSDKGKIPSKVIKSYYGTMDIKKINEGLLDSKILSAFNTVIALLGSIVIIVMNIMIIQNYTRSTDNQAVIKDA

SEQ ID NO: 25295 - protein, 85 aa, unidentified
  REGION 1..85: note = Description of Unknown:cds_NC_002728.1_cds_NP_112027.1_8 target sequence
LQGIQQQIKGLADKIGTEIGPKVSLIDTSSTITIPANIGLLGSKISQSTASINENVNEKCKFTLPPLKIHECNISCPNPLPFREY

SEQ ID NO: 25296 - protein, 85 aa, unidentified
  REGION 1..85: note = Description of Unknown:cds_NC_002728.1_cds_NP_112027.1_8 target sequence
RPQTEGVSNLVGLPNNICLQKTSNQILKPKLISYTLPVVGQSGTCITDPLLAMDEGYFAYSHLERIGSCSRGVSKQRIIGVGEVL

SEQ ID NO: 25297 - protein, 85 aa, unidentified
  REGION 1..85: note = Description of Unknown:cds_NC_002728.1_cds_NP_112027.1_8 target sequence
DRGDEVPSLFMTNVWTPPNPNTVYHCSAVYNNEFYYVLCAVSTVGDPILNSTYWSGSLMMTRLAVKPKSNGGGYNQHQLALRSIE

SEQ ID NO: 25298 - protein, 85 aa, unidentified
  REGION 1..85: note = Description of Unknown:cds_NC_002728.1_cds_NP_112027.1_8 target sequence
KGRYDKVMPYGPSGIKQGDTLYFPAVGFLVRTEFKYNDSNCPITKCQYSKPENCRLSMGIRPNSHYILRSGLLKYNLSDGENPKV

SEQ ID NO: 25299 - protein, 85 aa, unidentified
  REGION 1..85: note = Description of Unknown:cds_NC_002728.1_cds_NP_112027.1_8 target sequence
VFIEISDQRLSIGSPSKIYDSLGQPVFYQASFSWDTMIKFGDVLTVNPLVVNWRNNTVISRPGQSQCPRFNTCPEICWEGVYNDA

SEQ ID NO: 25300 - protein, 85 aa, unidentified
  REGION 1..85: note = Description of Unknown:cds_NC_002728.1_cds_NP_112027.1_8 target sequence
FLIDRINWISAGVFLDSNQTAENPVFTVFKDNEILYRAQLASEDTNAQKTITNCFLLKNKIWCISLVEIYDTGDNVIRPKLFAVK

SEQ ID NO: 25301 - protein, 84 aa, unidentified
  REGION 1..84: note = Description of Unknown:cds_NC_002728.1_cds_NP_112027.1_8 target sequence
WISAGVFLDSNQTAENPVFTVFKDNEILYRAQLASEDTNAQKTITNCFLLKNKIWCISLVEIYDTGDNVIRPKLFAVKIPEQCT

SEQ ID NO: 25302 - protein, 85 aa, unidentified
  REGION 1..85: note = Description of Unknown:cds_NC_002728.1_cds_NP_112027.1_8 target sequence
YGTMDIKKINEGLLDSKILSAFNTVIALLGSIVIIVMNIMIIQNYTRSTDNQAVIKDALQGIQQQIKGLADKIGTEIGPKVSLID

SEQ ID NO: 25303 - protein, 85 aa, unidentified
  REGION 1..85: note = Description of Unknown:cds_NC_002728.1_cds_NP_112027.1_8 target sequence
TSSTITIPANIGLLGSKISQSTASINENVNEKCKFTLPPLKIHECNISCPNPLPFREYRPQTEGVSNLVGLPNNICLQKTSNQIL

SEQ ID NO: 25304 - protein, 85 aa, unidentified
  REGION 1..85: note = Description of Unknown:cds_NC_002728.1_cds_NP_112027.1_8 target sequence
KPKLISYTLPVVGQSGTCITDPLLAMDEGYFAYSHLERIGSCSRGVSKQRIIGVGEVLDRGDEVPSLFMTNVWTPPNPNTVYHCS

SEQ ID NO: 25305 - protein, 85 aa, unidentified
  REGION 1..85: note = Description of Unknown:cds_NC_002728.1_cds_NP_112027.1_8 target sequence
AVYNNEFYYVLCAVSTVGDPILNSTYWSGSLMMTRLAVKPKSNGGGYNQHQLALRSIEKGRYDKVMPYGPSGIKQGDTLYFPAVG

SEQ ID NO: 25306 - protein, 85 aa, unidentified
  REGION 1..85: note = Description of Unknown:cds_NC_002728.1_cds_NP_112027.1_8 target sequence
FLVRTEFKYNDSNCPITKCQYSKPENCRLSMGIRPNSHYILRSGLLKYNLSDGENPKVVFIEISDQRLSIGSPSKIYDSLGQPVF

SEQ ID NO: 25307 - protein, 85 aa, unidentified
  REGION 1..85: note = Description of Unknown:cds_NC_002728.1_cds_NP_112027.1_8 target sequence
YQASFSWDTMIKFGDVLTVNPLVVNWRNNTVISRPGQSQCPRFNTCPEICWEGVYNDAFLIDRINWISAGVFLDSNQTAENPVFT

SEQ ID NO: 25308 - protein, 85 aa, unidentified
  REGION 1..85: note = Description of Unknown:cds_NZ_WFIY01000004.1_cds_WP_205737158.1_815 target sequence
SMRVAVINYDFCKPDKCNLECIRFCPINRSGSKAIELSEIVKGKPVIYEETCIGCGICVKKCPYEAISIVNLPDKLSGEIIHRYK

SEQ ID NO: 25309 - protein, 85 aa, unidentified
  REGION 1..85: note = Description of Unknown:cds_NZ_WFIY01000004.1_cds_WP_205737158.1_815 target sequence
INGFELFGLPILKQGYVIGILGKNGTGKSTILRILSGELIPNFGDPNAKLSYDDVLNKFKGKEIYDYFYKLYNKNLKVVHKIQYI

SEQ ID NO: 25310 - protein, 85 aa, unidentified
  REGION 1..85: note = Description of Unknown:cds_NZ_WFIY01000004.1_cds_WP_205737158.1_815 target sequence
EYASRMLKGNVNELLNKIDERGKIDEVRELLSMQNMWNKSVQTLSGGELQKFLVAAALLREADVYVFDEPSSYLDVRERLNMAKG

SEQ ID NO: 25311 - protein, 85 aa, unidentified
  REGION 1..85: note = Description of Unknown:cds_NZ_WFIY01000004.1_cds_WP_205737158.1_815 target sequence
IRELTKDKYVAVVDHDLIVLDYLTDLVSIIYGESSVYGRVSKLYSARTGINNFLNGYLPAENVKFRQDEIKFMLKELTDLDFSKN

SEQ ID NO: 25312 - protein, 85 aa, unidentified
  REGION 1..85: note = Description of Unknown:cds_NZ_WFIY01000004.1_cds_WP_205737158.1_815 target sequence
VKIRIKWSEIKKNLSDFSLDIEEGDAREGEVIGIVGPNGIGKTTFMRILVNEITPDYGYVTPEGLRMSYKPQKLIPEYDGTVQQY

SEQ ID NO: 25313 - protein, 85 aa, unidentified
  REGION 1..85: note = Description of Unknown:cds_NZ_WFIY01000004.1_cds_WP_205737158.1_815 target sequence
LENVSKDVLSTSSWFFEEVIRKLNLHRILESEVKDLSGGELQKLYVAGALAKEADIYVLDEPSSYLDVEERYIVAKAIKRITRER

SEQ ID NO: 25314 - protein, 85 aa, unidentified
  REGION 1..85: note = Description of Unknown:cds_NZ_WFIY01000004.1_cds_WP_205737158.1_815 target sequence
KAVTFLVDHDLAIHDYISDRIMVFTGIPGKEGHGKSPTSLRKGMNEFLKEMQITFRRDADTGRPRVNKLGSYLDRLQKERNEYYS

SEQ ID NO: 25315 - protein, 84 aa, unidentified
  REGION 1..84: note = Description of Unknown:cds_NZ_WFIY01000004.1_cds_WP_205737158.1_815 target sequence
DHDLAIHDYISDRIMVFTGIPGKEGHGKSPTSLRKGMNEFLKEMQITFRRDADTGRPRVNKLGSYLDRLQKERNEYYSLEVSRD

SEQ ID NO: 25316 - protein, 85 aa, unidentified
  REGION 1..85: note = Description of Unknown:cds_NZ_WFIY01000004.1_cds_WP_205737158.1_815 target sequence
NRSGSKAIELSEIVKGKPVIYEETCIGCGICVKKCPYEAISIVNLPDKLSGEIIHRYKINGFELFGLPILKQGYVIGILGKNGTG

SEQ ID NO: 25317 - protein, 85 aa, unidentified
  REGION 1..85: note = Description of Unknown:cds_NZ_WFIY01000004.1_cds_WP_205737158.1_815 target sequence
KSTILRILSGELIPNFGDPNAKLSYDDVLNKFKGKEIYDYFYKLYNKNLKVVHKIQYIEYASRMLKGNVNELLNKIDERGKIDEV

SEQ ID NO: 25318 - protein, 85 aa, unidentified
  REGION 1..85: note = Description of Unknown:cds_NZ_WFIY01000004.1_cds_WP_205737158.1_815 target sequence
RELLSMQNMWNKSVQTLSGGELQKFLVAAALLREADVYVFDEPSSYLDVRERLNMAKGIRELTKDKYVAVVDHDLIVLDYLTDLV

SEQ ID NO: 25319 - protein, 85 aa, unidentified
  REGION 1..85: note = Description of Unknown:cds_NZ_WFIY01000004.1_cds_WP_205737158.1_815 target sequence
SIIYGESSVYGRVSKLYSARTGINNFLNGYLPAENVKFRQDEIKFMLKELTDLDFSKNVKIRIKWSEIKKNLSDFSLDIEEGDAR

SEQ ID NO: 25320 - protein, 85 aa, unidentified
  REGION 1..85: note = Description of Unknown:cds_NZ_WFIY01000004.1_cds_WP_205737158.1_815 target sequence
EGEVIGIVGPNGIGKTTFMRILVNEITPDYGYVTPEGLRMSYKPQKLIPEYDGTVQQYLENVSKDVLSTSSWFFEEVIRKLNLHR

SEQ ID NO: 25321 - protein, 85 aa, unidentified
  REGION 1..85: note = Description of Unknown:cds_NZ_WFIY01000004.1_cds_WP_205737158.1_815 target sequence
ILESEVKDLSGGELQKLYVAGALAKEADIYVLDEPSSYLDVEERYIVAKAIKRITRERKAVTFLVDHDLAIHDYISDRIMVFTGI

SEQ ID NO: 25322 - protein, 85 aa, unidentified
  REGION 1..85: note = Description of Unknown:cds_NZ_WFIY01000004.1_cds_WP_155863633.1_1526 target sequence
SNFVKLDIKALDSYQPLMVISPTGSGKTFSVIKYALKQNVYNKVVFAMPTKAAIREVYTKLSLFTNYVGRDDSDARLEDSFNAEE

SEQ ID NO: 25323 - protein, 85 aa, unidentified
  REGION 1..85: note = Description of Unknown:cds_NZ_WFIY01000004.1_cds_WP_155863633.1_1526 target sequence
VWRKKIIVTSYERLLQQMISYPSLFSNSLLVIDEAHLLLSEGRNCTLQELLAYYKFFREKFGGKINIILLSATMPDVDSLSEYLE

SEQ ID NO: 25324 - protein, 85 aa, unidentified
  REGION 1..85: note = Description of Unknown:cds_NZ_WFIY01000004.1_cds_WP_155863633.1_1526 target sequence
AKVICNDKRPVNIDVKIVRVSQKRSENYYLNKAIEFINYVKKGELKLENYKQILVYTNTRRSAEEISKLIEKELHVSAVFHHAGL

SEQ ID NO: 25325 - protein, 85 aa, unidentified
  REGION 1..85: note = Description of Unknown:cds_NZ_WFIY01000004.1_cds_WP_155863633.1_1526 target sequence
PIEVRKKIEDDMRSENNQYKVIVSTDTLALSINTNVDVVVVLALKRFAALRTYVEPSTVAQVIGRAGRPGYSEKGLALIFAEPDE

SEQ ID NO: 25326 - protein, 85 aa, unidentified
  REGION 1..85: note = Description of Unknown:cds_NZ_WFIY01000004.1_cds_WP_155863633.1_1526 target sequence
VKIVNKALKKDFGRVPEPLDYPQTVLRWIYSGLDPLLLARYGYRYSPSKIKDSLSFLENIGAIQKGKVTPLGKVFAYEMVPKKGM

SEQ ID NO: 25327 - protein, 85 aa, unidentified
  REGION 1..85: note = Description of Unknown:cds_NZ_WFIY01000004.1_cds_WP_155863633.1_1526 target sequence
NLLKLIIKFDKKGNPLARALYYSFIYSFFVDEYFSRKVNEGEILRKGNSIFLDLVKSLRGSFGKYTYFTVGESLEPSTWFYYSLT

SEQ ID NO: 25328 - protein, 85 aa, unidentified
  REGION 1..85: note = Description of Unknown:cds_NZ_WFIY01000004.1_cds_WP_155863633.1_1526 target sequence
VPQVISTDDIAESIRKSSEIIYNLSTYSLISEDLSKPSYFIMRLMRSYRRVIRGGKKGEEIVDFIRFCFSNYQELSKSKDEFFDT

SEQ ID NO: 25329 - protein, 84 aa, unidentified
  REGION 1..84: note = Description of Unknown:cds_NZ_WFIY01000004.1_cds_WP_155863633.1_1526 target sequence
DDIAESIRKSSEIIYNLSTYSLISEDLSKPSYFIMRLMRSYRRVIRGGKKGEEIVDFIRFCFSNYQELSKSKDEFFDTQWIRNA

SEQ ID NO: 25330 - protein, 85 aa, unidentified
  REGION 1..85: note = Description of Unknown:cds_NZ_WFIY01000004.1_cds_WP_155863633.1_1526 target sequence
TFSVIKYALKQNVYNKVVFAMPTKAAIREVYTKLSLFTNYVGRDDSDARLEDSFNAEEVWRKKIIVTSYERLLQQMISYPSLFSN

SEQ ID NO: 25331 - protein, 85 aa, unidentified
  REGION 1..85: note = Description of Unknown:cds_NZ_WFIY01000004.1_cds_WP_155863633.1_1526 target sequence
SLLVIDEAHLLLSEGRNCTLQELLAYYKFFREKFGGKINIILLSATMPDVDSLSEYLEAKVICNDKRPVNIDVKIVRVSQKRSEN

SEQ ID NO: 25332 - protein, 85 aa, unidentified
  REGION 1..85: note = Description of Unknown:cds_NZ_WFIY01000004.1_cds_WP_155863633.1_1526 target sequence
YYLNKAIEFINYVKKGELKLENYKQILVYTNTRRSAEEISKLIEKELHVSAVFHHAGLPIEVRKKIEDDMRSENNQYKVIVSTDT

SEQ ID NO: 25333 - protein, 85 aa, unidentified
  REGION 1..85: note = Description of Unknown:cds_NZ_WFIY01000004.1_cds_WP_155863633.1_1526 target sequence
LALSINTNVDVVVVLALKRFAALRTYVEPSTVAQVIGRAGRPGYSEKGLALIFAEPDEVKIVNKALKKDFGRVPEPLDYPQTVLR

SEQ ID NO: 25334 - protein, 85 aa, unidentified
  REGION 1..85: note = Description of Unknown:cds_NZ_WFIY01000004.1_cds_WP_155863633.1_1526 target sequence
WIYSGLDPLLLARYGYRYSPSKIKDSLSFLENIGAIQKGKVTPLGKVFAYEMVPKKGMNLLKLIIKFDKKGNPLARALYYSFIYS

SEQ ID NO: 25335 - protein, 85 aa, unidentified
  REGION 1..85: note = Description of Unknown:cds_NZ_WFIY01000004.1_cds_WP_155863633.1_1526 target sequence
FFVDEYFSRKVNEGEILRKGNSIFLDLVKSLRGSFGKYTYFTVGESLEPSTWFYYSLTVPQVISTDDIAESIRKSSEIIYNLSTY

SEQ ID NO: 25336 - protein, 85 aa, unidentified
  REGION 1..85: note = Description of Unknown:cds_NZ_WFIY01000004.1_cds_WP_155862831.1_660 target sequence
TRSIILGNGRLTILADQNYLLRELYYPLSTDNHLHMGRIGIWVNNRFYWLHDLHPEIEYEEDTLSSKVKASVEGIKIKIKDAVDM

SEQ ID NO: 25337 - protein, 85 aa, unidentified
  REGION 1..85: note = Description of Unknown:cds_NZ_WFIY01000004.1_cds_WP_155862831.1_660 target sequence
AYEILSREVTIEGNKEVKVFFAWDYHIYGTEYGDTALYDPATDGIIHYKRDRWFLFTCDIPTYQYATGYKEVMGYQGTWKDCEDG

SEQ ID NO: 25338 - protein, 85 aa, unidentified
  REGION 1..85: note = Description of Unknown:cds_NZ_WFIY01000004.1_cds_WP_155862831.1_660 target sequence
ELSNNPIAQGAVDSAISFKINTGTTFYCWLIAGYNYGDVRKKNDYVQSKSPRELIDRTEKFWRAWLIKAKDYDKVVRRSLLTIVA

SEQ ID NO: 25339 - protein, 85 aa, unidentified
  REGION 1..85: note = Description of Unknown:cds_NZ_WFIY01000004.1_cds_WP_155862831.1_660 target sequence
NWQENGAIPASLDTDIMRFNKDTYNYVWHRDAAFASIALTLLGYQDFSRKFFTFSKNLLFNGFLFQKYTVDGFWGSTWHPWTTGY

SEQ ID NO: 25340 - protein, 85 aa, unidentified
  REGION 1..85: note = Description of Unknown:cds_NZ_WFIY01000004.1_cds_WP_155862831.1_660 target sequence
VPIQEDETALLIYALWIHFRKFWDVDFIKDLYRPMVKSAADFLSTYIDEKTGLPLPSYDLWEERRGVHFFTSAAVYAGLVSASKF

SEQ ID NO: 25341 - protein, 85 aa, unidentified
  REGION 1..85: note = Description of Unknown:cds_NZ_WFIY01000004.1_cds_WP_155862831.1_660 target sequence
AEFFGDEEYKDKYFSAAQLVRKGLDTFYQGDHFARMLGDKGFDKTVDASTVLGAMLVYDPMDPRVISNRKVVEAKLTVNGGIVRY

SEQ ID NO: 25342 - protein, 85 aa, unidentified
  REGION 1..85: note = Description of Unknown:cds_NZ_WFIY01000004.1_cds_WP_155862831.1_660 target sequence
EGDWYLKESDKPNPWFITTLWVAQQHIAEGNIEKATEYLNWVLKNSLPTGIIPEQITPSGNYPSVSPLVWSHAELVRTYYYLKNG

SEQ ID NO: 25343 - protein, 84 aa, unidentified
  REGION 1..84: note = Description of Unknown:cds_NZ_WFIY01000004.1_cds_WP_155862831.1_660 target sequence
KESDKPNPWFITTLWVAQQHIAEGNIEKATEYLNWVLKNSLPTGIIPEQITPSGNYPSVSPLVWSHAELVRTYYYLKNGFTKFI

SEQ ID NO: 25344 - protein, 85 aa, unidentified
  REGION 1..85: note = Description of Unknown:cds_NZ_WFIY01000004.1_cds_WP_155862831.1_660 target sequence
LSTDNHLHMGRIGIWVNNRFYWLHDLHPEIEYEEDTLSSKVKASVEGIKIKIKDAVDMAYEILSREVTIEGNKEVKVFFAWDYHI

SEQ ID NO: 25345 - protein, 85 aa, unidentified
  REGION 1..85: note = Description of Unknown:cds_NZ_WFIY01000004.1_cds_WP_155862831.1_660 target sequence
YGTEYGDTALYDPATDGIIHYKRDRWFLFTCDIPTYQYATGYKEVMGYQGTWKDCEDGELSNNPIAQGAVDSAISFKINTGTTFY

SEQ ID NO: 25346 - protein, 85 aa, unidentified
  REGION 1..85: note = Description of Unknown:cds_NZ_WFIY01000004.1_cds_WP_155862831.1_660 target sequence
CWLIAGYNYGDVRKKNDYVQSKSPRELIDRTEKFWRAWLIKAKDYDKVVRRSLLTIVANWQENGAIPASLDTDIMRFNKDTYNYV

SEQ ID NO: 25347 - protein, 85 aa, unidentified
  REGION 1..85: note = Description of Unknown:cds_NZ_WFIY01000004.1_cds_WP_155862831.1_660 target sequence
WHRDAAFASIALTLLGYQDFSRKFFTFSKNLLFNGFLFQKYTVDGFWGSTWHPWTTGYVPIQEDETALLIYALWIHFRKFWDVDF

SEQ ID NO: 25348 - protein, 85 aa, unidentified
  REGION 1..85: note = Description of Unknown:cds_NZ_WFIY01000004.1_cds_WP_155862831.1_660 target sequence
IKDLYRPMVKSAADFLSTYIDEKTGLPLPSYDLWEERRGVHFFTSAAVYAGLVSASKFAEFFGDEEYKDKYFSAAQLVRKGLDTF

SEQ ID NO: 25349 - protein, 85 aa, unidentified
  REGION 1..85: note = Description of Unknown:cds_NZ_WFIY01000004.1_cds_WP_155862831.1_660 target sequence
YQGDHFARMLGDKGFDKTVDASTVLGAMLVYDPMDPRVISNRKVVEAKLTVNGGIVRYEGDWYLKESDKPNPWFITTLWVAQQHI

SEQ ID NO: 25350 - protein, 85 aa, unidentified
  REGION 1..85: note = Description of Unknown:cds_NC_003214.2_cds_NP_445672.1_7 target sequence
VVKMSIQLNEFQKKALQSFLMSDKNLLITAPTGTGKSFLAMLMAMETKSRVVYTVPLRALALQLNDDFHNKVAPLVNGYADSVAL

SEQ ID NO: 25351 - protein, 85 aa, unidentified
  REGION 1..85: note = Description of Unknown:cds_NC_003214.2_cds_NP_445672.1_7 target sequence
TSEVYEEDPENLEERVIFTTYEKADAIFRRHYPWTDRIETLIIDEIHNIGDKERGKAIENLIAYAMNEGIRIVAMSATIPDVNKI

SEQ ID NO: 25352 - protein, 85 aa, unidentified
  REGION 1..85: note = Description of Unknown:cds_NC_003214.2_cds_NP_445672.1_7 target sequence
AEIIDAEIIKTDERPIPLYKAVKIGNKLYFEDGDVIELKEDFIKKMVRKNKVVMIFTSTRKKAEELYMIYDRKFQNKVAFFHAGL

SEQ ID NO: 25353 - protein, 85 aa, unidentified
  REGION 1..85: note = Description of Unknown:cds_NC_003214.2_cds_NP_445672.1_7 target sequence
DAETKLRLLEETRQGKYNIIVSTTALSQGVNFPFYAVVFDDLKLPIIEYGRFTGWKQITPIEFDQICGRAGRPGYDEEGLCIIEA

SEQ ID NO: 25354 - protein, 85 aa, unidentified
  REGION 1..85: note = Description of Unknown:cds_NC_003214.2_cds_NP_445672.1_7 target sequence
TDIRQAEKLKRTYFNTSYGTITGHHVLEDFLLALISKYIYAKPDRIMEATKHTISFRNISEELVKEKLEELKNAKLIGEDGTGYF

SEQ ID NO: 25355 - protein, 85 aa, unidentified
  REGION 1..85: note = Description of Unknown:cds_NC_003214.2_cds_NP_445672.1_7 target sequence
VTLYGRAVAESYFDVKDAITYHDVLTKNNVKEEEIINAILENENVLNASKGENVNIIFNSWIKGVDEKTIVKATKNMTLNDLNKL

SEQ ID NO: 25356 - protein, 85 aa, unidentified
  REGION 1..85: note = Description of Unknown:cds_NC_003214.2_cds_NP_445672.1_7 target sequence
VQTLSWQTYGVYRITKALGKKELADKLRLLFLEIRYGVPASALALVQLPGIGRKRAIELMRNGIHNKTELCSQKEISKKIIGEKM

SEQ ID NO: 25357 - protein, 84 aa, unidentified
  REGION 1..84: note = Description of Unknown:cds_NC_003214.2_cds_NP_445672.1_7 target sequence
TYGVYRITKALGKKELADKLRLLFLEIRYGVPASALALVQLPGIGRKRAIELMRNGIHNKTELCSQKEISKKIIGEKMVKVLCK

SEQ ID NO: 25358 - protein, 85 aa, unidentified
  REGION 1..85: note = Description of Unknown:cds_NC_003214.2_cds_NP_445672.1_7 target sequence
ITAPTGTGKSFLAMLMAMETKSRVVYTVPLRALALQLNDDFHNKVAPLVNGYADSVALTSEVYEEDPENLEERVIFTTYEKADAI

SEQ ID NO: 25359 - protein, 85 aa, unidentified
  REGION 1..85: note = Description of Unknown:cds_NC_003214.2_cds_NP_445672.1_7 target sequence
FRRHYPWTDRIETLIIDEIHNIGDKERGKAIENLIAYAMNEGIRIVAMSATIPDVNKIAEIIDAEIIKTDERPIPLYKAVKIGNK

SEQ ID NO: 25360 - protein, 85 aa, unidentified
  REGION 1..85: note = Description of Unknown:cds_NC_003214.2_cds_NP_445672.1_7 target sequence
LYFEDGDVIELKEDFIKKMVRKNKVVMIFTSTRKKAEELYMIYDRKFQNKVAFFHAGLDAETKLRLLEETRQGKYNIIVSTTALS

SEQ ID NO: 25361 - protein, 85 aa, unidentified
  REGION 1..85: note = Description of Unknown:cds_NC_003214.2_cds_NP_445672.1_7 target sequence
QGVNFPFYAVVFDDLKLPIIEYGRFTGWKQITPIEFDQICGRAGRPGYDEEGLCIIEATDIRQAEKLKRTYFNTSYGTITGHHVL

SEQ ID NO: 25362 - protein, 85 aa, unidentified
  REGION 1..85: note = Description of Unknown:cds_NC_003214.2_cds_NP_445672.1_7 target sequence
EDFLLALISKYIYAKPDRIMEATKHTISFRNISEELVKEKLEELKNAKLIGEDGTGYFVTLYGRAVAESYFDVKDAITYHDVLTK

SEQ ID NO: 25363 - protein, 85 aa, unidentified
  REGION 1..85: note = Description of Unknown:cds_NC_003214.2_cds_NP_445672.1_7 target sequence
NNVKEEEIINAILENENVLNASKGENVNIIFNSWIKGVDEKTIVKATKNMTLNDLNKLVQTLSWQTYGVYRITKALGKKELADKL

SEQ ID NO: 25364 - protein, 85 aa, unidentified
  REGION 1..85: note = Description of Unknown:cds_NZ_WFIY01000004.1_cds_WP_155863083.1_996 target sequence
EFKIIAEYFDRLEKISSRLQLTSLLADLFKKTDTNVIDKVVYIIQGKLWPDFLGMPELGIGEKFLIRALSIATGVSDDEIEKMYK

SEQ ID NO: 25365 - protein, 85 aa, unidentified
  REGION 1..85: note = Description of Unknown:cds_NZ_WFIY01000004.1_cds_WP_155863083.1_996 target sequence
SVGDLGQVAFDIKQKQQSASILAFLGAQKASKPLTVEKVYDDLTKVATSTGEGSRDIKIRLLAGLLKDASPLEAKYLVRFVDGRL

SEQ ID NO: 25366 - protein, 85 aa, unidentified
  REGION 1..85: note = Description of Unknown:cds_NZ_WFIY01000004.1_cds_WP_155863083.1_996 target sequence
RVGIGDATILDALAITFGGGQNFRPIVERAYNLRADLGNIAKILANGGIEQLKNIKPQPGIPIRPMLAERLSDPAEMLNKVGNLA

SEQ ID NO: 25367 - protein, 85 aa, unidentified
  REGION 1..85: note = Description of Unknown:cds_NZ_WFIY01000004.1_cds_WP_155863083.1_996 target sequence
LVDYKYDGERGQIHKAGDKIFIFSRRLENITNQYPDVVEYISKYVKGNEFIVEGEIIPVDPETGEMRPFQELMHRKRKSDIHEAI

SEQ ID NO: 25368 - protein, 85 aa, unidentified
  REGION 1..85: note = Description of Unknown:cds_NZ_WFIY01000004.1_cds_WP_155863083.1_996 target sequence
KEYPVNVFLFDLMYYEGEDYTVKPLSERRKKLESIVEDNDYVHIATHIITDNVEKLKEFFYQAISEGAEGVMVKSLAPDAIYQAG

SEQ ID NO: 25369 - protein, 85 aa, unidentified
  REGION 1..85: note = Description of Unknown:cds_NZ_WFIY01000004.1_cds_WP_155863083.1_996 target sequence
SRGWLWIKFKRDYQSEMADTVDLVMVGAFYGKGRKGGKYSSFLMAAYNPDKDVFETVCKVASGFTDAELDDLQKKIAELKRDSPH

SEQ ID NO: 25370 - protein, 85 aa, unidentified
  REGION 1..85: note = Description of Unknown:cds_NZ_WFIY01000004.1_cds_WP_155863083.1_996 target sequence
PRVVSTMVPDVWLTPVLVAEIIGAEITISPLHTCCKDQYGEGGLSIRFPRFIRWRPDKSPEDATTSREILEMYKSQLKKIEEKPS

SEQ ID NO: 25371 - protein, 84 aa, unidentified
  REGION 1..84: note = Description of Unknown:cds_NZ_WFIY01000004.1_cds_WP_155863083.1_996 target sequence
TMVPDVWLTPVLVAEIIGAEITISPLHTCCKDQYGEGGLSIRFPRFIRWRPDKSPEDATTSREILEMYKSQLKKIEEKPSDQNV

SEQ ID NO: 25372 - protein, 85 aa, unidentified
  REGION 1..85: note = Description of Unknown:cds_NZ_WFIY01000004.1_cds_WP_155863083.1_996 target sequence
LFKKTDTNVIDKVVYIIQGKLWPDFLGMPELGIGEKFLIRALSIATGVSDDEIEKMYKSVGDLGQVAFDIKQKQQSASILAFLGA

SEQ ID NO: 25373 - protein, 85 aa, unidentified
  REGION 1..85: note = Description of Unknown:cds_NZ_WFIY01000004.1_cds_WP_155863083.1_996 target sequence
QKASKPLTVEKVYDDLTKVATSTGEGSRDIKIRLLAGLLKDASPLEAKYLVRFVDGRLRVGIGDATILDALAITFGGGQNFRPIV

SEQ ID NO: 25374 - protein, 85 aa, unidentified
  REGION 1..85: note = Description of Unknown:cds_NZ_WFIY01000004.1_cds_WP_155863083.1_996 target sequence
ERAYNLRADLGNIAKILANGGIEQLKNIKPQPGIPIRPMLAERLSDPAEMLNKVGNLALVDYKYDGERGQIHKAGDKIFIFSRRL

SEQ ID NO: 25375 - protein, 85 aa, unidentified
  REGION 1..85: note = Description of Unknown:cds_NZ_WFIY01000004.1_cds_WP_155863083.1_996 target sequence
ENITNQYPDVVEYISKYVKGNEFIVEGEIIPVDPETGEMRPFQELMHRKRKSDIHEAIKEYPVNVFLFDLMYYEGEDYTVKPLSE

SEQ ID NO: 25376 - protein, 85 aa, unidentified
  REGION 1..85: note = Description of Unknown:cds_NZ_WFIY01000004.1_cds_WP_155863083.1_996 target sequence
RRKKLESIVEDNDYVHIATHIITDNVEKLKEFFYQAISEGAEGVMVKSLAPDAIYQAGSRGWLWIKFKRDYQSEMADTVDLVMVG

SEQ ID NO: 25377 - protein, 85 aa, unidentified
  REGION 1..85: note = Description of Unknown:cds_NZ_WFIY01000004.1_cds_WP_155863083.1_996 target sequence
AFYGKGRKGGKYSSFLMAAYNPDKDVFETVCKVASGFTDAELDDLQKKIAELKRDSPHPRVVSTMVPDVWLTPVLVAEIIGAEIT

SEQ ID NO: 25378 - protein, 85 aa, unidentified
  REGION 1..85: note = Description of Unknown:hvTR_K0FHU3 target sequence
PEYNREASMGISEGGDALRTLIVDIPSFVKVFKGIDSTVEAELLKFINCMIKNNYNFRENIKSVHHILQFACNVYWQAPCPVFLT

SEQ ID NO: 25379 - protein, 85 aa, unidentified
  REGION 1..85: note = Description of Unknown:hvTR_K0FHU3 target sequence
LYYKSLLTVIQDICLTSCMMYEQDNPAVGIVPSEWLKMHFQTMWTNFKGACFDKGAITGGELKIVHQSMFCDLFDTDAAIGGMFA

SEQ ID NO: 25380 - protein, 85 aa, unidentified
  REGION 1..85: note = Description of Unknown:hvTR_K0FHU3 target sequence
PARMQVRIARAMLMVPKTIKIKNRIIFSNSTGAESIQAGFMKPASQRDSYIVGGPYMKFLNALHKTLFPSTKTSALYLWHKIGQT

SEQ ID NO: 25381 - protein, 85 aa, unidentified
  REGION 1..85: note = Description of Unknown:hvTR_K0FHU3 target sequence
TKNPILPGVSGEHLTELCNYVKASSQAFEEINVLDLVPDTLTSYAKIKLNSSILRACGQTQFYATTLSCLSPVTQLVPAEEYPHV

SEQ ID NO: 25382 - protein, 85 aa, unidentified
  REGION 1..85: note = Description of Unknown:hvTR_K0FHU3 target sequence
LGPVGLSSPDEYRAKVAGRSVTIVQSTLKQAVSTNGRLRPIITVPLVVNKYTGSNGNTNVFHCANLGYFSGRGVDRNLRPESVPF

SEQ ID NO: 25383 - protein, 85 aa, unidentified
  REGION 1..85: note = Description of Unknown:hvTR_K0FHU3 target sequence
KKNNVSSMLRKRHVIMTPLVDRLVKRIVGINSGEFEAEAVKRSVQNVLEDRDNPNLPKTVVLELVKHLGSSCASLTEEDVIYYLG

SEQ ID NO: 25384 - protein, 85 aa, unidentified
  REGION 1..85: note = Description of Unknown:hvTR_K0FHU3 target sequence
PYAVLGDEVLSLLSTVGQAGVPWTAEGVASVIQDIIDDCELQFVGPEEPCLIQGQSVVEELFPSPGVPSLTVGKKRKIASLLSDL

SEQ ID NO: 25385 - protein, 84 aa, unidentified
  REGION 1..84: note = Description of Unknown:hvTR_K0FHU3 target sequence
VLGDEVLSLLSTVGQAGVPWTAEGVASVIQDIIDDCELQFVGPEEPCLIQGQSVVEELFPSPGVPSLTVGKKRKIASLLSDLDL

SEQ ID NO: 25386 - protein, 85 aa, unidentified
  REGION 1..85: note = Description of Unknown:hvTR_K0FHU3 target sequence
FVKVFKGIDSTVEAELLKFINCMIKNNYNFRENIKSVHHILQFACNVYWQAPCPVFLTLYYKSLLTVIQDICLTSCMMYEQDNPA

SEQ ID NO: 25387 - protein, 85 aa, unidentified
  REGION 1..85: note = Description of Unknown:hvTR_K0FHU3 target sequence
VGIVPSEWLKMHFQTMWTNFKGACFDKGAITGGELKIVHQSMFCDLFDTDAAIGGMFAPARMQVRIARAMLMVPKTIKIKNRIIF

SEQ ID NO: 25388 - protein, 85 aa, unidentified
  REGION 1..85: note = Description of Unknown:hvTR_K0FHU3 target sequence
SNSTGAESIQAGFMKPASQRDSYIVGGPYMKFLNALHKTLFPSTKTSALYLWHKIGQTTKNPILPGVSGEHLTELCNYVKASSQA

SEQ ID NO: 25389 - protein, 85 aa, unidentified
  REGION 1..85: note = Description of Unknown:hvTR_K0FHU3 target sequence
FEEINVLDLVPDTLTSYAKIKLNSSILRACGQTQFYATTLSCLSPVTQLVPAEEYPHVLGPVGLSSPDEYRAKVAGRSVTIVQST

SEQ ID NO: 25390 - protein, 85 aa, unidentified
  REGION 1..85: note = Description of Unknown:hvTR_K0FHU3 target sequence
LKQAVSTNGRLRPIITVPLVVNKYTGSNGNTNVFHCANLGYFSGRGVDRNLRPESVPFKKNNVSSMLRKRHVIMTPLVDRLVKRI

SEQ ID NO: 25391 - protein, 85 aa, unidentified
  REGION 1..85: note = Description of Unknown:hvTR_K0FHU3 target sequence
VGINSGEFEAEAVKRSVQNVLEDRDNPNLPKTVVLELVKHLGSSCASLTEEDVIYYLGPYAVLGDEVLSLLSTVGQAGVPWTAEG

SEQ ID NO: 25392 - protein, 85 aa, unidentified
  REGION 1..85: note = Description of Unknown:cds_NZ_WFIY01000004.1_cds_2154 target sequence
VLPVILERVTPTAYYDLIKHYKETFNEEPPVEQQNAWRKLLEILSTISPPRPLILEYPIFTERADVIFVGKDKALVVEAKGWKRV

SEQ ID NO: 25393 - protein, 85 aa, unidentified
  REGION 1..85: note = Description of Unknown:cds_NZ_WFIY01000004.1_cds_2154 target sequence
SKVGDNVVEADGELHEDPCYQLNNYVSKLNLFHSSNIKFEGVLFLYNTSDYSSSECKVIRDVRELEEELNKFPPGSLEDAKKIAE

SEQ ID NO: 25394 - protein, 85 aa, unidentified
  REGION 1..85: note = Description of Unknown:cds_NZ_WFIY01000004.1_cds_2154 target sequence
GKLELKETFIQLVRKLKYEKLRSDLSKALLSKGYGLTEDQMKVMNAVFDALEKGKRVNFLIRGTSGSGKSLLAVTLYLEALSRGY

SEQ ID NO: 25395 - protein, 85 aa, unidentified
  REGION 1..85: note = Description of Unknown:cds_NZ_WFIY01000004.1_cds_2154 target sequence
TTILAYKNNRLINTVRKALGNELSSHIMFYSTGRREPPGVGEEGFENWFNKKFSKTNIDLIIFDEAQRMTEEVIKNSPRGKVNVY

SEQ ID NO: 25396 - protein, 85 aa, unidentified
  REGION 1..85: note = Description of Unknown:cds_NZ_WFIY01000004.1_cds_2154 target sequence
FYDDSQVLIGNEAGTRDNFLKFLEKVEEYELPSPVREPKQYIDFVKRILEGVKGNPGNFDFRIFDNIVDMLNELENRREKGKIAL

SEQ ID NO: 25397 - protein, 85 aa, unidentified
  REGION 1..85: note = Description of Unknown:cds_NZ_WFIY01000004.1_cds_2154 target sequence
ICSFTESEGDVENKTSWSSIKNIRVGYPIQSGFDLYKGMKFRGGELKIKWLMDEKTEYPRYWEGKLDPLKYCASVYGAQGFEADY

SEQ ID NO: 25398 - protein, 85 aa, unidentified
  REGION 1..85: note = Description of Unknown:cds_NZ_WFIY01000004.1_cds_2154 target sequence
VGVVWGRDLIWRNNGWTVNPDPITDYVGGSKSLKKLAKSDKMKALTLLKNRYYIMLTRGLRGVYVFFEDKETANAVKKLIENPSN

SEQ ID NO: 25399 - protein, 84 aa, unidentified
  REGION 1..84: note = Description of Unknown:cds_NZ_WFIY01000004.1_cds_2154 target sequence
VWGRDLIWRNNGWTVNPDPITDYVGGSKSLKKLAKSDKMKALTLLKNRYYIMLTRGLRGVYVFFEDKETANAVKKLIENPSNVN

SEQ ID NO: 25400 - protein, 85 aa, unidentified
  REGION 1..85: note = Description of Unknown:cds_NZ_WFIY01000004.1_cds_2154 target sequence
EPPVEQQNAWRKLLEILSTISPPRPLILEYPIFTERADVIFVGKDKALVVEAKGWKRVSKVGDNVVEADGELHEDPCYQLNNYVS

SEQ ID NO: 25401 - protein, 85 aa, unidentified
  REGION 1..85: note = Description of Unknown:cds_NZ_WFIY01000004.1_cds_2154 target sequence
KLNLFHSSNIKFEGVLFLYNTSDYSSSECKVIRDVRELEEELNKFPPGSLEDAKKIAEGKLELKETFIQLVRKLKYEKLRSDLSK

SEQ ID NO: 25402 - protein, 85 aa, unidentified
  REGION 1..85: note = Description of Unknown:cds_NZ_WFIY01000004.1_cds_2154 target sequence
ALLSKGYGLTEDQMKVMNAVFDALEKGKRVNFLIRGTSGSGKSLLAVTLYLEALSRGYTTILAYKNNRLINTVRKALGNELSSHI

SEQ ID NO: 25403 - protein, 85 aa, unidentified
  REGION 1..85: note = Description of Unknown:cds_NZ_WFIY01000004.1_cds_2154 target sequence
MFYSTGRREPPGVGEEGFENWFNKKFSKTNIDLIIFDEAQRMTEEVIKNSPRGKVNVYFYDDSQVLIGNEAGTRDNFLKFLEKVE

SEQ ID NO: 25404 - protein, 85 aa, unidentified
  REGION 1..85: note = Description of Unknown:cds_NZ_WFIY01000004.1_cds_2154 target sequence
EYELPSPVREPKQYIDFVKRILEGVKGNPGNFDFRIFDNIVDMLNELENRREKGKIALICSFTESEGDVENKTSWSSIKNIRVGY

SEQ ID NO: 25405 - protein, 85 aa, unidentified
  REGION 1..85: note = Description of Unknown:cds_NZ_WFIY01000004.1_cds_2154 target sequence
PIQSGFDLYKGMKFRGGELKIKWLMDEKTEYPRYWEGKLDPLKYCASVYGAQGFEADYVGVVWGRDLIWRNNGWTVNPDPITDYV

SEQ ID NO: 25406 - protein, 85 aa, unidentified
  REGION 1..85: note = Description of Unknown:cds_NZ_WFIY01000004.1_cds_WP_155862880.1_721 target sequence
NEDKISFVFVSILIMVLTIVYRNPLLLLLLVVVSLVAFKYGKIDIGSLIRKIPFFNNSINLSSIKIEDGYIQKGNEYIGVLLIYD

SEQ ID NO: 25407 - protein, 85 aa, unidentified
  REGION 1..85: note = Description of Unknown:cds_NZ_WFIY01000004.1_cds_WP_155862880.1_721 target sequence
IPVDYKDLSENSLRNSIASFYKILQVGEQVDIFFRKKYVDSIKYKEVLLHKAQNLRIIIDSDPSNSKAKRELEIINFLLDRISEG

SEQ ID NO: 25408 - protein, 85 aa, unidentified
  REGION 1..85: note = Description of Unknown:cds_NZ_WFIY01000004.1_cds_WP_155862880.1_721 target sequence
EYPFKYEIYLLIHSKNKERAIQLAEVISKGLEGLNIRSRLAKKDEISNLIFLSECKCNKISIPSQVPFLTPFSVDKLPKFQLRND

SEQ ID NO: 25409 - protein, 85 aa, unidentified
  REGION 1..85: note = Description of Unknown:cds_NZ_WFIY01000004.1_cds_WP_155862880.1_721 target sequence
GILLGKDINHGIPVFWNIDTSENPHMLIIGPTGAGKTEFLINTSLQLSLNYSIPIVFFDTKGDIKQRIIKRGLEVKILNPLYHGI

SEQ ID NO: 25410 - protein, 85 aa, unidentified
  REGION 1..85: note = Description of Unknown:cds_NZ_WFIY01000004.1_cds_WP_155862880.1_721 target sequence
SLLKANNIPIQVRAMQIEKILTNSFDLDKIHSSIIFKLIYDTLEDYYSGKISYLNWDVIDEKAKSMLDEITYLYISKIIKIIKSL

SEQ ID NO: 25411 - protein, 85 aa, unidentified
  REGION 1..85: note = Description of Unknown:cds_NZ_WFIY01000004.1_cds_WP_155862880.1_721 target sequence
DHGGDLVDYITTGLNVIDITMIKSETLRKIIMYTIITDIYNKFSSSVDNGTKIVLVLDEAWTVIKNEKVDYPLVADLVKRGRGHG

SEQ ID NO: 25412 - protein, 85 aa, unidentified
  REGION 1..85: note = Description of Unknown:cds_NZ_WFIY01000004.1_cds_WP_155862880.1_721 target sequence
IALLMATQNVEDLGEMSSVYLDNIGLLIFMNNGDKEFWNNVVKRFVNINDEEIYNNLTFLGRGEALVRFLGDPRPLLIKTDIITS

SEQ ID NO: 25413 - protein, 84 aa, unidentified
  REGION 1..84: note = Description of Unknown:cds_NZ_WFIY01000004.1_cds_WP_155862880.1_721 target sequence
ALLMATQNVEDLGEMSSVYLDNIGLLIFMNNGDKEFWNNVVKRFVNINDEEIYNNLTFLGRGEALVRFLGDPRPLLIKTDIITS

SEQ ID NO: 25414 - protein, 85 aa, unidentified
  REGION 1..85: note = Description of Unknown:cds_NZ_WFIY01000004.1_cds_WP_155862880.1_721 target sequence
LLLVVVSLVAFKYGKIDIGSLIRKIPFFNNSINLSSIKIEDGYIQKGNEYIGVLLIYDIPVDYKDLSENSLRNSIASFYKILQVG

SEQ ID NO: 25415 - protein, 85 aa, unidentified
  REGION 1..85: note = Description of Unknown:cds_NZ_WFIY01000004.1_cds_WP_155862880.1_721 target sequence
EQVDIFFRKKYVDSIKYKEVLLHKAQNLRIIIDSDPSNSKAKRELEIINFLLDRISEGEYPFKYEIYLLIHSKNKERAIQLAEVI

SEQ ID NO: 25416 - protein, 85 aa, unidentified
  REGION 1..85: note = Description of Unknown:cds_NZ_WFIY01000004.1_cds_WP_155862880.1_721 target sequence
SKGLEGLNIRSRLAKKDEISNLIFLSECKCNKISIPSQVPFLTPFSVDKLPKFQLRNDGILLGKDINHGIPVFWNIDTSENPHML

SEQ ID NO: 25417 - protein, 85 aa, unidentified
  REGION 1..85: note = Description of Unknown:cds_NZ_WFIY01000004.1_cds_WP_155862880.1_721 target sequence
IIGPTGAGKTEFLINTSLQLSLNYSIPIVFFDTKGDIKQRIIKRGLEVKILNPLYHGISLLKANNIPIQVRAMQIEKILTNSFDL

SEQ ID NO: 25418 - protein, 85 aa, unidentified
  REGION 1..85: note = Description of Unknown:cds_NZ_WFIY01000004.1_cds_WP_155862880.1_721 target sequence
DKIHSSIIFKLIYDTLEDYYSGKISYLNWDVIDEKAKSMLDEITYLYISKIIKIIKSLDHGGDLVDYITTGLNVIDITMIKSETL

SEQ ID NO: 25419 - protein, 85 aa, unidentified
  REGION 1..85: note = Description of Unknown:cds_NZ_WFIY01000004.1_cds_WP_155862880.1_721 target sequence
RKIIMYTIITDIYNKFSSSVDNGTKIVLVLDEAWTVIKNEKVDYPLVADLVKRGRGHGIALLMATQNVEDLGEMSSVYLDNIGLL

SEQ ID NO: 25420 - protein, 85 aa, unidentified
  REGION 1..85: note = Description of Unknown:cds_NC_035460.1_cds_YP_009408005.1_54 target sequence
IVLSNGVRIFINNTMQKDIYLGISNFGFENDIDNILGIAHLLEHILINFDSSKFIANASTARNFMSFWCKAIDPNLYKEAIKTLV

SEQ ID NO: 25421 - protein, 85 aa, unidentified
  REGION 1..85: note = Description of Unknown:cds_NC_035460.1_cds_YP_009408005.1_54 target sequence
SWFFINKQLKHKFDLKKIHNHIMELENEYYFRNEILHCMDPLTFLAGGDLYNGGRLSMIDNLKKVEQLLVDRMEQITGSNIVIFV

SEQ ID NO: 25422 - protein, 85 aa, unidentified
  REGION 1..85: note = Description of Unknown:cds_NC_035460.1_cds_YP_009408005.1_54 target sequence
KNMSKDILTLFNHTFGSLPSCPNKLVIKTPYYKNINGKVVMMPSPFYTTMIKVKSTLYNLLAILSLYEIYHLIDYEIVGDYLYVV

SEQ ID NO: 25423 - protein, 85 aa, unidentified
  REGION 1..85: note = Description of Unknown:cds_NC_035460.1_cds_YP_009408005.1_54 target sequence
LSFVNEYDYENFLKGNCNINFNITNPLSFNFSDDFFMNMYLSFPCIKDDIFNYLYDVNTNCLEFIKPLEMEIYNSISNGDYIVIY

SEQ ID NO: 25424 - protein, 85 aa, unidentified
  REGION 1..85: note = Description of Unknown:cds_NC_035460.1_cds_YP_009408005.1_54 target sequence
PNFSQTMFNTSDNQKHKLVVMNINHNNNFLDKHNHCNTFINLMRKQTTNNIFIKYDDISLLNYVGLTLAYKSNVKLLKRKEGLNV

SEQ ID NO: 25425 - protein, 85 aa, unidentified
  REGION 1..85: note = Description of Unknown:cds_NC_035460.1_cds_YP_009408005.1_54 target sequence
SHNFSSSDMSTILNSESFIKFTRSKPAAMYQYILLSFFVSGNSIEDILANRESILGDNSKNKILFGKQTKYDITTKSSFVAGIIK

SEQ ID NO: 25426 - protein, 85 aa, unidentified
  REGION 1..85: note = Description of Unknown:cds_NC_035460.1_cds_YP_009408005.1_54 target sequence
GALSRELITTIMWELKKQGLIYSLEFTNLQTKNTFYIFMFTIYPKEVYNYFSKNKNIVAHCLAVSNKGTIEDFSTMKKNIIIKLS

SEQ ID NO: 25427 - protein, 84 aa, unidentified
  REGION 1..84: note = Description of Unknown:cds_NC_035460.1_cds_YP_009408005.1_54 target sequence
ALSRELITTIMWELKKQGLIYSLEFTNLQTKNTFYIFMFTIYPKEVYNYFSKNKNIVAHCLAVSNKGTIEDFSTMKKNIIIKLS

SEQ ID NO: 25428 - protein, 85 aa, unidentified
  REGION 1..85: note = Description of Unknown:cds_NC_035460.1_cds_YP_009408005.1_54 target sequence
FENDIDNILGIAHLLEHILINFDSSKFIANASTARNFMSFWCKAIDPNLYKEAIKTLVSWFFINKQLKHKFDLKKIHNHIMELEN

SEQ ID NO: 25429 - protein, 85 aa, unidentified
  REGION 1..85: note = Description of Unknown:cds_NC_035460.1_cds_YP_009408005.1_54 target sequence
EYYFRNEILHCMDPLTFLAGGDLYNGGRLSMIDNLKKVEQLLVDRMEQITGSNIVIFVKNMSKDILTLFNHTFGSLPSCPNKLVI

SEQ ID NO: 25430 - protein, 85 aa, unidentified
  REGION 1..85: note = Description of Unknown:cds_NC_035460.1_cds_YP_009408005.1_54 target sequence
KTPYYKNINGKVVMMPSPFYTTMIKVKSTLYNLLAILSLYEIYHLIDYEIVGDYLYVVLSFVNEYDYENFLKGNCNINFNITNPL

SEQ ID NO: 25431 - protein, 85 aa, unidentified
  REGION 1..85: note = Description of Unknown:cds_NC_035460.1_cds_YP_009408005.1_54 target sequence
SFNFSDDFFMNMYLSFPCIKDDIFNYLYDVNTNCLEFIKPLEMEIYNSISNGDYIVIYPNFSQTMFNTSDNQKHKLVVMNINHNN

SEQ ID NO: 25432 - protein, 85 aa, unidentified
  REGION 1..85: note = Description of Unknown:cds_NC_035460.1_cds_YP_009408005.1_54 target sequence
NFLDKHNHCNTFINLMRKQTTNNIFIKYDDISLLNYVGLTLAYKSNVKLLKRKEGLNVSHNFSSSDMSTILNSESFIKFTRSKPA

SEQ ID NO: 25433 - protein, 85 aa, unidentified
  REGION 1..85: note = Description of Unknown:cds_NC_035460.1_cds_YP_009408005.1_54 target sequence
AMYQYILLSFFVSGNSIEDILANRESILGDNSKNKILFGKQTKYDITTKSSFVAGIIKGALSRELITTIMWELKKQGLIYSLEFT

SEQ ID NO: 25434 - protein, 85 aa, unidentified
  REGION 1..85: note = Description of Unknown:cds_NZ_WFIY01000004.1_cds_WP_155864128.1_2080 target sequence
LYYLPNFSNFVKPLPCINNEFTGALIKGTDIVWLAFPRYDSPSVFSSILDPQRGGHFFISGEIAKQEYLVPNVLLTTLKDGSEIT

SEQ ID NO: 25435 - protein, 85 aa, unidentified
  REGION 1..85: note = Description of Unknown:cds_NZ_WFIY01000004.1_cds_WP_155864128.1_2080 target sequence
DLLLHGEHGLVRKIVAKNPLKVSILPVFNYGKSPAIIERLSNNVFKFSNPESSEFLEVHLLFDKLDQISENSWTVYGEGYIYMGY

SEQ ID NO: 25436 - protein, 85 aa, unidentified
  REGION 1..85: note = Description of Unknown:cds_NZ_WFIY01000004.1_cds_WP_155864128.1_2080 target sequence
FKDDRFGIFGKRQLKFDVARGFERTIAYWRNTMKRGRSKGKIAEIEIEGYTGDKLLDAYQTSVGILLGLLYNPTGAIVAAPTTSL

SEQ ID NO: 25437 - protein, 85 aa, unidentified
  REGION 1..85: note = Description of Unknown:cds_NZ_WFIY01000004.1_cds_WP_155864128.1_2080 target sequence
PEVEGGTRNWDYRFAWVRDSSIVAEALISAGFSAEARRIIEFFSRMVSFTSKPFIYPLYSIDGSVPPKEEEIPWLSGYENSKPVR

SEQ ID NO: 25438 - protein, 85 aa, unidentified
  REGION 1..85: note = Description of Unknown:cds_NZ_WFIY01000004.1_cds_WP_155864128.1_2080 target sequence
IGNAAAGQLQLDLEGFFLDAFYKYYEATGDENYIRSHVDVIEYIADWVSENWKLEDVGIWEERGVQGHYIHSKVMMWVALDRAGK

SEQ ID NO: 25439 - protein, 85 aa, unidentified
  REGION 1..85: note = Description of Unknown:cds_NZ_WFIY01000004.1_cds_WP_155864128.1_2080 target sequence
LMNAIGKENPWKETKHEIKEWVLQNGVKNGIFVKKVGSNEVDAALLTLPIYGFIDVRDEIFLNTLREIENQLLYKGQLKRYKRDF

SEQ ID NO: 25440 - protein, 84 aa, unidentified
  REGION 1..84: note = Description of Unknown:cds_NZ_WFIY01000004.1_cds_WP_155864128.1_2080 target sequence
LGEAKYPFVLASLWLARVYIRLGRIQDAKNIIKGILDATQGIYLVGEHIDPDRKEFTGNYPQAFAQANLILALDELAEKKEDKS

SEQ ID NO: 25441 - protein, 85 aa, unidentified
  REGION 1..85: note = Description of Unknown:cds_NZ_WFIY01000004.1_cds_WP_155864128.1_2080 target sequence
GTDIVWLAFPRYDSPSVFSSILDPQRGGHFFISGEIAKQEYLVPNVLLTTLKDGSEITDLLLHGEHGLVRKIVAKNPLKVSILPV

SEQ ID NO: 25442 - protein, 85 aa, unidentified
  REGION 1..85: note = Description of Unknown:cds_NZ_WFIY01000004.1_cds_WP_155864128.1_2080 target sequence
FNYGKSPAIIERLSNNVFKFSNPESSEFLEVHLLFDKLDQISENSWTVYGEGYIYMGYFKDDRFGIFGKRQLKFDVARGFERTIA

SEQ ID NO: 25443 - protein, 85 aa, unidentified
  REGION 1..85: note = Description of Unknown:cds_NZ_WFIY01000004.1_cds_WP_155864128.1_2080 target sequence
YWRNTMKRGRSKGKIAEIEIEGYTGDKLLDAYQTSVGILLGLLYNPTGAIVAAPTTSLPEVEGGTRNWDYRFAWVRDSSIVAEAL

SEQ ID NO: 25444 - protein, 85 aa, unidentified
  REGION 1..85: note = Description of Unknown:cds_NZ_WFIY01000004.1_cds_WP_155864128.1_2080 target sequence
ISAGFSAEARRIIEFFSRMVSFTSKPFIYPLYSIDGSVPPKEEEIPWLSGYENSKPVRIGNAAAGQLQLDLEGFFLDAFYKYYEA

SEQ ID NO: 25445 - protein, 85 aa, unidentified
  REGION 1..85: note = Description of Unknown:cds_NZ_WFIY01000004.1_cds_WP_155864128.1_2080 target sequence
TGDENYIRSHVDVIEYIADWVSENWKLEDVGIWEERGVQGHYIHSKVMMWVALDRAGKLMNAIGKENPWKETKHEIKEWVLQNGV

SEQ ID NO: 25446 - protein, 85 aa, unidentified
  REGION 1..85: note = Description of Unknown:cds_NZ_WFIY01000004.1_cds_WP_155864128.1_2080 target sequence
KNGIFVKKVGSNEVDAALLTLPIYGFIDVRDEIFLNTLREIENQLLYKGQLKRYKRDFLGEAKYPFVLASLWLARVYIRLGRIQD

SEQ ID NO: 25447 - protein, 85 aa, unidentified
  REGION 1..85: note = Description of Unknown:cds_NC_039198.1_cds_YP_009512977.1_6 target sequence
WSTQASKHPAMVNSATNLVDIPLDHPTSARFPINRKRTGRLIYRLFSILCNLILISILISLVVIWSRSSRDCAKSDGLSSVDNQL

SEQ ID NO: 25448 - protein, 85 aa, unidentified
  REGION 1..85: note = Description of Unknown:cds_NC_039198.1_cds_YP_009512977.1_6 target sequence
SSLSRSINSLITEVNQISVTTAINLPIKLSEFGKSVVDQVTQIIRQCNAACKGPGEKPGIQNVRINIPNNFSTYSELNRTANSLN

SEQ ID NO: 25449 - protein, 85 aa, unidentified
  REGION 1..85: note = Description of Unknown:cds_NC_039198.1_cds_YP_009512977.1_6 target sequence
FQSRTALFARPNPYPKTCSRFPSYSVYFGIHCFSHAVTDSSCELSDSTYYRLVIGVADKNLSDPADVKYIGETTTPVRVQTRGCS

SEQ ID NO: 25450 - protein, 85 aa, unidentified
  REGION 1..85: note = Description of Unknown:cds_NC_039198.1_cds_YP_009512977.1_6 target sequence
VVSSIYGCYLLCSKSNQDYQDDFREQGFHQMFILFLSRELKTTFFDDMVSSTTVTWNGLYPGEGSGIWHMGHLVFPLWGGIRFGT

SEQ ID NO: 25451 - protein, 85 aa, unidentified
  REGION 1..85: note = Description of Unknown:cds_NC_039198.1_cds_YP_009512977.1_6 target sequence
HASEGILNSTLELPPVGPSCKRSLADNGLINKDVLFSPYFGDSVMVFAYLSCYMLSNVPTHCQVETMNSSVLGFGSRAQFYDLKG

SEQ ID NO: 25452 - protein, 85 aa, unidentified
  REGION 1..85: note = Description of Unknown:cds_NC_039198.1_cds_YP_009512977.1_6 target sequence
IVYLYIQSAGWFSYTQLFRLSLQSKGYKLSVKQIKRIPISSTSRPGTEPCDIIHNCPYTCATGLFQAPWIVNGDSIRDRDVRNMA

SEQ ID NO: 25453 - protein, 84 aa, unidentified
  REGION 1..84: note = Description of Unknown:cds_NC_039198.1_cds_YP_009512977.1_6 target sequence
FVQAWSGAINTFQRPFMSICSQYSCPLSELLDSESSIMRSTTTYCFPSLTESILQCVSFIEWGGPVGNPISINEVYSSISFRPD

SEQ ID NO: 25454 - protein, 85 aa, unidentified
  REGION 1..85: note = Description of Unknown:cds_NC_039198.1_cds_YP_009512977.1_6 target sequence
SARFPINRKRTGRLIYRLFSILCNLILISILISLVVIWSRSSRDCAKSDGLSSVDNQLSSLSRSINSLITEVNQISVTTAINLPI

SEQ ID NO: 25455 - protein, 85 aa, unidentified
  REGION 1..85: note = Description of Unknown:cds_NC_039198.1_cds_YP_009512977.1_6 target sequence
KLSEFGKSVVDQVTQIIRQCNAACKGPGEKPGIQNVRINIPNNFSTYSELNRTANSLNFQSRTALFARPNPYPKTCSRFPSYSVY

SEQ ID NO: 25456 - protein, 85 aa, unidentified
  REGION 1..85: note = Description of Unknown:cds_NC_039198.1_cds_YP_009512977.1_6 target sequence
FGIHCFSHAVTDSSCELSDSTYYRLVIGVADKNLSDPADVKYIGETTTPVRVQTRGCSVVSSIYGCYLLCSKSNQDYQDDFREQG

SEQ ID NO: 25457 - protein, 85 aa, unidentified
  REGION 1..85: note = Description of Unknown:cds_NC_039198.1_cds_YP_009512977.1_6 target sequence
FHQMFILFLSRELKTTFFDDMVSSTTVTWNGLYPGEGSGIWHMGHLVFPLWGGIRFGTHASEGILNSTLELPPVGPSCKRSLADN

SEQ ID NO: 25458 - protein, 85 aa, unidentified
  REGION 1..85: note = Description of Unknown:cds_NC_039198.1_cds_YP_009512977.1_6 target sequence
GLINKDVLFSPYFGDSVMVFAYLSCYMLSNVPTHCQVETMNSSVLGFGSRAQFYDLKGIVYLYIQSAGWFSYTQLFRLSLQSKGY

SEQ ID NO: 25459 - protein, 85 aa, unidentified
  REGION 1..85: note = Description of Unknown:cds_NC_039198.1_cds_YP_009512977.1_6 target sequence
KLSVKQIKRIPISSTSRPGTEPCDIIHNCPYTCATGLFQAPWIVNGDSIRDRDVRNMAFVQAWSGAINTFQRPFMSICSQYSCPL

SEQ ID NO: 25460 - protein, 85 aa, unidentified
  REGION 1..85: note = Description of Unknown:cds_NZ_WFIY01000004.1_cds_WP_155862985.1_857 target sequence
LPKLRQPIVVVLGHVDHGKTTLLDKIRGTAMVKKEPGEMTQEVGASFVPTSVISKIAEPLKNIIPIKLEIPGLLFIDTPGHELFS

SEQ ID NO: 25461 - protein, 85 aa, unidentified
  REGION 1..85: note = Description of Unknown:cds_NZ_WFIY01000004.1_cds_WP_155862985.1_857 target sequence
NLRRRGGSVADIAILVVDIMEGFQKQTYESIEILKEKKVPFLVAANKIDRIPGWKPNENEPFLFSLQKQSPVVQKKLDELIYNLV

SEQ ID NO: 25462 - protein, 85 aa, unidentified
  REGION 1..85: note = Description of Unknown:cds_NZ_WFIY01000004.1_cds_WP_155862985.1_857 target sequence
IQLASENFNADRFDRIRDFTKYVAIVPVSGKTGEGIPELLAILAGLTQRYMQGKLKFVEGPAKGVVLEVKEDPGIGHTIDVIIYD

SEQ ID NO: 25463 - protein, 85 aa, unidentified
  REGION 1..85: note = Description of Unknown:cds_NZ_WFIY01000004.1_cds_WP_155862985.1_857 target sequence
GILHKNDTIVVGGLNGIIVTKVRGILLPAPLQDMRLAKTGYRSVDEVPAAAGVKISAPNLEEALAGSPLYVAENESKIDEYKKLI

SEQ ID NO: 25464 - protein, 85 aa, unidentified
  REGION 1..85: note = Description of Unknown:cds_NZ_WFIY01000004.1_cds_WP_155862985.1_857 target sequence
EEELSKIRFAKDVKGIVVKADSLGVLESIVTALEKRGIPVRLADIGPITKRDIVEAELAGKEEEEYGIIAAFRVKPIGNLDTSKV

SEQ ID NO: 25465 - protein, 85 aa, unidentified
  REGION 1..85: note = Description of Unknown:cds_NZ_WFIY01000004.1_cds_WP_155862985.1_857 target sequence
KIIYNDIIYQLIDEVEKYINDVRERKKRRTYDSLILPGKIKILPGFVFRRSDPAIVGVEVEGGVIKPKFPLIKDDGRKVGEILQI

SEQ ID NO: 25466 - protein, 84 aa, unidentified
  REGION 1..84: note = Description of Unknown:cds_NZ_WFIY01000004.1_cds_WP_155862985.1_857 target sequence
QDNKKSLDKATKGMEVAISIKGNVMVGRQINEGDVLYTDVPKEDLEILVNNYKDTITDDMKEVIQEIIKIKRVEDPLYGLGIKL

SEQ ID NO: 25467 - protein, 85 aa, unidentified
  REGION 1..85: note = Description of Unknown:cds_NZ_WFIY01000004.1_cds_WP_155862985.1_857 target sequence
GTAMVKKEPGEMTQEVGASFVPTSVISKIAEPLKNIIPIKLEIPGLLFIDTPGHELFSNLRRRGGSVADIAILVVDIMEGFQKQT

SEQ ID NO: 25468 - protein, 85 aa, unidentified
  REGION 1..85: note = Description of Unknown:cds_NZ_WFIY01000004.1_cds_WP_155862985.1_857 target sequence
YESIEILKEKKVPFLVAANKIDRIPGWKPNENEPFLFSLQKQSPVVQKKLDELIYNLVIQLASENFNADRFDRIRDFTKYVAIVP

SEQ ID NO: 25469 - protein, 85 aa, unidentified
  REGION 1..85: note = Description of Unknown:cds_NZ_WFIY01000004.1_cds_WP_155862985.1_857 target sequence
VSGKTGEGIPELLAILAGLTQRYMQGKLKFVEGPAKGVVLEVKEDPGIGHTIDVIIYDGILHKNDTIVVGGLNGIIVTKVRGILL

SEQ ID NO: 25470 - protein, 85 aa, unidentified
  REGION 1..85: note = Description of Unknown:cds_NZ_WFIY01000004.1_cds_WP_155862985.1_857 target sequence
PAPLQDMRLAKTGYRSVDEVPAAAGVKISAPNLEEALAGSPLYVAENESKIDEYKKLIEEELSKIRFAKDVKGIVVKADSLGVLE

SEQ ID NO: 25471 - protein, 85 aa, unidentified
  REGION 1..85: note = Description of Unknown:cds_NZ_WFIY01000004.1_cds_WP_155862985.1_857 target sequence
SIVTALEKRGIPVRLADIGPITKRDIVEAELAGKEEEEYGIIAAFRVKPIGNLDTSKVKIIYNDIIYQLIDEVEKYINDVRERKK

SEQ ID NO: 25472 - protein, 85 aa, unidentified
  REGION 1..85: note = Description of Unknown:cds_NZ_WFIY01000004.1_cds_WP_155862985.1_857 target sequence
RRTYDSLILPGKIKILPGFVFRRSDPAIVGVEVEGGVIKPKFPLIKDDGRKVGEILQIQDNKKSLDKATKGMEVAISIKGNVMVG

SEQ ID NO: 25473 - protein, 85 aa, unidentified
  REGION 1..85: note = Description of Unknown:cds_NC_004074.1_cds_NP_665870.1_7 target sequence
WATSESKAPIPANSTLNLVDVPLDEPQTITKHRKQKRTGRLVFRLLSLVLSLMTVILVLVILASWSQKINACATKEGFNSLDLQI

SEQ ID NO: 25474 - protein, 85 aa, unidentified
  REGION 1..85: note = Description of Unknown:cds_NC_004074.1_cds_NP_665870.1_7 target sequence
SGLVKSINSLITEVNQISITTAINLPIKLSDFGKSIVDQVTQMIRQCNAVCKGPGEKPGIQNIRINIPNNFSTYLELNNTVKSIE

SEQ ID NO: 25475 - protein, 85 aa, unidentified
  REGION 1..85: note = Description of Unknown:cds_NC_004074.1_cds_NP_665870.1_7 target sequence
LQRRPALLARPNPIPKSCSRFPSYSVNFGIHCFAHAITDQSCELSDKTYYRLAIGISDKNLSDPSDVKYIGEAFTPMGLQARGCS

SEQ ID NO: 25476 - protein, 85 aa, unidentified
  REGION 1..85: note = Description of Unknown:cds_NC_004074.1_cds_NP_665870.1_7 target sequence
VISSIYGCYLLCSKSNQGYEADFQTQGFHQMYILFLSRDLKTTLFNDMISSTTVVWNGLYPGEGAGIWHMGYLIFPLWGGIKIGT

SEQ ID NO: 25477 - protein, 85 aa, unidentified
  REGION 1..85: note = Description of Unknown:cds_NC_004074.1_cds_NP_665870.1_7 target sequence
PASTSILNSTLDLPLVGPSCKSTLEENNLINKDVLFSPYFGESVMVFGFLSCYMLSNVPTHCQVEVLNSSVLGFGSRSQLMDLKG

SEQ ID NO: 25478 - protein, 85 aa, unidentified
  REGION 1..85: note = Description of Unknown:cds_NC_004074.1_cds_NP_665870.1_7 target sequence
IVYLYIQSAGWYSYTQLFRLSLQSRGYKLTVKQIRRIPISSTTRPGTAPCDVVHNCPYTCATGLFQAPWIVNGDSILDRDVRNLV

SEQ ID NO: 25479 - protein, 84 aa, unidentified
  REGION 1..84: note = Description of Unknown:cds_NC_004074.1_cds_NP_665870.1_7 target sequence
LVFVQAWSGNFNTFQKGLISICNQYTCPLTTLLDNDNSIMRSTTTYCYPSLSEYNLQCQSFIEWGGPVGNPIGILEVHYIIKFK

SEQ ID NO: 25480 - protein, 85 aa, unidentified
  REGION 1..85: note = Description of Unknown:cds_NC_004074.1_cds_NP_665870.1_7 target sequence
TITKHRKQKRTGRLVFRLLSLVLSLMTVILVLVILASWSQKINACATKEGFNSLDLQISGLVKSINSLITEVNQISITTAINLPI

SEQ ID NO: 25481 - protein, 85 aa, unidentified
  REGION 1..85: note = Description of Unknown:cds_NC_004074.1_cds_NP_665870.1_7 target sequence
KLSDFGKSIVDQVTQMIRQCNAVCKGPGEKPGIQNIRINIPNNFSTYLELNNTVKSIELQRRPALLARPNPIPKSCSRFPSYSVN

SEQ ID NO: 25482 - protein, 85 aa, unidentified
  REGION 1..85: note = Description of Unknown:cds_NC_004074.1_cds_NP_665870.1_7 target sequence
FGIHCFAHAITDQSCELSDKTYYRLAIGISDKNLSDPSDVKYIGEAFTPMGLQARGCSVISSIYGCYLLCSKSNQGYEADFQTQG

SEQ ID NO: 25483 - protein, 85 aa, unidentified
  REGION 1..85: note = Description of Unknown:cds_NC_004074.1_cds_NP_665870.1_7 target sequence
FHQMYILFLSRDLKTTLFNDMISSTTVVWNGLYPGEGAGIWHMGYLIFPLWGGIKIGTPASTSILNSTLDLPLVGPSCKSTLEEN

SEQ ID NO: 25484 - protein, 85 aa, unidentified
  REGION 1..85: note = Description of Unknown:cds_NC_004074.1_cds_NP_665870.1_7 target sequence
NLINKDVLFSPYFGESVMVFGFLSCYMLSNVPTHCQVEVLNSSVLGFGSRSQLMDLKGIVYLYIQSAGWYSYTQLFRLSLQSRGY

SEQ ID NO: 25485 - protein, 85 aa, unidentified
  REGION 1..85: note = Description of Unknown:cds_NC_004074.1_cds_NP_665870.1_7 target sequence
KLTVKQIRRIPISSTTRPGTAPCDVVHNCPYTCATGLFQAPWIVNGDSILDRDVRNLVFVQAWSGNFNTFQKGLISICNQYTCPL

SEQ ID NO: 25486 - protein, 85 aa, unidentified
  REGION 1..85: note = Description of Unknown:cds_NC_030656.1_cds_YP_009268770.1_55 target sequence
IVFSNGVKVFFQENMKKDIFVGISNFGFSQDIDNILGIAHLLEHVLISFDHTKFVANASTARSFMSFWCKSIRGSPMESVKELVS

SEQ ID NO: 25487 - protein, 85 aa, unidentified
  REGION 1..85: note = Description of Unknown:cds_NC_030656.1_cds_YP_009268770.1_55 target sequence
WFFNKGQLKNDFSSVNIKNYIRELENEYYFRNELFHCMDILTFINGGDLYNGGRISMLEKENEVKQLLSLRMKQLSGSSVVIFVK

SEQ ID NO: 25488 - protein, 85 aa, unidentified
  REGION 1..85: note = Description of Unknown:cds_NC_030656.1_cds_YP_009268770.1_55 target sequence
QINCKIVDLLKSTFGTLPDCPSYVSIPTLYEQKGKIAMIPSPFYTVMVEIENTLNNVLAILCLTEYYHLIDYETINKKLYLLISF

SEQ ID NO: 25489 - protein, 85 aa, unidentified
  REGION 1..85: note = Description of Unknown:cds_NC_030656.1_cds_YP_009268770.1_55 target sequence
VNEYDYESFLHGNSSLNFQIPGNVSFSHSDDFKMNMYLNFPWISHDIFDYWLETNDNKEKILKSLEENVHLSIVNRNIIVVYPSF

SEQ ID NO: 25490 - protein, 85 aa, unidentified
  REGION 1..85: note = Description of Unknown:cds_NC_030656.1_cds_YP_009268770.1_55 target sequence
SSSIFNVSDQQNHKLVVLDALPSTNTASKTNVISLMKKSMVNKVYVNYSDSELLSFVSFALTPKFRYGNINKTHDGISFKHTFSA

SEQ ID NO: 25491 - protein, 85 aa, unidentified
  REGION 1..85: note = Description of Unknown:cds_NC_030656.1_cds_YP_009268770.1_55 target sequence
DDMNTILESDTFIKYSKSRPAITYQFVFLAFFVSGRSIDDILEHRESAFSMAKGNYNKIIFPKKVKYSVTAKSSFVCGILKGSNL

SEQ ID NO: 25492 - protein, 84 aa, unidentified
  REGION 1..84: note = Description of Unknown:cds_NC_030656.1_cds_YP_009268770.1_55 target sequence
NLSSVYITGLMWTMKRKGLIYSLDHTKLKEKNTYYVFAFSIYPEKAYNFLINQSHVSSYCIILANKDTVENFSSLNKNVYIVLN

SEQ ID NO: 25493 - protein, 85 aa, unidentified
  REGION 1..85: note = Description of Unknown:cds_NC_030656.1_cds_YP_009268770.1_55 target sequence
FSQDIDNILGIAHLLEHVLISFDHTKFVANASTARSFMSFWCKSIRGSPMESVKELVSWFFNKGQLKNDFSSVNIKNYIRELENE

SEQ ID NO: 25494 - protein, 85 aa, unidentified
  REGION 1..85: note = Description of Unknown:cds_NC_030656.1_cds_YP_009268770.1_55 target sequence
YYFRNELFHCMDILTFINGGDLYNGGRISMLEKENEVKQLLSLRMKQLSGSSVVIFVKQINCKIVDLLKSTFGTLPDCPSYVSIP

SEQ ID NO: 25495 - protein, 85 aa, unidentified
  REGION 1..85: note = Description of Unknown:cds_NC_030656.1_cds_YP_009268770.1_55 target sequence
TLYEQKGKIAMIPSPFYTVMVEIENTLNNVLAILCLTEYYHLIDYETINKKLYLLISFVNEYDYESFLHGNSSLNFQIPGNVSFS

SEQ ID NO: 25496 - protein, 85 aa, unidentified
  REGION 1..85: note = Description of Unknown:cds_NC_030656.1_cds_YP_009268770.1_55 target sequence
HSDDFKMNMYLNFPWISHDIFDYWLETNDNKEKILKSLEENVHLSIVNRNIIVVYPSFSSSIFNVSDQQNHKLVVLDALPSTNTA

SEQ ID NO: 25497 - protein, 85 aa, unidentified
  REGION 1..85: note = Description of Unknown:cds_NC_030656.1_cds_YP_009268770.1_55 target sequence
SKTNVISLMKKSMVNKVYVNYSDSELLSFVSFALTPKFRYGNINKTHDGISFKHTFSADDMNTILESDTFIKYSKSRPAITYQFV

SEQ ID NO: 25498 - protein, 85 aa, unidentified
  REGION 1..85: note = Description of Unknown:cds_NC_030656.1_cds_YP_009268770.1_55 target sequence
FLAFFVSGRSIDDILEHRESAFSMAKGNYNKIIFPKKVKYSVTAKSSFVCGILKGSNLSSVYITGLMWTMKRKGLIYSLDHTKLK

SEQ ID NO: 25499 - protein, 85 aa, unidentified
  REGION 1..85: note = Description of Unknown:hvTR_P14347 target sequence
ALFLARHTLSGTGAGCHGRGPAPDVSEVDLTLQALGERGFSRLLDLGLACLDLSYVEMREFVVWGRPPASEAAVASTPGSLFRSH

SEQ ID NO: 25500 - protein, 85 aa, unidentified
  REGION 1..85: note = Description of Unknown:hvTR_P14347 target sequence
SSAYWLSEVERPGGLVRWARSQTSPSSLTLAPHLGPSLLSLSVVTGGGCGAVAFCNAFFLAYFLVVRSVFPAFSDRIAAWICDRS

SEQ ID NO: 25501 - protein, 85 aa, unidentified
  REGION 1..85: note = Description of Unknown:hvTR_P14347 target sequence
PFCENTRAVARGYRGLVKRFLAFVFERSSYDPPLLRQNSRPVERCFAIKNYVPGLDSQSCVTVPSFSRWAQSHASELDPREIRDR

SEQ ID NO: 25502 - protein, 85 aa, unidentified
  REGION 1..85: note = Description of Unknown:hvTR_P14347 target sequence
VTPATAPSFVADHASALLASLQKKASDTPCGNPIQWMWYRLLVNSCLRSAHCLLPIPAVSEGGRKTGGGVGEELVGAGGPCLSRD

SEQ ID NO: 25503 - protein, 85 aa, unidentified
  REGION 1..85: note = Description of Unknown:hvTR_P14347 target sequence
VFVAIVSRNVLSCLLNVPAAGPRAYKCFRSHASRPVSGPDYPPLAVFCMDCGYCLNFGKQTGVGGRLNSFRPTLQFYPRDQKEKH

SEQ ID NO: 25504 - protein, 85 aa, unidentified
  REGION 1..85: note = Description of Unknown:hvTR_P14347 target sequence
VLTCHASGRVYCSNCGSAAVGCQRLAEPPSARSGWRPRIRAVLPHNAAYELDRGSRLLDAIIPCLGPDRTCMRPVVLRGVTVRQL

SEQ ID NO: 25505 - protein, 84 aa, unidentified
  REGION 1..84: note = Description of Unknown:hvTR_P14347 target sequence
VRQLLYLTLRTEARAVCSICQQRQAPEDARDEPHLFSSCLEVELPPGERCAGCRLYQTRYGTPAAQAHPPGEAGGGFSRQSPAS

SEQ ID NO: 25506 - protein, 85 aa, unidentified
  REGION 1..85: note = Description of Unknown:hvTR_P14347 target sequence
VDLTLQALGERGFSRLLDLGLACLDLSYVEMREFVVWGRPPASEAAVASTPGSLFRSHSSAYWLSEVERPGGLVRWARSQTSPSS

SEQ ID NO: 25507 - protein, 85 aa, unidentified
  REGION 1..85: note = Description of Unknown:hvTR_P14347 target sequence
LTLAPHLGPSLLSLSVVTGGGCGAVAFCNAFFLAYFLVVRSVFPAFSDRIAAWICDRSPFCENTRAVARGYRGLVKRFLAFVFER

SEQ ID NO: 25508 - protein, 85 aa, unidentified
  REGION 1..85: note = Description of Unknown:hvTR_P14347 target sequence
SSYDPPLLRQNSRPVERCFAIKNYVPGLDSQSCVTVPSFSRWAQSHASELDPREIRDRVTPATAPSFVADHASALLASLQKKASD

SEQ ID NO: 25509 - protein, 85 aa, unidentified
  REGION 1..85: note = Description of Unknown:hvTR_P14347 target sequence
TPCGNPIQWMWYRLLVNSCLRSAHCLLPIPAVSEGGRKTGGGVGEELVGAGGPCLSRDVFVAIVSRNVLSCLLNVPAAGPRAYKC

SEQ ID NO: 25510 - protein, 85 aa, unidentified
  REGION 1..85: note = Description of Unknown:hvTR_P14347 target sequence
FRSHASRPVSGPDYPPLAVFCMDCGYCLNFGKQTGVGGRLNSFRPTLQFYPRDQKEKHVLTCHASGRVYCSNCGSAAVGCQRLAE

SEQ ID NO: 25511 - protein, 85 aa, unidentified
  REGION 1..85: note = Description of Unknown:hvTR_P14347 target sequence
PPSARSGWRPRIRAVLPHNAAYELDRGSRLLDAIIPCLGPDRTCMRPVVLRGVTVRQLLYLTLRTEARAVCSICQQRQAPEDARD

SEQ ID NO: 25512 - protein, 85 aa, unidentified
  REGION 1..85: note = Description of Unknown:cds_NC_003214.2_cds_NP_445719.1_54 target sequence
SFLLNLGQAFFSGLSSIATGVTSDVTSVANGINYAFNVLANFLQKLPSEIATFFQSIPGALIGFAHTFGTYIWDGMQRIASGFTA

SEQ ID NO: 25513 - protein, 85 aa, unidentified
  REGION 1..85: note = Description of Unknown:cds_NC_003214.2_cds_NP_445719.1_54 target sequence
IMAPIERGLETLGTTVINALTVVWNDIKAFASAIYNSIVSMINNIVSFVQPFINDFKNAISFAYNFLLNVINDVYSAFTIISNFF

SEQ ID NO: 25514 - protein, 85 aa, unidentified
  REGION 1..85: note = Description of Unknown:cds_NC_003214.2_cds_NP_445719.1_54 target sequence
LDLPTFFQNASNYLNSLFTDPGNQPNLLTMVPNLVASEVSRIAGAFPDVIAYNTFMEVLPKMVSGIASSPIFGNTVKGMFAKALL

SEQ ID NO: 25515 - protein, 85 aa, unidentified
  REGION 1..85: note = Description of Unknown:cds_NC_003214.2_cds_NP_445719.1_54 target sequence
MAGSPILSALLSELTKALMQSLFTSTQTTQTTQRPSQPQIQPPTAPSTQLQQRSTQQTSLSDLQNLQTQQLTPTQIEVQLERPNV

SEQ ID NO: 25516 - protein, 85 aa, unidentified
  REGION 1..85: note = Description of Unknown:cds_NC_003214.2_cds_NP_445719.1_54 target sequence
TGVFTQDVIGMGTASGGTAKLVTGYINFQNSIKQFEDVFNITASFFMELIQSLQTEFSQDMAVNVSLTLLENIYQVSQSIEIIPS

SEQ ID NO: 25517 - protein, 85 aa, unidentified
  REGION 1..85: note = Description of Unknown:cds_NC_003214.2_cds_NP_445719.1_54 target sequence
VDATTIILPPGISLCNPSQAPSPSESTSTSTNSIDVTTTVDVTEELCIPPYDLLADGLTTQFAVIALLHSNISDVMLAITQLIYG

SEQ ID NO: 25518 - protein, 84 aa, unidentified
  REGION 1..84: note = Description of Unknown:cds_NC_003214.2_cds_NP_445719.1_54 target sequence
LIYGITFSNLISDILSATTQLMYSITSNISTSDTVSVSASFTPSPPPSETYTYYVPIDIAVTYTIQVASSTTYSGALSYTVSTS

SEQ ID NO: 25519 - protein, 85 aa, unidentified
  REGION 1..85: note = Description of Unknown:cds_NC_003214.2_cds_NP_445719.1_54 target sequence
VANGINYAFNVLANFLQKLPSEIATFFQSIPGALIGFAHTFGTYIWDGMQRIASGFTAIMAPIERGLETLGTTVINALTVVWNDI

SEQ ID NO: 25520 - protein, 85 aa, unidentified
  REGION 1..85: note = Description of Unknown:cds_NC_003214.2_cds_NP_445719.1_54 target sequence
KAFASAIYNSIVSMINNIVSFVQPFINDFKNAISFAYNFLLNVINDVYSAFTIISNFFLDLPTFFQNASNYLNSLFTDPGNQPNL

SEQ ID NO: 25521 - protein, 85 aa, unidentified
  REGION 1..85: note = Description of Unknown:cds_NC_003214.2_cds_NP_445719.1_54 target sequence
LTMVPNLVASEVSRIAGAFPDVIAYNTFMEVLPKMVSGIASSPIFGNTVKGMFAKALLMAGSPILSALLSELTKALMQSLFTSTQ

SEQ ID NO: 25522 - protein, 85 aa, unidentified
  REGION 1..85: note = Description of Unknown:cds_NC_003214.2_cds_NP_445719.1_54 target sequence
TTQTTQRPSQPQIQPPTAPSTQLQQRSTQQTSLSDLQNLQTQQLTPTQIEVQLERPNVTGVFTQDVIGMGTASGGTAKLVTGYIN

SEQ ID NO: 25523 - protein, 85 aa, unidentified
  REGION 1..85: note = Description of Unknown:cds_NC_003214.2_cds_NP_445719.1_54 target sequence
FQNSIKQFEDVFNITASFFMELIQSLQTEFSQDMAVNVSLTLLENIYQVSQSIEIIPSVDATTIILPPGISLCNPSQAPSPSEST

SEQ ID NO: 25524 - protein, 85 aa, unidentified
  REGION 1..85: note = Description of Unknown:cds_NC_003214.2_cds_NP_445719.1_54 target sequence
STSTNSIDVTTTVDVTEELCIPPYDLLADGLTTQFAVIALLHSNISDVMLAITQLIYGITFSNLISDILSATTQLMYSITSNIST

SEQ ID NO: 25525 - protein, 85 aa, unidentified
  REGION 1..85: note = Description of Unknown:cds_NZ_WFIY01000004.1_cds_WP_155862640.1_421 target sequence
VGKIVRVNGPLVVADNMRNSQMYEVVEVGELRLVGEITRIEGDRAYIQVYEDTSGLKPGEPVYNTGGPLSAELGPGLLGKIFDGL

SEQ ID NO: 25526 - protein, 85 aa, unidentified
  REGION 1..85: note = Description of Unknown:cds_NZ_WFIY01000004.1_cds_WP_155862640.1_421 target sequence
ERPLSTIAEVTGSVFVNRGVKIPPLDRQKKWHFVPKVKKGDKVSPGDVLGIVQETSLIEHKILVPPDRHGEIKEIVPEGDYTVED

SEQ ID NO: 25527 - protein, 85 aa, unidentified
  REGION 1..85: note = Description of Unknown:cds_NZ_WFIY01000004.1_cds_WP_155862640.1_421 target sequence
TIATVDMNGDQVSLKMMHKWPVRIPRPYKEKLEPSEPLLTGVRVLDTIFPLAKGGTAAIPGPFGSGKTVTLQSLAKWSSAKIVIY

SEQ ID NO: 25528 - protein, 85 aa, unidentified
  REGION 1..85: note = Description of Unknown:cds_NZ_WFIY01000004.1_cds_WP_155862640.1_421 target sequence
VGCGERGNELTDELRSFPTLKDPWTGKPLLERTILVANTSNMPVAARETSIYLGVTLGEYFRDQGYDTLVVADSTTRWAEALRDL

SEQ ID NO: 25529 - protein, 85 aa, unidentified
  REGION 1..85: note = Description of Unknown:cds_NZ_WFIY01000004.1_cds_WP_155862640.1_421 target sequence
GGRMEEMPAEEGFPSYLPSRLAEYYERAGRVITLGNPERVGSVTLASAVSPPGGDFTEPVTSNTLRFVRVFWPLDVSLAHARHFP

SEQ ID NO: 25530 - protein, 85 aa, unidentified
  REGION 1..85: note = Description of Unknown:cds_NZ_WFIY01000004.1_cds_WP_155862640.1_421 target sequence
AINWLQGFSAYVDLVGKWWNTNVDPQWKEMREFMVKTLIRENELQQIVKLVGPESLAEKDKLVLEVARLIKEAFLKQNAFDDIDA

SEQ ID NO: 25531 - protein, 84 aa, unidentified
  REGION 1..84: note = Description of Unknown:cds_NZ_WFIY01000004.1_cds_WP_155862640.1_421 target sequence
DDIDAFSSPQKQVRIMKLIYLYNSLASPLVEKGVPVKKIIDSIKVVSDIIRSKATIPNNALEKYDELEKTLRAQFEQLSKEVSS

SEQ ID NO: 25532 - protein, 85 aa, unidentified
  REGION 1..85: note = Description of Unknown:cds_NZ_WFIY01000004.1_cds_WP_155862640.1_421 target sequence
VGELRLVGEITRIEGDRAYIQVYEDTSGLKPGEPVYNTGGPLSAELGPGLLGKIFDGLERPLSTIAEVTGSVFVNRGVKIPPLDR

SEQ ID NO: 25533 - protein, 85 aa, unidentified
  REGION 1..85: note = Description of Unknown:cds_NZ_WFIY01000004.1_cds_WP_155862640.1_421 target sequence
QKKWHFVPKVKKGDKVSPGDVLGIVQETSLIEHKILVPPDRHGEIKEIVPEGDYTVEDTIATVDMNGDQVSLKMMHKWPVRIPRP

SEQ ID NO: 25534 - protein, 85 aa, unidentified
  REGION 1..85: note = Description of Unknown:cds_NZ_WFIY01000004.1_cds_WP_155862640.1_421 target sequence
YKEKLEPSEPLLTGVRVLDTIFPLAKGGTAAIPGPFGSGKTVTLQSLAKWSSAKIVIYVGCGERGNELTDELRSFPTLKDPWTGK

SEQ ID NO: 25535 - protein, 85 aa, unidentified
  REGION 1..85: note = Description of Unknown:cds_NZ_WFIY01000004.1_cds_WP_155862640.1_421 target sequence
PLLERTILVANTSNMPVAARETSIYLGVTLGEYFRDQGYDTLVVADSTTRWAEALRDLGGRMEEMPAEEGFPSYLPSRLAEYYER

SEQ ID NO: 25536 - protein, 85 aa, unidentified
  REGION 1..85: note = Description of Unknown:cds_NZ_WFIY01000004.1_cds_WP_155862640.1_421 target sequence
AGRVITLGNPERVGSVTLASAVSPPGGDFTEPVTSNTLRFVRVFWPLDVSLAHARHFPAINWLQGFSAYVDLVGKWWNTNVDPQW

SEQ ID NO: 25537 - protein, 85 aa, unidentified
  REGION 1..85: note = Description of Unknown:cds_NZ_WFIY01000004.1_cds_WP_155862640.1_421 target sequence
KEMREFMVKTLIRENELQQIVKLVGPESLAEKDKLVLEVARLIKEAFLKQNAFDDIDAFSSPQKQVRIMKLIYLYNSLASPLVEK

SEQ ID NO: 25538 - protein, 85 aa, unidentified
  REGION 1..85: note = Description of Unknown:cds_NZ_WFIY01000004.1_cds_150 target sequence
VCGIIGVISKNDEKKLATITVQCLERLEYRGYDSVGVASMEGNELEVRKAKGRIDEVVKRLNILSMTGRVFLGHTRWATHGEPND

SEQ ID NO: 25539 - protein, 85 aa, unidentified
  REGION 1..85: note = Description of Unknown:cds_NZ_WFIY01000004.1_cds_150 target sequence
INAHPHTDCTNSIAVVHNGTIKNFRELREDLESLGHKFKSETDTEVIPHLVEEFKKRGMDTFSAFKSAINSIQGSYAVLAIIKGE

SEQ ID NO: 25540 - protein, 85 aa, unidentified
  REGION 1..85: note = Description of Unknown:cds_NZ_WFIY01000004.1_cds_150 target sequence
NKIYFAKKDNPLIIGLGDKMNFISSDIPSFLPYTNKVLILIDGDVGYITPDDIYIENEGKKVNVLDRIKIITWDASAASKEGYAH

SEQ ID NO: 25541 - protein, 85 aa, unidentified
  REGION 1..85: note = Description of Unknown:cds_NZ_WFIY01000004.1_cds_150 target sequence
YMLKEIHESPRAVDDTISGLVSDIEDVKNAIKILEESKRIIVIAAGTSYHAGLYFSLLLQREGFNIIPVIASEYYNIKTNQEDAI

SEQ ID NO: 25542 - protein, 85 aa, unidentified
  REGION 1..85: note = Description of Unknown:cds_NZ_WFIY01000004.1_cds_150 target sequence
LAISQSGETYDVMMALKEFKANGSRIISLTNVIDSAIARQSDVKLYTRAGPEIGVAATKTFTSQIAALQFLYSLMKGEDYTYLNK

SEQ ID NO: 25543 - protein, 85 aa, unidentified
  REGION 1..85: note = Description of Unknown:cds_NZ_WFIY01000004.1_cds_150 target sequence
AKDVIRRSLDFEGEAKLIGEELSAKSNAYYLGRGLSLPFAMEGALKIKEITYLHAEAYAAGESKHGPIALVEKDFPVVFINLGEL

SEQ ID NO: 25544 - protein, 84 aa, unidentified
  REGION 1..84: note = Description of Unknown:cds_NZ_WFIY01000004.1_cds_150 target sequence
NLGELVGELQNNVQEMKARKAKTYAISVNERLNTDKEILLTVDDERLSPFAVTPIIQLIAYYSAVKRGNDPDKPRNLAKTVTVG

SEQ ID NO: 25545 - protein, 85 aa, unidentified
  REGION 1..85: note = Description of Unknown:cds_NZ_WFIY01000004.1_cds_150 target sequence
EYRGYDSVGVASMEGNELEVRKAKGRIDEVVKRLNILSMTGRVFLGHTRWATHGEPNDINAHPHTDCTNSIAVVHNGTIKNFREL

SEQ ID NO: 25546 - protein, 85 aa, unidentified
  REGION 1..85: note = Description of Unknown:cds_NZ_WFIY01000004.1_cds_150 target sequence
REDLESLGHKFKSETDTEVIPHLVEEFKKRGMDTFSAFKSAINSIQGSYAVLAIIKGENKIYFAKKDNPLIIGLGDKMNFISSDI

SEQ ID NO: 25547 - protein, 85 aa, unidentified
  REGION 1..85: note = Description of Unknown:cds_NZ_WFIY01000004.1_cds_150 target sequence
PSFLPYTNKVLILIDGDVGYITPDDIYIENEGKKVNVLDRIKIITWDASAASKEGYAHYMLKEIHESPRAVDDTISGLVSDIEDV

SEQ ID NO: 25548 - protein, 85 aa, unidentified
  REGION 1..85: note = Description of Unknown:cds_NZ_WFIY01000004.1_cds_150 target sequence
KNAIKILEESKRIIVIAAGTSYHAGLYFSLLLQREGFNIIPVIASEYYNIKTNQEDAILAISQSGETYDVMMALKEFKANGSRII

SEQ ID NO: 25549 - protein, 85 aa, unidentified
  REGION 1..85: note = Description of Unknown:cds_NZ_WFIY01000004.1_cds_150 target sequence
SLTNVIDSAIARQSDVKLYTRAGPEIGVAATKTFTSQIAALQFLYSLMKGEDYTYLNKAKDVIRRSLDFEGEAKLIGEELSAKSN

SEQ ID NO: 25550 - protein, 85 aa, unidentified
  REGION 1..85: note = Description of Unknown:cds_NZ_WFIY01000004.1_cds_150 target sequence
AYYLGRGLSLPFAMEGALKIKEITYLHAEAYAAGESKHGPIALVEKDFPVVFINLGELVGELQNNVQEMKARKAKTYAISVNERL

SEQ ID NO: 25551 - protein, 85 aa, unidentified
  REGION 1..85: note = Description of Unknown:cds_NC_025348.1_cds_YP_009094066.1_6 target sequence
PPVPTVSQSIDEGSFTDIPLSPDDIKHPLSKKTCRKLFRIVTLIGVGLISILTIISLAQQTGILRKVDSSDFQSYVQESFKQVLN

SEQ ID NO: 25552 - protein, 85 aa, unidentified
  REGION 1..85: note = Description of Unknown:cds_NC_025348.1_cds_YP_009094066.1_6 target sequence
LMKQFSSNLNSLIEITSVTLPFRIDQFGTDIKTQVAQLVRQCNAVCRGPIKGPTTQNIVYPALYETSLNKTLETKNVRIQEVRQE

SEQ ID NO: 25553 - protein, 85 aa, unidentified
  REGION 1..85: note = Description of Unknown:cds_NC_025348.1_cds_YP_009094066.1_6 target sequence
VDPVPGPGLSNGCTRNPSFSVYHGVWCYTHATSIGNCNGSLGTSQLFRIGNVLEGDGGAPYHKSLATHLLTTRNVSRQCSATASY

SEQ ID NO: 25554 - protein, 85 aa, unidentified
  REGION 1..85: note = Description of Unknown:cds_NC_025348.1_cds_YP_009094066.1_6 target sequence
YGCYFICSEPVLTERDDYETPGIEPITIFRLDPDGNWVVFPNINRFTEYSLKALYPGIGSGVLFQGKLIFPMYGGIDKERLSALG

SEQ ID NO: 25555 - protein, 85 aa, unidentified
  REGION 1..85: note = Description of Unknown:cds_NC_025348.1_cds_YP_009094066.1_6 target sequence
LGNIGLIERRMADTCNHTEKELGRSFPGAFSSPYYHDAVMLNFLLICEMIENLPGDCDLQILNPTNMSMGSESQLSVLDNELFLY

SEQ ID NO: 25556 - protein, 85 aa, unidentified
  REGION 1..85: note = Description of Unknown:cds_NC_025348.1_cds_YP_009094066.1_6 target sequence
QRSASWWPYTLIYRLNMRYTGKYLKPKSIIPMVIKSNTRPGYEGCNHERVCPKVCVTGVFQAPWILSIGRDHKERVSNVTYMVAW

SEQ ID NO: 25557 - protein, 84 aa, unidentified
  REGION 1..84: note = Description of Unknown:cds_NC_025348.1_cds_YP_009094066.1_6 target sequence
VTYMVAWSMDKSDRTYPAVSVCGSDTCKLTVPLGDSKVHSAYSVTRCYLSRDHMSAYCLVIFELDARPWAEMRIQSFLYKLILT

SEQ ID NO: 25558 - protein, 85 aa, unidentified
  REGION 1..85: note = Description of Unknown:cds_NC_025348.1_cds_YP_009094066.1_6 target sequence
PLSKKTCRKLFRIVTLIGVGLISILTIISLAQQTGILRKVDSSDFQSYVQESFKQVLNLMKQFSSNLNSLIEITSVTLPFRIDQF

SEQ ID NO: 25559 - protein, 85 aa, unidentified
  REGION 1..85: note = Description of Unknown:cds_NC_025348.1_cds_YP_009094066.1_6 target sequence
GTDIKTQVAQLVRQCNAVCRGPIKGPTTQNIVYPALYETSLNKTLETKNVRIQEVRQEVDPVPGPGLSNGCTRNPSFSVYHGVWC

SEQ ID NO: 25560 - protein, 85 aa, unidentified
  REGION 1..85: note = Description of Unknown:cds_NC_025348.1_cds_YP_009094066.1_6 target sequence
YTHATSIGNCNGSLGTSQLFRIGNVLEGDGGAPYHKSLATHLLTTRNVSRQCSATASYYGCYFICSEPVLTERDDYETPGIEPIT

SEQ ID NO: 25561 - protein, 85 aa, unidentified
  REGION 1..85: note = Description of Unknown:cds_NC_025348.1_cds_YP_009094066.1_6 target sequence
IFRLDPDGNWVVFPNINRFTEYSLKALYPGIGSGVLFQGKLIFPMYGGIDKERLSALGLGNIGLIERRMADTCNHTEKELGRSFP

SEQ ID NO: 25562 - protein, 85 aa, unidentified
  REGION 1..85: note = Description of Unknown:cds_NC_025348.1_cds_YP_009094066.1_6 target sequence
GAFSSPYYHDAVMLNFLLICEMIENLPGDCDLQILNPTNMSMGSESQLSVLDNELFLYQRSASWWPYTLIYRLNMRYTGKYLKPK

SEQ ID NO: 25563 - protein, 85 aa, unidentified
  REGION 1..85: note = Description of Unknown:cds_NC_025348.1_cds_YP_009094066.1_6 target sequence
SIIPMVIKSNTRPGYEGCNHERVCPKVCVTGVFQAPWILSIGRDHKERVSNVTYMVAWSMDKSDRTYPAVSVCGSDTCKLTVPLG

SEQ ID NO: 25564 - protein, 85 aa, unidentified
  REGION 1..85: note = Description of Unknown:hvTR_P29839 target sequence
PRADPNLRNRARRPRARRGGGGGVGSNSSRHSGKCRRQRRALSAPPLTFLATTTTTTMMGVASTDDDSLLLKTPDELDKHSGSPQ

SEQ ID NO: 25565 - protein, 85 aa, unidentified
  REGION 1..85: note = Description of Unknown:hvTR_P29839 target sequence
TILTLTDKHDIRQPRVHRGTYHLIQLHLDLRPEELRDPFQILLSTPLQLGEANGESQTAPATSQEEETAASHELEKKKEKEEKKE

SEQ ID NO: 25566 - protein, 85 aa, unidentified
  REGION 1..85: note = Description of Unknown:hvTR_P29839 target sequence
EEDEDDRNDDRERGILCVVSNEDSDVRPAFSLFPARPGCHILRSVIDQQLTRMAIVRLSLNLFALRIITPPLKRVPLRRKAAHHT

SEQ ID NO: 25567 - protein, 85 aa, unidentified
  REGION 1..85: note = Description of Unknown:hvTR_P29839 target sequence
ALHDCMALHLPELTFESTLDINNVTENAASVADAAESTDADLTPTLTVRVRHAVCWHRVEGGISGPRGLTSRISARLSETTAKTL

SEQ ID NO: 25568 - protein, 85 aa, unidentified
  REGION 1..85: note = Description of Unknown:hvTR_P29839 target sequence
GPSVFGRLELDPNESPPDLTLSSLTLYQDGMLRFNVTCDRTEAPADPVAFRLRLRRETVRRPFFSDAPLPYFVPPRSGAADEGLE

SEQ ID NO: 25569 - protein, 85 aa, unidentified
  REGION 1..85: note = Description of Unknown:hvTR_P29839 target sequence
VRVPYELTLKNSHTLRIYRRFYGPYLGVFVPHNRQGLKMPVTVWLPRSWLELTVLVSDENGATFPRDALLGRLYFISSKHTLNRG

SEQ ID NO: 25570 - protein, 84 aa, unidentified
  REGION 1..84: note = Description of Unknown:hvTR_P29839 target sequence
SKHTLNRGCLSAMTHQVKSTLHSRSTSHSPSQQQLSVLGASIALEDLLPMRLASPETEPQDCKLTENTTEKTSPVTLAMVCGDL

SEQ ID NO: 25571 - protein, 85 aa, unidentified
  REGION 1..85: note = Description of Unknown:hvTR_P29839 target sequence
SSRHSGKCRRQRRALSAPPLTFLATTTTTTMMGVASTDDDSLLLKTPDELDKHSGSPQTILTLTDKHDIRQPRVHRGTYHLIQLH

SEQ ID NO: 25572 - protein, 85 aa, unidentified
  REGION 1..85: note = Description of Unknown:hvTR_P29839 target sequence
LDLRPEELRDPFQILLSTPLQLGEANGESQTAPATSQEEETAASHELEKKKEKEEKKEEEDEDDRNDDRERGILCVVSNEDSDVR

SEQ ID NO: 25573 - protein, 85 aa, unidentified
  REGION 1..85: note = Description of Unknown:hvTR_P29839 target sequence
PAFSLFPARPGCHILRSVIDQQLTRMAIVRLSLNLFALRIITPPLKRVPLRRKAAHHTALHDCMALHLPELTFESTLDINNVTEN

SEQ ID NO: 25574 - protein, 85 aa, unidentified
  REGION 1..85: note = Description of Unknown:hvTR_P29839 target sequence
AASVADAAESTDADLTPTLTVRVRHAVCWHRVEGGISGPRGLTSRISARLSETTAKTLGPSVFGRLELDPNESPPDLTLSSLTLY

SEQ ID NO: 25575 - protein, 85 aa, unidentified
  REGION 1..85: note = Description of Unknown:hvTR_P29839 target sequence
QDGMLRFNVTCDRTEAPADPVAFRLRLRRETVRRPFFSDAPLPYFVPPRSGAADEGLEVRVPYELTLKNSHTLRIYRRFYGPYLG

SEQ ID NO: 25576 - protein, 85 aa, unidentified
  REGION 1..85: note = Description of Unknown:hvTR_P29839 target sequence
VFVPHNRQGLKMPVTVWLPRSWLELTVLVSDENGATFPRDALLGRLYFISSKHTLNRGCLSAMTHQVKSTLHSRSTSHSPSQQQL

SEQ ID NO: 25577 - protein, 85 aa, unidentified
  REGION 1..85: note = Description of Unknown:cds_NZ_WFIY01000004.1_cds_WP_155863125.1_1044 target sequence
SLKDLVISLFQLDKDWTTRIVMAMLVMGVIWGLLGVIDSLMVRIQESTWGTYGVLAMTSQEYYAGITLHAERDLFGFAEQVEFAL

SEQ ID NO: 25578 - protein, 85 aa, unidentified
  REGION 1..85: note = Description of Unknown:cds_NZ_WFIY01000004.1_cds_WP_155863125.1_1044 target sequence
FIYFTIKLLNLQPRAKWLLNAAFIAINISMMFMEGPIVAFPTFNDNYFSATDWYYISPMGIPPYSEYVVSPLFFIGWLLLDAFTY

SEQ ID NO: 25579 - protein, 85 aa, unidentified
  REGION 1..85: note = Description of Unknown:cds_NZ_WFIY01000004.1_cds_WP_155863125.1_1044 target sequence
MASVWIIYHYYIASKSLKEKLPVPLVFFLMNTLLYAIGYSGVTAADIWDILAYAGIVGLNPIANQIAFWIFGHAVVYMAWLPAVA

SEQ ID NO: 25580 - protein, 85 aa, unidentified
  REGION 1..85: note = Description of Unknown:cds_NZ_WFIY01000004.1_cds_WP_155863125.1_1044 target sequence
ALYLLIPTLANKPLYSDRMGRISALLYLIFSNNVPIHHLYMVNLPVAIKVLQEILTYAVVVPSMMTFLNLWATAKGAQVNFNVIT

SEQ ID NO: 25581 - protein, 85 aa, unidentified
  REGION 1..85: note = Description of Unknown:cds_NZ_WFIY01000004.1_cds_WP_155863125.1_1044 target sequence
AFVATSFAGAIAAGVTGISNATIAFDSIVHNSMWVVGHFHAMILLSIVPAAMAVLYFMIPMMTGRQWYSSKMAWIHYIGYTIGAS

SEQ ID NO: 25582 - protein, 85 aa, unidentified
  REGION 1..85: note = Description of Unknown:cds_NZ_WFIY01000004.1_cds_WP_155863125.1_1044 target sequence
ILIIGFEIIGLYGVVRRAEIYPRVPGLVFAENLATVGALIAEISTLVWFVNLVATLVKGRTARLEGLSLGQLINTVAMSLDWSSA

SEQ ID NO: 25583 - protein, 84 aa, unidentified
  REGION 1..84: note = Description of Unknown:cds_NZ_WFIY01000004.1_cds_WP_155863125.1_1044 target sequence
MSLDWSSAGFKLNNFNKIGKTMNSKALGAYWALGIIGALIIVISTIPLALGGDMYNTMPWAWIILLTLGIILISYPVLKGAKSL

SEQ ID NO: 25584 - protein, 85 aa, unidentified
  REGION 1..85: note = Description of Unknown:cds_NZ_WFIY01000004.1_cds_WP_155863125.1_1044 target sequence
GVIWGLLGVIDSLMVRIQESTWGTYGVLAMTSQEYYAGITLHAERDLFGFAEQVEFALFIYFTIKLLNLQPRAKWLLNAAFIAIN

SEQ ID NO: 25585 - protein, 85 aa, unidentified
  REGION 1..85: note = Description of Unknown:cds_NZ_WFIY01000004.1_cds_WP_155863125.1_1044 target sequence
ISMMFMEGPIVAFPTFNDNYFSATDWYYISPMGIPPYSEYVVSPLFFIGWLLLDAFTYMASVWIIYHYYIASKSLKEKLPVPLVF

SEQ ID NO: 25586 - protein, 85 aa, unidentified
  REGION 1..85: note = Description of Unknown:cds_NZ_WFIY01000004.1_cds_WP_155863125.1_1044 target sequence
FLMNTLLYAIGYSGVTAADIWDILAYAGIVGLNPIANQIAFWIFGHAVVYMAWLPAVAALYLLIPTLANKPLYSDRMGRISALLY

SEQ ID NO: 25587 - protein, 85 aa, unidentified
  REGION 1..85: note = Description of Unknown:cds_NZ_WFIY01000004.1_cds_WP_155863125.1_1044 target sequence
LIFSNNVPIHHLYMVNLPVAIKVLQEILTYAVVVPSMMTFLNLWATAKGAQVNFNVITAFVATSFAGAIAAGVTGISNATIAFDS

SEQ ID NO: 25588 - protein, 85 aa, unidentified
  REGION 1..85: note = Description of Unknown:cds_NZ_WFIY01000004.1_cds_WP_155863125.1_1044 target sequence
IVHNSMWVVGHFHAMILLSIVPAAMAVLYFMIPMMTGRQWYSSKMAWIHYIGYTIGASILIIGFEIIGLYGVVRRAEIYPRVPGL

SEQ ID NO: 25589 - protein, 85 aa, unidentified
  REGION 1..85: note = Description of Unknown:cds_NZ_WFIY01000004.1_cds_WP_155863125.1_1044 target sequence
VFAENLATVGALIAEISTLVWFVNLVATLVKGRTARLEGLSLGQLINTVAMSLDWSSAGFKLNNFNKIGKTMNSKALGAYWALGI

SEQ ID NO: 25590 - protein, 85 aa, unidentified
  REGION 1..85: note = Description of Unknown:cds_NZ_WFIY01000004.1_cds_WP_155863631.1_1525 target sequence
TPEEAYSIKLISDVKLNNEGDLLHVETWIEKYEYRSAILLNKRKIIEGKVSLPRFNGEYLYYVKEIKGHKNKKEVCLFRKSPYGE

SEQ ID NO: 25591 - protein, 85 aa, unidentified
  REGION 1..85: note = Description of Unknown:cds_NZ_WFIY01000004.1_cds_WP_155863631.1_1525 target sequence
EEKLLCLGKISDYAFHNKGILILGEDKVDKSAPFEATKLKYRFDSRGLLRTRQALYLFSTKLEKIISGDFDVTGVATNGKRVVIS

SEQ ID NO: 25592 - protein, 85 aa, unidentified
  REGION 1..85: note = Description of Unknown:cds_NZ_WFIY01000004.1_cds_WP_155863631.1_1525 target sequence
ATKENDDIGLSDVYEIDLSNGEMRRITQGEGIVNAVAMNEKGQIAYLGHRKGRAPWAVEEIILPEEDKSFLCGNTCGGDVLTDLF

SEQ ID NO: 25593 - protein, 85 aa, unidentified
  REGION 1..85: note = Description of Unknown:cds_NZ_WFIY01000004.1_cds_WP_155863631.1_1525 target sequence
DGAKTRIYFVNDVIYSLGQVKGEVQIYKISDKAEQITEGKIVVRGFDVNTKEDIAYFYTTPTKPSILHYKEDYDPNPGVEGIEPQ

SEQ ID NO: 25594 - protein, 85 aa, unidentified
  REGION 1..85: note = Description of Unknown:cds_NZ_WFIY01000004.1_cds_WP_155863631.1_1525 target sequence
EINDEIQGWAIITNPDNPTILFIHGGPHAAYGYGYFIEFQFFASNGFNIVYCNPRGSQGYGEDFAKACVGDWGGKDMQDIINFTK

SEQ ID NO: 25595 - protein, 85 aa, unidentified
  REGION 1..85: note = Description of Unknown:cds_NZ_WFIY01000004.1_cds_WP_155863631.1_1525 target sequence
KVIEKYNLKGKLGVTGGSYGGYMTNWIVTQTDMFSAAIAERSISNLVSMCGTSDIGFWFNAIEAGIDDPWKQENIEKLMRMSPIY

SEQ ID NO: 25596 - protein, 84 aa, unidentified
  REGION 1..84: note = Description of Unknown:cds_NZ_WFIY01000004.1_cds_WP_155863631.1_1525 target sequence
LMRMSPIYYVKNVKTPTMLIHGEEDYRCPIEQAEQFFMALKMNGVPTVLERYPGDSHEHARRGKPKNMIDRLYKKIWWFTKYLK

SEQ ID NO: 25597 - protein, 85 aa, unidentified
  REGION 1..85: note = Description of Unknown:cds_NZ_WFIY01000004.1_cds_WP_155863631.1_1525 target sequence
WIEKYEYRSAILLNKRKIIEGKVSLPRFNGEYLYYVKEIKGHKNKKEVCLFRKSPYGEEEKLLCLGKISDYAFHNKGILILGEDK

SEQ ID NO: 25598 - protein, 85 aa, unidentified
  REGION 1..85: note = Description of Unknown:cds_NZ_WFIY01000004.1_cds_WP_155863631.1_1525 target sequence
VDKSAPFEATKLKYRFDSRGLLRTRQALYLFSTKLEKIISGDFDVTGVATNGKRVVISATKENDDIGLSDVYEIDLSNGEMRRIT

SEQ ID NO: 25599 - protein, 85 aa, unidentified
  REGION 1..85: note = Description of Unknown:cds_NZ_WFIY01000004.1_cds_WP_155863631.1_1525 target sequence
QGEGIVNAVAMNEKGQIAYLGHRKGRAPWAVEEIILPEEDKSFLCGNTCGGDVLTDLFDGAKTRIYFVNDVIYSLGQVKGEVQIY

SEQ ID NO: 25600 - protein, 85 aa, unidentified
  REGION 1..85: note = Description of Unknown:cds_NZ_WFIY01000004.1_cds_WP_155863631.1_1525 target sequence
KISDKAEQITEGKIVVRGFDVNTKEDIAYFYTTPTKPSILHYKEDYDPNPGVEGIEPQEINDEIQGWAIITNPDNPTILFIHGGP

SEQ ID NO: 25601 - protein, 85 aa, unidentified
  REGION 1..85: note = Description of Unknown:cds_NZ_WFIY01000004.1_cds_WP_155863631.1_1525 target sequence
HAAYGYGYFIEFQFFASNGFNIVYCNPRGSQGYGEDFAKACVGDWGGKDMQDIINFTKKVIEKYNLKGKLGVTGGSYGGYMTNWI

SEQ ID NO: 25602 - protein, 85 aa, unidentified
  REGION 1..85: note = Description of Unknown:cds_NZ_WFIY01000004.1_cds_WP_155863631.1_1525 target sequence
VTQTDMFSAAIAERSISNLVSMCGTSDIGFWFNAIEAGIDDPWKQENIEKLMRMSPIYYVKNVKTPTMLIHGEEDYRCPIEQAEQ

SEQ ID NO: 25603 - protein, 85 aa, unidentified
  REGION 1..85: note = Description of Unknown:vpeps_4WSE_1 target sequence
LKNKTRAEKYQTYYTTNEYQIVKEKLPDIIRDAEIKASEVLEPTIYEKRAIMEVIKDFIRDHQRKVYGGTALNEALKQVNPKDAI

SEQ ID NO: 25604 - protein, 85 aa, unidentified
  REGION 1..85: note = Description of Unknown:vpeps_4WSE_1 target sequence
YDNYSFSDIEFYSPTPVQDLVDLCNILYRKGYKFVQGKDAQHEETYSIFVNFQLYCDITYSPTRVFYGIKTIEIDGINYTDPHFM

SEQ ID NO: 25605 - protein, 85 aa, unidentified
  REGION 1..85: note = Description of Unknown:vpeps_4WSE_1 target sequence
LIDYLRMVNQPLTAAGQRWEKAFERMYRLLKDYPIEDFDKRLDIPEPPEEIQSYISRIKTEFLSDNKLNESFLISGIEAYNFYIR

SEQ ID NO: 25606 - protein, 85 aa, unidentified
  REGION 1..85: note = Description of Unknown:vpeps_4WSE_1 target sequence
HAASSKDEEQMARTNRNVVNLNNFIANVPFSELISVNYREDVKNTYNFLRMIVEDKEKISVDEYFPLFQFTGYSTVIKYDDHPII

SEQ ID NO: 25607 - protein, 85 aa, unidentified
  REGION 1..85: note = Description of Unknown:vpeps_4WSE_1 target sequence
RIYEGDGYCIPNVKTVKTVENDNGTKTKYEYKYVSFQYVLMILYINKFRAHLDKNKPMYFNYGIAISNLVKARNIYLDQTGKSVL

SEQ ID NO: 25608 - protein, 85 aa, unidentified
  REGION 1..85: note = Description of Unknown:vpeps_4WSE_1 target sequence
DNTVFKEFRTNCTGNTISFTRMNRLRLLEKRKQGKQTSFVYTPEDFFKKDLETQAKLDPSKARFKNTSGNKIMVPKYLLFKIDNN

SEQ ID NO: 25609 - protein, 85 aa, unidentified
  REGION 1..85: note = Description of Unknown:vpeps_4WSE_1 target sequence
VPKYLLFKIDNNGNIEDNIHSEEAEISEKEETSGGSSISTDKSFEESPNSSPNSSPNNSLNNSIDISTNNYDDRSENSLDSLTSD

SEQ ID NO: 25610 - protein, 85 aa, unidentified
  REGION 1..85: note = Description of Unknown:vpeps_4WSE_1 target sequence
DIIRDAEIKASEVLEPTIYEKRAIMEVIKDFIRDHQRKVYGGTALNEALKQVNPKDAIYDNYSFSDIEFYSPTPVQDLVDLCNIL

SEQ ID NO: 25611 - protein, 85 aa, unidentified
  REGION 1..85: note = Description of Unknown:vpeps_4WSE_1 target sequence
YRKGYKFVQGKDAQHEETYSIFVNFQLYCDITYSPTRVFYGIKTIEIDGINYTDPHFMLIDYLRMVNQPLTAAGQRWEKAFERMY

SEQ ID NO: 25612 - protein, 85 aa, unidentified
  REGION 1..85: note = Description of Unknown:vpeps_4WSE_1 target sequence
RLLKDYPIEDFDKRLDIPEPPEEIQSYISRIKTEFLSDNKLNESFLISGIEAYNFYIRHAASSKDEEQMARTNRNVVNLNNFIAN

SEQ ID NO: 25613 - protein, 85 aa, unidentified
  REGION 1..85: note = Description of Unknown:vpeps_4WSE_1 target sequence
VPFSELISVNYREDVKNTYNFLRMIVEDKEKISVDEYFPLFQFTGYSTVIKYDDHPIIRIYEGDGYCIPNVKTVKTVENDNGTKT

SEQ ID NO: 25614 - protein, 85 aa, unidentified
  REGION 1..85: note = Description of Unknown:vpeps_4WSE_1 target sequence
KYEYKYVSFQYVLMILYINKFRAHLDKNKPMYFNYGIAISNLVKARNIYLDQTGKSVLDNTVFKEFRTNCTGNTISFTRMNRLRL

SEQ ID NO: 25615 - protein, 85 aa, unidentified
  REGION 1..85: note = Description of Unknown:vpeps_4WSE_1 target sequence
LEKRKQGKQTSFVYTPEDFFKKDLETQAKLDPSKARFKNTSGNKIMVPKYLLFKIDNNGNIEDNIHSEEAEISEKEETSGGSSIS

SEQ ID NO: 25616 - protein, 85 aa, unidentified
  REGION 1..85: note = Description of Unknown:cds_NZ_WFIY01000004.1_cds_WP_155862811.1_639 target sequence
SEGLFEEQIGRLREMKVITRQTADGRGSVSFRNFIVEFPINTKITAGKILAVKSLQNDYLLLEVADLLPVHYGMINLDGSIPKEI

SEQ ID NO: 25617 - protein, 85 aa, unidentified
  REGION 1..85: note = Description of Unknown:cds_NZ_WFIY01000004.1_cds_WP_155862811.1_639 target sequence
RDEVMRKVEEDWGRNDEEAWLDVYAYPIGYLLKIDGDVEFYKGYSPPIPGSTVRVLSRELYEKFVCDKNGVEIGNIIGEDVKLRI

SEQ ID NO: 25618 - protein, 85 aa, unidentified
  REGION 1..85: note = Description of Unknown:cds_NZ_WFIY01000004.1_cds_WP_155862811.1_639 target sequence
NMEKAINYHIGIFAFTGSGKSNLTASLVRRILKENKDTKVVIFDISLEYSILLLDQLISNNSRLISTERLPINKTDAGRRFIRTH

SEQ ID NO: 25619 - protein, 85 aa, unidentified
  REGION 1..85: note = Description of Unknown:cds_NZ_WFIY01000004.1_cds_WP_155862811.1_639 target sequence
VIPEEIIDLKDEIRKSAEEIFELNKMRQLYVPPEGSTYLTYGEIIDMVRAQINDKYTAFAQKPLFGLFLKKIDETMRQNKLTKED

SEQ ID NO: 25620 - protein, 85 aa, unidentified
  REGION 1..85: note = Description of Unknown:cds_NZ_WFIY01000004.1_cds_WP_155862811.1_639 target sequence
IADTTLSPVIDEIETLARESGLKENASIFAFLNALRVYLTSEIQEGEEYDIEKMAIEILDNDENSPRLFILELPNIEEARLIVGQ

SEQ ID NO: 25621 - protein, 85 aa, unidentified
  REGION 1..85: note = Description of Unknown:cds_NZ_WFIY01000004.1_cds_WP_155862811.1_639 target sequence
LINQIMLRRKKSYSTNPILFVLDEAQEFIPFDTKQKDNSEFSSNAVEKLLRHGRKYHLHGLISTQRLAYLNTNVLQQLHTYFIST

SEQ ID NO: 25622 - protein, 84 aa, unidentified
  REGION 1..84: note = Description of Unknown:cds_NZ_WFIY01000004.1_cds_WP_155862811.1_639 target sequence
NVLQQLHTYFISTLPRPYDRQLIAETFGINDTLMDRTLDLEVGQWLLVSFKAALPHDVPVFFTAPNNLEELRKGLQNSRPSSSI

SEQ ID NO: 25623 - protein, 85 aa, unidentified
  REGION 1..85: note = Description of Unknown:cds_NZ_WFIY01000004.1_cds_WP_155862811.1_639 target sequence
SVSFRNFIVEFPINTKITAGKILAVKSLQNDYLLLEVADLLPVHYGMINLDGSIPKEIRDEVMRKVEEDWGRNDEEAWLDVYAYP

SEQ ID NO: 25624 - protein, 85 aa, unidentified
  REGION 1..85: note = Description of Unknown:cds_NZ_WFIY01000004.1_cds_WP_155862811.1_639 target sequence
IGYLLKIDGDVEFYKGYSPPIPGSTVRVLSRELYEKFVCDKNGVEIGNIIGEDVKLRINMEKAINYHIGIFAFTGSGKSNLTASL

SEQ ID NO: 25625 - protein, 85 aa, unidentified
  REGION 1..85: note = Description of Unknown:cds_NZ_WFIY01000004.1_cds_WP_155862811.1_639 target sequence
VRRILKENKDTKVVIFDISLEYSILLLDQLISNNSRLISTERLPINKTDAGRRFIRTHVIPEEIIDLKDEIRKSAEEIFELNKMR

SEQ ID NO: 25626 - protein, 85 aa, unidentified
  REGION 1..85: note = Description of Unknown:cds_NZ_WFIY01000004.1_cds_WP_155862811.1_639 target sequence
QLYVPPEGSTYLTYGEIIDMVRAQINDKYTAFAQKPLFGLFLKKIDETMRQNKLTKEDIADTTLSPVIDEIETLARESGLKENAS

SEQ ID NO: 25627 - protein, 85 aa, unidentified
  REGION 1..85: note = Description of Unknown:cds_NZ_WFIY01000004.1_cds_WP_155862811.1_639 target sequence
IFAFLNALRVYLTSEIQEGEEYDIEKMAIEILDNDENSPRLFILELPNIEEARLIVGQLINQIMLRRKKSYSTNPILFVLDEAQE

SEQ ID NO: 25628 - protein, 85 aa, unidentified
  REGION 1..85: note = Description of Unknown:cds_NZ_WFIY01000004.1_cds_WP_155862811.1_639 target sequence
FIPFDTKQKDNSEFSSNAVEKLLRHGRKYHLHGLISTQRLAYLNTNVLQQLHTYFISTLPRPYDRQLIAETFGINDTLMDRTLDL

SEQ ID NO: 25629 - protein, 85 aa, unidentified
  REGION 1..85: note = Description of Unknown:cds_NZ_WFIY01000004.1_cds_WP_155862977.1_847 target sequence
AQVETQKKEGGFRLLPAPSKYENGVVKFGDREIKIGGPLPKLAENEKLIRVTHSLCPVCYRLLPAAIFEKDEKMYIRKVCPEHGE

SEQ ID NO: 25630 - protein, 85 aa, unidentified
  REGION 1..85: note = Description of Unknown:cds_NZ_WFIY01000004.1_cds_WP_155862977.1_847 target sequence
FEDLYYGDVGMYYKFDYWEYEGKGPKVPYVDLKSPCPFNCGLCPMHHQHSALVNLVITNRCDQACWYCFFFAEKAGYVFEPTLEQ

SEQ ID NO: 25631 - protein, 85 aa, unidentified
  REGION 1..85: note = Description of Unknown:cds_NZ_WFIY01000004.1_cds_WP_155862977.1_847 target sequence
IKFMVDQLKRQEITLVIQITGGEPTLREDLVQIVKLLRESGVKHIQLNTWGGTFARLYMEDPDKAIKYAMQLREAGVNTVYMSFD

SEQ ID NO: 25632 - protein, 85 aa, unidentified
  REGION 1..85: note = Description of Unknown:cds_NZ_WFIY01000004.1_cds_WP_155862977.1_847 target sequence
GTNRRTNPKNHWEIPYTLEVFRRAGMTSVVLVPTVIKTTNDNDLGNIVRFAAENIDVVRAINFQPVSLTGMMKRNMRSRFRITIP

SEQ ID NO: 25633 - protein, 85 aa, unidentified
  REGION 1..85: note = Description of Unknown:cds_NZ_WFIY01000004.1_cds_WP_155862977.1_847 target sequence
EIIKDIEDQTDGEITRDSWYPIGTSVVFSRLIEALTGKEQFEMANHPSCGAGTYVFVEWREGKPHFIPLSKFIDLEGLLEYFKEK

SEQ ID NO: 25634 - protein, 85 aa, unidentified
  REGION 1..85: note = Description of Unknown:cds_NZ_WFIY01000004.1_cds_WP_155862977.1_847 target sequence
AEELKEGGNKYWVGLKILYNIRKFIDKEKGPKDFDVYKMLYNIIVNHNYEALGEWHYRTLFLGTMHFMDLYNYDIQRVMRCDIHY

SEQ ID NO: 25635 - protein, 84 aa, unidentified
  REGION 1..84: note = Description of Unknown:cds_NZ_WFIY01000004.1_cds_WP_155862977.1_847 target sequence
YDIQRVMRCDIHYVTPDGRVIPFCTYNVLNDLYRDKILKEYQIPLDEWVKLHGENSIGDQVKYKRVVSDLEKGEIYKNTYKHFM

SEQ ID NO: 25636 - protein, 85 aa, unidentified
  REGION 1..85: note = Description of Unknown:cds_NZ_WFIY01000004.1_cds_WP_155862977.1_847 target sequence
FGDREIKIGGPLPKLAENEKLIRVTHSLCPVCYRLLPAAIFEKDEKMYIRKVCPEHGEFEDLYYGDVGMYYKFDYWEYEGKGPKV

SEQ ID NO: 25637 - protein, 85 aa, unidentified
  REGION 1..85: note = Description of Unknown:cds_NZ_WFIY01000004.1_cds_WP_155862977.1_847 target sequence
PYVDLKSPCPFNCGLCPMHHQHSALVNLVITNRCDQACWYCFFFAEKAGYVFEPTLEQIKFMVDQLKRQEITLVIQITGGEPTLR

SEQ ID NO: 25638 - protein, 85 aa, unidentified
  REGION 1..85: note = Description of Unknown:cds_NZ_WFIY01000004.1_cds_WP_155862977.1_847 target sequence
EDLVQIVKLLRESGVKHIQLNTWGGTFARLYMEDPDKAIKYAMQLREAGVNTVYMSFDGTNRRTNPKNHWEIPYTLEVFRRAGMT

SEQ ID NO: 25639 - protein, 85 aa, unidentified
  REGION 1..85: note = Description of Unknown:cds_NZ_WFIY01000004.1_cds_WP_155862977.1_847 target sequence
SVVLVPTVIKTTNDNDLGNIVRFAAENIDVVRAINFQPVSLTGMMKRNMRSRFRITIPEIIKDIEDQTDGEITRDSWYPIGTSVV

SEQ ID NO: 25640 - protein, 85 aa, unidentified
  REGION 1..85: note = Description of Unknown:cds_NZ_WFIY01000004.1_cds_WP_155862977.1_847 target sequence
FSRLIEALTGKEQFEMANHPSCGAGTYVFVEWREGKPHFIPLSKFIDLEGLLEYFKEKAEELKEGGNKYWVGLKILYNIRKFIDK

SEQ ID NO: 25641 - protein, 85 aa, unidentified
  REGION 1..85: note = Description of Unknown:cds_NZ_WFIY01000004.1_cds_WP_155862977.1_847 target sequence
EKGPKDFDVYKMLYNIIVNHNYEALGEWHYRTLFLGTMHFMDLYNYDIQRVMRCDIHYVTPDGRVIPFCTYNVLNDLYRDKILKE

SEQ ID NO: 25642 - protein, 85 aa, unidentified
  REGION 1..85: note = Description of Unknown:cds_NZ_WFIY01000004.1_cds_WP_155863716.1_1579 target sequence
IACTRDCYDTCIFDSNYKPLDIFPINGFTCSRGIADLKRNSINRIKSAYYEGKEITVEEGIRILAKKIREIKPEEILHIDYDGNQ

SEQ ID NO: 25643 - protein, 85 aa, unidentified
  REGION 1..85: note = Description of Unknown:cds_NZ_WFIY01000004.1_cds_WP_155863716.1_1579 target sequence
GLLTWYYPARLWNYLGSASTDYSICSAEGHEAIKAHYGSSFGALPEDFVKFSSVVFWGSEASISFIHGWKILKDKYKVTIDVRKS

SEQ ID NO: 25644 - protein, 85 aa, unidentified
  REGION 1..85: note = Description of Unknown:cds_NZ_WFIY01000004.1_cds_WP_155863716.1_1579 target sequence
ETAKRSDKYYIIKPGSDVYLAIGILKKLVEKGRIHNAELQDKVVSFNYSLIEEATSLKEKDIEDLADFYFNEKPLTIIGFALGRS

SEQ ID NO: 25645 - protein, 85 aa, unidentified
  REGION 1..85: note = Description of Unknown:cds_NZ_WFIY01000004.1_cds_WP_155863716.1_1579 target sequence
LNGGYAIGVISLIPGLLNIENGFFYSNSQGWGIDFDYLRGTHLYKPRKIISMGEVGDRINEFKIIFVWNSNPLHSLPGGDKIIEA

SEQ ID NO: 25646 - protein, 85 aa, unidentified
  REGION 1..85: note = Description of Unknown:cds_NZ_WFIY01000004.1_cds_WP_155863716.1_1579 target sequence
VNDGRVFLVVHDPFWSETAKLANLVFPGLTFLEKEDVVYSYWHNYLVYNEPIINNSLGISEVNLMHKIARELKISEDFIFEDPWK

SEQ ID NO: 25647 - protein, 85 aa, unidentified
  REGION 1..85: note = Description of Unknown:cds_NZ_WFIY01000004.1_cds_WP_155863716.1_1579 target sequence
AVEVSLRNTGISVEELKRRKVVKISPKVTRKFSIEPFPKPDNLEFPQGEFLVYSSHPNYTNSQFKEIYGERKPIVFNSKFEGEGI

SEQ ID NO: 25648 - protein, 84 aa, unidentified
  REGION 1..84: note = Description of Unknown:cds_NZ_WFIY01000004.1_cds_WP_155863716.1_1579 target sequence
PIVFNSKFEGEGILYSEKGQVRVIFKKSEDLPSGVYFLFKSSLFDLDGKPINSIINGKKGKFGGTPLLNIKVQAKPVKLFTLNF

SEQ ID NO: 25649 - protein, 85 aa, unidentified
  REGION 1..85: note = Description of Unknown:cds_NZ_WFIY01000004.1_cds_WP_155863716.1_1579 target sequence
FTCSRGIADLKRNSINRIKSAYYEGKEITVEEGIRILAKKIREIKPEEILHIDYDGNQGLLTWYYPARLWNYLGSASTDYSICSA

SEQ ID NO: 25650 - protein, 85 aa, unidentified
  REGION 1..85: note = Description of Unknown:cds_NZ_WFIY01000004.1_cds_WP_155863716.1_1579 target sequence
EGHEAIKAHYGSSFGALPEDFVKFSSVVFWGSEASISFIHGWKILKDKYKVTIDVRKSETAKRSDKYYIIKPGSDVYLAIGILKK

SEQ ID NO: 25651 - protein, 85 aa, unidentified
  REGION 1..85: note = Description of Unknown:cds_NZ_WFIY01000004.1_cds_WP_155863716.1_1579 target sequence
LVEKGRIHNAELQDKVVSFNYSLIEEATSLKEKDIEDLADFYFNEKPLTIIGFALGRSLNGGYAIGVISLIPGLLNIENGFFYSN

SEQ ID NO: 25652 - protein, 85 aa, unidentified
  REGION 1..85: note = Description of Unknown:cds_NZ_WFIY01000004.1_cds_WP_155863716.1_1579 target sequence
SQGWGIDFDYLRGTHLYKPRKIISMGEVGDRINEFKIIFVWNSNPLHSLPGGDKIIEAVNDGRVFLVVHDPFWSETAKLANLVFP

SEQ ID NO: 25653 - protein, 85 aa, unidentified
  REGION 1..85: note = Description of Unknown:cds_NZ_WFIY01000004.1_cds_WP_155863716.1_1579 target sequence
GLTFLEKEDVVYSYWHNYLVYNEPIINNSLGISEVNLMHKIARELKISEDFIFEDPWKAVEVSLRNTGISVEELKRRKVVKISPK

SEQ ID NO: 25654 - protein, 85 aa, unidentified
  REGION 1..85: note = Description of Unknown:cds_NZ_WFIY01000004.1_cds_WP_155863716.1_1579 target sequence
VTRKFSIEPFPKPDNLEFPQGEFLVYSSHPNYTNSQFKEIYGERKPIVFNSKFEGEGILYSEKGQVRVIFKKSEDLPSGVYFLFK

SEQ ID NO: 25655 - protein, 85 aa, unidentified
  REGION 1..85: note = Description of Unknown:cds_NZ_WFIY01000004.1_cds_WP_155863816.1_1708 target sequence
KVRVYNIGGIVSPLEVELIKGVNIYKAPNAYGKTSLAKALVSLLTSAIKPDDLLNVFANSGYVELDLDGRTYYRRIKRVKNKIME

SEQ ID NO: 25656 - protein, 85 aa, unidentified
  REGION 1..85: note = Description of Unknown:cds_NZ_WFIY01000004.1_cds_WP_155863816.1_1708 target sequence
SSKLLLDDDRALLLSYFSPENKLLNQIMSGEENVEWFISATSKINELKSKKEEMETKLHNLQAEIDDLNRKYKEAIELQTKIKQI

SEQ ID NO: 25657 - protein, 85 aa, unidentified
  REGION 1..85: note = Description of Unknown:cds_NZ_WFIY01000004.1_cds_WP_155863816.1_1708 target sequence
EDEIARLEKEKESDKVLNKTTQTISITNENKLRDIKEKIEVKKRELEDLQNRIARLDQEIKNKESLASPEIRQSYERQLQEINAQ

SEQ ID NO: 25658 - protein, 85 aa, unidentified
  REGION 1..85: note = Description of Unknown:cds_NZ_WFIY01000004.1_cds_WP_155863816.1_1708 target sequence
LQKITAQRNEAEIEIRLLEKVLDQIRESEKQHLTTCYVCGSHVDPSIWKVRIDVISKELQEKNSLYSGIKKEADELLSKKAEIEK

SEQ ID NO: 25659 - protein, 85 aa, unidentified
  REGION 1..85: note = Description of Unknown:cds_NZ_WFIY01000004.1_cds_WP_155863816.1_1708 target sequence
KLKELDQISSEISKLKISRSELENRIESVKSTIDDLERQRREMEERFNRNAELYRVYDINDSINRRIEELKKKKDEYEYELAING

SEQ ID NO: 25660 - protein, 85 aa, unidentified
  REGION 1..85: note = Description of Unknown:cds_NZ_WFIY01000004.1_cds_WP_155863816.1_1708 target sequence
VPSTILNKISEKQKELQEVQKMVDDLEKEYMRRLTIAREEFVKIANYLLKELEFDLRAEIDENDRLVVKRNDATLELRKLSSSER

SEQ ID NO: 25661 - protein, 84 aa, unidentified
  REGION 1..84: note = Description of Unknown:cds_NZ_WFIY01000004.1_cds_WP_155863816.1_1708 target sequence
ATLELRKLSSSERTTLALILVLTALKSYFKTPFFIVDESFMTFDQRRFDKIVKYLNSVTDYVIITKSDENIELLKETMEPLASS

SEQ ID NO: 25662 - protein, 85 aa, unidentified
  REGION 1..85: note = Description of Unknown:cds_NZ_WFIY01000004.1_cds_WP_155863816.1_1708 target sequence
PNAYGKTSLAKALVSLLTSAIKPDDLLNVFANSGYVELDLDGRTYYRRIKRVKNKIMESSKLLLDDDRALLLSYFSPENKLLNQI

SEQ ID NO: 25663 - protein, 85 aa, unidentified
  REGION 1..85: note = Description of Unknown:cds_NZ_WFIY01000004.1_cds_WP_155863816.1_1708 target sequence
MSGEENVEWFISATSKINELKSKKEEMETKLHNLQAEIDDLNRKYKEAIELQTKIKQIEDEIARLEKEKESDKVLNKTTQTISIT

SEQ ID NO: 25664 - protein, 85 aa, unidentified
  REGION 1..85: note = Description of Unknown:cds_NZ_WFIY01000004.1_cds_WP_155863816.1_1708 target sequence
NENKLRDIKEKIEVKKRELEDLQNRIARLDQEIKNKESLASPEIRQSYERQLQEINAQLQKITAQRNEAEIEIRLLEKVLDQIRE

SEQ ID NO: 25665 - protein, 85 aa, unidentified
  REGION 1..85: note = Description of Unknown:cds_NZ_WFIY01000004.1_cds_WP_155863816.1_1708 target sequence
SEKQHLTTCYVCGSHVDPSIWKVRIDVISKELQEKNSLYSGIKKEADELLSKKAEIEKKLKELDQISSEISKLKISRSELENRIE

SEQ ID NO: 25666 - protein, 85 aa, unidentified
  REGION 1..85: note = Description of Unknown:cds_NZ_WFIY01000004.1_cds_WP_155863816.1_1708 target sequence
SVKSTIDDLERQRREMEERFNRNAELYRVYDINDSINRRIEELKKKKDEYEYELAINGVPSTILNKISEKQKELQEVQKMVDDLE

SEQ ID NO: 25667 - protein, 85 aa, unidentified
  REGION 1..85: note = Description of Unknown:cds_NZ_WFIY01000004.1_cds_WP_155863816.1_1708 target sequence
KEYMRRLTIAREEFVKIANYLLKELEFDLRAEIDENDRLVVKRNDATLELRKLSSSERTTLALILVLTALKSYFKTPFFIVDESF

SEQ ID NO: 25668 - protein, 85 aa, unidentified
  REGION 1..85: note = Description of Unknown:cds_NC_009489.1_cds_YP_001249277.1_8 target sequence
ASLQSEPGSQKPHYQSDDQLVKRTWRSFFRFSVLVVTITSLALSIITLIGVNRISTAKQISNAFAAIQANILSSIPDIRPINSLL

SEQ ID NO: 25669 - protein, 85 aa, unidentified
  REGION 1..85: note = Description of Unknown:cds_NC_009489.1_cds_YP_001249277.1_8 target sequence
NQLVYTSSVTLPLRISSLESNVLAAIQEACTYRDSQSSCSATMSVMNDQRYIEGIQVYSGSFLDLQKHTLSPPIAFPSFIPTSTT

SEQ ID NO: 25670 - protein, 85 aa, unidentified
  REGION 1..85: note = Description of Unknown:cds_NC_009489.1_cds_YP_001249277.1_8 target sequence
TVGCTRIPSFSLTKTHWCYTHNYIKTGCRDATQSNQYIALGTIYTDPDGTPGFSTSRSQYLNDGVNRKSCSISAVPMGCALYCFI

SEQ ID NO: 25671 - protein, 85 aa, unidentified
  REGION 1..85: note = Description of Unknown:cds_NC_009489.1_cds_YP_001249277.1_8 target sequence
SVKEEVDYYKGTVPPAQTLILFFFNGTVHEHRIVPSSMNSEWVMLSPGVGSGVFYNNYIIFPLYGGMTKDKAEKRGELTRFFTPK

SEQ ID NO: 25672 - protein, 85 aa, unidentified
  REGION 1..85: note = Description of Unknown:cds_NC_009489.1_cds_YP_001249277.1_8 target sequence
NSRSLCKMNDSVFSNAAQSAYYPPYFSSRWIRSGLLACNWNQIITTNCEILTFSNQVMMMGAEGRLILINDDLFYYQRSTSWWPR

SEQ ID NO: 25673 - protein, 85 aa, unidentified
  REGION 1..85: note = Description of Unknown:cds_NC_009489.1_cds_YP_001249277.1_8 target sequence
PLVYKLDIELNYPDSHIQRVDQVEVTFPTRPGWGGCVGNNFCPMICVSGVYQDVWPVTNPVNTTDSRTLWVGGTLLSNTTRENPA

SEQ ID NO: 25674 - protein, 84 aa, unidentified
  REGION 1..84: note = Description of Unknown:cds_NC_009489.1_cds_YP_001249277.1_8 target sequence
GTLLSNTTRENPASVVTSGGSISQTVSWFNQTVPGAYSTTTCFNDQVQGRIFCLIIFEVGGGLLGEYQIVPFLKELKYQGAVHA

SEQ ID NO: 25675 - protein, 85 aa, unidentified
  REGION 1..85: note = Description of Unknown:cds_NC_009489.1_cds_YP_001249277.1_8 target sequence
FFRFSVLVVTITSLALSIITLIGVNRISTAKQISNAFAAIQANILSSIPDIRPINSLLNQLVYTSSVTLPLRISSLESNVLAAIQ

SEQ ID NO: 25676 - protein, 85 aa, unidentified
  REGION 1..85: note = Description of Unknown:cds_NC_009489.1_cds_YP_001249277.1_8 target sequence
EACTYRDSQSSCSATMSVMNDQRYIEGIQVYSGSFLDLQKHTLSPPIAFPSFIPTSTTTVGCTRIPSFSLTKTHWCYTHNYIKTG

SEQ ID NO: 25677 - protein, 85 aa, unidentified
  REGION 1..85: note = Description of Unknown:cds_NC_009489.1_cds_YP_001249277.1_8 target sequence
CRDATQSNQYIALGTIYTDPDGTPGFSTSRSQYLNDGVNRKSCSISAVPMGCALYCFISVKEEVDYYKGTVPPAQTLILFFFNGT

SEQ ID NO: 25678 - protein, 85 aa, unidentified
  REGION 1..85: note = Description of Unknown:cds_NC_009489.1_cds_YP_001249277.1_8 target sequence
VHEHRIVPSSMNSEWVMLSPGVGSGVFYNNYIIFPLYGGMTKDKAEKRGELTRFFTPKNSRSLCKMNDSVFSNAAQSAYYPPYFS

SEQ ID NO: 25679 - protein, 85 aa, unidentified
  REGION 1..85: note = Description of Unknown:cds_NC_009489.1_cds_YP_001249277.1_8 target sequence
SRWIRSGLLACNWNQIITTNCEILTFSNQVMMMGAEGRLILINDDLFYYQRSTSWWPRPLVYKLDIELNYPDSHIQRVDQVEVTF

SEQ ID NO: 25680 - protein, 85 aa, unidentified
  REGION 1..85: note = Description of Unknown:cds_NC_009489.1_cds_YP_001249277.1_8 target sequence
PTRPGWGGCVGNNFCPMICVSGVYQDVWPVTNPVNTTDSRTLWVGGTLLSNTTRENPASVVTSGGSISQTVSWFNQTVPGAYSTT

SEQ ID NO: 25681 - protein, 85 aa, unidentified
  REGION 1..85: note = Description of Unknown:cds_NC_025350.1_cds_YP_009094079.1_6 target sequence
HNRTQSVSSIDTSSDVYLPRRKKAVTKFTFKKIFRVLILTLLLSIIIIIAVIFPKIDHIRETCDNSQILETITNQNSEIKNLINS

SEQ ID NO: 25682 - protein, 85 aa, unidentified
  REGION 1..85: note = Description of Unknown:cds_NC_025350.1_cds_YP_009094079.1_6 target sequence
AITNLNVLLTSTTVDLPIKLNNFGKSIVDQVTMMVRQCNAVCRGPGDRPTQNIELFKGLYHTSPPSNTSTKLSMITEASNPDDIV

SEQ ID NO: 25683 - protein, 85 aa, unidentified
  REGION 1..85: note = Description of Unknown:cds_NC_025350.1_cds_YP_009094079.1_6 target sequence
PRPGKLLGCTRFPSFSVHYGLWCYGHMASTGNCSGSSPSVQIIRIGSIGTNKDGTPKYVIIASASLPETTRLYHCSVTMTSIGCY

SEQ ID NO: 25684 - protein, 85 aa, unidentified
  REGION 1..85: note = Description of Unknown:cds_NC_025350.1_cds_YP_009094079.1_6 target sequence
ILCTTPSVSETDDYSTMGIEKMSISFLSLDGYLTQLGQPTGLDNQNLYALYPGPGSGVIFRDFLIFPMMGGIRLMDAQKMLNRNI

SEQ ID NO: 25685 - protein, 85 aa, unidentified
  REGION 1..85: note = Description of Unknown:cds_NC_025350.1_cds_YP_009094079.1_6 target sequence
TYRGFPPSETCTESELKLKQEVANMLTSPYYGEVLVLNFLYVCSLLDNIPGDCSVQLIPPDNMTLGAESRLYVLNGSLIMYKRGS

SEQ ID NO: 25686 - protein, 85 aa, unidentified
  REGION 1..85: note = Description of Unknown:cds_NC_025350.1_cds_YP_009094079.1_6 target sequence
SWWPYTELYQINYRVNNRAFRVRESVRINTTSTSRPGVQGCNLEKVCPKVCVSGIYQSPGIISAPVNPTRQEEGLLYFLVWTSSM

SEQ ID NO: 25687 - protein, 84 aa, unidentified
  REGION 1..84: note = Description of Unknown:cds_NC_025350.1_cds_YP_009094079.1_6 target sequence
EGLLYFLVWTSSMSSRTGPLSSLCDHSTCRITYPIGDDTIFIGYTDSSCFMSSIKEGIYCIAFLELDNQPYSMMAIRSLSYIIN

SEQ ID NO: 25688 - protein, 85 aa, unidentified
  REGION 1..85: note = Description of Unknown:cds_NC_025350.1_cds_YP_009094079.1_6 target sequence
FTFKKIFRVLILTLLLSIIIIIAVIFPKIDHIRETCDNSQILETITNQNSEIKNLINSAITNLNVLLTSTTVDLPIKLNNFGKSI

SEQ ID NO: 25689 - protein, 85 aa, unidentified
  REGION 1..85: note = Description of Unknown:cds_NC_025350.1_cds_YP_009094079.1_6 target sequence
VDQVTMMVRQCNAVCRGPGDRPTQNIELFKGLYHTSPPSNTSTKLSMITEASNPDDIVPRPGKLLGCTRFPSFSVHYGLWCYGHM

SEQ ID NO: 25690 - protein, 85 aa, unidentified
  REGION 1..85: note = Description of Unknown:cds_NC_025350.1_cds_YP_009094079.1_6 target sequence
ASTGNCSGSSPSVQIIRIGSIGTNKDGTPKYVIIASASLPETTRLYHCSVTMTSIGCYILCTTPSVSETDDYSTMGIEKMSISFL

SEQ ID NO: 25691 - protein, 85 aa, unidentified
  REGION 1..85: note = Description of Unknown:cds_NC_025350.1_cds_YP_009094079.1_6 target sequence
SLDGYLTQLGQPTGLDNQNLYALYPGPGSGVIFRDFLIFPMMGGIRLMDAQKMLNRNITYRGFPPSETCTESELKLKQEVANMLT

SEQ ID NO: 25692 - protein, 85 aa, unidentified
  REGION 1..85: note = Description of Unknown:cds_NC_025350.1_cds_YP_009094079.1_6 target sequence
SPYYGEVLVLNFLYVCSLLDNIPGDCSVQLIPPDNMTLGAESRLYVLNGSLIMYKRGSSWWPYTELYQINYRVNNRAFRVRESVR

SEQ ID NO: 25693 - protein, 85 aa, unidentified
  REGION 1..85: note = Description of Unknown:cds_NC_025350.1_cds_YP_009094079.1_6 target sequence
INTTSTSRPGVQGCNLEKVCPKVCVSGIYQSPGIISAPVNPTRQEEGLLYFLVWTSSMSSRTGPLSSLCDHSTCRITYPIGDDTI

SEQ ID NO: 25694 - protein, 85 aa, unidentified
  REGION 1..85: note = Description of Unknown:cds_NC_029316.1_cds_YP_009230322.1_69 target sequence
VTEVYLLNLYPGTITVTVTDKTNGNSETYTLSEYQTIDITNLISSCYDCLCIKVNGNSRGWTLPLSLFPSRAITITPLASPDGSP

SEQ ID NO: 25695 - protein, 85 aa, unidentified
  REGION 1..85: note = Description of Unknown:cds_NC_029316.1_cds_YP_009230322.1_69 target sequence
QISIWSTSPEVALRDWLTGVIAGNIPTYLSDAYQEISSLISLYKSGSSISTAKLKSILQEIYDCLQNAINFQKQAGVNFEAISAW

SEQ ID NO: 25696 - protein, 85 aa, unidentified
  REGION 1..85: note = Description of Unknown:cds_NC_029316.1_cds_YP_009230322.1_69 target sequence
SQIYQNLTTICEELNNGKLTASSLQSLRLPSYSCNLAQACAKEYCNNLNNFISSLSTTQSSTSSTNTTPTSSTPSPTSTTQPTSS

SEQ ID NO: 25697 - protein, 85 aa, unidentified
  REGION 1..85: note = Description of Unknown:cds_NC_029316.1_cds_YP_009230322.1_69 target sequence
SSTQSSTSSTSTTPSSTTSSSSSSTPSSSTTKTQPTSSSSTQSSTTQSTTPSSPSSTPSPSTTSSSSTTPSSSTTTPTSSTPSPT

SEQ ID NO: 25698 - protein, 85 aa, unidentified
  REGION 1..85: note = Description of Unknown:cds_NC_029316.1_cds_YP_009230322.1_69 target sequence
STTQPTSSSSTQSSTSSTSTTPSSTTSSSSSSTPSSSTTPSSPTSPTTTQQTSSSTTSTTPLQLLQEATPSSSTQSSTSSTSTTP

SEQ ID NO: 25699 - protein, 85 aa, unidentified
  REGION 1..85: note = Description of Unknown:cds_NC_029316.1_cds_YP_009230322.1_69 target sequence
SSSSTQSSTTQQTPSSPATPLQLLLENDYITFENEYPQYATLANVLQNTPGLTLSQKISTLKQQFSAYAQQAYQALLGGDKRSAK

SEQ ID NO: 25700 - protein, 84 aa, unidentified
  REGION 1..84: note = Description of Unknown:cds_NC_029316.1_cds_YP_009230322.1_69 target sequence
YQALLGGDKRSAKYYAKQANCILNALQQYSQLSGQDCLSELQQYIQELSNVNNVVYDTASQVQPLVLGTQPAPVRPAPNIEILQ

SEQ ID NO: 25701 - protein, 85 aa, unidentified
  REGION 1..85: note = Description of Unknown:cds_NC_029316.1_cds_YP_009230322.1_69 target sequence
TYTLSEYQTIDITNLISSCYDCLCIKVNGNSRGWTLPLSLFPSRAITITPLASPDGSPQISIWSTSPEVALRDWLTGVIAGNIPT

SEQ ID NO: 25702 - protein, 85 aa, unidentified
  REGION 1..85: note = Description of Unknown:cds_NC_029316.1_cds_YP_009230322.1_69 target sequence
YLSDAYQEISSLISLYKSGSSISTAKLKSILQEIYDCLQNAINFQKQAGVNFEAISAWSQIYQNLTTICEELNNGKLTASSLQSL

SEQ ID NO: 25703 - protein, 85 aa, unidentified
  REGION 1..85: note = Description of Unknown:cds_NC_029316.1_cds_YP_009230322.1_69 target sequence
RLPSYSCNLAQACAKEYCNNLNNFISSLSTTQSSTSSTNTTPTSSTPSPTSTTQPTSSSSTQSSTSSTSTTPSSTTSSSSSSTPS

SEQ ID NO: 25704 - protein, 85 aa, unidentified
  REGION 1..85: note = Description of Unknown:cds_NC_029316.1_cds_YP_009230322.1_69 target sequence
SSTTKTQPTSSSSTQSSTTQSTTPSSPSSTPSPSTTSSSSTTPSSSTTTPTSSTPSPTSTTQPTSSSSTQSSTSSTSTTPSSTTS

SEQ ID NO: 25705 - protein, 85 aa, unidentified
  REGION 1..85: note = Description of Unknown:cds_NC_029316.1_cds_YP_009230322.1_69 target sequence
SSSSSTPSSSTTPSSPTSPTTTQQTSSSTTSTTPLQLLQEATPSSSTQSSTSSTSTTPSSSSTQSSTTQQTPSSPATPLQLLLEN

SEQ ID NO: 25706 - protein, 85 aa, unidentified
  REGION 1..85: note = Description of Unknown:cds_NC_029316.1_cds_YP_009230322.1_69 target sequence
DYITFENEYPQYATLANVLQNTPGLTLSQKISTLKQQFSAYAQQAYQALLGGDKRSAKYYAKQANCILNALQQYSQLSGQDCLSE

SEQ ID NO: 25707 - protein, 85 aa, unidentified
  REGION 1..85: note = Description of Unknown:hvTR_P19893.2 target sequence
ESSAKRKMDPDNPDEGPSSKVPRPETPVTKATTFLQTMLRKEVNSQLSLGDPLFPELAEESLKTFEQVTEDCNENPEKDVLAELG

SEQ ID NO: 25708 - protein, 85 aa, unidentified
  REGION 1..85: note = Description of Unknown:hvTR_P19893.2 target sequence
DILAQAVNHAGIDSSSTGPTLTTHSCSVSSAPLNKPTPTSVAVTNTPLPGASATPELSPRKKPRKTTRPFKVIIKPPVPPAPIML

SEQ ID NO: 25709 - protein, 85 aa, unidentified
  REGION 1..85: note = Description of Unknown:hvTR_P19893.2 target sequence
PLIKQEDIKPEPDFTIQYRNKIIDTAGCIVISDSEEEQGEEVETRGATASSPSTGSGTPRVTSPTHPLSQMNHPPLPDPLGRPDE

SEQ ID NO: 25710 - protein, 85 aa, unidentified
  REGION 1..85: note = Description of Unknown:hvTR_P19893.2 target sequence
DSSSSSSSSCSSASDSESESEEMKCSSGGGASVTSSHHGRGGFGGAASSSLLSCGHQSSGGASTGPRKKKSKRISELDNEKVRNI

SEQ ID NO: 25711 - protein, 85 aa, unidentified
  REGION 1..85: note = Description of Unknown:hvTR_P19893.2 target sequence
MKDKNTPFCTPNVQTRRGRVKIDEVSRMFRNTNRSLEYKNLPFTIPSMHQVLDEAIKACKTMQVNNKGIQIIYTRNHEVKSEVDA

SEQ ID NO: 25712 - protein, 85 aa, unidentified
  REGION 1..85: note = Description of Unknown:hvTR_P19893.2 target sequence
VRCRLGTMCNLALSTPFLMEHTMPVTHPPEVAQRTADACNEGVKAAWSLKELHTHQLCPRSSDYRNMIIHAATPVDLLGALNLCL

SEQ ID NO: 25713 - protein, 84 aa, unidentified
  REGION 1..84: note = Description of Unknown:hvTR_P19893.2 target sequence
AATPVDLLGALNLCLPLMQKFPKQVMVRIFSTNQGGFMLPIYETAAKAYAVGQFEQPTETPPEDLDTLSLAIEAAIQDLRNKSQ

SEQ ID NO: 25714 - protein, 85 aa, unidentified
  REGION 1..85: note = Description of Unknown:hvTR_P19893.2 target sequence
VTKATTFLQTMLRKEVNSQLSLGDPLFPELAEESLKTFEQVTEDCNENPEKDVLAELGDILAQAVNHAGIDSSSTGPTLTTHSCS

SEQ ID NO: 25715 - protein, 85 aa, unidentified
  REGION 1..85: note = Description of Unknown:hvTR_P19893.2 target sequence
VSSAPLNKPTPTSVAVTNTPLPGASATPELSPRKKPRKTTRPFKVIIKPPVPPAPIMLPLIKQEDIKPEPDFTIQYRNKIIDTAG

SEQ ID NO: 25716 - protein, 85 aa, unidentified
  REGION 1..85: note = Description of Unknown:hvTR_P19893.2 target sequence
CIVISDSEEEQGEEVETRGATASSPSTGSGTPRVTSPTHPLSQMNHPPLPDPLGRPDEDSSSSSSSSCSSASDSESESEEMKCSS

SEQ ID NO: 25717 - protein, 85 aa, unidentified
  REGION 1..85: note = Description of Unknown:hvTR_P19893.2 target sequence
GGGASVTSSHHGRGGFGGAASSSLLSCGHQSSGGASTGPRKKKSKRISELDNEKVRNIMKDKNTPFCTPNVQTRRGRVKIDEVSR

SEQ ID NO: 25718 - protein, 85 aa, unidentified
  REGION 1..85: note = Description of Unknown:hvTR_P19893.2 target sequence
MFRNTNRSLEYKNLPFTIPSMHQVLDEAIKACKTMQVNNKGIQIIYTRNHEVKSEVDAVRCRLGTMCNLALSTPFLMEHTMPVTH

SEQ ID NO: 25719 - protein, 85 aa, unidentified
  REGION 1..85: note = Description of Unknown:hvTR_P19893.2 target sequence
PPEVAQRTADACNEGVKAAWSLKELHTHQLCPRSSDYRNMIIHAATPVDLLGALNLCLPLMQKFPKQVMVRIFSTNQGGFMLPIY

SEQ ID NO: 25720 - protein, 85 aa, unidentified
  REGION 1..85: note = Description of Unknown:cds_NC_025410.1_cds_YP_009094497.1_6 target sequence
DSRSDSFTDIPLDNRIERTVTSKKTWRSIFRVTAIILLIICVVVSSISLNQHNDAPLNGAGNQATSGFMDAIKSLEKLMSQTINE

SEQ ID NO: 25721 - protein, 85 aa, unidentified
  REGION 1..85: note = Description of Unknown:cds_NC_025410.1_cds_YP_009094497.1_6 target sequence
LNQVVMTTSVQLPNRITKFGQDILDQVTQMVRQCNAVCRGPGVGPSIQNYVIQGHAPTVSFDPISAEYQKFVFGITEKTLITAYH

SEQ ID NO: 25722 - protein, 85 aa, unidentified
  REGION 1..85: note = Description of Unknown:cds_NC_025410.1_cds_YP_009094497.1_6 target sequence
NPWECLRFPSQHLFDTTWCVSYQILTQNCSDHGPRITVIQLGEIMIANNLSTVFRDPVIKYIRHHIWLRSCSVVAYYSQCTIFCT

SEQ ID NO: 25723 - protein, 85 aa, unidentified
  REGION 1..85: note = Description of Unknown:cds_NC_025410.1_cds_YP_009094497.1_6 target sequence
STNKSEPSDYADTGYEQLFLATLQSDGTFTEHSMHGVNIVHQWNAIYGGVGNGVIIGRNMLIPLYGGINYYDHNTTIVQTVDLRP

SEQ ID NO: 25724 - protein, 85 aa, unidentified
  REGION 1..85: note = Description of Unknown:cds_NC_025410.1_cds_YP_009094497.1_6 target sequence
YPIPDSCSQTDNYQTNYLPSMFTNSYYGTNLVVSGYLSCRLMAGTPTSCSIRVIPIENMTMGSEGQFYLINNQLYYYKRSSNWIR

SEQ ID NO: 25725 - protein, 85 aa, unidentified
  REGION 1..85: note = Description of Unknown:cds_NC_025410.1_cds_YP_009094497.1_6 target sequence
DTQVYLLSYSDKGNIIEITSAERYIFKSVTSPDEGDCVTNHGCPSNCIGGLFQAPWILNDFKLCGSNITCPKIVTVWADQPDKRS

SEQ ID NO: 25726 - protein, 84 aa, unidentified
  REGION 1..84: note = Description of Unknown:cds_NC_025410.1_cds_YP_009094497.1_6 target sequence
PKIVTVWADQPDKRSNPMLSIAETDKLLLHKSYINYHTAVGYSTVLCFDSPKLNLKTCVVLQELMSDDKLLIRISYSIVSIMVE

SEQ ID NO: 25727 - protein, 85 aa, unidentified
  REGION 1..85: note = Description of Unknown:cds_NC_025410.1_cds_YP_009094497.1_6 target sequence
SIFRVTAIILLIICVVVSSISLNQHNDAPLNGAGNQATSGFMDAIKSLEKLMSQTINELNQVVMTTSVQLPNRITKFGQDILDQV

SEQ ID NO: 25728 - protein, 85 aa, unidentified
  REGION 1..85: note = Description of Unknown:cds_NC_025410.1_cds_YP_009094497.1_6 target sequence
TQMVRQCNAVCRGPGVGPSIQNYVIQGHAPTVSFDPISAEYQKFVFGITEKTLITAYHNPWECLRFPSQHLFDTTWCVSYQILTQ

SEQ ID NO: 25729 - protein, 85 aa, unidentified
  REGION 1..85: note = Description of Unknown:cds_NC_025410.1_cds_YP_009094497.1_6 target sequence
NCSDHGPRITVIQLGEIMIANNLSTVFRDPVIKYIRHHIWLRSCSVVAYYSQCTIFCTSTNKSEPSDYADTGYEQLFLATLQSDG

SEQ ID NO: 25730 - protein, 85 aa, unidentified
  REGION 1..85: note = Description of Unknown:cds_NC_025410.1_cds_YP_009094497.1_6 target sequence
TFTEHSMHGVNIVHQWNAIYGGVGNGVIIGRNMLIPLYGGINYYDHNTTIVQTVDLRPYPIPDSCSQTDNYQTNYLPSMFTNSYY

SEQ ID NO: 25731 - protein, 85 aa, unidentified
  REGION 1..85: note = Description of Unknown:cds_NC_025410.1_cds_YP_009094497.1_6 target sequence
GTNLVVSGYLSCRLMAGTPTSCSIRVIPIENMTMGSEGQFYLINNQLYYYKRSSNWIRDTQVYLLSYSDKGNIIEITSAERYIFK

SEQ ID NO: 25732 - protein, 85 aa, unidentified
  REGION 1..85: note = Description of Unknown:cds_NC_025410.1_cds_YP_009094497.1_6 target sequence
SVTSPDEGDCVTNHGCPSNCIGGLFQAPWILNDFKLCGSNITCPKIVTVWADQPDKRSNPMLSIAETDKLLLHKSYINYHTAVGY

SEQ ID NO: 25733 - protein, 85 aa, unidentified
  REGION 1..85: note = Description of Unknown:cds_NZ_WFIY01000004.1_cds_WP_155864017.1_1946 target sequence
VKFSVGKLPYFEKWIILGTLIGIAVGLFSIAFTILLDFFQLLFIHIILHVSYPKPLGEGGNLRIPPFHPNFLIPAILGLGGLIAG

SEQ ID NO: 25734 - protein, 85 aa, unidentified
  REGION 1..85: note = Description of Unknown:cds_NZ_WFIY01000004.1_cds_WP_155864017.1_1946 target sequence
IIIYRISPETAGGGVDFAITVYHKLQGKMRKRVALVELFTSTIILGSGGSAGDLGPMGLIGGSLASTIAQLFDLTPEDMRRAVAV

SEQ ID NO: 25735 - protein, 85 aa, unidentified
  REGION 1..85: note = Description of Unknown:cds_NZ_WFIY01000004.1_cds_WP_155864017.1_1946 target sequence
GIGSGVGAIFKAPIGGALLSAEILYRRDLEPEVILPSMISSAIAYSIYGSYVGFQPIFGLYPFQFSPLRLPFYALLGVIIGLFSI

SEQ ID NO: 25736 - protein, 85 aa, unidentified
  REGION 1..85: note = Description of Unknown:cds_NZ_WFIY01000004.1_cds_WP_155864017.1_1946 target sequence
LFVKIYSTITLAFKKMKIRDEIKPAIGGVLAGLLILIFPEVMGTGYGWDNLLEFGVIPFSSLPCIFLLLVGLVKMLASSLTIGSG

SEQ ID NO: 25737 - protein, 85 aa, unidentified
  REGION 1..85: note = Description of Unknown:cds_NZ_WFIY01000004.1_cds_WP_155864017.1_1946 target sequence
GSGGIEAPAFEIGAFIGASYGLILHDLFPKVVPVIAPFVVIGMLTMFGASAKAPLSVMIIITEMTSSLQLLPGEMIAVALAYVIS

SEQ ID NO: 25738 - protein, 85 aa, unidentified
  REGION 1..85: note = Description of Unknown:cds_NZ_WFIY01000004.1_cds_WP_155864017.1_1946 target sequence
GKYTLYPAQYPTRRESPAHRSEYEVPILENIKISEVPFTELRINENEDVMSARKLMEEEGYFSLPVVDNEGNFVGAVFYKDVANK

SEQ ID NO: 25739 - protein, 84 aa, unidentified
  REGION 1..84: note = Description of Unknown:cds_NZ_WFIY01000004.1_cds_WP_155864017.1_1946 target sequence
NEGNFVGAVFYKDVANKKGKVIEYTIRGIPYVTPNSNIENAWEIITRTKSRWVAVVEKGKLIGVVTLEDLFNVYEKELKKVHKD

SEQ ID NO: 25740 - protein, 85 aa, unidentified
  REGION 1..85: note = Description of Unknown:cds_NZ_WFIY01000004.1_cds_WP_155864017.1_1946 target sequence
FSIAFTILLDFFQLLFIHIILHVSYPKPLGEGGNLRIPPFHPNFLIPAILGLGGLIAGIIIYRISPETAGGGVDFAITVYHKLQG

SEQ ID NO: 25741 - protein, 85 aa, unidentified
  REGION 1..85: note = Description of Unknown:cds_NZ_WFIY01000004.1_cds_WP_155864017.1_1946 target sequence
KMRKRVALVELFTSTIILGSGGSAGDLGPMGLIGGSLASTIAQLFDLTPEDMRRAVAVGIGSGVGAIFKAPIGGALLSAEILYRR

SEQ ID NO: 25742 - protein, 85 aa, unidentified
  REGION 1..85: note = Description of Unknown:cds_NZ_WFIY01000004.1_cds_WP_155864017.1_1946 target sequence
DLEPEVILPSMISSAIAYSIYGSYVGFQPIFGLYPFQFSPLRLPFYALLGVIIGLFSILFVKIYSTITLAFKKMKIRDEIKPAIG

SEQ ID NO: 25743 - protein, 85 aa, unidentified
  REGION 1..85: note = Description of Unknown:cds_NZ_WFIY01000004.1_cds_WP_155864017.1_1946 target sequence
GVLAGLLILIFPEVMGTGYGWDNLLEFGVIPFSSLPCIFLLLVGLVKMLASSLTIGSGGSGGIEAPAFEIGAFIGASYGLILHDL

SEQ ID NO: 25744 - protein, 85 aa, unidentified
  REGION 1..85: note = Description of Unknown:cds_NZ_WFIY01000004.1_cds_WP_155864017.1_1946 target sequence
FPKVVPVIAPFVVIGMLTMFGASAKAPLSVMIIITEMTSSLQLLPGEMIAVALAYVISGKYTLYPAQYPTRRESPAHRSEYEVPI

SEQ ID NO: 25745 - protein, 85 aa, unidentified
  REGION 1..85: note = Description of Unknown:cds_NZ_WFIY01000004.1_cds_WP_155864017.1_1946 target sequence
LENIKISEVPFTELRINENEDVMSARKLMEEEGYFSLPVVDNEGNFVGAVFYKDVANKKGKVIEYTIRGIPYVTPNSNIENAWEI

SEQ ID NO: 25746 - protein, 85 aa, unidentified
  REGION 1..85: note = Description of Unknown:cds_NZ_WFIY01000004.1_cds_WP_155863224.1_1170 target sequence
DEFEYLEDLNDEKTRSFIEKENRKTEEKLGKRAKELYPRLLEIYNEPYILGMFAYDENEPVILLYGEKNQVLLGNKVIYISPKDY

SEQ ID NO: 25747 - protein, 85 aa, unidentified
  REGION 1..85: note = Description of Unknown:cds_NZ_WFIY01000004.1_cds_WP_155863224.1_1170 target sequence
VASSVWKVYNSKEIGVSVEKKGSDKITTFLISPDGKTTELGEMVESPFYFKRELCYIKSYRYSPPPDGGEYPADRVFCGNEIVYG

SEQ ID NO: 25748 - protein, 85 aa, unidentified
  REGION 1..85: note = Description of Unknown:cds_NZ_WFIY01000004.1_cds_WP_155863224.1_1170 target sequence
KDLKPGEFVSIRTFGDFITLIRSKGWRYSELYAGEGFDSLKKIDEGEVIDVIDYIQGNLIYQKNDSVHLDKKKIIKSDYPILGVS

SEQ ID NO: 25749 - protein, 85 aa, unidentified
  REGION 1..85: note = Description of Unknown:cds_NZ_WFIY01000004.1_cds_WP_155863224.1_1170 target sequence
SLKETLAVEVIKDYRTPLLFYSINGDKVGEEIHDNIQFMDSEGHSLFMVETSFNYKFKVSRRVKEKSETIMQYGNYDVKVTDIYV

SEQ ID NO: 25750 - protein, 85 aa, unidentified
  REGION 1..85: note = Description of Unknown:cds_NZ_WFIY01000004.1_cds_WP_155863224.1_1170 target sequence
KGDVLLHGFLLSKSNNPKGVIVYGYGGFRISLLPSFPMFTRILLDEGYSVLITNLRGGYENGEEWHKAGMLLNKKNVFKDFSEFL

SEQ ID NO: 25751 - protein, 85 aa, unidentified
  REGION 1..85: note = Description of Unknown:cds_NZ_WFIY01000004.1_cds_WP_155863224.1_1170 target sequence
RLVKSLGGKTIAMGGSNGGLLVGATENEYPELIDCAVIGHPVLDMLRYDKLYVGKYWVEEYGDPNDPKYRDYLLSYSPYHNLKKE

SEQ ID NO: 25752 - protein, 84 aa, unidentified
  REGION 1..84: note = Description of Unknown:cds_NZ_WFIY01000004.1_cds_WP_155863224.1_1170 target sequence
KYRDYLLSYSPYHNLKKELPKTFVYTGINDDRVHPAHALKYAAKSEKLGNDVMLFVNDSGHAIADPESEAREYSYVIAFIEECK

SEQ ID NO: 25753 - protein, 85 aa, unidentified
  REGION 1..85: note = Description of Unknown:cds_NZ_WFIY01000004.1_cds_WP_155863224.1_1170 target sequence
KLGKRAKELYPRLLEIYNEPYILGMFAYDENEPVILLYGEKNQVLLGNKVIYISPKDYVASSVWKVYNSKEIGVSVEKKGSDKIT

SEQ ID NO: 25754 - protein, 85 aa, unidentified
  REGION 1..85: note = Description of Unknown:cds_NZ_WFIY01000004.1_cds_WP_155863224.1_1170 target sequence
TFLISPDGKTTELGEMVESPFYFKRELCYIKSYRYSPPPDGGEYPADRVFCGNEIVYGKDLKPGEFVSIRTFGDFITLIRSKGWR

SEQ ID NO: 25755 - protein, 85 aa, unidentified
  REGION 1..85: note = Description of Unknown:cds_NZ_WFIY01000004.1_cds_WP_155863224.1_1170 target sequence
YSELYAGEGFDSLKKIDEGEVIDVIDYIQGNLIYQKNDSVHLDKKKIIKSDYPILGVSSLKETLAVEVIKDYRTPLLFYSINGDK

SEQ ID NO: 25756 - protein, 85 aa, unidentified
  REGION 1..85: note = Description of Unknown:cds_NZ_WFIY01000004.1_cds_WP_155863224.1_1170 target sequence
VGEEIHDNIQFMDSEGHSLFMVETSFNYKFKVSRRVKEKSETIMQYGNYDVKVTDIYVKGDVLLHGFLLSKSNNPKGVIVYGYGG

SEQ ID NO: 25757 - protein, 85 aa, unidentified
  REGION 1..85: note = Description of Unknown:cds_NZ_WFIY01000004.1_cds_WP_155863224.1_1170 target sequence
FRISLLPSFPMFTRILLDEGYSVLITNLRGGYENGEEWHKAGMLLNKKNVFKDFSEFLRLVKSLGGKTIAMGGSNGGLLVGATEN

SEQ ID NO: 25758 - protein, 85 aa, unidentified
  REGION 1..85: note = Description of Unknown:cds_NZ_WFIY01000004.1_cds_WP_155863224.1_1170 target sequence
EYPELIDCAVIGHPVLDMLRYDKLYVGKYWVEEYGDPNDPKYRDYLLSYSPYHNLKKELPKTFVYTGINDDRVHPAHALKYAAKS

SEQ ID NO: 25759 - protein, 85 aa, unidentified
  REGION 1..85: note = Description of Unknown:cds_NC_035460.1_cds_YP_009407961.1_10 target sequence
AMTEMLLYLKNDLAITVKKLTKYFNNGVNPNIIDNKYNNALHCYFYNKCVNKDIVKLLLSYDINLLHKNNVEETPLAVYSSRKNI

SEQ ID NO: 25760 - protein, 85 aa, unidentified
  REGION 1..85: note = Description of Unknown:cds_NC_035460.1_cds_YP_009407961.1_10 target sequence
DEDIVKMLLEAVNYKNVNDFNIHNYIITKNVNLDFIKLLMSKKLKLSIDENDRTVFEKYVETDYPNAEILDFLIKHDTNNRVYYN

SEQ ID NO: 25761 - protein, 85 aa, unidentified
  REGION 1..85: note = Description of Unknown:cds_NC_035460.1_cds_YP_009407961.1_10 target sequence
ICDSDYSDSDSDSDSNYSDNINYSDSDSDDSDYIKEPSIDKKLFDSKTALHLYINSHCYTKCNILKDVVQCLIDNNIYPWEYDIT

SEQ ID NO: 25762 - protein, 85 aa, unidentified
  REGION 1..85: note = Description of Unknown:cds_NC_035460.1_cds_YP_009407961.1_10 target sequence
ETTAVQYYIRSQYIDPSILTMLIGNADACIVYDDITGKKRGVLMDYLNSNYRFSDQIDVEIVKLLLKTGNAYNIMCNIGHYWLVD

SEQ ID NO: 25763 - protein, 85 aa, unidentified
  REGION 1..85: note = Description of Unknown:cds_NC_035460.1_cds_YP_009407961.1_10 target sequence
ESIANMLIDLLNVNTLRQVLKKYLKYYTNISIQLIERIHKLKVDSKNIISVYFNNKHINLEVLEYLLKQNPNMVNYLDRGELLFG

SEQ ID NO: 25764 - protein, 85 aa, unidentified
  REGION 1..85: note = Description of Unknown:cds_NC_035460.1_cds_YP_009407961.1_10 target sequence
KMISSYIKNEELFNCVNLCMKHYTDVNLQNCKGENIMMYAIKQNNTALVKYFIKMGVNPHVILKSNKTYISYCINHIYTPEISKL

SEQ ID NO: 25765 - protein, 84 aa, unidentified
  REGION 1..84: note = Description of Unknown:cds_NC_035460.1_cds_YP_009407961.1_10 target sequence
TYISYCINHIYTPEISKLLLDTLPNLKYMKKTIKNIKYFEDVDNIHECISYMAKLDISSLNYIPNKIQRKFKEHINNIKNKNII

SEQ ID NO: 25766 - protein, 85 aa, unidentified
  REGION 1..85: note = Description of Unknown:cds_NC_035460.1_cds_YP_009407961.1_10 target sequence
VNPNIIDNKYNNALHCYFYNKCVNKDIVKLLLSYDINLLHKNNVEETPLAVYSSRKNIDEDIVKMLLEAVNYKNVNDFNIHNYII

SEQ ID NO: 25767 - protein, 85 aa, unidentified
  REGION 1..85: note = Description of Unknown:cds_NC_035460.1_cds_YP_009407961.1_10 target sequence
TKNVNLDFIKLLMSKKLKLSIDENDRTVFEKYVETDYPNAEILDFLIKHDTNNRVYYNICDSDYSDSDSDSDSNYSDNINYSDSD

SEQ ID NO: 25768 - protein, 85 aa, unidentified
  REGION 1..85: note = Description of Unknown:cds_NC_035460.1_cds_YP_009407961.1_10 target sequence
SDDSDYIKEPSIDKKLFDSKTALHLYINSHCYTKCNILKDVVQCLIDNNIYPWEYDITETTAVQYYIRSQYIDPSILTMLIGNAD

SEQ ID NO: 25769 - protein, 85 aa, unidentified
  REGION 1..85: note = Description of Unknown:cds_NC_035460.1_cds_YP_009407961.1_10 target sequence
ACIVYDDITGKKRGVLMDYLNSNYRFSDQIDVEIVKLLLKTGNAYNIMCNIGHYWLVDESIANMLIDLLNVNTLRQVLKKYLKYY

SEQ ID NO: 25770 - protein, 85 aa, unidentified
  REGION 1..85: note = Description of Unknown:cds_NC_035460.1_cds_YP_009407961.1_10 target sequence
TNISIQLIERIHKLKVDSKNIISVYFNNKHINLEVLEYLLKQNPNMVNYLDRGELLFGKMISSYIKNEELFNCVNLCMKHYTDVN

SEQ ID NO: 25771 - protein, 85 aa, unidentified
  REGION 1..85: note = Description of Unknown:cds_NC_035460.1_cds_YP_009407961.1_10 target sequence
LQNCKGENIMMYAIKQNNTALVKYFIKMGVNPHVILKSNKTYISYCINHIYTPEISKLLLDTLPNLKYMKKTIKNIKYFEDVDNI

SEQ ID NO: 25772 - protein, 85 aa, unidentified
  REGION 1..85: note = Description of Unknown:cds_NZ_WFIY01000004.1_cds_WP_155863544.1_1480 target sequence
LCLLILFLLLVSIVISLFNRKIGYSLLGIASVLIIYQGLHCIFLLIAGIVWLFSSAFSIFYDNYGKWLSPLFITSILGMYIVLIS

SEQ ID NO: 25773 - protein, 85 aa, unidentified
  REGION 1..85: note = Description of Unknown:cds_NZ_WFIY01000004.1_cds_WP_155863544.1_1480 target sequence
NNYLEFLAGWEIMSIPAYAIIGLNKKIDYPAFTFMAFGELSTALILSAFIYSYSITDSIYFTELSSPLPFIISTFGFIVKMGIFP

SEQ ID NO: 25774 - protein, 85 aa, unidentified
  REGION 1..85: note = Description of Unknown:cds_NZ_WFIY01000004.1_cds_WP_155863544.1_1480 target sequence
FLVMEWLPITHGSAPANLSAILSATMTLMGVYGIIKIASLTQRSIVTQDFGFILLGMGGFSVFFGALYAYVSEHVKGLLAFSTIE

SEQ ID NO: 25775 - protein, 85 aa, unidentified
  REGION 1..85: note = Description of Unknown:cds_NZ_WFIY01000004.1_cds_WP_155863544.1_1480 target sequence
NNGSILTGIGVYLISNGILSHFALDVTLVFALAHSIAKTGLFFISGDVEGESLSYVKIAKSLRGKIGGILLATSMSGLLPNIGGV

SEQ ID NO: 25776 - protein, 85 aa, unidentified
  REGION 1..85: note = Description of Unknown:cds_NZ_WFIY01000004.1_cds_WP_155863544.1_1480 target sequence
AAWGLLESLFMLAYVEHSILSIIPIISGSIVAMGEGLATGALIKFISYTQIFKIGKTEGSTKSSIILLVGIIILLLGSDSYIFFK

SEQ ID NO: 25777 - protein, 85 aa, unidentified
  REGION 1..85: note = Description of Unknown:cds_NZ_WFIY01000004.1_cds_WP_155863544.1_1480 target sequence
GFTAGAPCLGMLEGLLIVSNYGKPFGGISPLYILLLLFIISLITFGIFGKPKIRRSETWNNGEKLEEQYSSFALANNIRMMLSKL

SEQ ID NO: 25778 - protein, 84 aa, unidentified
  REGION 1..84: note = Description of Unknown:cds_NZ_WFIY01000004.1_cds_WP_155863544.1_1480 target sequence
EQYSSFALANNIRMMLSKLLRTKILENEVVFSADIFWEAMYSLAKAYKKFSRILSTSYMNSSLSYYIFYMILAFIIITLLAVII

SEQ ID NO: 25779 - protein, 85 aa, unidentified
  REGION 1..85: note = Description of Unknown:cds_NZ_WFIY01000004.1_cds_WP_155863544.1_1480 target sequence
GIASVLIIYQGLHCIFLLIAGIVWLFSSAFSIFYDNYGKWLSPLFITSILGMYIVLISNNYLEFLAGWEIMSIPAYAIIGLNKKI

SEQ ID NO: 25780 - protein, 85 aa, unidentified
  REGION 1..85: note = Description of Unknown:cds_NZ_WFIY01000004.1_cds_WP_155863544.1_1480 target sequence
DYPAFTFMAFGELSTALILSAFIYSYSITDSIYFTELSSPLPFIISTFGFIVKMGIFPFLVMEWLPITHGSAPANLSAILSATMT

SEQ ID NO: 25781 - protein, 85 aa, unidentified
  REGION 1..85: note = Description of Unknown:cds_NZ_WFIY01000004.1_cds_WP_155863544.1_1480 target sequence
LMGVYGIIKIASLTQRSIVTQDFGFILLGMGGFSVFFGALYAYVSEHVKGLLAFSTIENNGSILTGIGVYLISNGILSHFALDVT

SEQ ID NO: 25782 - protein, 85 aa, unidentified
  REGION 1..85: note = Description of Unknown:cds_NZ_WFIY01000004.1_cds_WP_155863544.1_1480 target sequence
LVFALAHSIAKTGLFFISGDVEGESLSYVKIAKSLRGKIGGILLATSMSGLLPNIGGVAAWGLLESLFMLAYVEHSILSIIPIIS

SEQ ID NO: 25783 - protein, 85 aa, unidentified
  REGION 1..85: note = Description of Unknown:cds_NZ_WFIY01000004.1_cds_WP_155863544.1_1480 target sequence
GSIVAMGEGLATGALIKFISYTQIFKIGKTEGSTKSSIILLVGIIILLLGSDSYIFFKGFTAGAPCLGMLEGLLIVSNYGKPFGG

SEQ ID NO: 25784 - protein, 85 aa, unidentified
  REGION 1..85: note = Description of Unknown:cds_NZ_WFIY01000004.1_cds_WP_155863544.1_1480 target sequence
ISPLYILLLLFIISLITFGIFGKPKIRRSETWNNGEKLEEQYSSFALANNIRMMLSKLLRTKILENEVVFSADIFWEAMYSLAKA

SEQ ID NO: 25785 - protein, 85 aa, unidentified
  REGION 1..85: note = Description of Unknown:hvTR_P25215 target sequence
LAHLNQVTRIPPCPPFSGREARLKFHFFSWSTFMLSWPNNATLREIRTRAATNLTHHPHLVDTLYHASPQTPFLTRSGALYRFVT

SEQ ID NO: 25786 - protein, 85 aa, unidentified
  REGION 1..85: note = Description of Unknown:hvTR_P25215 target sequence
CCNCTLPNISIQQCKAGDRPGDLEIILQSNGGGRPASFQFPSSPTGSLLRCIVAASLLPEVSVGHQELSPLRSRSQGGQTDVRSG

SEQ ID NO: 25787 - protein, 85 aa, unidentified
  REGION 1..85: note = Description of Unknown:hvTR_P25215 target sequence
PDPARRLVALLRREDGAPKDPPLGPFGHPRGPGPAKSEDEESERRDAPPPPLDSSFQASRLVPVGPGFRLLVFNTNRVINTKLVC

SEQ ID NO: 25788 - protein, 85 aa, unidentified
  REGION 1..85: note = Description of Unknown:hvTR_P25215 target sequence
SEPLVKMRVCNVPRLINNFVARKYVVKETAFTVSLFFTDGVGANLAINVNISGTYLSFLLAMTSLRCFLPVEAIYPAAVSNWNST

SEQ ID NO: 25789 - protein, 85 aa, unidentified
  REGION 1..85: note = Description of Unknown:hvTR_P25215 target sequence
LDLHGLENQSLVRENRSGVFWTTNFPSVVSCRDGLNVSWFKAATATISRVHGQTLEQHLIREITPIVTHREAKISRIKNRLFTLL

SEQ ID NO: 25790 - protein, 85 aa, unidentified
  REGION 1..85: note = Description of Unknown:hvTR_P25215 target sequence
ELRNRSQIQVLHKRFLEGLLDCASLLRLDPSCINRIASEGLFDFSKRSIAHSKNRHECALLGHRHSANVTKLVVNERKTRLDILG

SEQ ID NO: 25791 - protein, 84 aa, unidentified
  REGION 1..84: note = Description of Unknown:hvTR_P25215 target sequence
SANVTKLVVNERKTRLDILGRNANFLTRCKHQVNLRQSPIFLTLLRHIRRRLGLGRASVKREITLLLAHLRKKTAPIHCRDAQV

SEQ ID NO: 25792 - protein, 85 aa, unidentified
  REGION 1..85: note = Description of Unknown:hvTR_P25215 target sequence
FSWSTFMLSWPNNATLREIRTRAATNLTHHPHLVDTLYHASPQTPFLTRSGALYRFVTCCNCTLPNISIQQCKAGDRPGDLEIIL

SEQ ID NO: 25793 - protein, 85 aa, unidentified
  REGION 1..85: note = Description of Unknown:hvTR_P25215 target sequence
QSNGGGRPASFQFPSSPTGSLLRCIVAASLLPEVSVGHQELSPLRSRSQGGQTDVRSGPDPARRLVALLRREDGAPKDPPLGPFG

SEQ ID NO: 25794 - protein, 85 aa, unidentified
  REGION 1..85: note = Description of Unknown:hvTR_P25215 target sequence
HPRGPGPAKSEDEESERRDAPPPPLDSSFQASRLVPVGPGFRLLVFNTNRVINTKLVCSEPLVKMRVCNVPRLINNFVARKYVVK

SEQ ID NO: 25795 - protein, 85 aa, unidentified
  REGION 1..85: note = Description of Unknown:hvTR_P25215 target sequence
ETAFTVSLFFTDGVGANLAINVNISGTYLSFLLAMTSLRCFLPVEAIYPAAVSNWNSTLDLHGLENQSLVRENRSGVFWTTNFPS

SEQ ID NO: 25796 - protein, 85 aa, unidentified
  REGION 1..85: note = Description of Unknown:hvTR_P25215 target sequence
VVSCRDGLNVSWFKAATATISRVHGQTLEQHLIREITPIVTHREAKISRIKNRLFTLLELRNRSQIQVLHKRFLEGLLDCASLLR

SEQ ID NO: 25797 - protein, 85 aa, unidentified
  REGION 1..85: note = Description of Unknown:hvTR_P25215 target sequence
LDPSCINRIASEGLFDFSKRSIAHSKNRHECALLGHRHSANVTKLVVNERKTRLDILGRNANFLTRCKHQVNLRQSPIFLTLLRH

SEQ ID NO: 25798 - protein, 85 aa, unidentified
  REGION 1..85: note = Description of Unknown:cds_NZ_WFIY01000004.1_cds_WP_155863037.1_925 target sequence
LGYVSEEKVIELAKRRGIFWPSYEIYGGVGGLYDIGPIGTRIKNKIVQLWRKIFVEENSDFVVEIETPMITPKKVFEASGHLENF

SEQ ID NO: 25799 - protein, 85 aa, unidentified
  REGION 1..85: note = Description of Unknown:cds_NZ_WFIY01000004.1_cds_WP_155863037.1_925 target sequence
TDPIVECSKCHRVFRADHLVEEVLKINAEGLKAEELTNLIREKNIKCPVCGGDLGDVRYFNLLFSTNIGPYTGSTGFLRPETAQG

SEQ ID NO: 25800 - protein, 85 aa, unidentified
  REGION 1..85: note = Description of Unknown:cds_NZ_WFIY01000004.1_cds_WP_155863037.1_925 target sequence
MFTSFKRVYESTREKLPLGIAQVGRVARNEISPRQGLIRMREFTIMEIEFFMDPEDTENVPLDKFSEDKINVLPAEAKIKGDKPS

SEQ ID NO: 25801 - protein, 85 aa, unidentified
  REGION 1..85: note = Description of Unknown:cds_NZ_WFIY01000004.1_cds_WP_155863037.1_925 target sequence
TFKVKELVDEKIVINPWMAYWMATANKFVRKLGVPLERVYFEEKLPSERAHYSSQTFDQMVIVGEDKVEISGHAYRGDYDLSRHS

SEQ ID NO: 25802 - protein, 85 aa, unidentified
  REGION 1..85: note = Description of Unknown:cds_NZ_WFIY01000004.1_cds_WP_155863037.1_925 target sequence
KFSGQDLSVFKKYDQPKIIKKKIVIINKDKLNKESKDFVKELMKRISSLKPEEVEKILDEKIDGKEIKEYVTVTEREEKESGKRF

SEQ ID NO: 25803 - protein, 85 aa, unidentified
  REGION 1..85: note = Description of Unknown:cds_NZ_WFIY01000004.1_cds_WP_155863037.1_925 target sequence
IPHVVEPSFGVERCLYISVLNAYREKKDRIVLSLPREIAPYEVAVFPLLEREELISRAREIYNKVKEKFDAIFDDSGSIGKRYAR

SEQ ID NO: 25804 - protein, 84 aa, unidentified
  REGION 1..84: note = Description of Unknown:cds_NZ_WFIY01000004.1_cds_WP_155863037.1_925 target sequence
VKEKFDAIFDDSGSIGKRYARADEIGIPYAITVDPQTLQDNTVTIRDRDTWNQIRVKEEELINTLEKLFSGEEIIPKGSSDESG

SEQ ID NO: 25805 - protein, 85 aa, unidentified
  REGION 1..85: note = Description of Unknown:cds_NZ_WFIY01000004.1_cds_WP_155863037.1_925 target sequence
GVGGLYDIGPIGTRIKNKIVQLWRKIFVEENSDFVVEIETPMITPKKVFEASGHLENFTDPIVECSKCHRVFRADHLVEEVLKIN

SEQ ID NO: 25806 - protein, 85 aa, unidentified
  REGION 1..85: note = Description of Unknown:cds_NZ_WFIY01000004.1_cds_WP_155863037.1_925 target sequence
AEGLKAEELTNLIREKNIKCPVCGGDLGDVRYFNLLFSTNIGPYTGSTGFLRPETAQGMFTSFKRVYESTREKLPLGIAQVGRVA

SEQ ID NO: 25807 - protein, 85 aa, unidentified
  REGION 1..85: note = Description of Unknown:cds_NZ_WFIY01000004.1_cds_WP_155863037.1_925 target sequence
RNEISPRQGLIRMREFTIMEIEFFMDPEDTENVPLDKFSEDKINVLPAEAKIKGDKPSTFKVKELVDEKIVINPWMAYWMATANK

SEQ ID NO: 25808 - protein, 85 aa, unidentified
  REGION 1..85: note = Description of Unknown:cds_NZ_WFIY01000004.1_cds_WP_155863037.1_925 target sequence
FVRKLGVPLERVYFEEKLPSERAHYSSQTFDQMVIVGEDKVEISGHAYRGDYDLSRHSKFSGQDLSVFKKYDQPKIIKKKIVIIN

SEQ ID NO: 25809 - protein, 85 aa, unidentified
  REGION 1..85: note = Description of Unknown:cds_NZ_WFIY01000004.1_cds_WP_155863037.1_925 target sequence
KDKLNKESKDFVKELMKRISSLKPEEVEKILDEKIDGKEIKEYVTVTEREEKESGKRFIPHVVEPSFGVERCLYISVLNAYREKK

SEQ ID NO: 25810 - protein, 85 aa, unidentified
  REGION 1..85: note = Description of Unknown:cds_NZ_WFIY01000004.1_cds_WP_155863037.1_925 target sequence
DRIVLSLPREIAPYEVAVFPLLEREELISRAREIYNKVKEKFDAIFDDSGSIGKRYARADEIGIPYAITVDPQTLQDNTVTIRDR

SEQ ID NO: 25811 - protein, 85 aa, unidentified
  REGION 1..85: note = Description of Unknown:cds_NZ_WFIY01000004.1_cds_WP_155863918.1_1831 target sequence
KFSFPKLSFKNNQNKITVIKKIDLPAPLMPISAQPEELTEIISDYEINLLNIIPNDIKKTINDANIELSIANPHVFITYDQEKGI

SEQ ID NO: 25812 - protein, 85 aa, unidentified
  REGION 1..85: note = Description of Unknown:cds_NZ_WFIY01000004.1_cds_WP_155863918.1_1831 target sequence
YKYVLLEPPMDYPAFDIYTFLISEIERRLVEESSTIDLGGILLASAAKRPDLKIIQGERAGLKLLSTRAKVALYYLLRNMFGYNV

SEQ ID NO: 25813 - protein, 85 aa, unidentified
  REGION 1..85: note = Description of Unknown:cds_NZ_WFIY01000004.1_cds_WP_155863918.1_1831 target sequence
LTPLLGDFRIEDISCSGLDLPVFVYHREFEYIPTNITFQEKMKVLDMEVDGKELLDEMVLRLVSISGKTISIADPISDGILPKGD

SEQ ID NO: 25814 - protein, 85 aa, unidentified
  REGION 1..85: note = Description of Unknown:cds_NZ_WFIY01000004.1_cds_WP_155863918.1_1831 target sequence
RIAATFRSEVSARGSSFVIRRFSERPITILDLINSGVISPDVAAYLWYAIDMRMSFMVIGVTGAGKTTVMSSILNLAKDSMKIVS

SEQ ID NO: 25815 - protein, 85 aa, unidentified
  REGION 1..85: note = Description of Unknown:cds_NZ_WFIY01000004.1_cds_WP_155863918.1_1831 target sequence
IEDIPEIRLAQDNWVQLYARAAYGGSGKEISLMDLLKLSLRYRPDIIVVGEIRGAEAYVLFQALSTGHGGATTFHAYDTDSAIKR

SEQ ID NO: 25816 - protein, 85 aa, unidentified
  REGION 1..85: note = Description of Unknown:cds_NZ_WFIY01000004.1_cds_WP_155863918.1_1831 target sequence
LMNAPLNIPQEWIPMMNIVINVRRLPVYVGDKILLKRRVVGVDEIVNWNDFRRVVNWDAKSDTHILDIENAKVMRSRLEESGRTL

SEQ ID NO: 25817 - protein, 84 aa, unidentified
  REGION 1..84: note = Description of Unknown:cds_NZ_WFIY01000004.1_cds_WP_155863918.1_1831 target sequence
HILDIENAKVMRSRLEESGRTLQELKEELERRALYLKMLASARDIVQDPESYKLVKKYIIKYSIRPEEALAEVSRIASVKPTVQ

SEQ ID NO: 25818 - protein, 85 aa, unidentified
  REGION 1..85: note = Description of Unknown:cds_NZ_WFIY01000004.1_cds_WP_155863918.1_1831 target sequence
LMPISAQPEELTEIISDYEINLLNIIPNDIKKTINDANIELSIANPHVFITYDQEKGIYKYVLLEPPMDYPAFDIYTFLISEIER

SEQ ID NO: 25819 - protein, 85 aa, unidentified
  REGION 1..85: note = Description of Unknown:cds_NZ_WFIY01000004.1_cds_WP_155863918.1_1831 target sequence
RLVEESSTIDLGGILLASAAKRPDLKIIQGERAGLKLLSTRAKVALYYLLRNMFGYNVLTPLLGDFRIEDISCSGLDLPVFVYHR

SEQ ID NO: 25820 - protein, 85 aa, unidentified
  REGION 1..85: note = Description of Unknown:cds_NZ_WFIY01000004.1_cds_WP_155863918.1_1831 target sequence
EFEYIPTNITFQEKMKVLDMEVDGKELLDEMVLRLVSISGKTISIADPISDGILPKGDRIAATFRSEVSARGSSFVIRRFSERPI

SEQ ID NO: 25821 - protein, 85 aa, unidentified
  REGION 1..85: note = Description of Unknown:cds_NZ_WFIY01000004.1_cds_WP_155863918.1_1831 target sequence
TILDLINSGVISPDVAAYLWYAIDMRMSFMVIGVTGAGKTTVMSSILNLAKDSMKIVSIEDIPEIRLAQDNWVQLYARAAYGGSG

SEQ ID NO: 25822 - protein, 85 aa, unidentified
  REGION 1..85: note = Description of Unknown:cds_NZ_WFIY01000004.1_cds_WP_155863918.1_1831 target sequence
KEISLMDLLKLSLRYRPDIIVVGEIRGAEAYVLFQALSTGHGGATTFHAYDTDSAIKRLMNAPLNIPQEWIPMMNIVINVRRLPV

SEQ ID NO: 25823 - protein, 85 aa, unidentified
  REGION 1..85: note = Description of Unknown:cds_NZ_WFIY01000004.1_cds_WP_155863918.1_1831 target sequence
YVGDKILLKRRVVGVDEIVNWNDFRRVVNWDAKSDTHILDIENAKVMRSRLEESGRTLQELKEELERRALYLKMLASARDIVQDP

SEQ ID NO: 25824 - protein, 85 aa, unidentified
  REGION 1..85: note = Description of Unknown:cds_NZ_WFIY01000004.1_cds_WP_155862636.1_417 target sequence
KIYVASAWPYVEAVPHLGNLIGSVLSADVFARYARLKYGKDNVIFVSGSDEHGTPIEVEAIKRKINPRDLTNQAHEYDKKLFLDV

SEQ ID NO: 25825 - protein, 85 aa, unidentified
  REGION 1..85: note = Description of Unknown:cds_NZ_WFIY01000004.1_cds_WP_155862636.1_417 target sequence
WKISYDNYTRTESDTHKKFVREFLLSIQDYIKVQEEEMPYCEHDKIFLPDRFIKGTCPYCGYEDARGDQCDRCGRLLSPTLLINP

SEQ ID NO: 25826 - protein, 85 aa, unidentified
  REGION 1..85: note = Description of Unknown:cds_NZ_WFIY01000004.1_cds_WP_155862636.1_417 target sequence
RCAICGSKPVIKKTKHWFFDLSQFSDKLKEWLENNKDMPDNVKSVALSWIQEGLKPRSLTRDTSWGIPAPFEGSEGKTIYVWFEA

SEQ ID NO: 25827 - protein, 85 aa, unidentified
  REGION 1..85: note = Description of Unknown:cds_NZ_WFIY01000004.1_cds_WP_155862636.1_417 target sequence
LLGYISATIEYFEKSGNPDKWKEFWFGDDVKSYYFIGKDNIPFHAVIFPAMLMASKKGYKLPSVISSTEYLMYEGQKFSKSRRIG

SEQ ID NO: 25828 - protein, 85 aa, unidentified
  REGION 1..85: note = Description of Unknown:cds_NZ_WFIY01000004.1_cds_WP_155862636.1_417 target sequence
IWIDEAPKLLDVDYWRYVLIRLRPEEKDTNFLWREAIRIINTELNDDIGNYINRVITMVNRYFNGYVPNFNEDKLDDVDKKFMEL

SEQ ID NO: 25829 - protein, 85 aa, unidentified
  REGION 1..85: note = Description of Unknown:cds_NZ_WFIY01000004.1_cds_WP_155862636.1_417 target sequence
VKTTPIVVSQLFEKGKLKAGSDEIIKIAREGNAYLNQKAPWDKVKNDIKVAENTLYIALNSVRTLSILLYPIIPVSAEKIYNQLG

SEQ ID NO: 25830 - protein, 84 aa, unidentified
  REGION 1..84: note = Description of Unknown:cds_NZ_WFIY01000004.1_cds_WP_155862636.1_417 target sequence
RTLSILLYPIIPVSAEKIYNQLGLKGIENEKWDSAGEFTLDHNHKVEQASPIFKKIDQNFEKELNEKLEKIRKELDNIRPPLLR

SEQ ID NO: 25831 - protein, 85 aa, unidentified
  REGION 1..85: note = Description of Unknown:cds_NZ_WFIY01000004.1_cds_WP_155862636.1_417 target sequence
DVFARYARLKYGKDNVIFVSGSDEHGTPIEVEAIKRKINPRDLTNQAHEYDKKLFLDVWKISYDNYTRTESDTHKKFVREFLLSI

SEQ ID NO: 25832 - protein, 85 aa, unidentified
  REGION 1..85: note = Description of Unknown:cds_NZ_WFIY01000004.1_cds_WP_155862636.1_417 target sequence
QDYIKVQEEEMPYCEHDKIFLPDRFIKGTCPYCGYEDARGDQCDRCGRLLSPTLLINPRCAICGSKPVIKKTKHWFFDLSQFSDK

SEQ ID NO: 25833 - protein, 85 aa, unidentified
  REGION 1..85: note = Description of Unknown:cds_NZ_WFIY01000004.1_cds_WP_155862636.1_417 target sequence
LKEWLENNKDMPDNVKSVALSWIQEGLKPRSLTRDTSWGIPAPFEGSEGKTIYVWFEALLGYISATIEYFEKSGNPDKWKEFWFG

SEQ ID NO: 25834 - protein, 85 aa, unidentified
  REGION 1..85: note = Description of Unknown:cds_NZ_WFIY01000004.1_cds_WP_155862636.1_417 target sequence
DDVKSYYFIGKDNIPFHAVIFPAMLMASKKGYKLPSVISSTEYLMYEGQKFSKSRRIGIWIDEAPKLLDVDYWRYVLIRLRPEEK

SEQ ID NO: 25835 - protein, 85 aa, unidentified
  REGION 1..85: note = Description of Unknown:cds_NZ_WFIY01000004.1_cds_WP_155862636.1_417 target sequence
DTNFLWREAIRIINTELNDDIGNYINRVITMVNRYFNGYVPNFNEDKLDDVDKKFMELVKTTPIVVSQLFEKGKLKAGSDEIIKI

SEQ ID NO: 25836 - protein, 85 aa, unidentified
  REGION 1..85: note = Description of Unknown:cds_NZ_WFIY01000004.1_cds_WP_155862636.1_417 target sequence
AREGNAYLNQKAPWDKVKNDIKVAENTLYIALNSVRTLSILLYPIIPVSAEKIYNQLGLKGIENEKWDSAGEFTLDHNHKVEQAS

SEQ ID NO: 25837 - protein, 85 aa, unidentified
  REGION 1..85: note = Description of Unknown:cds_NZ_WFIY01000004.1_cds_WP_155862648.1_434 target sequence
LPSGARILVDALKREGVKVIFGIPGLYNMPFYDELFYEIQNQEIRHVLMRHEQGATHAADGFARVSGFPGVVTATSGPGATNLVT

SEQ ID NO: 25838 - protein, 85 aa, unidentified
  REGION 1..85: note = Description of Unknown:cds_NZ_WFIY01000004.1_cds_WP_155862648.1_434 target sequence
GMITAYWDSSPVIAITGQVNRSSIGKMAFQESDQPGIFKDITKYVVQLKTVSEIPIWIKNAFYIATTGRPGPVLVDIPRDVQLEK

SEQ ID NO: 25839 - protein, 85 aa, unidentified
  REGION 1..85: note = Description of Unknown:cds_NZ_WFIY01000004.1_cds_WP_155862648.1_434 target sequence
IDEVEWPEKPMVRGYKPFRTVIEPEKLKKAAEILVNAEKPIILVGTGVTWSNATTEVLNLAETLICPIISTLPGKSAIPHDHPLY

SEQ ID NO: 25840 - protein, 85 aa, unidentified
  REGION 1..85: note = Description of Unknown:cds_NZ_WFIY01000004.1_cds_WP_155862648.1_434 target sequence
VGPMGYYGRAEASLAALESDVMLIIGARLSDRTFTSYDEMIETKKKFIMINLDPTDAERAFKVDVAMYGDAKILTRELLNAVIKV

SEQ ID NO: 25841 - protein, 85 aa, unidentified
  REGION 1..85: note = Description of Unknown:cds_NZ_WFIY01000004.1_cds_WP_155862648.1_434 target sequence
GMKKDRSAWMKRVKELKEYYAQFYYQDEPGKIKPWKALKTIRNAIPRDAIVTTGVGQHQMWAEVFWEVLEPRTFLSSTGMGTMGF

SEQ ID NO: 25842 - protein, 85 aa, unidentified
  REGION 1..85: note = Description of Unknown:cds_NZ_WFIY01000004.1_cds_WP_155862648.1_434 target sequence
GLPAAMGAKLARPDKVVVDLDGDGSFMMTGNNLATAVDEHIPVISVIFDNRSLGLVRQVQDLFQNKRIVGVDYGPSPDFVKYAEA

SEQ ID NO: 25843 - protein, 84 aa, unidentified
  REGION 1..84: note = Description of Unknown:cds_NZ_WFIY01000004.1_cds_WP_155862648.1_434 target sequence
QNKRIVGVDYGPSPDFVKYAEAFGALGFNADSYEELEKAIKTAIREDLPTVIRLPIDKNELALPTLPPGGKLKQVIVSDPRKNS

SEQ ID NO: 25844 - protein, 85 aa, unidentified
  REGION 1..85: note = Description of Unknown:cds_NZ_WFIY01000004.1_cds_WP_155862648.1_434 target sequence
NMPFYDELFYEIQNQEIRHVLMRHEQGATHAADGFARVSGFPGVVTATSGPGATNLVTGMITAYWDSSPVIAITGQVNRSSIGKM

SEQ ID NO: 25845 - protein, 85 aa, unidentified
  REGION 1..85: note = Description of Unknown:cds_NZ_WFIY01000004.1_cds_WP_155862648.1_434 target sequence
AFQESDQPGIFKDITKYVVQLKTVSEIPIWIKNAFYIATTGRPGPVLVDIPRDVQLEKIDEVEWPEKPMVRGYKPFRTVIEPEKL

SEQ ID NO: 25846 - protein, 85 aa, unidentified
  REGION 1..85: note = Description of Unknown:cds_NZ_WFIY01000004.1_cds_WP_155862648.1_434 target sequence
KKAAEILVNAEKPIILVGTGVTWSNATTEVLNLAETLICPIISTLPGKSAIPHDHPLYVGPMGYYGRAEASLAALESDVMLIIGA

SEQ ID NO: 25847 - protein, 85 aa, unidentified
  REGION 1..85: note = Description of Unknown:cds_NZ_WFIY01000004.1_cds_WP_155862648.1_434 target sequence
RLSDRTFTSYDEMIETKKKFIMINLDPTDAERAFKVDVAMYGDAKILTRELLNAVIKVGMKKDRSAWMKRVKELKEYYAQFYYQD

SEQ ID NO: 25848 - protein, 85 aa, unidentified
  REGION 1..85: note = Description of Unknown:cds_NZ_WFIY01000004.1_cds_WP_155862648.1_434 target sequence
EPGKIKPWKALKTIRNAIPRDAIVTTGVGQHQMWAEVFWEVLEPRTFLSSTGMGTMGFGLPAAMGAKLARPDKVVVDLDGDGSFM

SEQ ID NO: 25849 - protein, 85 aa, unidentified
  REGION 1..85: note = Description of Unknown:cds_NZ_WFIY01000004.1_cds_WP_155862648.1_434 target sequence
MTGNNLATAVDEHIPVISVIFDNRSLGLVRQVQDLFQNKRIVGVDYGPSPDFVKYAEAFGALGFNADSYEELEKAIKTAIREDLP

SEQ ID NO: 25850 - protein, 85 aa, unidentified
  REGION 1..85: note = Description of Unknown:cds_NZ_WFIY01000004.1_cds_WP_155864160.1_2114 target sequence
SRQTETSSGVKLKRELRLIDLYFAGLTAVIGSGWIFGSLETASAAGPAAILSWIFGGIFILIIALVWAEVGTSIPVAGGAVRYAK

SEQ ID NO: 25851 - protein, 85 aa, unidentified
  REGION 1..85: note = Description of Unknown:cds_NZ_WFIY01000004.1_cds_WP_155864160.1_2114 target sequence
YSHGGLAASIISWSVILTYIAVPAAEAVAVVEVLQGALSLYGITSVTLCSSEFPTAEGLGVALALSALFFFINYIGISALRASNF

SEQ ID NO: 25852 - protein, 85 aa, unidentified
  REGION 1..85: note = Description of Unknown:cds_NZ_WFIY01000004.1_cds_WP_155864160.1_2114 target sequence
AITSWKLIIPSLTVISILIVGVPKFASNFTTPSFAPYGFLPVFSAIPATGVAFAYLGFRQPIEMAAEAKMPGRDIWRAILAVVGT

SEQ ID NO: 25853 - protein, 85 aa, unidentified
  REGION 1..85: note = Description of Unknown:cds_NZ_WFIY01000004.1_cds_WP_155864160.1_2114 target sequence
SIVLYTMLQVVFIGGFAWNSSAFGTTGVSPGDWSALTSSPQPPIYSFPFFYEVAGLGLGALAILLAIDGVVSPSGTLSQYMASTA

SEQ ID NO: 25854 - protein, 85 aa, unidentified
  REGION 1..85: note = Description of Unknown:cds_NZ_WFIY01000004.1_cds_WP_155864160.1_2114 target sequence
RVLYGTSKEGFLSDKFFEVHGKYRVPVWGLIATMIVTIVLLVMAFAGTLVSSVGGAWSALVSIITTTGVFSYIIGSVFLPLSRKY

SEQ ID NO: 25855 - protein, 85 aa, unidentified
  REGION 1..85: note = Description of Unknown:cds_NZ_WFIY01000004.1_cds_WP_155864160.1_2114 target sequence
APDLPRPFKLPAHQAFSLAAFVISALLVYWGAGALIAPPSDPYGGYILIGVMLAGALTYLTYKDKKPCDLKAGLWVIAFLIFTGV

SEQ ID NO: 25856 - protein, 84 aa, unidentified
  REGION 1..84: note = Description of Unknown:cds_NZ_WFIY01000004.1_cds_WP_155864160.1_2114 target sequence
KDKKPCDLKAGLWVIAFLIFTGVLVALGCYGFGVIPSSPLPFAWIIDIIASIGFYLWAINSAVPECHVKVNIGKGIEASKNESE

SEQ ID NO: 25857 - protein, 85 aa, unidentified
  REGION 1..85: note = Description of Unknown:cds_NZ_WFIY01000004.1_cds_WP_155864160.1_2114 target sequence
AVIGSGWIFGSLETASAAGPAAILSWIFGGIFILIIALVWAEVGTSIPVAGGAVRYAKYSHGGLAASIISWSVILTYIAVPAAEA

SEQ ID NO: 25858 - protein, 85 aa, unidentified
  REGION 1..85: note = Description of Unknown:cds_NZ_WFIY01000004.1_cds_WP_155864160.1_2114 target sequence
VAVVEVLQGALSLYGITSVTLCSSEFPTAEGLGVALALSALFFFINYIGISALRASNFAITSWKLIIPSLTVISILIVGVPKFAS

SEQ ID NO: 25859 - protein, 85 aa, unidentified
  REGION 1..85: note = Description of Unknown:cds_NZ_WFIY01000004.1_cds_WP_155864160.1_2114 target sequence
NFTTPSFAPYGFLPVFSAIPATGVAFAYLGFRQPIEMAAEAKMPGRDIWRAILAVVGTSIVLYTMLQVVFIGGFAWNSSAFGTTG

SEQ ID NO: 25860 - protein, 85 aa, unidentified
  REGION 1..85: note = Description of Unknown:cds_NZ_WFIY01000004.1_cds_WP_155864160.1_2114 target sequence
VSPGDWSALTSSPQPPIYSFPFFYEVAGLGLGALAILLAIDGVVSPSGTLSQYMASTARVLYGTSKEGFLSDKFFEVHGKYRVPV

SEQ ID NO: 25861 - protein, 85 aa, unidentified
  REGION 1..85: note = Description of Unknown:cds_NZ_WFIY01000004.1_cds_WP_155864160.1_2114 target sequence
WGLIATMIVTIVLLVMAFAGTLVSSVGGAWSALVSIITTTGVFSYIIGSVFLPLSRKYAPDLPRPFKLPAHQAFSLAAFVISALL

SEQ ID NO: 25862 - protein, 85 aa, unidentified
  REGION 1..85: note = Description of Unknown:cds_NZ_WFIY01000004.1_cds_WP_155864160.1_2114 target sequence
VYWGAGALIAPPSDPYGGYILIGVMLAGALTYLTYKDKKPCDLKAGLWVIAFLIFTGVLVALGCYGFGVIPSSPLPFAWIIDIIA

SEQ ID NO: 25863 - protein, 85 aa, unidentified
  REGION 1..85: note = Description of Unknown:cds_NC_039223.1_cds_YP_009513198.1_5 target sequence
DRAVNRVVLENEEREAKNTWRLVFRIAVLLLMVMTLAISAAALAYSTGASTPHDLAGISTVISKTEDKVTSLLSSSQDVIDRIYK

SEQ ID NO: 25864 - protein, 85 aa, unidentified
  REGION 1..85: note = Description of Unknown:cds_NC_039223.1_cds_YP_009513198.1_5 target sequence
QVALESPLALLNTESIIMNAITSLSYQINGAANNSGCGAPVHDPDYIGGIGKELIVDDISDVTSFYPSAYQEHLNFIPAPTTGSG

SEQ ID NO: 25865 - protein, 85 aa, unidentified
  REGION 1..85: note = Description of Unknown:cds_NC_039223.1_cds_YP_009513198.1_5 target sequence
CTRIPSFDMSTTHYCYTHNVILSGCRDHSHSYQYLALGVLRTSATGRVFFSTLRSVNLDDTQNRKSCSVSATPLGCDMLCSKVTG

SEQ ID NO: 25866 - protein, 85 aa, unidentified
  REGION 1..85: note = Description of Unknown:cds_NC_039223.1_cds_YP_009513198.1_5 target sequence
TEEEDYKSVAPTSMVHGRLGFDGQYHEKDLDTTVLFKDWVANYPGAGGGSFIDDRVWFPVYGGLKPNSPSDTAQEGKYVIYKRHN

SEQ ID NO: 25867 - protein, 85 aa, unidentified
  REGION 1..85: note = Description of Unknown:cds_NC_039223.1_cds_YP_009513198.1_5 target sequence
NTCPDEQDYQIRMAKSSYKPGRFGGKRVQQAILSIKVSTSLGKDPVLTIPPNTITLMGAEGRILTVGTSHFLYQRGSSYFSPALL

SEQ ID NO: 25868 - protein, 85 aa, unidentified
  REGION 1..85: note = Description of Unknown:cds_NC_039223.1_cds_YP_009513198.1_5 target sequence
YPMTVNNKTATLHSPYTFNAFTRPGSVPCQASARCPNSCITGVYTDPYPLIFHRNHTLRGVFGTMLDDEQARLNPVSAVFDNISR

SEQ ID NO: 25869 - protein, 84 aa, unidentified
  REGION 1..84: note = Description of Unknown:cds_NC_039223.1_cds_YP_009513198.1_5 target sequence
FGTMLDDEQARLNPVSAVFDNISRSRVTRVSSSSTKAAYTTSTCFKVVETNKAYCLSIAEISNTLFGEFRIVPLLVEILKDDRV

SEQ ID NO: 25870 - protein, 85 aa, unidentified
  REGION 1..85: note = Description of Unknown:cds_NC_039223.1_cds_YP_009513198.1_5 target sequence
VLLLMVMTLAISAAALAYSTGASTPHDLAGISTVISKTEDKVTSLLSSSQDVIDRIYKQVALESPLALLNTESIIMNAITSLSYQ

SEQ ID NO: 25871 - protein, 85 aa, unidentified
  REGION 1..85: note = Description of Unknown:cds_NC_039223.1_cds_YP_009513198.1_5 target sequence
INGAANNSGCGAPVHDPDYIGGIGKELIVDDISDVTSFYPSAYQEHLNFIPAPTTGSGCTRIPSFDMSTTHYCYTHNVILSGCRD

SEQ ID NO: 25872 - protein, 85 aa, unidentified
  REGION 1..85: note = Description of Unknown:cds_NC_039223.1_cds_YP_009513198.1_5 target sequence
HSHSYQYLALGVLRTSATGRVFFSTLRSVNLDDTQNRKSCSVSATPLGCDMLCSKVTGTEEEDYKSVAPTSMVHGRLGFDGQYHE

SEQ ID NO: 25873 - protein, 85 aa, unidentified
  REGION 1..85: note = Description of Unknown:cds_NC_039223.1_cds_YP_009513198.1_5 target sequence
KDLDTTVLFKDWVANYPGAGGGSFIDDRVWFPVYGGLKPNSPSDTAQEGKYVIYKRHNNTCPDEQDYQIRMAKSSYKPGRFGGKR

SEQ ID NO: 25874 - protein, 85 aa, unidentified
  REGION 1..85: note = Description of Unknown:cds_NC_039223.1_cds_YP_009513198.1_5 target sequence
VQQAILSIKVSTSLGKDPVLTIPPNTITLMGAEGRILTVGTSHFLYQRGSSYFSPALLYPMTVNNKTATLHSPYTFNAFTRPGSV

SEQ ID NO: 25875 - protein, 85 aa, unidentified
  REGION 1..85: note = Description of Unknown:cds_NC_039223.1_cds_YP_009513198.1_5 target sequence
PCQASARCPNSCITGVYTDPYPLIFHRNHTLRGVFGTMLDDEQARLNPVSAVFDNISRSRVTRVSSSSTKAAYTTSTCFKVVETN

SEQ ID NO: 25876 - protein, 85 aa, unidentified
  REGION 1..85: note = Description of Unknown:hvTR_P16786 target sequence
ASRRLRHAPHTATDEFHQALRRLFAPLCVHEDHFHVQLVIGRGALQPEEAAVETSQPPAQFAAQTSAVLQQQLVHHVPRSCVLHL

SEQ ID NO: 25877 - protein, 85 aa, unidentified
  REGION 1..85: note = Description of Unknown:hvTR_P16786 target sequence
FVTDKRFLNRELGDRLYQRFLREWLVCRQAEREAVTALFQRMVMTKPYFVFLAYVYSMDCLHTVAVRTMAFLRFERYDTDYLLRR

SEQ ID NO: 25878 - protein, 85 aa, unidentified
  REGION 1..85: note = Description of Unknown:hvTR_P16786 target sequence
LRLYPPERLHALLDGVTASLLGDLHRFLFGVDLRLPVLHPTSSPCLALLRAKRFDARADLAVYHRNQWCHQRQPRSPQLRGLIAA

SEQ ID NO: 25879 - protein, 85 aa, unidentified
  REGION 1..85: note = Description of Unknown:hvTR_P16786 target sequence
LRRYAGKVPCGNPLYVLARQAVQTFCDTCPRYLVPLRALGLHDETRGGGSTAAAAAVGHAGAGQQARHVEPTKIVLFALSAALRG

SEQ ID NO: 25880 - protein, 85 aa, unidentified
  REGION 1..85: note = Description of Unknown:hvTR_P16786 target sequence
GLIGSVIDLPLWCLCRLKCERHLDARSLVAVVCRQCGHCLNLGKEKLHCQQNFPLNSMFYYRDRQEKSVIFNTHAELVHCSLCGS

SEQ ID NO: 25881 - protein, 85 aa, unidentified
  REGION 1..85: note = Description of Unknown:hvTR_P16786 target sequence
QRVVRQRVYELVSETLFGQRCVRVGWKAVLGLNAACAVYDHRLAFDVILPCAARTCDSTVVVRDVTVPRLLRLTSHGHGLLCARC

SEQ ID NO: 25882 - protein, 84 aa, unidentified
  REGION 1..84: note = Description of Unknown:hvTR_P16786 target sequence
VVRDVTVPRLLRLTSHGHGLLCARCQTGEYRDSCLESEDGAPLCRGCALVKQTACHVGGHIVQQARGGLAAASSSSSPHGLPHV

SEQ ID NO: 25883 - protein, 85 aa, unidentified
  REGION 1..85: note = Description of Unknown:hvTR_P16786 target sequence
CVHEDHFHVQLVIGRGALQPEEAAVETSQPPAQFAAQTSAVLQQQLVHHVPRSCVLHLFVTDKRFLNRELGDRLYQRFLREWLVC

SEQ ID NO: 25884 - protein, 85 aa, unidentified
  REGION 1..85: note = Description of Unknown:hvTR_P16786 target sequence
RQAEREAVTALFQRMVMTKPYFVFLAYVYSMDCLHTVAVRTMAFLRFERYDTDYLLRRLRLYPPERLHALLDGVTASLLGDLHRF

SEQ ID NO: 25885 - protein, 85 aa, unidentified
  REGION 1..85: note = Description of Unknown:hvTR_P16786 target sequence
LFGVDLRLPVLHPTSSPCLALLRAKRFDARADLAVYHRNQWCHQRQPRSPQLRGLIAALRRYAGKVPCGNPLYVLARQAVQTFCD

SEQ ID NO: 25886 - protein, 85 aa, unidentified
  REGION 1..85: note = Description of Unknown:hvTR_P16786 target sequence
TCPRYLVPLRALGLHDETRGGGSTAAAAAVGHAGAGQQARHVEPTKIVLFALSAALRGGLIGSVIDLPLWCLCRLKCERHLDARS

SEQ ID NO: 25887 - protein, 85 aa, unidentified
  REGION 1..85: note = Description of Unknown:hvTR_P16786 target sequence
LVAVVCRQCGHCLNLGKEKLHCQQNFPLNSMFYYRDRQEKSVIFNTHAELVHCSLCGSQRVVRQRVYELVSETLFGQRCVRVGWK

SEQ ID NO: 25888 - protein, 85 aa, unidentified
  REGION 1..85: note = Description of Unknown:hvTR_P16786 target sequence
AVLGLNAACAVYDHRLAFDVILPCAARTCDSTVVVRDVTVPRLLRLTSHGHGLLCARCQTGEYRDSCLESEDGAPLCRGCALVKQ

SEQ ID NO: 25889 - protein, 85 aa, unidentified
  REGION 1..85: note = Description of Unknown:cds_NZ_WFIY01000004.1_cds_WP_155863099.1_1016 target sequence
DEIDEIIYKYALDNAVKHDGKAAVGPVMSKVLGEKPELKPKAKEIAKRVQEIVEKVNSMSLEDQKKELEAKFPEMLTKKKSEEEK

SEQ ID NO: 25890 - protein, 85 aa, unidentified
  REGION 1..85: note = Description of Unknown:cds_NZ_WFIY01000004.1_cds_WP_155863099.1_1016 target sequence
KTLPPLPNVKGEVITRFAPNPDGPIHLGNTRAAILSYEYAKMYKGKFILRFDDTDPKVKKPLREAYDWIREDLKWLGITWQEEFT

SEQ ID NO: 25891 - protein, 85 aa, unidentified
  REGION 1..85: note = Description of Unknown:cds_NZ_WFIY01000004.1_cds_WP_155863099.1_1016 target sequence
ASSRLERYYEVAKEMIKKGYAYVDTCSEEEFKKMKETRNFSLPCFNRSKPVEYNLELWEKMLERKFKEGEAVLRIKTDLNDPDPS

SEQ ID NO: 25892 - protein, 85 aa, unidentified
  REGION 1..85: note = Description of Unknown:cds_NZ_WFIY01000004.1_cds_WP_155863099.1_1016 target sequence
KIDWVMARIVDTEKNPHPLVGDKYWVWPTYNFASAVDDHDYKITHILRAKEHMSNAEKQKWVFNYMGWEIPEVMEFGRLKLEGFM

SEQ ID NO: 25893 - protein, 85 aa, unidentified
  REGION 1..85: note = Description of Unknown:cds_NZ_WFIY01000004.1_cds_WP_155863099.1_1016 target sequence
MSKSKIKGMMEKGTTKDDPRLPTIAGLRRRGILPETIREIIIEVGVKPSDATISFENIAALNRKKLDPIAKRIMYVENYSEFTLE

SEQ ID NO: 25894 - protein, 85 aa, unidentified
  REGION 1..85: note = Description of Unknown:cds_NZ_WFIY01000004.1_cds_WP_155863099.1_1016 target sequence
IPEEMTAKIPLSPTMKEFREITVKPGDKILVEKADAENQSIIRLVDLCNVKVEGNKLVYVSKPVEDAKKINAKIVQWVKKGEEVN

SEQ ID NO: 25895 - protein, 84 aa, unidentified
  REGION 1..84: note = Description of Unknown:cds_NZ_WFIY01000004.1_cds_WP_155863099.1_1016 target sequence
SKPVEDAKKINAKIVQWVKKGEEVNVNVIKADPNQDLKIIKGKAERYAINLNPNEIVQFIRYGFVRVDSKNESSNELTVIYAHE

SEQ ID NO: 25896 - protein, 85 aa, unidentified
  REGION 1..85: note = Description of Unknown:cds_NZ_WFIY01000004.1_cds_WP_155863099.1_1016 target sequence
MSKVLGEKPELKPKAKEIAKRVQEIVEKVNSMSLEDQKKELEAKFPEMLTKKKSEEEKKTLPPLPNVKGEVITRFAPNPDGPIHL

SEQ ID NO: 25897 - protein, 85 aa, unidentified
  REGION 1..85: note = Description of Unknown:cds_NZ_WFIY01000004.1_cds_WP_155863099.1_1016 target sequence
GNTRAAILSYEYAKMYKGKFILRFDDTDPKVKKPLREAYDWIREDLKWLGITWQEEFTASSRLERYYEVAKEMIKKGYAYVDTCS

SEQ ID NO: 25898 - protein, 85 aa, unidentified
  REGION 1..85: note = Description of Unknown:cds_NZ_WFIY01000004.1_cds_WP_155863099.1_1016 target sequence
EEEFKKMKETRNFSLPCFNRSKPVEYNLELWEKMLERKFKEGEAVLRIKTDLNDPDPSKIDWVMARIVDTEKNPHPLVGDKYWVW

SEQ ID NO: 25899 - protein, 85 aa, unidentified
  REGION 1..85: note = Description of Unknown:cds_NZ_WFIY01000004.1_cds_WP_155863099.1_1016 target sequence
PTYNFASAVDDHDYKITHILRAKEHMSNAEKQKWVFNYMGWEIPEVMEFGRLKLEGFMMSKSKIKGMMEKGTTKDDPRLPTIAGL

SEQ ID NO: 25900 - protein, 85 aa, unidentified
  REGION 1..85: note = Description of Unknown:cds_NZ_WFIY01000004.1_cds_WP_155863099.1_1016 target sequence
RRRGILPETIREIIIEVGVKPSDATISFENIAALNRKKLDPIAKRIMYVENYSEFTLEIPEEMTAKIPLSPTMKEFREITVKPGD

SEQ ID NO: 25901 - protein, 85 aa, unidentified
  REGION 1..85: note = Description of Unknown:cds_NZ_WFIY01000004.1_cds_WP_155863099.1_1016 target sequence
KILVEKADAENQSIIRLVDLCNVKVEGNKLVYVSKPVEDAKKINAKIVQWVKKGEEVNVNVIKADPNQDLKIIKGKAERYAINLN

SEQ ID NO: 25902 - protein, 85 aa, unidentified
  REGION 1..85: note = Description of Unknown:hvTR_P13699 target sequence
SASKEIKSFLWTQSLRRELSGYCSNIKLQVVKDAQALLHGLDFSEVSNVQRLMRKERRDDNDLKRLRDLNQAVNNLVELKSTQQK

SEQ ID NO: 25903 - protein, 85 aa, unidentified
  REGION 1..85: note = Description of Unknown:hvTR_P13699 target sequence
SILRVGTLTSDDLLILAADLEKLKSKVIRTERPLSAGVYMGNLSSQQLDQRRALLNMIGMSGGNQGARAGRDGVVRVWDVKNAEL

SEQ ID NO: 25904 - protein, 85 aa, unidentified
  REGION 1..85: note = Description of Unknown:hvTR_P13699 target sequence
LNNQFGTMPSLTLACLTKQGQVDLNDAVQALTDLGLIYTAKYPNTSDLDRLTQSHPILNMIDTKKSSLNISGYNFSLGAAVKAGA

SEQ ID NO: 25905 - protein, 85 aa, unidentified
  REGION 1..85: note = Description of Unknown:hvTR_P13699 target sequence
CMLDGGNMLETIKVSPQTMDGILKSILKVKKALGMFISDTPGERNPYENILYKICLSGDGWPYIASRTSITGRAWENTVVDLESD

SEQ ID NO: 25906 - protein, 85 aa, unidentified
  REGION 1..85: note = Description of Unknown:hvTR_P13699 target sequence
GKPQKADSNNSSKSLQSAGFTAGLTYSQLMTLKDAMLQLDPNAKTWMDIEGRPEDPVEIALYQPSSGCYIHFFREPTDLKQFKQD

SEQ ID NO: 25907 - protein, 85 aa, unidentified
  REGION 1..85: note = Description of Unknown:hvTR_P13699 target sequence
AKYSHGIDVTDLFATQPGLTSAVIDALPRNMVITCQGSDDIRKLLESQGRKDIKLIDIALSKTDSRKYENAVWDQYKDLCHMHTG

SEQ ID NO: 25908 - protein, 84 aa, unidentified
  REGION 1..84: note = Description of Unknown:hvTR_P13699 target sequence
LSKTDSRKYENAVWDQYKDLCHMHTGVVVEKKKRGGKEEITPHCALMDCIMFDAAVSGGLNTSVLRAVLPRDMVFRTSTPRVVL

SEQ ID NO: 25909 - protein, 85 aa, unidentified
  REGION 1..85: note = Description of Unknown:hvTR_P13699 target sequence
LQVVKDAQALLHGLDFSEVSNVQRLMRKERRDDNDLKRLRDLNQAVNNLVELKSTQQKSILRVGTLTSDDLLILAADLEKLKSKV

SEQ ID NO: 25910 - protein, 85 aa, unidentified
  REGION 1..85: note = Description of Unknown:hvTR_P13699 target sequence
IRTERPLSAGVYMGNLSSQQLDQRRALLNMIGMSGGNQGARAGRDGVVRVWDVKNAELLNNQFGTMPSLTLACLTKQGQVDLNDA

SEQ ID NO: 25911 - protein, 85 aa, unidentified
  REGION 1..85: note = Description of Unknown:hvTR_P13699 target sequence
VQALTDLGLIYTAKYPNTSDLDRLTQSHPILNMIDTKKSSLNISGYNFSLGAAVKAGACMLDGGNMLETIKVSPQTMDGILKSIL

SEQ ID NO: 25912 - protein, 85 aa, unidentified
  REGION 1..85: note = Description of Unknown:hvTR_P13699 target sequence
KVKKALGMFISDTPGERNPYENILYKICLSGDGWPYIASRTSITGRAWENTVVDLESDGKPQKADSNNSSKSLQSAGFTAGLTYS

SEQ ID NO: 25913 - protein, 85 aa, unidentified
  REGION 1..85: note = Description of Unknown:hvTR_P13699 target sequence
QLMTLKDAMLQLDPNAKTWMDIEGRPEDPVEIALYQPSSGCYIHFFREPTDLKQFKQDAKYSHGIDVTDLFATQPGLTSAVIDAL

SEQ ID NO: 25914 - protein, 85 aa, unidentified
  REGION 1..85: note = Description of Unknown:hvTR_P13699 target sequence
PRNMVITCQGSDDIRKLLESQGRKDIKLIDIALSKTDSRKYENAVWDQYKDLCHMHTGVVVEKKKRGGKEEITPHCALMDCIMFD

SEQ ID NO: 25915 - protein, 85 aa, unidentified
  REGION 1..85: note = Description of Unknown:hvTR_P32530 target sequence
DQDAFFFERDPEAEGEAPRKQESLSDVIGLLDVVLSYKPTEIGEDRSWLHGIIDNPKENKPSCKADDNNKDRAISTPTQDHRSGE

SEQ ID NO: 25916 - protein, 85 aa, unidentified
  REGION 1..85: note = Description of Unknown:hvTR_P32530 target sequence
ESGISRRTSESKTETHARILDQQGIHRASRRGTSPNPLPENMGNERNTRIDEDSPNERRHQRSVLTDEDRKMAEDSNKREEDQVE

SEQ ID NO: 25917 - protein, 85 aa, unidentified
  REGION 1..85: note = Description of Unknown:hvTR_P32530 target sequence
GFPEEIRRSTPLSDDGESRTNNNGRSMETSSTHSTRITDVIINPSPELEDAVLQRNKRRPTIIRRNQTRSERTQNSELHKSTSEN

SEQ ID NO: 25918 - protein, 85 aa, unidentified
  REGION 1..85: note = Description of Unknown:hvTR_P32530 target sequence
SSNLEDHNTKTSPKGPPPKNEESAATPKNNHNHRKTKYTMNNANNNTKSPPTPEHDTTANEEETSNTSVDEMAKLLVSLGVMKSQ

SEQ ID NO: 25919 - protein, 85 aa, unidentified
  REGION 1..85: note = Description of Unknown:hvTR_P32530 target sequence
HEFELSRSASHVFAKRMLKSANYKEMTFNLCGMLISVEKSLENKVEENRTLLKQIQEEINSSRDLHKRFSEYQKEQNSLMMANLS

SEQ ID NO: 25920 - protein, 85 aa, unidentified
  REGION 1..85: note = Description of Unknown:hvTR_P32530 target sequence
TLHIITDRGGKTGDPSDTTRSPSVFTKGKDNKVKKTRFDPSMEALGGQEFKPDLIREDELRDDIKNPVLEENNNDLQASNASRLI

SEQ ID NO: 25921 - protein, 84 aa, unidentified
  REGION 1..84: note = Description of Unknown:hvTR_P32530 target sequence
ELRDDIKNPVLEENNNDLQASNASRLIPSTEKHTLHSLKLVIENSPLSRVEKKAYIKSLYKCRTNQEVKNVMELFEEDIDSLTN

SEQ ID NO: 25922 - protein, 85 aa, unidentified
  REGION 1..85: note = Description of Unknown:hvTR_P32530 target sequence
IGLLDVVLSYKPTEIGEDRSWLHGIIDNPKENKPSCKADDNNKDRAISTPTQDHRSGEESGISRRTSESKTETHARILDQQGIHR

SEQ ID NO: 25923 - protein, 85 aa, unidentified
  REGION 1..85: note = Description of Unknown:hvTR_P32530 target sequence
ASRRGTSPNPLPENMGNERNTRIDEDSPNERRHQRSVLTDEDRKMAEDSNKREEDQVEGFPEEIRRSTPLSDDGESRTNNNGRSM

SEQ ID NO: 25924 - protein, 85 aa, unidentified
  REGION 1..85: note = Description of Unknown:hvTR_P32530 target sequence
ETSSTHSTRITDVIINPSPELEDAVLQRNKRRPTIIRRNQTRSERTQNSELHKSTSENSSNLEDHNTKTSPKGPPPKNEESAATP

SEQ ID NO: 25925 - protein, 85 aa, unidentified
  REGION 1..85: note = Description of Unknown:hvTR_P32530 target sequence
KNNHNHRKTKYTMNNANNNTKSPPTPEHDTTANEEETSNTSVDEMAKLLVSLGVMKSQHEFELSRSASHVFAKRMLKSANYKEMT

SEQ ID NO: 25926 - protein, 85 aa, unidentified
  REGION 1..85: note = Description of Unknown:hvTR_P32530 target sequence
FNLCGMLISVEKSLENKVEENRTLLKQIQEEINSSRDLHKRFSEYQKEQNSLMMANLSTLHIITDRGGKTGDPSDTTRSPSVFTK

SEQ ID NO: 25927 - protein, 85 aa, unidentified
  REGION 1..85: note = Description of Unknown:hvTR_P32530 target sequence
GKDNKVKKTRFDPSMEALGGQEFKPDLIREDELRDDIKNPVLEENNNDLQASNASRLIPSTEKHTLHSLKLVIENSPLSRVEKKA

SEQ ID NO: 25928 - protein, 85 aa, unidentified
  REGION 1..85: note = Description of Unknown:cds_NZ_WFIY01000004.1_cds_WP_155863350.1_1321 target sequence
QLGFISNQITSAIIQGTSIVWFPVPKFDSPSIFAKLLDEDGGEFSILPEKIESIKKYYEHPLVLTTEVKTERGGSLKVTDLLPLG

SEQ ID NO: 25929 - protein, 85 aa, unidentified
  REGION 1..85: note = Description of Unknown:cds_NZ_WFIY01000004.1_cds_WP_155863350.1_1321 target sequence
ETVIIRKVESDVPFTVVFKPAFKYALYRPIILGDRFVNPKGRDCVAFLYKWDGKVSRESSFTWRFSEGKGFLVANYATDKEHGAF

SEQ ID NO: 25930 - protein, 85 aa, unidentified
  REGION 1..85: note = Description of Unknown:cds_NZ_WFIY01000004.1_cds_WP_155863350.1_1321 target sequence
SERGKALQMDFEKPFEKTIKYWESFNVRSKVYEDLYRSSVYVLLGSIYSPSGASIASPTTSLPEVVGGSRNWDYRFAWIRDSSIT

SEQ ID NO: 25931 - protein, 85 aa, unidentified
  REGION 1..85: note = Description of Unknown:cds_NZ_WFIY01000004.1_cds_WP_155863350.1_1321 target sequence
AEALINAGFIVEARRILNFLLSLVNFTSKPFYYPLYTVEGTIPPPEVKLMWLSGYKNSKPVRVGNAASKQIQLDVEGFFMNALYK

SEQ ID NO: 25932 - protein, 85 aa, unidentified
  REGION 1..85: note = Description of Unknown:cds_NZ_WFIY01000004.1_cds_WP_155863350.1_1321 target sequence
YFEKTGDTVLIKDVFDKIEHIADWISENWLIKDSGIWEDRGEPKHYTHSKIMMWVALDRAGKLAEYIGKEDRWKESKEKIRKWVL

SEQ ID NO: 25933 - protein, 85 aa, unidentified
  REGION 1..85: note = Description of Unknown:cds_NZ_WFIY01000004.1_cds_WP_155863350.1_1321 target sequence
ENCVSNGYLARFAGSEDIDSSILSAPLYGFISEKDGLFLNTLSKIEKELKVGNFVKRYKGDFMGEAKHPFLLTTLWLARVYVRLG

SEQ ID NO: 25934 - protein, 84 aa, unidentified
  REGION 1..84: note = Description of Unknown:cds_NZ_WFIY01000004.1_cds_WP_155863350.1_1321 target sequence
KGDFMGEAKHPFLLTTLWLARVYVRLGRTEEVKEIISDIERIAGSLHLVGEHVDVEKKEFTGNFPQVFVHAEIVNLVKEIEGVT

SEQ ID NO: 25935 - protein, 85 aa, unidentified
  REGION 1..85: note = Description of Unknown:cds_NZ_WFIY01000004.1_cds_WP_155863350.1_1321 target sequence
DSPSIFAKLLDEDGGEFSILPEKIESIKKYYEHPLVLTTEVKTERGGSLKVTDLLPLGETVIIRKVESDVPFTVVFKPAFKYALY

SEQ ID NO: 25936 - protein, 85 aa, unidentified
  REGION 1..85: note = Description of Unknown:cds_NZ_WFIY01000004.1_cds_WP_155863350.1_1321 target sequence
RPIILGDRFVNPKGRDCVAFLYKWDGKVSRESSFTWRFSEGKGFLVANYATDKEHGAFSERGKALQMDFEKPFEKTIKYWESFNV

SEQ ID NO: 25937 - protein, 85 aa, unidentified
  REGION 1..85: note = Description of Unknown:cds_NZ_WFIY01000004.1_cds_WP_155863350.1_1321 target sequence
RSKVYEDLYRSSVYVLLGSIYSPSGASIASPTTSLPEVVGGSRNWDYRFAWIRDSSITAEALINAGFIVEARRILNFLLSLVNFT

SEQ ID NO: 25938 - protein, 85 aa, unidentified
  REGION 1..85: note = Description of Unknown:cds_NZ_WFIY01000004.1_cds_WP_155863350.1_1321 target sequence
SKPFYYPLYTVEGTIPPPEVKLMWLSGYKNSKPVRVGNAASKQIQLDVEGFFMNALYKYFEKTGDTVLIKDVFDKIEHIADWISE

SEQ ID NO: 25939 - protein, 85 aa, unidentified
  REGION 1..85: note = Description of Unknown:cds_NZ_WFIY01000004.1_cds_WP_155863350.1_1321 target sequence
NWLIKDSGIWEDRGEPKHYTHSKIMMWVALDRAGKLAEYIGKEDRWKESKEKIRKWVLENCVSNGYLARFAGSEDIDSSILSAPL

SEQ ID NO: 25940 - protein, 85 aa, unidentified
  REGION 1..85: note = Description of Unknown:cds_NZ_WFIY01000004.1_cds_WP_155863350.1_1321 target sequence
YGFISEKDGLFLNTLSKIEKELKVGNFVKRYKGDFMGEAKHPFLLTTLWLARVYVRLGRTEEVKEIISDIERIAGSLHLVGEHVD

SEQ ID NO: 25941 - protein, 85 aa, unidentified
  REGION 1..85: note = Description of Unknown:cds_NC_035460.1_cds_YP_009407990.1_39 target sequence
DFIRRKYLIYTIDNNIDFLKEDALNKISNFTLNHVLALKYLITNFPKQIINKDMLNNTNFYVFLHMVKCCDVYDTVLKQSFDIPS

SEQ ID NO: 25942 - protein, 85 aa, unidentified
  REGION 1..85: note = Description of Unknown:cds_NC_035460.1_cds_YP_009407990.1_39 target sequence
LYVRALTKNYTAFSNAIQTYKTIVGDLLKDDKFLEVIKYAKSFNEIIGVNYDLSLNPLFYHDEPIQDMEIIYYKLFKKTTFKTVK

SEQ ID NO: 25943 - protein, 85 aa, unidentified
  REGION 1..85: note = Description of Unknown:cds_NC_035460.1_cds_YP_009407990.1_39 target sequence
RLDVIRLMIWAYLNKQDTGLEFKDNDNQDIYTLFQKSGRIINSDMTEKFKDYIYPDKTKSSYWIWLNDEIASDSNIYENKNAVTM

SEQ ID NO: 25944 - protein, 85 aa, unidentified
  REGION 1..85: note = Description of Unknown:cds_NC_035460.1_cds_YP_009407990.1_39 target sequence
YDKILSYIYLEIKQGRVNKNMLKLVYMFETENYLKSILLQIIYDVPGDILSIIDSEDEDWKKYFIGLYKENFINGKTFISARTFY

SEQ ID NO: 25945 - protein, 85 aa, unidentified
  REGION 1..85: note = Description of Unknown:cds_NC_035460.1_cds_YP_009407990.1_39 target sequence
DDLFKIVASIDPKYFNVENVLSLFNTDPLKVKRFDDLEINSTYISNIIYETIDLDLLEMEKMQPCQIYNESTEYYIKEYNTYKFL

SEQ ID NO: 25946 - protein, 85 aa, unidentified
  REGION 1..85: note = Description of Unknown:cds_NC_035460.1_cds_YP_009407990.1_39 target sequence
KENDPNILYNGILTKLSQIPENKKENLFSKNILKYYLDSKLAQLGLILPNYNNDIIVSILSHLKCVEDLSTFVKYSIQYNSSILP

SEQ ID NO: 25947 - protein, 84 aa, unidentified
  REGION 1..84: note = Description of Unknown:cds_NC_035460.1_cds_YP_009407990.1_39 target sequence
SILSHLKCVEDLSTFVKYSIQYNSSILPALIKTILASFNISLIVIFQKFLRDNLYHVEAFLDKSCHLTTNDKKYIIQVIKHGRT

SEQ ID NO: 25948 - protein, 85 aa, unidentified
  REGION 1..85: note = Description of Unknown:cds_NC_035460.1_cds_YP_009407990.1_39 target sequence
SNFTLNHVLALKYLITNFPKQIINKDMLNNTNFYVFLHMVKCCDVYDTVLKQSFDIPSLYVRALTKNYTAFSNAIQTYKTIVGDL

SEQ ID NO: 25949 - protein, 85 aa, unidentified
  REGION 1..85: note = Description of Unknown:cds_NC_035460.1_cds_YP_009407990.1_39 target sequence
LKDDKFLEVIKYAKSFNEIIGVNYDLSLNPLFYHDEPIQDMEIIYYKLFKKTTFKTVKRLDVIRLMIWAYLNKQDTGLEFKDNDN

SEQ ID NO: 25950 - protein, 85 aa, unidentified
  REGION 1..85: note = Description of Unknown:cds_NC_035460.1_cds_YP_009407990.1_39 target sequence
QDIYTLFQKSGRIINSDMTEKFKDYIYPDKTKSSYWIWLNDEIASDSNIYENKNAVTMYDKILSYIYLEIKQGRVNKNMLKLVYM

SEQ ID NO: 25951 - protein, 85 aa, unidentified
  REGION 1..85: note = Description of Unknown:cds_NC_035460.1_cds_YP_009407990.1_39 target sequence
FETENYLKSILLQIIYDVPGDILSIIDSEDEDWKKYFIGLYKENFINGKTFISARTFYDDLFKIVASIDPKYFNVENVLSLFNTD

SEQ ID NO: 25952 - protein, 85 aa, unidentified
  REGION 1..85: note = Description of Unknown:cds_NC_035460.1_cds_YP_009407990.1_39 target sequence
PLKVKRFDDLEINSTYISNIIYETIDLDLLEMEKMQPCQIYNESTEYYIKEYNTYKFLKENDPNILYNGILTKLSQIPENKKENL

SEQ ID NO: 25953 - protein, 85 aa, unidentified
  REGION 1..85: note = Description of Unknown:cds_NC_035460.1_cds_YP_009407990.1_39 target sequence
FSKNILKYYLDSKLAQLGLILPNYNNDIIVSILSHLKCVEDLSTFVKYSIQYNSSILPALIKTILASFNISLIVIFQKFLRDNLY

SEQ ID NO: 25954 - protein, 85 aa, unidentified
  REGION 1..85: note = Description of Unknown:cds_NC_007409.1_cds_YP_319880.1_49 target sequence
EFFRFINALLGFPEEERKKKQSSGGTHNEHKPEQQTNAQHPSPQPIHHTPPSHSSETNNEHKPTPTPIRPAPPPPPPIIRHLKTH

SEQ ID NO: 25955 - protein, 85 aa, unidentified
  REGION 1..85: note = Description of Unknown:cds_NC_007409.1_cds_YP_319880.1_49 target sequence
GSGSTTTHNEHESTPPSHYIRPMPIEHEPTPSPQPVTHNSSTNNEHESTPLPTPTPPNSGNEHKSTSAPTPPGLHRTPLPTPPIH

SEQ ID NO: 25956 - protein, 85 aa, unidentified
  REGION 1..85: note = Description of Unknown:cds_NC_007409.1_cds_YP_319880.1_49 target sequence
HGIPTQIPPKREPEHHTHGSTNNEHESKRSPIPTPPGLHRIPTPTPPTHQTSPSHSSGGTHNEHESHPPTLHIPPSHHIRPMPIP

SEQ ID NO: 25957 - protein, 85 aa, unidentified
  REGION 1..85: note = Description of Unknown:cds_NC_007409.1_cds_YP_319880.1_49 target sequence
PNPPIVREPTPTPQPTPIPTPPRLHRIPTPTPPRTPQPTPPPTHGSSSTNSSGSTNNEHKPTPKPIPIPPTPPPPPPHHGIPTQI

SEQ ID NO: 25958 - protein, 85 aa, unidentified
  REGION 1..85: note = Description of Unknown:cds_NC_007409.1_cds_YP_319880.1_49 target sequence
PPKHESEHHDHGSSSTNSSSSTSNSSSGGTNNEHESTPSPQPMPIEHKPEQQTNAQNRITPIINLSQTKQKTTEKQTSCTIQNLE

SEQ ID NO: 25959 - protein, 85 aa, unidentified
  REGION 1..85: note = Description of Unknown:cds_NC_007409.1_cds_YP_319880.1_49 target sequence
YAIQIGNLTQAKKILNNLSSNGQISQTKVNMANTVIEGLTKLKMQNQPISNVLSNLTNSFQQMYQNYIRTGKMPDNLIELANVIN

SEQ ID NO: 25960 - protein, 84 aa, unidentified
  REGION 1..84: note = Description of Unknown:cds_NC_007409.1_cds_YP_319880.1_49 target sequence
NSFQQMYQNYIRTGKMPDNLIELANVINAITSLLPQYSASVPPNVKAEISRLTVLQQGGSTGTVPAVFFQATEEQRPVSNLIVQ

SEQ ID NO: 25961 - protein, 85 aa, unidentified
  REGION 1..85: note = Description of Unknown:cds_NC_007409.1_cds_YP_319880.1_49 target sequence
NEHKPEQQTNAQHPSPQPIHHTPPSHSSETNNEHKPTPTPIRPAPPPPPPIIRHLKTHGSGSTTTHNEHESTPPSHYIRPMPIEH

SEQ ID NO: 25962 - protein, 85 aa, unidentified
  REGION 1..85: note = Description of Unknown:cds_NC_007409.1_cds_YP_319880.1_49 target sequence
EPTPSPQPVTHNSSTNNEHESTPLPTPTPPNSGNEHKSTSAPTPPGLHRTPLPTPPIHHGIPTQIPPKREPEHHTHGSTNNEHES

SEQ ID NO: 25963 - protein, 85 aa, unidentified
  REGION 1..85: note = Description of Unknown:cds_NC_007409.1_cds_YP_319880.1_49 target sequence
KRSPIPTPPGLHRIPTPTPPTHQTSPSHSSGGTHNEHESHPPTLHIPPSHHIRPMPIPPNPPIVREPTPTPQPTPIPTPPRLHRI

SEQ ID NO: 25964 - protein, 85 aa, unidentified
  REGION 1..85: note = Description of Unknown:cds_NC_007409.1_cds_YP_319880.1_49 target sequence
PTPTPPRTPQPTPPPTHGSSSTNSSGSTNNEHKPTPKPIPIPPTPPPPPPHHGIPTQIPPKHESEHHDHGSSSTNSSSSTSNSSS

SEQ ID NO: 25965 - protein, 85 aa, unidentified
  REGION 1..85: note = Description of Unknown:cds_NC_007409.1_cds_YP_319880.1_49 target sequence
GGTNNEHESTPSPQPMPIEHKPEQQTNAQNRITPIINLSQTKQKTTEKQTSCTIQNLEYAIQIGNLTQAKKILNNLSSNGQISQT

SEQ ID NO: 25966 - protein, 85 aa, unidentified
  REGION 1..85: note = Description of Unknown:cds_NC_007409.1_cds_YP_319880.1_49 target sequence
KVNMANTVIEGLTKLKMQNQPISNVLSNLTNSFQQMYQNYIRTGKMPDNLIELANVINAITSLLPQYSASVPPNVKAEISRLTVL

SEQ ID NO: 25967 - protein, 85 aa, unidentified
  REGION 1..85: note = Description of Unknown:hvTR_Q9DUN1 target sequence
AGRRLTWISEFIVGALDSDKYPLVKWLDRSTGTFLAPAARNDVIPLDSLQFFIDFKRECLSKGLHPRDLLGSPITAFGKICTTSR

SEQ ID NO: 25968 - protein, 85 aa, unidentified
  REGION 1..85: note = Description of Unknown:hvTR_Q9DUN1 target sequence
RLRRLPGEEYEVVQGINCRRWRLLCAEVKECWWCVHARTHLHSGSSLWEILYQHSVRLEKHRRRPRPFVGENSDSSEEDHPAFCD

SEQ ID NO: 25969 - protein, 85 aa, unidentified
  REGION 1..85: note = Description of Unknown:hvTR_Q9DUN1 target sequence
VPVTQTGAESEDSGDEGPSTRHSASGVQPVDDANADSPGSGDEGPSTRHSDSQPPPADETTVHTDNVEDDLTLLDKESACALMYH

SEQ ID NO: 25970 - protein, 85 aa, unidentified
  REGION 1..85: note = Description of Unknown:hvTR_Q9DUN1 target sequence
VGQEMDMLMRAMCDEDLFDLLGIPEDVIATSQPGGDTDASGVVTEGSIAASAVGAGVEDVYLAGALEAQNVAGEYVLEISDEEVD

SEQ ID NO: 25971 - protein, 85 aa, unidentified
  REGION 1..85: note = Description of Unknown:hvTR_Q9DUN1 target sequence
DGAGLPPASRRRPVVGEFLWDDGPRRHERPTTRRIRHRKLRSAYYRVARPPVMITDRLGVEVFYFGRPAMSLEVERKVFILCSQN

SEQ ID NO: 25972 - protein, 85 aa, unidentified
  REGION 1..85: note = Description of Unknown:hvTR_Q9DUN1 target sequence
PLADISHSCLHSRKGLRVLLPKPDDNNTGPGDVNLLAAVLRSFASGLVIVSLRSGIYVKNLCKSTVLYHGNNPPKKFGVICGLSS

SEQ ID NO: 25973 - protein, 84 aa, unidentified
  REGION 1..84: note = Description of Unknown:hvTR_Q9DUN1 target sequence
YVKNLCKSTVLYHGNNPPKKFGVICGLSSRAVLDVFNVAQYRIQGHEHIKKTTVFIGGDPTSAEQFDMVPLVIKLRLRSVTCDD

SEQ ID NO: 25974 - protein, 85 aa, unidentified
  REGION 1..85: note = Description of Unknown:hvTR_Q9DUN1 target sequence
DRSTGTFLAPAARNDVIPLDSLQFFIDFKRECLSKGLHPRDLLGSPITAFGKICTTSRRLRRLPGEEYEVVQGINCRRWRLLCAE

SEQ ID NO: 25975 - protein, 85 aa, unidentified
  REGION 1..85: note = Description of Unknown:hvTR_Q9DUN1 target sequence
VKECWWCVHARTHLHSGSSLWEILYQHSVRLEKHRRRPRPFVGENSDSSEEDHPAFCDVPVTQTGAESEDSGDEGPSTRHSASGV

SEQ ID NO: 25976 - protein, 85 aa, unidentified
  REGION 1..85: note = Description of Unknown:hvTR_Q9DUN1 target sequence
QPVDDANADSPGSGDEGPSTRHSDSQPPPADETTVHTDNVEDDLTLLDKESACALMYHVGQEMDMLMRAMCDEDLFDLLGIPEDV

SEQ ID NO: 25977 - protein, 85 aa, unidentified
  REGION 1..85: note = Description of Unknown:hvTR_Q9DUN1 target sequence
IATSQPGGDTDASGVVTEGSIAASAVGAGVEDVYLAGALEAQNVAGEYVLEISDEEVDDGAGLPPASRRRPVVGEFLWDDGPRRH

SEQ ID NO: 25978 - protein, 85 aa, unidentified
  REGION 1..85: note = Description of Unknown:hvTR_Q9DUN1 target sequence
ERPTTRRIRHRKLRSAYYRVARPPVMITDRLGVEVFYFGRPAMSLEVERKVFILCSQNPLADISHSCLHSRKGLRVLLPKPDDNN

SEQ ID NO: 25979 - protein, 85 aa, unidentified
  REGION 1..85: note = Description of Unknown:hvTR_Q9DUN1 target sequence
TGPGDVNLLAAVLRSFASGLVIVSLRSGIYVKNLCKSTVLYHGNNPPKKFGVICGLSSRAVLDVFNVAQYRIQGHEHIKKTTVFI

SEQ ID NO: 25980 - protein, 85 aa, unidentified
  REGION 1..85: note = Description of Unknown:cds_NZ_WFIY01000004.1_cds_WP_155863846.1_1742 target sequence
KRIESLWIPDKIEKIWLLTFELSKIASMGGLGTAVYNLGKELASLGKQVTVIMPSHGRHMNDYYRSLLKLRDSGITIYGVRKGMN

SEQ ID NO: 25981 - protein, 85 aa, unidentified
  REGION 1..85: note = Description of Unknown:cds_NZ_WFIY01000004.1_cds_WP_155863846.1_1742 target sequence
GVYYPYKLGFEIGELDGMKIMLAKGLDYDTGRIMDSWGIYDYAMEKSALLARAIEGLIQNMSLEDVPSIIHVNDWHSVLAGVKAK

SEQ ID NO: 25982 - protein, 85 aa, unidentified
  REGION 1..85: note = Description of Unknown:cds_NZ_WFIY01000004.1_cds_WP_155863846.1_1742 target sequence
LMFEQRRVIVPLMYTIHLLNKIGAPWHYASPDWGGLEDYYHYIWMVAKHIAYKTSVLWDYCEGKIERFGAYEADIIATVSKSYLN

SEQ ID NO: 25983 - protein, 85 aa, unidentified
  REGION 1..85: note = Description of Unknown:cds_NZ_WFIY01000004.1_cds_WP_155863846.1_1742 target sequence
YDVFPYIGNFMENKSCVTYNGTDWKLEEASALSIKYFGTADRKVARKSAYKLISLQKAIPEDYTTGNMLWNNRHRIGIKDDWTTE

SEQ ID NO: 25984 - protein, 85 aa, unidentified
  REGION 1..85: note = Description of Unknown:cds_NZ_WFIY01000004.1_cds_WP_155863846.1_1742 target sequence
ELQDGPLVLFTGRIIYQKGIDLLLRAFKDVVNEIWNARLIVFGVPTGDYGLLQDIIDRSAEIRDNVRLLISHGINPEIYKVAHYV

SEQ ID NO: 25985 - protein, 85 aa, unidentified
  REGION 1..85: note = Description of Unknown:cds_NZ_WFIY01000004.1_cds_WP_155863846.1_1742 target sequence
ASVFVVPSRWEPFGINAIEAMAVGTPVIAYSVGGLTESILDLRWNKDGTGFLVEPESISSLSTAIKTAIYLSLADENDDRSYLNK

SEQ ID NO: 25986 - protein, 84 aa, unidentified
  REGION 1..84: note = Description of Unknown:cds_NZ_WFIY01000004.1_cds_WP_155863846.1_1742 target sequence
SISSLSTAIKTAIYLSLADENDDRSYLNKSYIYKTDNVHIWSVVRENAVKRVEENFRWNKVANSVLNCYEKGLIMAKYRALAYM

SEQ ID NO: 25987 - protein, 85 aa, unidentified
  REGION 1..85: note = Description of Unknown:cds_NZ_WFIY01000004.1_cds_WP_155863846.1_1742 target sequence
MGGLGTAVYNLGKELASLGKQVTVIMPSHGRHMNDYYRSLLKLRDSGITIYGVRKGMNGVYYPYKLGFEIGELDGMKIMLAKGLD

SEQ ID NO: 25988 - protein, 85 aa, unidentified
  REGION 1..85: note = Description of Unknown:cds_NZ_WFIY01000004.1_cds_WP_155863846.1_1742 target sequence
YDTGRIMDSWGIYDYAMEKSALLARAIEGLIQNMSLEDVPSIIHVNDWHSVLAGVKAKLMFEQRRVIVPLMYTIHLLNKIGAPWH

SEQ ID NO: 25989 - protein, 85 aa, unidentified
  REGION 1..85: note = Description of Unknown:cds_NZ_WFIY01000004.1_cds_WP_155863846.1_1742 target sequence
YASPDWGGLEDYYHYIWMVAKHIAYKTSVLWDYCEGKIERFGAYEADIIATVSKSYLNYDVFPYIGNFMENKSCVTYNGTDWKLE

SEQ ID NO: 25990 - protein, 85 aa, unidentified
  REGION 1..85: note = Description of Unknown:cds_NZ_WFIY01000004.1_cds_WP_155863846.1_1742 target sequence
EASALSIKYFGTADRKVARKSAYKLISLQKAIPEDYTTGNMLWNNRHRIGIKDDWTTEELQDGPLVLFTGRIIYQKGIDLLLRAF

SEQ ID NO: 25991 - protein, 85 aa, unidentified
  REGION 1..85: note = Description of Unknown:cds_NZ_WFIY01000004.1_cds_WP_155863846.1_1742 target sequence
KDVVNEIWNARLIVFGVPTGDYGLLQDIIDRSAEIRDNVRLLISHGINPEIYKVAHYVASVFVVPSRWEPFGINAIEAMAVGTPV

SEQ ID NO: 25992 - protein, 85 aa, unidentified
  REGION 1..85: note = Description of Unknown:cds_NZ_WFIY01000004.1_cds_WP_155863846.1_1742 target sequence
IAYSVGGLTESILDLRWNKDGTGFLVEPESISSLSTAIKTAIYLSLADENDDRSYLNKSYIYKTDNVHIWSVVRENAVKRVEENF

SEQ ID NO: 25993 - protein, 85 aa, unidentified
  REGION 1..85: note = Description of Unknown:cds_NZ_WFIY01000004.1_cds_WP_155863940.1_1857 target sequence
EKLSYDAVVIGGGLAGLMAAHEIAVSGYKVAVISKVFPTRSHSSSAEGGIAAYIEGNSDPNDNPDYMTYDTIKGGDFLVDQDAAE

SEQ ID NO: 25994 - protein, 85 aa, unidentified
  REGION 1..85: note = Description of Unknown:cds_NZ_WFIY01000004.1_cds_WP_155863940.1_1857 target sequence
LLSQKSGEIVRIMESWGTLFNRQPDGRVAVRYFGGQTYPRTRFVGDKTGMALLHTLFQRVSGLDIDFYNEWFALDLIRDDKRVVG

SEQ ID NO: 25995 - protein, 85 aa, unidentified
  REGION 1..85: note = Description of Unknown:cds_NZ_WFIY01000004.1_cds_WP_155863940.1_1857 target sequence
VVAMEMKSMTPAFFKARAIVMATGGMGMLYAHSTNAYINTGDGYAMALRAGAALKDPEFVQFHPTALYPSDILISEAARGEGAIL

SEQ ID NO: 25996 - protein, 85 aa, unidentified
  REGION 1..85: note = Description of Unknown:cds_NZ_WFIY01000004.1_cds_WP_155863940.1_1857 target sequence
INNKGERFMARYAPRKLDLAPRDITSRAIITEIREGRGFPGGYVGLDLRHLGEDYIKERLALAYEAAKNFAGVDATQEPIPVRPA

SEQ ID NO: 25997 - protein, 85 aa, unidentified
  REGION 1..85: note = Description of Unknown:cds_NZ_WFIY01000004.1_cds_WP_155863940.1_1857 target sequence
QHYYMGGIDVDITGQNPDLIGLFAAGEAACVSVHGANRLGSNSLLETLVFGRETGRAVAKFLSEHKEEDSNSLDKEAEKVVDDAY

SEQ ID NO: 25998 - protein, 85 aa, unidentified
  REGION 1..85: note = Description of Unknown:cds_NZ_WFIY01000004.1_cds_WP_155863940.1_1857 target sequence
KFVKSESGVHFGEILNKLRNVMWEKVGIFRDEDGMKDALSQIIELRKMTSSMYVLDKSNTYNTEFFNALELRNMLDLAIVIARTA

SEQ ID NO: 25999 - protein, 84 aa, unidentified
  REGION 1..84: note = Description of Unknown:cds_NZ_WFIY01000004.1_cds_WP_155863940.1_1857 target sequence
KSNTYNTEFFNALELRNMLDLAIVIARTALERKESRGAHYRTDYPERDDTNWLKHTIAYLKGETVEITYKPVRITRWKPEPRVY

SEQ ID NO: 26000 - protein, 85 aa, unidentified
  REGION 1..85: note = Description of Unknown:cds_NZ_WFIY01000004.1_cds_WP_155863940.1_1857 target sequence
YKVAVISKVFPTRSHSSSAEGGIAAYIEGNSDPNDNPDYMTYDTIKGGDFLVDQDAAELLSQKSGEIVRIMESWGTLFNRQPDGR

SEQ ID NO: 26001 - protein, 85 aa, unidentified
  REGION 1..85: note = Description of Unknown:cds_NZ_WFIY01000004.1_cds_WP_155863940.1_1857 target sequence
VAVRYFGGQTYPRTRFVGDKTGMALLHTLFQRVSGLDIDFYNEWFALDLIRDDKRVVGVVAMEMKSMTPAFFKARAIVMATGGMG

SEQ ID NO: 26002 - protein, 85 aa, unidentified
  REGION 1..85: note = Description of Unknown:cds_NZ_WFIY01000004.1_cds_WP_155863940.1_1857 target sequence
MLYAHSTNAYINTGDGYAMALRAGAALKDPEFVQFHPTALYPSDILISEAARGEGAILINNKGERFMARYAPRKLDLAPRDITSR

SEQ ID NO: 26003 - protein, 85 aa, unidentified
  REGION 1..85: note = Description of Unknown:cds_NZ_WFIY01000004.1_cds_WP_155863940.1_1857 target sequence
AIITEIREGRGFPGGYVGLDLRHLGEDYIKERLALAYEAAKNFAGVDATQEPIPVRPAQHYYMGGIDVDITGQNPDLIGLFAAGE

SEQ ID NO: 26004 - protein, 85 aa, unidentified
  REGION 1..85: note = Description of Unknown:cds_NZ_WFIY01000004.1_cds_WP_155863940.1_1857 target sequence
AACVSVHGANRLGSNSLLETLVFGRETGRAVAKFLSEHKEEDSNSLDKEAEKVVDDAYKFVKSESGVHFGEILNKLRNVMWEKVG

SEQ ID NO: 26005 - protein, 85 aa, unidentified
  REGION 1..85: note = Description of Unknown:cds_NZ_WFIY01000004.1_cds_WP_155863940.1_1857 target sequence
IFRDEDGMKDALSQIIELRKMTSSMYVLDKSNTYNTEFFNALELRNMLDLAIVIARTALERKESRGAHYRTDYPERDDTNWLKHT

SEQ ID NO: 26006 - protein, 85 aa, unidentified
  REGION 1..85: note = Description of Unknown:cds_NC_030656.1_cds_YP_009268750.1_35 target sequence
DFIRRKYLIHVIENNINVLRDDAVNKVSNFTLNHVLALRYLITTFPKAILTKDVFSNPNFFVFLHMAQSRDVFDAVLKAAFDAPT

SEQ ID NO: 26007 - protein, 85 aa, unidentified
  REGION 1..85: note = Description of Unknown:cds_NC_030656.1_cds_YP_009268750.1_35 target sequence
MYIKALVKHYTLFSNAIQTYKDLCQKLITDDRFIEVVKFSSALKDVIGVNYDLTLNPLFYKEEPIQDIEIVFTKLFKETKFKAVK

SEQ ID NO: 26008 - protein, 85 aa, unidentified
  REGION 1..85: note = Description of Unknown:cds_NC_030656.1_cds_YP_009268750.1_35 target sequence
KLPVLRLMIWAYLSKQDTGIEFEDNDRQDIFTIFQKVGPVIHSHLTEQFREFMFSKDKTSYWIWLNDKISNDSDIYKDRLAETMY

SEQ ID NO: 26009 - protein, 85 aa, unidentified
  REGION 1..85: note = Description of Unknown:cds_NC_030656.1_cds_YP_009268750.1_35 target sequence
EKILSYIYFEVTQGRVNKNMLKLVYIFEDNVEIKQMLLEIIYGVPGDILGIINNENEEWKQYFIHLYKESFIDGNTFVNEKTFYD

SEQ ID NO: 26010 - protein, 85 aa, unidentified
  REGION 1..85: note = Description of Unknown:cds_NC_030656.1_cds_YP_009268750.1_35 target sequence
NLFNVVAAIDPVYFKAERITSLFTVDVNSREMFDKMKINSTYISQIIYETLDIDMYLLEKQVSCQIYNENTVYYIKEYNTYKFLS

SEQ ID NO: 26011 - protein, 85 aa, unidentified
  REGION 1..85: note = Description of Unknown:cds_NC_030656.1_cds_YP_009268750.1_35 target sequence
EDDPLVINKGSLVKLSSINDIKERIDLFSLNILKYYLDGRLASIGLVLDDYAVDIVSKMLSHMKCIENVSCFIKFAVEKNESIIP

SEQ ID NO: 26012 - protein, 84 aa, unidentified
  REGION 1..84: note = Description of Unknown:cds_NC_030656.1_cds_YP_009268750.1_35 target sequence
SKMLSHMKCIENVSCFIKFAVEKNESIIPAIIRTIIANFNVPVIVLFRDFLKQNLHHVETFFDNTKYLQENDKKYIRAVIEHGR

SEQ ID NO: 26013 - protein, 85 aa, unidentified
  REGION 1..85: note = Description of Unknown:cds_NC_030656.1_cds_YP_009268750.1_35 target sequence
SNFTLNHVLALRYLITTFPKAILTKDVFSNPNFFVFLHMAQSRDVFDAVLKAAFDAPTMYIKALVKHYTLFSNAIQTYKDLCQKL

SEQ ID NO: 26014 - protein, 85 aa, unidentified
  REGION 1..85: note = Description of Unknown:cds_NC_030656.1_cds_YP_009268750.1_35 target sequence
ITDDRFIEVVKFSSALKDVIGVNYDLTLNPLFYKEEPIQDIEIVFTKLFKETKFKAVKKLPVLRLMIWAYLSKQDTGIEFEDNDR

SEQ ID NO: 26015 - protein, 85 aa, unidentified
  REGION 1..85: note = Description of Unknown:cds_NC_030656.1_cds_YP_009268750.1_35 target sequence
QDIFTIFQKVGPVIHSHLTEQFREFMFSKDKTSYWIWLNDKISNDSDIYKDRLAETMYEKILSYIYFEVTQGRVNKNMLKLVYIF

SEQ ID NO: 26016 - protein, 85 aa, unidentified
  REGION 1..85: note = Description of Unknown:cds_NC_030656.1_cds_YP_009268750.1_35 target sequence
EDNVEIKQMLLEIIYGVPGDILGIINNENEEWKQYFIHLYKESFIDGNTFVNEKTFYDNLFNVVAAIDPVYFKAERITSLFTVDV

SEQ ID NO: 26017 - protein, 85 aa, unidentified
  REGION 1..85: note = Description of Unknown:cds_NC_030656.1_cds_YP_009268750.1_35 target sequence
NSREMFDKMKINSTYISQIIYETLDIDMYLLEKQVSCQIYNENTVYYIKEYNTYKFLSEDDPLVINKGSLVKLSSINDIKERIDL

SEQ ID NO: 26018 - protein, 85 aa, unidentified
  REGION 1..85: note = Description of Unknown:cds_NC_030656.1_cds_YP_009268750.1_35 target sequence
FSLNILKYYLDGRLASIGLVLDDYAVDIVSKMLSHMKCIENVSCFIKFAVEKNESIIPAIIRTIIANFNVPVIVLFRDFLKQNLH

SEQ ID NO: 26019 - protein, 85 aa, unidentified
  REGION 1..85: note = Description of Unknown:hvTR_P14239 target sequence
AHSKEVPSFRWTQSLRRGLSQFTQTVKSDVLKDAKLIADSIDFNQVAQVQRALRKTKRGEEDLNKLRDLNKEVDRLMSMRSVQRN

SEQ ID NO: 26020 - protein, 85 aa, unidentified
  REGION 1..85: note = Description of Unknown:hvTR_P14239 target sequence
TVFKAGDLGRVERMELASGLGNLKTKFRRAETGSQGVYMGNLSQSQLAKRSEILRTLGFQQQGTGGNGVVRVWDVKDPSKLNNQF

SEQ ID NO: 26021 - protein, 85 aa, unidentified
  REGION 1..85: note = Description of Unknown:hvTR_P14239 target sequence
GSVPALTIACMTVQGGETMNSVIQALTSLGLLYTVKYPNLSDLDRLTQEHDCLQIVTKDESSINISGYNFSLSAAVKAGASILDD

SEQ ID NO: 26022 - protein, 85 aa, unidentified
  REGION 1..85: note = Description of Unknown:hvTR_P14239 target sequence
GNMLETIRVTPDNFSSLIKSTIQVKRREGMFIDEKPGNRNPYENLLYKLCLSGDGWPYIGSRSQIIGRSWDNTSIDLTRKPVAGP

SEQ ID NO: 26023 - protein, 85 aa, unidentified
  REGION 1..85: note = Description of Unknown:hvTR_P14239 target sequence
RQPEKNGQNLRLANLTEIQEAVIREAVGKLDPTNTLWLDIEGPATDPVEMALFQPAGSKYIHCFRKPHDEKGFKNGSRHSHGILM

SEQ ID NO: 26024 - protein, 85 aa, unidentified
  REGION 1..85: note = Description of Unknown:hvTR_P14239 target sequence
KDIEDAMPGVLSYVIGLLPPDMVVTTQGSDDIRKLFDLHGRRDLKLVDVRLTSEQARQFDQQVWEKFGHLCKHHNGVVVSKKKRD

SEQ ID NO: 26025 - protein, 84 aa, unidentified
  REGION 1..84: note = Description of Unknown:hvTR_P14239 target sequence
QARQFDQQVWEKFGHLCKHHNGVVVSKKKRDKDAPFKLASSEPHCALLDCIMFQSVLDGKLYEEELTPLLPPSLLFLPKAAYAL

SEQ ID NO: 26026 - protein, 85 aa, unidentified
  REGION 1..85: note = Description of Unknown:hvTR_P14239 target sequence
SDVLKDAKLIADSIDFNQVAQVQRALRKTKRGEEDLNKLRDLNKEVDRLMSMRSVQRNTVFKAGDLGRVERMELASGLGNLKTKF

SEQ ID NO: 26027 - protein, 85 aa, unidentified
  REGION 1..85: note = Description of Unknown:hvTR_P14239 target sequence
RRAETGSQGVYMGNLSQSQLAKRSEILRTLGFQQQGTGGNGVVRVWDVKDPSKLNNQFGSVPALTIACMTVQGGETMNSVIQALT

SEQ ID NO: 26028 - protein, 85 aa, unidentified
  REGION 1..85: note = Description of Unknown:hvTR_P14239 target sequence
SLGLLYTVKYPNLSDLDRLTQEHDCLQIVTKDESSINISGYNFSLSAAVKAGASILDDGNMLETIRVTPDNFSSLIKSTIQVKRR

SEQ ID NO: 26029 - protein, 85 aa, unidentified
  REGION 1..85: note = Description of Unknown:hvTR_P14239 target sequence
EGMFIDEKPGNRNPYENLLYKLCLSGDGWPYIGSRSQIIGRSWDNTSIDLTRKPVAGPRQPEKNGQNLRLANLTEIQEAVIREAV

SEQ ID NO: 26030 - protein, 85 aa, unidentified
  REGION 1..85: note = Description of Unknown:hvTR_P14239 target sequence
GKLDPTNTLWLDIEGPATDPVEMALFQPAGSKYIHCFRKPHDEKGFKNGSRHSHGILMKDIEDAMPGVLSYVIGLLPPDMVVTTQ

SEQ ID NO: 26031 - protein, 85 aa, unidentified
  REGION 1..85: note = Description of Unknown:hvTR_P14239 target sequence
GSDDIRKLFDLHGRRDLKLVDVRLTSEQARQFDQQVWEKFGHLCKHHNGVVVSKKKRDKDAPFKLASSEPHCALLDCIMFQSVLD

SEQ ID NO: 26032 - protein, 85 aa, unidentified
  REGION 1..85: note = Description of Unknown:hvTR_P26578 target sequence
AHSKEIPSFRWTQSLRRGLSQVHPTVKTDVLKDAKLIADSIDFNQVSQVQRALRKNKRGEEDLNKLRDLNKEVDRLMSMKSIQKN

SEQ ID NO: 26033 - protein, 85 aa, unidentified
  REGION 1..85: note = Description of Unknown:hvTR_P26578 target sequence
TIFKIGDLGRDELMELASDLEKLKNKIKRTESGPQGLYMGNLSQLQLTKRSEILKTLGFQQQRGAGNGVVRIWDVSDPSKLNNQF

SEQ ID NO: 26034 - protein, 85 aa, unidentified
  REGION 1..85: note = Description of Unknown:hvTR_P26578 target sequence
GSMPALTIACMTVQGGETMNSVVQALTSLGLLYTVKYPNLNDLDKLTLEHECLQIVTKDESSINISGYNFSLSAAVKAGASILDG

SEQ ID NO: 26035 - protein, 85 aa, unidentified
  REGION 1..85: note = Description of Unknown:hvTR_P26578 target sequence
GNMLETIRVTPDNFSSLIKSTLQVKRKEGMFIDEKPGNRNPYENLLYKLCLSGDGWPYIGSRSQILGRSWDNTSVDLTKKPQVGP

SEQ ID NO: 26036 - protein, 85 aa, unidentified
  REGION 1..85: note = Description of Unknown:hvTR_P26578 target sequence
RQPEKNGQNLRLANLTEMQEAVIKEAVKKLDPTNTLWLDIEGPPTDPVELALYQPANKHYIHCFRKPHDEKGFKNGSRHSHGILM

SEQ ID NO: 26037 - protein, 85 aa, unidentified
  REGION 1..85: note = Description of Unknown:hvTR_P26578 target sequence
QDIEDAMPGVLSYVIGLLPQDMVITTQGSDDIRKLLDIHGRKDLKLVDVKLTSDQARLYDQQIWEKFGHLCKHHNGVVVNKKKRE

SEQ ID NO: 26038 - protein, 84 aa, unidentified
  REGION 1..84: note = Description of Unknown:hvTR_P26578 target sequence
QARLYDQQIWEKFGHLCKHHNGVVVNKKKREKDSPFKLSSGEPHCALLDCIMYQSVMDGKMVDEEPVALLPLSLLFLPKAAFAL

SEQ ID NO: 26039 - protein, 85 aa, unidentified
  REGION 1..85: note = Description of Unknown:hvTR_P26578 target sequence
TDVLKDAKLIADSIDFNQVSQVQRALRKNKRGEEDLNKLRDLNKEVDRLMSMKSIQKNTIFKIGDLGRDELMELASDLEKLKNKI

SEQ ID NO: 26040 - protein, 85 aa, unidentified
  REGION 1..85: note = Description of Unknown:hvTR_P26578 target sequence
KRTESGPQGLYMGNLSQLQLTKRSEILKTLGFQQQRGAGNGVVRIWDVSDPSKLNNQFGSMPALTIACMTVQGGETMNSVVQALT

SEQ ID NO: 26041 - protein, 85 aa, unidentified
  REGION 1..85: note = Description of Unknown:hvTR_P26578 target sequence
SLGLLYTVKYPNLNDLDKLTLEHECLQIVTKDESSINISGYNFSLSAAVKAGASILDGGNMLETIRVTPDNFSSLIKSTLQVKRK

SEQ ID NO: 26042 - protein, 85 aa, unidentified
  REGION 1..85: note = Description of Unknown:hvTR_P26578 target sequence
EGMFIDEKPGNRNPYENLLYKLCLSGDGWPYIGSRSQILGRSWDNTSVDLTKKPQVGPRQPEKNGQNLRLANLTEMQEAVIKEAV

SEQ ID NO: 26043 - protein, 85 aa, unidentified
  REGION 1..85: note = Description of Unknown:hvTR_P26578 target sequence
KKLDPTNTLWLDIEGPPTDPVELALYQPANKHYIHCFRKPHDEKGFKNGSRHSHGILMQDIEDAMPGVLSYVIGLLPQDMVITTQ

SEQ ID NO: 26044 - protein, 85 aa, unidentified
  REGION 1..85: note = Description of Unknown:hvTR_P26578 target sequence
GSDDIRKLLDIHGRKDLKLVDVKLTSDQARLYDQQIWEKFGHLCKHHNGVVVNKKKREKDSPFKLSSGEPHCALLDCIMYQSVMD

SEQ ID NO: 26045 - protein, 85 aa, unidentified
  REGION 1..85: note = Description of Unknown:cds_NZ_WFIY01000004.1_cds_WP_155863090.1_1003 target sequence
SYIDLLAWVVENKNELIGCRIDNIYNLEKLDNVFIFKLHCKNSDKNLIIEPGVRINFTKYDIQKEIGNKAKSLRELIRDLVISDV

SEQ ID NO: 26046 - protein, 85 aa, unidentified
  REGION 1..85: note = Description of Unknown:cds_NZ_WFIY01000004.1_cds_WP_155863090.1_1003 target sequence
QIIDKERILKIALSNGMKIIVELLPRGLLLVLDDQDKIKFSTEYKEFKDRVVKPGLPYVQPPKQNKVVVPKDIQLALHLTSNAEE

SEQ ID NO: 26047 - protein, 85 aa, unidentified
  REGION 1..85: note = Description of Unknown:cds_NZ_WFIY01000004.1_cds_WP_155863090.1_1003 target sequence
EYEKLEKSIVEGKITPCIQKGINFMPIEFEGCEKGNSFNDVIDEYFLELTKQKEIQKITEKIEGEKKKLEKTIQQIEENIKEYEE

SEQ ID NO: 26048 - protein, 85 aa, unidentified
  REGION 1..85: note = Description of Unknown:cds_NZ_WFIY01000004.1_cds_WP_155863090.1_1003 target sequence
KAEELRKIGKEIMEHYMEVENAIKNKEKKIKLEDKEIEIDPKLSVTKNASIYFDKAKEYVQKSKKAKETLEELKRKLNEIEIEIK

SEQ ID NO: 26049 - protein, 85 aa, unidentified
  REGION 1..85: note = Description of Unknown:cds_NZ_WFIY01000004.1_cds_WP_155863090.1_1003 target sequence
KEEEGRKLSIRKKEWYEKYRWSFTTNGFLVIAGKDADQNESLVRKLLEDNDIFLHADIQGAAATIIKNPKNITEQDIYDAAVIAA

SEQ ID NO: 26050 - protein, 85 aa, unidentified
  REGION 1..85: note = Description of Unknown:cds_NZ_WFIY01000004.1_cds_WP_155863090.1_1003 target sequence
SYSKAWKLGLAAVDVFWVYGSQVSKSPPAGEYLPKGSFMIYGKKNYIKSVKLNLAIGFKINDSLEIIVGSENSVSAKVKNYVLIS

SEQ ID NO: 26051 - protein, 84 aa, unidentified
  REGION 1..84: note = Description of Unknown:cds_NZ_WFIY01000004.1_cds_WP_155863090.1_1003 target sequence
AIGFKINDSLEIIVGSENSVSAKVKNYVLISPGDELERTADRIVKILSEANSINAGKELKNEVLSILPGKSKIIKVVKETNDKQ

SEQ ID NO: 26052 - protein, 85 aa, unidentified
  REGION 1..85: note = Description of Unknown:cds_NZ_WFIY01000004.1_cds_WP_155863090.1_1003 target sequence
EKLDNVFIFKLHCKNSDKNLIIEPGVRINFTKYDIQKEIGNKAKSLRELIRDLVISDVQIIDKERILKIALSNGMKIIVELLPRG

SEQ ID NO: 26053 - protein, 85 aa, unidentified
  REGION 1..85: note = Description of Unknown:cds_NZ_WFIY01000004.1_cds_WP_155863090.1_1003 target sequence
LLLVLDDQDKIKFSTEYKEFKDRVVKPGLPYVQPPKQNKVVVPKDIQLALHLTSNAEEEYEKLEKSIVEGKITPCIQKGINFMPI

SEQ ID NO: 26054 - protein, 85 aa, unidentified
  REGION 1..85: note = Description of Unknown:cds_NZ_WFIY01000004.1_cds_WP_155863090.1_1003 target sequence
EFEGCEKGNSFNDVIDEYFLELTKQKEIQKITEKIEGEKKKLEKTIQQIEENIKEYEEKAEELRKIGKEIMEHYMEVENAIKNKE

SEQ ID NO: 26055 - protein, 85 aa, unidentified
  REGION 1..85: note = Description of Unknown:cds_NZ_WFIY01000004.1_cds_WP_155863090.1_1003 target sequence
KKIKLEDKEIEIDPKLSVTKNASIYFDKAKEYVQKSKKAKETLEELKRKLNEIEIEIKKEEEGRKLSIRKKEWYEKYRWSFTTNG

SEQ ID NO: 26056 - protein, 85 aa, unidentified
  REGION 1..85: note = Description of Unknown:cds_NZ_WFIY01000004.1_cds_WP_155863090.1_1003 target sequence
FLVIAGKDADQNESLVRKLLEDNDIFLHADIQGAAATIIKNPKNITEQDIYDAAVIAASYSKAWKLGLAAVDVFWVYGSQVSKSP

SEQ ID NO: 26057 - protein, 85 aa, unidentified
  REGION 1..85: note = Description of Unknown:cds_NZ_WFIY01000004.1_cds_WP_155863090.1_1003 target sequence
PAGEYLPKGSFMIYGKKNYIKSVKLNLAIGFKINDSLEIIVGSENSVSAKVKNYVLISPGDELERTADRIVKILSEANSINAGKE

SEQ ID NO: 26058 - protein, 85 aa, unidentified
  REGION 1..85: note = Description of Unknown:cds_NZ_WFIY01000004.1_cds_WP_155862472.1_227 target sequence
AAGGVPVLLFKEGTSRSSGREALKNNILAARTLAEMLKTSLGPKGLDKMLIDSFGDVTITNDGATIVKEMEIQHPAAKLLVEAAK

SEQ ID NO: 26059 - protein, 85 aa, unidentified
  REGION 1..85: note = Description of Unknown:cds_NZ_WFIY01000004.1_cds_WP_155862472.1_227 target sequence
AQDAEVGDGTTSAVVLAGLLLEKADALLDQNIHPTIIIEGYKKAFNKSLELLSQIATKLDVSDLNSSTARENLRKIVYTTMSSKF

SEQ ID NO: 26060 - protein, 85 aa, unidentified
  REGION 1..85: note = Description of Unknown:cds_NZ_WFIY01000004.1_cds_WP_155862472.1_227 target sequence
LAEGDEFNKIMDMVIDAVATVAEPLPTGGYNVSLDLIKIDKKKGGSIEDSQLIKGIVLDKEVVHPGMPRRVEKAKIAVLDASLEV

SEQ ID NO: 26061 - protein, 85 aa, unidentified
  REGION 1..85: note = Description of Unknown:cds_NZ_WFIY01000004.1_cds_WP_155862472.1_227 target sequence
EKPEISAKISITSPEQIKAFLDEEAKYLKDMVDKLASIGANVVICQKGIDDIAQHFLAKKGIMAVRRVKRSDIEKLEKALGARII

SEQ ID NO: 26062 - protein, 85 aa, unidentified
  REGION 1..85: note = Description of Unknown:cds_NZ_WFIY01000004.1_cds_WP_155862472.1_227 target sequence
SNIKDASPEDLGYAELVEERKVGNDKMVFIEGAKNPRAVNILLRGSNDMALDEAERSINDALHALRNILLEPMIVPGGGAIELEL

SEQ ID NO: 26063 - protein, 85 aa, unidentified
  REGION 1..85: note = Description of Unknown:cds_NZ_WFIY01000004.1_cds_WP_155862472.1_227 target sequence
AMRLREYARTVGGKEQLAIEAYADALEEIPMILAETAGMEPISTLMELRAKHAKGLVNAGVDAINGKIVDDIYTLNVVEPIRVKR

SEQ ID NO: 26064 - protein, 84 aa, unidentified
  REGION 1..84: note = Description of Unknown:cds_NZ_WFIY01000004.1_cds_WP_155862472.1_227 target sequence
KGLVNAGVDAINGKIVDDIYTLNVVEPIRVKRQVLKSATEAATAVLKIDDLIAASQLKSSKEKEGEKSGEKKEGEESSSTSSIS

SEQ ID NO: 26065 - protein, 85 aa, unidentified
  REGION 1..85: note = Description of Unknown:cds_NZ_WFIY01000004.1_cds_WP_155862472.1_227 target sequence
LAARTLAEMLKTSLGPKGLDKMLIDSFGDVTITNDGATIVKEMEIQHPAAKLLVEAAKAQDAEVGDGTTSAVVLAGLLLEKADAL

SEQ ID NO: 26066 - protein, 85 aa, unidentified
  REGION 1..85: note = Description of Unknown:cds_NZ_WFIY01000004.1_cds_WP_155862472.1_227 target sequence
LDQNIHPTIIIEGYKKAFNKSLELLSQIATKLDVSDLNSSTARENLRKIVYTTMSSKFLAEGDEFNKIMDMVIDAVATVAEPLPT

SEQ ID NO: 26067 - protein, 85 aa, unidentified
  REGION 1..85: note = Description of Unknown:cds_NZ_WFIY01000004.1_cds_WP_155862472.1_227 target sequence
GGYNVSLDLIKIDKKKGGSIEDSQLIKGIVLDKEVVHPGMPRRVEKAKIAVLDASLEVEKPEISAKISITSPEQIKAFLDEEAKY

SEQ ID NO: 26068 - protein, 85 aa, unidentified
  REGION 1..85: note = Description of Unknown:cds_NZ_WFIY01000004.1_cds_WP_155862472.1_227 target sequence
LKDMVDKLASIGANVVICQKGIDDIAQHFLAKKGIMAVRRVKRSDIEKLEKALGARIISNIKDASPEDLGYAELVEERKVGNDKM

SEQ ID NO: 26069 - protein, 85 aa, unidentified
  REGION 1..85: note = Description of Unknown:cds_NZ_WFIY01000004.1_cds_WP_155862472.1_227 target sequence
VFIEGAKNPRAVNILLRGSNDMALDEAERSINDALHALRNILLEPMIVPGGGAIELELAMRLREYARTVGGKEQLAIEAYADALE

SEQ ID NO: 26070 - protein, 85 aa, unidentified
  REGION 1..85: note = Description of Unknown:cds_NZ_WFIY01000004.1_cds_WP_155862472.1_227 target sequence
EIPMILAETAGMEPISTLMELRAKHAKGLVNAGVDAINGKIVDDIYTLNVVEPIRVKRQVLKSATEAATAVLKIDDLIAASQLKS

SEQ ID NO: 26071 - protein, 85 aa, unidentified
  REGION 1..85: note = Description of Unknown:hvTR_Q90038 target sequence
SNSKEIPSFRWTQSLRRGLSEFTTPVKTDVLRDAKMILDGLDFNQVSLVQRILRKSKRNDGDLDKLRDLNKEVDNLMSMKSSQRD

SEQ ID NO: 26072 - protein, 85 aa, unidentified
  REGION 1..85: note = Description of Unknown:hvTR_Q90038 target sequence
TILKLGDLNKSELMDLASDLEKLKRKVGQTERSASGGVYLGNLSQSQLTKRSDLLRKLGFQQQQVRSPGVVRIWDVADPNRLNNQ

SEQ ID NO: 26073 - protein, 85 aa, unidentified
  REGION 1..85: note = Description of Unknown:hvTR_Q90038 target sequence
FGSVPALTIACMTKQSDNTMGDVVQALTSLGLLYTVKFPNLIDLEKLTAEHDCLQIVTKDESGLNISGYNYSLSAAVKAGATLLD

SEQ ID NO: 26074 - protein, 85 aa, unidentified
  REGION 1..85: note = Description of Unknown:hvTR_Q90038 target sequence
GGNMLETIRITPDNFSQIIKTTLSIKKKEGMFVDEKPGNRNPYENLLYKICLSGEGWPYIGSRSQIKGRSWENTTVDLSTKPQQG

SEQ ID NO: 26075 - protein, 85 aa, unidentified
  REGION 1..85: note = Description of Unknown:hvTR_Q90038 target sequence
PRTPEKAGQNIRLSHLTELQESVVREAMGKIDPTLTTWIDIEGTSNDPVELALYQPDTGNYILCYRKPHDEKGFKNGSRHSHGML

SEQ ID NO: 26076 - protein, 85 aa, unidentified
  REGION 1..85: note = Description of Unknown:hvTR_Q90038 target sequence
LKDLESAQPGLLSYVIGLLPQNMVLTTQGSDDIRRLVDTHGRKDLKIVDIKLASEQARKFEEPIWSDFGHLCKKHNGVIVPKKKK

SEQ ID NO: 26077 - protein, 84 aa, unidentified
  REGION 1..84: note = Description of Unknown:hvTR_Q90038 target sequence
ASEQARKFEEPIWSDFGHLCKKHNGVIVPKKKKDKDIPQSSEPHCALLDCLMFQSAIAGQPPQTKLEGLLPDALLFTLEAAFTI

SEQ ID NO: 26078 - protein, 85 aa, unidentified
  REGION 1..85: note = Description of Unknown:hvTR_Q90038 target sequence
TDVLRDAKMILDGLDFNQVSLVQRILRKSKRNDGDLDKLRDLNKEVDNLMSMKSSQRDTILKLGDLNKSELMDLASDLEKLKRKV

SEQ ID NO: 26079 - protein, 85 aa, unidentified
  REGION 1..85: note = Description of Unknown:hvTR_Q90038 target sequence
GQTERSASGGVYLGNLSQSQLTKRSDLLRKLGFQQQQVRSPGVVRIWDVADPNRLNNQFGSVPALTIACMTKQSDNTMGDVVQAL

SEQ ID NO: 26080 - protein, 85 aa, unidentified
  REGION 1..85: note = Description of Unknown:hvTR_Q90038 target sequence
TSLGLLYTVKFPNLIDLEKLTAEHDCLQIVTKDESGLNISGYNYSLSAAVKAGATLLDGGNMLETIRITPDNFSQIIKTTLSIKK

SEQ ID NO: 26081 - protein, 85 aa, unidentified
  REGION 1..85: note = Description of Unknown:hvTR_Q90038 target sequence
KEGMFVDEKPGNRNPYENLLYKICLSGEGWPYIGSRSQIKGRSWENTTVDLSTKPQQGPRTPEKAGQNIRLSHLTELQESVVREA

SEQ ID NO: 26082 - protein, 85 aa, unidentified
  REGION 1..85: note = Description of Unknown:hvTR_Q90038 target sequence
MGKIDPTLTTWIDIEGTSNDPVELALYQPDTGNYILCYRKPHDEKGFKNGSRHSHGMLLKDLESAQPGLLSYVIGLLPQNMVLTT

SEQ ID NO: 26083 - protein, 85 aa, unidentified
  REGION 1..85: note = Description of Unknown:hvTR_Q90038 target sequence
QGSDDIRRLVDTHGRKDLKIVDIKLASEQARKFEEPIWSDFGHLCKKHNGVIVPKKKKDKDIPQSSEPHCALLDCLMFQSAIAGQ

SEQ ID NO: 26084 - protein, 85 aa, unidentified
  REGION 1..85: note = Description of Unknown:hvTR_Q91PB2 target sequence
SDQSVPSFRWTQSLRRGLSAWTTSVKADVLNDTRALLSGLDFAKVASVQRMMRRVKRDDSDLVGLRDLNKEVDSLMIMKSNQKNM

SEQ ID NO: 26085 - protein, 85 aa, unidentified
  REGION 1..85: note = Description of Unknown:hvTR_Q91PB2 target sequence
FLKVGSLSKDELMELSSDLEKLKQKVQRTERVGNGTGQYQGNLSNTQLTRRSEILQLVGIQRAGLAPTGGVVKIWDIKDPSLLVN

SEQ ID NO: 26086 - protein, 85 aa, unidentified
  REGION 1..85: note = Description of Unknown:hvTR_Q91PB2 target sequence
QFGSVPAVTISCMTEQGGESLNDVVQGLTDLGLLYTAKYPNLNDLKALTTKHPSLNIITQEESQINISGYNLSLSAAVKAGACLI

SEQ ID NO: 26087 - protein, 85 aa, unidentified
  REGION 1..85: note = Description of Unknown:hvTR_Q91PB2 target sequence
DGGNMLETIKIEESTFTTVIKTLLEVKNKEKMFVSPTPGQRNPYENVLYKLCLSGDGWPYIASRSQIKGRAWDNTVVEFDTATVK

SEQ ID NO: 26088 - protein, 85 aa, unidentified
  REGION 1..85: note = Description of Unknown:hvTR_Q91PB2 target sequence
EPIPIRNGGAPLLTTLKPEIENQVKRSVESLLINDTTWIDIEGPPNDPVEFAIYQPESQRYIHCYRRPNDIKSFKDQSKYCHGIL

SEQ ID NO: 26089 - protein, 85 aa, unidentified
  REGION 1..85: note = Description of Unknown:hvTR_Q91PB2 target sequence
LKDVENARPGLISSIIRSLPKSMVFTAQGADDIRKLFDMHGRQDLKIVDVKLSAEESRIFEDLVWKRFEHLCDKHKGIVIKSKKK

SEQ ID NO: 26090 - protein, 84 aa, unidentified
  REGION 1..84: note = Description of Unknown:hvTR_Q91PB2 target sequence
SAEESRIFEDLVWKRFEHLCDKHKGIVIKSKKKGSTPATTNAHCALLDGVMFSAVISGSVSNEKPKRMLPIDLLFREPETTVVL

SEQ ID NO: 26091 - protein, 85 aa, unidentified
  REGION 1..85: note = Description of Unknown:hvTR_Q91PB2 target sequence
DVLNDTRALLSGLDFAKVASVQRMMRRVKRDDSDLVGLRDLNKEVDSLMIMKSNQKNMFLKVGSLSKDELMELSSDLEKLKQKVQ

SEQ ID NO: 26092 - protein, 85 aa, unidentified
  REGION 1..85: note = Description of Unknown:hvTR_Q91PB2 target sequence
RTERVGNGTGQYQGNLSNTQLTRRSEILQLVGIQRAGLAPTGGVVKIWDIKDPSLLVNQFGSVPAVTISCMTEQGGESLNDVVQG

SEQ ID NO: 26093 - protein, 85 aa, unidentified
  REGION 1..85: note = Description of Unknown:hvTR_Q91PB2 target sequence
LTDLGLLYTAKYPNLNDLKALTTKHPSLNIITQEESQINISGYNLSLSAAVKAGACLIDGGNMLETIKIEESTFTTVIKTLLEVK

SEQ ID NO: 26094 - protein, 85 aa, unidentified
  REGION 1..85: note = Description of Unknown:hvTR_Q91PB2 target sequence
NKEKMFVSPTPGQRNPYENVLYKLCLSGDGWPYIASRSQIKGRAWDNTVVEFDTATVKEPIPIRNGGAPLLTTLKPEIENQVKRS

SEQ ID NO: 26095 - protein, 85 aa, unidentified
  REGION 1..85: note = Description of Unknown:hvTR_Q91PB2 target sequence
VESLLINDTTWIDIEGPPNDPVEFAIYQPESQRYIHCYRRPNDIKSFKDQSKYCHGILLKDVENARPGLISSIIRSLPKSMVFTA

SEQ ID NO: 26096 - protein, 85 aa, unidentified
  REGION 1..85: note = Description of Unknown:hvTR_Q91PB2 target sequence
QGADDIRKLFDMHGRQDLKIVDVKLSAEESRIFEDLVWKRFEHLCDKHKGIVIKSKKKGSTPATTNAHCALLDGVMFSAVISGSV

SEQ ID NO: 26097 - protein, 85 aa, unidentified
  REGION 1..85: note = Description of Unknown:cds_NZ_WFIY01000004.1_cds_WP_155863593.1_1503 target sequence
DRNKALTVNFSQFLFAISMFLLIAPNYDNLIFITMDVLLVFFSGLLLFTKLSIHDKYFIAIIYAEIIIVGMLYYFTQGVSIYVLI

SEQ ID NO: 26098 - protein, 85 aa, unidentified
  REGION 1..85: note = Description of Unknown:cds_NZ_WFIY01000004.1_cds_WP_155863593.1_1503 target sequence
IYLLLVALGIKYNFLAEAMIVNFLILTFSTLVFPPNFGTDGMMLSYYAAYLFLHGENPYNPALTANVYTFFHLSQFIPILGTPLS

SEQ ID NO: 26099 - protein, 85 aa, unidentified
  REGION 1..85: note = Description of Unknown:cds_NZ_WFIY01000004.1_cds_WP_155863593.1_1503 target sequence
TGGVVTRYDYPALQMLILIPSVIFNINPNFITVIFYFLVVFLLYAKLRKVDKFLFLSFLLPYLFNINYRDFSAGGVTTLDWVFFA

SEQ ID NO: 26100 - protein, 85 aa, unidentified
  REGION 1..85: note = Description of Unknown:cds_NZ_WFIY01000004.1_cds_WP_155863593.1_1503 target sequence
LLSLFSKDVKAKGVFYGLALSLKQTPFALLPFYLISIYKEGGRSSLLKFITYTAISFLAINGYFIFLSPEYYFQGVLYPIVAPLI

SEQ ID NO: 26101 - protein, 85 aa, unidentified
  REGION 1..85: note = Description of Unknown:cds_NZ_WFIY01000004.1_cds_WP_155863593.1_1503 target sequence
GISMGLSMIAISGFFYIYPQFFTLALVIVTLTEVYFFWKYYDNLKDSWVFFPYFIFFVNYRALWNYFMSWPILGYALPNGEKSSR

SEQ ID NO: 26102 - protein, 85 aa, unidentified
  REGION 1..85: note = Description of Unknown:cds_NZ_WFIY01000004.1_cds_WP_155863593.1_1503 target sequence
SAINFKPLAIPLLLLVGLGIFFHFAYTPYYTSINVKVLHVCEKDGEIYGFLLNVSYYPKSPSLPNCIKPYFRIFPDAPSISANGY

SEQ ID NO: 26103 - protein, 84 aa, unidentified
  REGION 1..84: note = Description of Unknown:cds_NZ_WFIY01000004.1_cds_WP_155863593.1_1503 target sequence
NVSYYPKSPSLPNCIKPYFRIFPDAPSISANGYIFFSNATVLKKCSWEIVKLYSPYEGYYVPAVPLKVEAYYCNLIGIASVYKV

SEQ ID NO: 26104 - protein, 85 aa, unidentified
  REGION 1..85: note = Description of Unknown:cds_NZ_WFIY01000004.1_cds_WP_155863593.1_1503 target sequence
DNLIFITMDVLLVFFSGLLLFTKLSIHDKYFIAIIYAEIIIVGMLYYFTQGVSIYVLIIYLLLVALGIKYNFLAEAMIVNFLILT

SEQ ID NO: 26105 - protein, 85 aa, unidentified
  REGION 1..85: note = Description of Unknown:cds_NZ_WFIY01000004.1_cds_WP_155863593.1_1503 target sequence
FSTLVFPPNFGTDGMMLSYYAAYLFLHGENPYNPALTANVYTFFHLSQFIPILGTPLSTGGVVTRYDYPALQMLILIPSVIFNIN

SEQ ID NO: 26106 - protein, 85 aa, unidentified
  REGION 1..85: note = Description of Unknown:cds_NZ_WFIY01000004.1_cds_WP_155863593.1_1503 target sequence
PNFITVIFYFLVVFLLYAKLRKVDKFLFLSFLLPYLFNINYRDFSAGGVTTLDWVFFALLSLFSKDVKAKGVFYGLALSLKQTPF

SEQ ID NO: 26107 - protein, 85 aa, unidentified
  REGION 1..85: note = Description of Unknown:cds_NZ_WFIY01000004.1_cds_WP_155863593.1_1503 target sequence
ALLPFYLISIYKEGGRSSLLKFITYTAISFLAINGYFIFLSPEYYFQGVLYPIVAPLIGISMGLSMIAISGFFYIYPQFFTLALV

SEQ ID NO: 26108 - protein, 85 aa, unidentified
  REGION 1..85: note = Description of Unknown:cds_NZ_WFIY01000004.1_cds_WP_155863593.1_1503 target sequence
IVTLTEVYFFWKYYDNLKDSWVFFPYFIFFVNYRALWNYFMSWPILGYALPNGEKSSRSAINFKPLAIPLLLLVGLGIFFHFAYT

SEQ ID NO: 26109 - protein, 85 aa, unidentified
  REGION 1..85: note = Description of Unknown:cds_NZ_WFIY01000004.1_cds_WP_155863593.1_1503 target sequence
PYYTSINVKVLHVCEKDGEIYGFLLNVSYYPKSPSLPNCIKPYFRIFPDAPSISANGYIFFSNATVLKKCSWEIVKLYSPYEGYY

SEQ ID NO: 26110 - protein, 85 aa, unidentified
  REGION 1..85: note = Description of Unknown:cds_NC_024711.1_cds_YP_009052540.1_63 target sequence
NNKQLYEKLGQNSYDKVFPITYLQNILDKDTNNDLTVVLSRFNHLWIPYQGTRVNTRKAVPAIFRRNSLTISYYDAEHNLSVTES

SEQ ID NO: 26111 - protein, 85 aa, unidentified
  REGION 1..85: note = Description of Unknown:cds_NC_024711.1_cds_YP_009052540.1_63 target sequence
YTGSNLQAGVETSWVSDDNWTKILSEKYLEENGAKIPIADGTIDWDMLNEALKQMIAGDGKVNIINYPDEEDITIRLSPGCCNVN

SEQ ID NO: 26112 - protein, 85 aa, unidentified
  REGION 1..85: note = Description of Unknown:cds_NC_024711.1_cds_YP_009052540.1_63 target sequence
RLSFKDRPYEPEYKSGKGYKIVRKVLLPVEDDASNAEQLLFDGFLDDTYCEHYGQIILNTDKYEVIRTDLGNTAGIYYDTYHKLF

SEQ ID NO: 26113 - protein, 85 aa, unidentified
  REGION 1..85: note = Description of Unknown:cds_NC_024711.1_cds_YP_009052540.1_63 target sequence
VLRVKTIHDGVGFYNYYTRWTIVEPTDRVHPLRGVNTPAYGNSEDYNIYNTCLSDERPRLGIIYVNSVDNIKYYFNEENLVQVKN

SEQ ID NO: 26114 - protein, 85 aa, unidentified
  REGION 1..85: note = Description of Unknown:cds_NC_024711.1_cds_YP_009052540.1_63 target sequence
NIYLNYKAVLTQDMVNEENTRYIIRYAFDLSGKTITMPVGCELVFEGGIIENGTINLNKCKLTGMVGEESEYLPNVTCSNWAKGQ

SEQ ID NO: 26115 - protein, 85 aa, unidentified
  REGION 1..85: note = Description of Unknown:cds_NC_024711.1_cds_YP_009052540.1_63 target sequence
IEYRNGKICYWNGTEWRVMGDTSSFDSYTKQEINNLLKNYYTKSETYNKEEVNNLLNGYVTNDTFNNFKKEINQTITNSVNLDKI

SEQ ID NO: 26116 - protein, 84 aa, unidentified
  REGION 1..84: note = Description of Unknown:cds_NC_024711.1_cds_YP_009052540.1_63 target sequence
VNNLLNGYVTNDTFNNFKKEINQTITNSVNLDKIQKAINDGCGVNMTMPSANSNKLSLPIWTGTATQYATITPVAGMTYNIIDE

SEQ ID NO: 26117 - protein, 85 aa, unidentified
  REGION 1..85: note = Description of Unknown:cds_NC_024711.1_cds_YP_009052540.1_63 target sequence
DKDTNNDLTVVLSRFNHLWIPYQGTRVNTRKAVPAIFRRNSLTISYYDAEHNLSVTESYTGSNLQAGVETSWVSDDNWTKILSEK

SEQ ID NO: 26118 - protein, 85 aa, unidentified
  REGION 1..85: note = Description of Unknown:cds_NC_024711.1_cds_YP_009052540.1_63 target sequence
YLEENGAKIPIADGTIDWDMLNEALKQMIAGDGKVNIINYPDEEDITIRLSPGCCNVNRLSFKDRPYEPEYKSGKGYKIVRKVLL

SEQ ID NO: 26119 - protein, 85 aa, unidentified
  REGION 1..85: note = Description of Unknown:cds_NC_024711.1_cds_YP_009052540.1_63 target sequence
PVEDDASNAEQLLFDGFLDDTYCEHYGQIILNTDKYEVIRTDLGNTAGIYYDTYHKLFVLRVKTIHDGVGFYNYYTRWTIVEPTD

SEQ ID NO: 26120 - protein, 85 aa, unidentified
  REGION 1..85: note = Description of Unknown:cds_NC_024711.1_cds_YP_009052540.1_63 target sequence
RVHPLRGVNTPAYGNSEDYNIYNTCLSDERPRLGIIYVNSVDNIKYYFNEENLVQVKNNIYLNYKAVLTQDMVNEENTRYIIRYA

SEQ ID NO: 26121 - protein, 85 aa, unidentified
  REGION 1..85: note = Description of Unknown:cds_NC_024711.1_cds_YP_009052540.1_63 target sequence
FDLSGKTITMPVGCELVFEGGIIENGTINLNKCKLTGMVGEESEYLPNVTCSNWAKGQIEYRNGKICYWNGTEWRVMGDTSSFDS

SEQ ID NO: 26122 - protein, 85 aa, unidentified
  REGION 1..85: note = Description of Unknown:cds_NC_024711.1_cds_YP_009052540.1_63 target sequence
YTKQEINNLLKNYYTKSETYNKEEVNNLLNGYVTNDTFNNFKKEINQTITNSVNLDKIQKAINDGCGVNMTMPSANSNKLSLPIW

SEQ ID NO: 26123 - protein, 85 aa, unidentified
  REGION 1..85: note = Description of Unknown:cds_NZ_WFIY01000004.1_cds_WP_155863268.1_1223 target sequence
VDIFTLEIIKNGLIAASEEMFYAFQRTAKSPVIYEVLDYAVGITDYEGRGLVAQSPGVPGFSGVLDFTIREVLNKWKNELNPGDI

SEQ ID NO: 26124 - protein, 85 aa, unidentified
  REGION 1..85: note = Description of Unknown:cds_NZ_WFIY01000004.1_cds_WP_155863268.1_1223 target sequence
IATNIPYSGGTHLNDVALVMPVFYKDELLGFIVNKGHWSEIGGMHFGSWTSDANEIFQEGLQLPSIKIYVEDRPNRDVIDIIKAN

SEQ ID NO: 26125 - protein, 85 aa, unidentified
  REGION 1..85: note = Description of Unknown:cds_NZ_WFIY01000004.1_cds_WP_155863268.1_1223 target sequence
SRLPEATLGDMEAQIGSMKVAKKRIDELVRKYGIKAIKEAMEKLIEDGEKLSKLRLKELPKGTFEAEDYIDDDGINDNPIYVRVK

SEQ ID NO: 26126 - protein, 85 aa, unidentified
  REGION 1..85: note = Description of Unknown:cds_NZ_WFIY01000004.1_cds_WP_155863268.1_1223 target sequence
VTITDDEFIVDFTGSSNQVNGSINSPLPATVSAVREIYMAVTDPHALPNAGYFKPLKIIAPEGSIFNPKKPAATSTYWESMSYAT

SEQ ID NO: 26127 - protein, 85 aa, unidentified
  REGION 1..85: note = Description of Unknown:cds_NZ_WFIY01000004.1_cds_WP_155863268.1_1223 target sequence
DLVWKALAPHVPEKLSAGHFLSILATIIGGIDDRTGEPFAIVEPQPGGWGASYNSDGESALVASGDGETYIASAEVYENRMPILV

SEQ ID NO: 26128 - protein, 85 aa, unidentified
  REGION 1..85: note = Description of Unknown:cds_NZ_WFIY01000004.1_cds_WP_155863268.1_1223 target sequence
DRIELNIEDGVGHGKYRGGFGIIKDYIILCKEAYFTVSIGRYKYTPWGVNGGMNGPPNYCVVYKKGEKPRIIRKAAALKLEYGDK

SEQ ID NO: 26129 - protein, 84 aa, unidentified
  REGION 1..84: note = Description of Unknown:cds_NZ_WFIY01000004.1_cds_WP_155863268.1_1223 target sequence
GMNGPPNYCVVYKKGEKPRIIRKAAALKLEYGDKISLHSAGGGGWGNPAERDLNLILNDIINGYISIDTAEKVYKFDKNLLKDI

SEQ ID NO: 26130 - protein, 85 aa, unidentified
  REGION 1..85: note = Description of Unknown:cds_NZ_WFIY01000004.1_cds_WP_155863268.1_1223 target sequence
AKSPVIYEVLDYAVGITDYEGRGLVAQSPGVPGFSGVLDFTIREVLNKWKNELNPGDIIATNIPYSGGTHLNDVALVMPVFYKDE

SEQ ID NO: 26131 - protein, 85 aa, unidentified
  REGION 1..85: note = Description of Unknown:cds_NZ_WFIY01000004.1_cds_WP_155863268.1_1223 target sequence
LLGFIVNKGHWSEIGGMHFGSWTSDANEIFQEGLQLPSIKIYVEDRPNRDVIDIIKANSRLPEATLGDMEAQIGSMKVAKKRIDE

SEQ ID NO: 26132 - protein, 85 aa, unidentified
  REGION 1..85: note = Description of Unknown:cds_NZ_WFIY01000004.1_cds_WP_155863268.1_1223 target sequence
LVRKYGIKAIKEAMEKLIEDGEKLSKLRLKELPKGTFEAEDYIDDDGINDNPIYVRVKVTITDDEFIVDFTGSSNQVNGSINSPL

SEQ ID NO: 26133 - protein, 85 aa, unidentified
  REGION 1..85: note = Description of Unknown:cds_NZ_WFIY01000004.1_cds_WP_155863268.1_1223 target sequence
PATVSAVREIYMAVTDPHALPNAGYFKPLKIIAPEGSIFNPKKPAATSTYWESMSYATDLVWKALAPHVPEKLSAGHFLSILATI

SEQ ID NO: 26134 - protein, 85 aa, unidentified
  REGION 1..85: note = Description of Unknown:cds_NZ_WFIY01000004.1_cds_WP_155863268.1_1223 target sequence
IGGIDDRTGEPFAIVEPQPGGWGASYNSDGESALVASGDGETYIASAEVYENRMPILVDRIELNIEDGVGHGKYRGGFGIIKDYI

SEQ ID NO: 26135 - protein, 85 aa, unidentified
  REGION 1..85: note = Description of Unknown:cds_NZ_WFIY01000004.1_cds_WP_155863268.1_1223 target sequence
ILCKEAYFTVSIGRYKYTPWGVNGGMNGPPNYCVVYKKGEKPRIIRKAAALKLEYGDKISLHSAGGGGWGNPAERDLNLILNDII

SEQ ID NO: 26136 - protein, 85 aa, unidentified
  REGION 1..85: note = Description of Unknown:cds_NC_035460.1_cds_YP_009408099.1_148 target sequence
VSICTFRSFRQLCSYISNENSTKNKTLIIKKYLSTCNNTDVHLIITVLLCSVNKCVYNLNDKQLIKHFSKIFNHDINEMISDLEQ

SEQ ID NO: 26137 - protein, 85 aa, unidentified
  REGION 1..85: note = Description of Unknown:cds_NC_035460.1_cds_YP_009408099.1_148 target sequence
GDVSETIKQFFEKSNTRKPISKSIMLLIDVYNFLKHLSTLTKEKDQQSFLKDIVGVSTSNDLKCFILLIKNDLKIRAGAKCILDA

SEQ ID NO: 26138 - protein, 85 aa, unidentified
  REGION 1..85: note = Description of Unknown:cds_NC_035460.1_cds_YP_009408099.1_148 target sequence
LHPHAYETFKMSQNLNNVIHGVLNKSIQTVSITPFIPIKPMLADACKSITDAFKKFPNGMYVEIKYDGERVQIHKNGDIIKYYSR

SEQ ID NO: 26139 - protein, 85 aa, unidentified
  REGION 1..85: note = Description of Unknown:cds_NC_035460.1_cds_YP_009408099.1_148 target sequence
NLKPVLEHKIESFNKIINQAFTNCDTIILDAELILIDTVTSTPLPFGSLGIHKKKLYQNATECVFIFDCMLYNNQILINMPLYKR

SEQ ID NO: 26140 - protein, 85 aa, unidentified
  REGION 1..85: note = Description of Unknown:cds_NC_035460.1_cds_YP_009408099.1_148 target sequence
KEILLNNMTEIKDKIMFSESKRINTLEELNDILTSTIDEGLEGLVVKKFDEEYKPGKRHWLKIKKDYLECGFMVDSADLVVLGAY

SEQ ID NO: 26141 - protein, 85 aa, unidentified
  REGION 1..85: note = Description of Unknown:cds_NC_035460.1_cds_YP_009408099.1_148 target sequence
YGKGIKGGIMSIFLMGCYDDITNKWYTVTKCSGHDDDTLKQLQTQLKMIKISKNESKIPNWLVIHKNYYPDFITLNPYESQIWEI

SEQ ID NO: 26142 - protein, 84 aa, unidentified
  REGION 1..84: note = Description of Unknown:cds_NC_035460.1_cds_YP_009408099.1_148 target sequence
SKNESKIPNWLVIHKNYYPDFITLNPYESQIWEIRGAEFSASPTHTANGISIRFPRCIKIRTDKDWTSSTKLSELQTLYNTSKK

SEQ ID NO: 26143 - protein, 85 aa, unidentified
  REGION 1..85: note = Description of Unknown:cds_NC_035460.1_cds_YP_009408099.1_148 target sequence
IIKKYLSTCNNTDVHLIITVLLCSVNKCVYNLNDKQLIKHFSKIFNHDINEMISDLEQGDVSETIKQFFEKSNTRKPISKSIMLL

SEQ ID NO: 26144 - protein, 85 aa, unidentified
  REGION 1..85: note = Description of Unknown:cds_NC_035460.1_cds_YP_009408099.1_148 target sequence
IDVYNFLKHLSTLTKEKDQQSFLKDIVGVSTSNDLKCFILLIKNDLKIRAGAKCILDALHPHAYETFKMSQNLNNVIHGVLNKSI

SEQ ID NO: 26145 - protein, 85 aa, unidentified
  REGION 1..85: note = Description of Unknown:cds_NC_035460.1_cds_YP_009408099.1_148 target sequence
QTVSITPFIPIKPMLADACKSITDAFKKFPNGMYVEIKYDGERVQIHKNGDIIKYYSRNLKPVLEHKIESFNKIINQAFTNCDTI

SEQ ID NO: 26146 - protein, 85 aa, unidentified
  REGION 1..85: note = Description of Unknown:cds_NC_035460.1_cds_YP_009408099.1_148 target sequence
ILDAELILIDTVTSTPLPFGSLGIHKKKLYQNATECVFIFDCMLYNNQILINMPLYKRKEILLNNMTEIKDKIMFSESKRINTLE

SEQ ID NO: 26147 - protein, 85 aa, unidentified
  REGION 1..85: note = Description of Unknown:cds_NC_035460.1_cds_YP_009408099.1_148 target sequence
ELNDILTSTIDEGLEGLVVKKFDEEYKPGKRHWLKIKKDYLECGFMVDSADLVVLGAYYGKGIKGGIMSIFLMGCYDDITNKWYT

SEQ ID NO: 26148 - protein, 85 aa, unidentified
  REGION 1..85: note = Description of Unknown:cds_NC_035460.1_cds_YP_009408099.1_148 target sequence
VTKCSGHDDDTLKQLQTQLKMIKISKNESKIPNWLVIHKNYYPDFITLNPYESQIWEIRGAEFSASPTHTANGISIRFPRCIKIR

SEQ ID NO: 26149 - protein, 85 aa, unidentified
  REGION 1..85: note = Description of Unknown:cds_NC_040410.1_cds_YP_009551536.1_5 target sequence
SVYRDAVYWYSKHIRVKNHRLLDNITRFMWRHADINLKIDNSRFYNIMPNSNNANLNKETLVKVVSHCLVCCKLSTLHACRVCNI

SEQ ID NO: 26150 - protein, 85 aa, unidentified
  REGION 1..85: note = Description of Unknown:cds_NC_040410.1_cds_YP_009551536.1_5 target sequence
VHTCAECLHTADCFLQNKVTQLRLRTLKYKLSECQSINGTKIRVIDLLKLPKKDHIKNIITFYRDTFPIDEKVLAISRNKVRQRK

SEQ ID NO: 26151 - protein, 85 aa, unidentified
  REGION 1..85: note = Description of Unknown:cds_NC_040410.1_cds_YP_009551536.1_5 target sequence
CRNEYGIWASHLYMPICLLAKIIVLRDEIYLVFGVYERGKEINAPYQECNFYKSEYLVDEENFDRISVLEDDYMRARYACNAIKL

SEQ ID NO: 26152 - protein, 85 aa, unidentified
  REGION 1..85: note = Description of Unknown:cds_NC_040410.1_cds_YP_009551536.1_5 target sequence
TRKINVDFLDCSMLKTPAAYALPRYNAVLNVLYTVSLRSSDRMSIQLHSEWNSLYPAYRHLIEEKTAAAKARKRELLQYKSAIVL

SEQ ID NO: 26153 - protein, 85 aa, unidentified
  REGION 1..85: note = Description of Unknown:cds_NC_040410.1_cds_YP_009551536.1_5 target sequence
KYIDSPMYATLLWDKIMNTSNLSTLFCTHWFVDPLESDDPMCIYTKGIKKRAVVVCPTVHNMLYELYSVMKSAFSVGIYSMNGRY

SEQ ID NO: 26154 - protein, 85 aa, unidentified
  REGION 1..85: note = Description of Unknown:cds_NC_040410.1_cds_YP_009551536.1_5 target sequence
SCNEISCERLSELRTRLLAKNIIYYGTDFKTFIVAKTILISDYSSFVYEAIRELDMQPLPITNMYSYRRQMVIVDTKQRISDLIK

SEQ ID NO: 26155 - protein, 84 aa, unidentified
  REGION 1..84: note = Description of Unknown:cds_NC_040410.1_cds_YP_009551536.1_5 target sequence
RELDMQPLPITNMYSYRRQMVIVDTKQRISDLIKNLASRIIKYMLCGEFCEAQSTNLYTKTDRYVLRALDNIENTDGGATSDID

SEQ ID NO: 26156 - protein, 85 aa, unidentified
  REGION 1..85: note = Description of Unknown:cds_NC_040410.1_cds_YP_009551536.1_5 target sequence
FMWRHADINLKIDNSRFYNIMPNSNNANLNKETLVKVVSHCLVCCKLSTLHACRVCNIVHTCAECLHTADCFLQNKVTQLRLRTL

SEQ ID NO: 26157 - protein, 85 aa, unidentified
  REGION 1..85: note = Description of Unknown:cds_NC_040410.1_cds_YP_009551536.1_5 target sequence
KYKLSECQSINGTKIRVIDLLKLPKKDHIKNIITFYRDTFPIDEKVLAISRNKVRQRKCRNEYGIWASHLYMPICLLAKIIVLRD

SEQ ID NO: 26158 - protein, 85 aa, unidentified
  REGION 1..85: note = Description of Unknown:cds_NC_040410.1_cds_YP_009551536.1_5 target sequence
EIYLVFGVYERGKEINAPYQECNFYKSEYLVDEENFDRISVLEDDYMRARYACNAIKLTRKINVDFLDCSMLKTPAAYALPRYNA

SEQ ID NO: 26159 - protein, 85 aa, unidentified
  REGION 1..85: note = Description of Unknown:cds_NC_040410.1_cds_YP_009551536.1_5 target sequence
VLNVLYTVSLRSSDRMSIQLHSEWNSLYPAYRHLIEEKTAAAKARKRELLQYKSAIVLKYIDSPMYATLLWDKIMNTSNLSTLFC

SEQ ID NO: 26160 - protein, 85 aa, unidentified
  REGION 1..85: note = Description of Unknown:cds_NC_040410.1_cds_YP_009551536.1_5 target sequence
THWFVDPLESDDPMCIYTKGIKKRAVVVCPTVHNMLYELYSVMKSAFSVGIYSMNGRYSCNEISCERLSELRTRLLAKNIIYYGT

SEQ ID NO: 26161 - protein, 85 aa, unidentified
  REGION 1..85: note = Description of Unknown:cds_NC_040410.1_cds_YP_009551536.1_5 target sequence
DFKTFIVAKTILISDYSSFVYEAIRELDMQPLPITNMYSYRRQMVIVDTKQRISDLIKNLASRIIKYMLCGEFCEAQSTNLYTKT

SEQ ID NO: 26162 - protein, 85 aa, unidentified
  REGION 1..85: note = Description of Unknown:hvTR_P06726 target sequence
SQASSSPGEGPSSEAAAISEAEAASGSFGRLHCQVLRLITNVEGGSLEAGRLRLLDLRTNIEVSRPSVLCCFQENKSPHDTVDLT

SEQ ID NO: 26163 - protein, 85 aa, unidentified
  REGION 1..85: note = Description of Unknown:hvTR_P06726 target sequence
DLNIKGRCVVGEQDRLLVDLNNFGPRRLTPGSENNTVSVLAFALPLDRVPVSGLHLFQSQRRGGEENRPRMEARAIIRRTAHHWA

SEQ ID NO: 26164 - protein, 85 aa, unidentified
  REGION 1..85: note = Description of Unknown:hvTR_P06726 target sequence
VRLTVTPNWRRRTDSSLEAGQIFVSQFAFRAGAIPLTLVDALEQLACSDPNTYIHKTETDERGQWIMLFLHHDSPHPPTSVFLHF

SEQ ID NO: 26165 - protein, 85 aa, unidentified
  REGION 1..85: note = Description of Unknown:hvTR_P06726 target sequence
SVYTHRAEVVARHNPYPHLRRLPDNGFQLLIPKSFTLTRIHPEYIVQIQNAFETNQTHDTIFFPENIPGVSIEAGPLPDRVRITL

SEQ ID NO: 26166 - protein, 85 aa, unidentified
  REGION 1..85: note = Description of Unknown:hvTR_P06726 target sequence
RVTLTGDQAVHLEHRQPLGRIHFFRRGFWTLTPGKPDKIKRPQVQLRAGLFPRSNVMRGAVSEFLPQSPGLPPTEEEEEEEEEDD

SEQ ID NO: 26167 - protein, 85 aa, unidentified
  REGION 1..85: note = Description of Unknown:hvTR_P06726 target sequence
EDDLSSTPTPTPLSEAMFAGFEEASGDEDSDTQAGLSPALILTGQRRRSGNNGALTLVIPSWHVFASLDDLVPLTVSVQHAALRP

SEQ ID NO: 26168 - protein, 84 aa, unidentified
  REGION 1..84: note = Description of Unknown:hvTR_P06726 target sequence
GNNGALTLVIPSWHVFASLDDLVPLTVSVQHAALRPTSYLRSDMDGDVRTAADISSTLRSVPAPRPSPISTASTSSTPRSRPRI

SEQ ID NO: 26169 - protein, 85 aa, unidentified
  REGION 1..85: note = Description of Unknown:hvTR_P06726 target sequence
FGRLHCQVLRLITNVEGGSLEAGRLRLLDLRTNIEVSRPSVLCCFQENKSPHDTVDLTDLNIKGRCVVGEQDRLLVDLNNFGPRR

SEQ ID NO: 26170 - protein, 85 aa, unidentified
  REGION 1..85: note = Description of Unknown:hvTR_P06726 target sequence
LTPGSENNTVSVLAFALPLDRVPVSGLHLFQSQRRGGEENRPRMEARAIIRRTAHHWAVRLTVTPNWRRRTDSSLEAGQIFVSQF

SEQ ID NO: 26171 - protein, 85 aa, unidentified
  REGION 1..85: note = Description of Unknown:hvTR_P06726 target sequence
AFRAGAIPLTLVDALEQLACSDPNTYIHKTETDERGQWIMLFLHHDSPHPPTSVFLHFSVYTHRAEVVARHNPYPHLRRLPDNGF

SEQ ID NO: 26172 - protein, 85 aa, unidentified
  REGION 1..85: note = Description of Unknown:hvTR_P06726 target sequence
QLLIPKSFTLTRIHPEYIVQIQNAFETNQTHDTIFFPENIPGVSIEAGPLPDRVRITLRVTLTGDQAVHLEHRQPLGRIHFFRRG

SEQ ID NO: 26173 - protein, 85 aa, unidentified
  REGION 1..85: note = Description of Unknown:hvTR_P06726 target sequence
FWTLTPGKPDKIKRPQVQLRAGLFPRSNVMRGAVSEFLPQSPGLPPTEEEEEEEEEDDEDDLSSTPTPTPLSEAMFAGFEEASGD

SEQ ID NO: 26174 - protein, 85 aa, unidentified
  REGION 1..85: note = Description of Unknown:hvTR_P06726 target sequence
EDSDTQAGLSPALILTGQRRRSGNNGALTLVIPSWHVFASLDDLVPLTVSVQHAALRPTSYLRSDMDGDVRTAADISSTLRSVPA

SEQ ID NO: 26175 - protein, 85 aa, unidentified
  REGION 1..85: note = Description of Unknown:cds_NZ_WFIY01000004.1_cds_WP_155862760.1_573 target sequence
DIGANFDGKSTFFRVWAPYHKEVFLVLYKDGEREVIKMELEDEERGYFSVEVDNAKPGDMYTYMLGGKEYPDPASRFQPEGVHGK

SEQ ID NO: 26176 - protein, 85 aa, unidentified
  REGION 1..85: note = Description of Unknown:cds_NZ_WFIY01000004.1_cds_WP_155862760.1_573 target sequence
SQIIGDFSWEDGDWKGIDFPLIYELHVGAFGGDFEGVKRKLDYLKELGVTAIELMPVHQFAGNRNWGYDGVLLYAVQNSYGGPQK

SEQ ID NO: 26177 - protein, 85 aa, unidentified
  REGION 1..85: note = Description of Unknown:cds_NZ_WFIY01000004.1_cds_WP_155862760.1_573 target sequence
LKELVNEAHKKGLGVILDVVYNHVGPEGNYLSVFGPYFSTRYKTPWGPIFNFDEAYSDEVRHYVVQNAVYWIKEYHIDGLRLDAV

SEQ ID NO: 26178 - protein, 85 aa, unidentified
  REGION 1..85: note = Description of Unknown:cds_NZ_WFIY01000004.1_cds_WP_155862760.1_573 target sequence
HSIFDNSPKHILEEIRDAVKEANPKALLIAESDLNDPRIILPKDKCGYCIDAQWSDDFHHSLHALLTGERDSYYSDFGEITQLAK

SEQ ID NO: 26179 - protein, 85 aa, unidentified
  REGION 1..85: note = Description of Unknown:cds_NZ_WFIY01000004.1_cds_WP_155862760.1_573 target sequence
AIKDVFVYDGVYSRFRKKTHGRPVGNLPGNKFVVYAQNHDQVGNRKDGKRLISLVGEKALIAPFLYILSPYIPMIFMGEEYGETN

SEQ ID NO: 26180 - protein, 85 aa, unidentified
  REGION 1..85: note = Description of Unknown:cds_NZ_WFIY01000004.1_cds_WP_155862760.1_573 target sequence
PFLFFTDFSDPEIIKGLREGRKKELGEYYYDPQDYSTFEKSKLSWKINEKILFLYKELIRLRKELFNDFSRDVDIRIEDNKCIII

SEQ ID NO: 26181 - protein, 84 aa, unidentified
  REGION 1..84: note = Description of Unknown:cds_NZ_WFIY01000004.1_cds_WP_155862760.1_573 target sequence
KILFLYKELIRLRKELFNDFSRDVDIRIEDNKCIIIKRKEKYLVIACFGETHLDVKAKSIITTGGMPSSLPGKVSIGAGVYEEL

SEQ ID NO: 26182 - protein, 85 aa, unidentified
  REGION 1..85: note = Description of Unknown:cds_NZ_WFIY01000004.1_cds_WP_155862760.1_573 target sequence
YKDGEREVIKMELEDEERGYFSVEVDNAKPGDMYTYMLGGKEYPDPASRFQPEGVHGKSQIIGDFSWEDGDWKGIDFPLIYELHV

SEQ ID NO: 26183 - protein, 85 aa, unidentified
  REGION 1..85: note = Description of Unknown:cds_NZ_WFIY01000004.1_cds_WP_155862760.1_573 target sequence
GAFGGDFEGVKRKLDYLKELGVTAIELMPVHQFAGNRNWGYDGVLLYAVQNSYGGPQKLKELVNEAHKKGLGVILDVVYNHVGPE

SEQ ID NO: 26184 - protein, 85 aa, unidentified
  REGION 1..85: note = Description of Unknown:cds_NZ_WFIY01000004.1_cds_WP_155862760.1_573 target sequence
GNYLSVFGPYFSTRYKTPWGPIFNFDEAYSDEVRHYVVQNAVYWIKEYHIDGLRLDAVHSIFDNSPKHILEEIRDAVKEANPKAL

SEQ ID NO: 26185 - protein, 85 aa, unidentified
  REGION 1..85: note = Description of Unknown:cds_NZ_WFIY01000004.1_cds_WP_155862760.1_573 target sequence
LIAESDLNDPRIILPKDKCGYCIDAQWSDDFHHSLHALLTGERDSYYSDFGEITQLAKAIKDVFVYDGVYSRFRKKTHGRPVGNL

SEQ ID NO: 26186 - protein, 85 aa, unidentified
  REGION 1..85: note = Description of Unknown:cds_NZ_WFIY01000004.1_cds_WP_155862760.1_573 target sequence
PGNKFVVYAQNHDQVGNRKDGKRLISLVGEKALIAPFLYILSPYIPMIFMGEEYGETNPFLFFTDFSDPEIIKGLREGRKKELGE

SEQ ID NO: 26187 - protein, 85 aa, unidentified
  REGION 1..85: note = Description of Unknown:cds_NZ_WFIY01000004.1_cds_WP_155862760.1_573 target sequence
YYYDPQDYSTFEKSKLSWKINEKILFLYKELIRLRKELFNDFSRDVDIRIEDNKCIIIKRKEKYLVIACFGETHLDVKAKSIITT

SEQ ID NO: 26188 - protein, 85 aa, unidentified
  REGION 1..85: note = Description of Unknown:cds_NC_035460.1_cds_YP_009408046.1_95 target sequence
NNTVINSLISNDDATKRQNVFGVDAHNPTLYMPQYITLPGIITPTVTDQHCNSIPSDQTVVATFEIRDQYITALNYLVLSIELPE

SEQ ID NO: 26189 - protein, 85 aa, unidentified
  REGION 1..85: note = Description of Unknown:cds_NC_035460.1_cds_YP_009408046.1_95 target sequence
IKGVGRVSYVPYVGYKAIQHVSISSTNGVLWEIDGEELFYSCRNNNTALEHSGYSHELNNISTGLTPNDTIKEASTVYVYIKTPF

SEQ ID NO: 26190 - protein, 85 aa, unidentified
  REGION 1..85: note = Description of Unknown:cds_NC_035460.1_cds_YP_009408046.1_95 target sequence
DVEKTFSSLKLSDSKITVSILFNPVSDIIIRDTQFNFESFLKEFVYVTELSFIGYMVKNIQIKPSYIEKPRRAIGQLNQSTAVIT

SEQ ID NO: 26191 - protein, 85 aa, unidentified
  REGION 1..85: note = Description of Unknown:cds_NC_035460.1_cds_YP_009408046.1_95 target sequence
EVYAATSLSVYVKPYYGNADNKFISYPGYAQTERDYICAFVERLLDDLVIVSKGLPTGFPQSAEIVEVPPNGIVTIQDVDVFVKI

SEQ ID NO: 26192 - protein, 85 aa, unidentified
  REGION 1..85: note = Description of Unknown:cds_NC_035460.1_cds_YP_009408046.1_95 target sequence
DNVPDDMTVYFHTNILVFGTRKNSFLYNISKKFTTITGTFSEATNRTKFANVSHSISITDASIPVSLWSCQRNVYNGDNRSELSK

SEQ ID NO: 26193 - protein, 85 aa, unidentified
  REGION 1..85: note = Description of Unknown:cds_NC_035460.1_cds_YP_009408046.1_95 target sequence
SKDLFINDPFIRGIDFKNKTDIISRMEVRFGNDVLYSETGPISKIYNDLLSNCMGGNRTLTFNFTPHTFFKHTTIIANPSRGKDK

SEQ ID NO: 26194 - protein, 84 aa, unidentified
  REGION 1..84: note = Description of Unknown:cds_NC_035460.1_cds_YP_009408046.1_95 target sequence
LSNCMGGNRTLTFNFTPHTFFKHTTIIANPSRGKDKLSVRVVYSTLDPNNPIYYVSKQLVIVCNDLYKVSHENDDIIITKITSE

SEQ ID NO: 26195 - protein, 85 aa, unidentified
  REGION 1..85: note = Description of Unknown:cds_NC_035460.1_cds_YP_009408046.1_95 target sequence
PTLYMPQYITLPGIITPTVTDQHCNSIPSDQTVVATFEIRDQYITALNYLVLSIELPEIKGVGRVSYVPYVGYKAIQHVSISSTN

SEQ ID NO: 26196 - protein, 85 aa, unidentified
  REGION 1..85: note = Description of Unknown:cds_NC_035460.1_cds_YP_009408046.1_95 target sequence
GVLWEIDGEELFYSCRNNNTALEHSGYSHELNNISTGLTPNDTIKEASTVYVYIKTPFDVEKTFSSLKLSDSKITVSILFNPVSD

SEQ ID NO: 26197 - protein, 85 aa, unidentified
  REGION 1..85: note = Description of Unknown:cds_NC_035460.1_cds_YP_009408046.1_95 target sequence
IIIRDTQFNFESFLKEFVYVTELSFIGYMVKNIQIKPSYIEKPRRAIGQLNQSTAVITEVYAATSLSVYVKPYYGNADNKFISYP

SEQ ID NO: 26198 - protein, 85 aa, unidentified
  REGION 1..85: note = Description of Unknown:cds_NC_035460.1_cds_YP_009408046.1_95 target sequence
GYAQTERDYICAFVERLLDDLVIVSKGLPTGFPQSAEIVEVPPNGIVTIQDVDVFVKIDNVPDDMTVYFHTNILVFGTRKNSFLY

SEQ ID NO: 26199 - protein, 85 aa, unidentified
  REGION 1..85: note = Description of Unknown:cds_NC_035460.1_cds_YP_009408046.1_95 target sequence
NISKKFTTITGTFSEATNRTKFANVSHSISITDASIPVSLWSCQRNVYNGDNRSELSKSKDLFINDPFIRGIDFKNKTDIISRME

SEQ ID NO: 26200 - protein, 85 aa, unidentified
  REGION 1..85: note = Description of Unknown:cds_NC_035460.1_cds_YP_009408046.1_95 target sequence
VRFGNDVLYSETGPISKIYNDLLSNCMGGNRTLTFNFTPHTFFKHTTIIANPSRGKDKLSVRVVYSTLDPNNPIYYVSKQLVIVC

SEQ ID NO: 26201 - protein, 85 aa, unidentified
  REGION 1..85: note = Description of Unknown:cds_NC_003214.2_cds_NP_445687.1_22 target sequence
LTQNINKIYLPSPNKYLSREDFLNYTNLMREIANFDPSTKKWYINEYKISRLTKDELKGIIDQIAEYIGNSIYNILSNYIKDDNN

SEQ ID NO: 26202 - protein, 85 aa, unidentified
  REGION 1..85: note = Description of Unknown:cds_NC_003214.2_cds_NP_445687.1_22 target sequence
IINAYIKGNYIYIRDNLEKYKNLLTYKIKTFDYKEGKYTEEEILLAWQKSYGFVTLRGLYWKLKNIANFDLKPFTNLRFYDIQLK

SEQ ID NO: 26203 - protein, 85 aa, unidentified
  REGION 1..85: note = Description of Unknown:cds_NC_003214.2_cds_NP_445687.1_22 target sequence
NFEMRNYQINSIKSWVSDVNVIGNGIIKAPTGSGKSVIAILSALEILKNKNNAKIVYAVNSTTLLKQFQNFAKKEDLPFVLVSGE

SEQ ID NO: 26204 - protein, 85 aa, unidentified
  REGION 1..85: note = Description of Unknown:cds_NC_003214.2_cds_NP_445687.1_22 target sequence
IDEIKKGERSDFIALSISYYYSKKKRNEHEKLKELVTNADLVIIDEAHHTPANIVKSLLLDSPNSIRLGLSATPIREDGKELEIM

SEQ ID NO: 26205 - protein, 85 aa, unidentified
  REGION 1..85: note = Description of Unknown:cds_NC_003214.2_cds_NP_445687.1_22 target sequence
GLLGKISFTIDYTELVRNRYLVPIEYIRYIPEIPKKLKLKIQDLDDNKDPENFAKYYSSLLRSFEHSPNTNKQIISKIKQLNQYP

SEQ ID NO: 26206 - protein, 85 aa, unidentified
  REGION 1..85: note = Description of Unknown:cds_NC_003214.2_cds_NP_445687.1_22 target sequence
CLVIVRRIAIAKKLAEIMRENGIIADWVSSKTKLEERMEKIEALKNEKLQVLISTSLADEGLDIPNLRLVVLLTQGKSRIKLIQR

SEQ ID NO: 26207 - protein, 84 aa, unidentified
  REGION 1..84: note = Description of Unknown:cds_NC_003214.2_cds_NP_445687.1_22 target sequence
VLISTSLADEGLDIPNLRLVVLLTQGKSRIKLIQRIGRVMRVSQNKRKGYILDVIYNHDLFIKQSVKKMNFIENEYNGIITIHY

SEQ ID NO: 26208 - protein, 85 aa, unidentified
  REGION 1..85: note = Description of Unknown:cds_NC_003214.2_cds_NP_445687.1_22 target sequence
LMREIANFDPSTKKWYINEYKISRLTKDELKGIIDQIAEYIGNSIYNILSNYIKDDNNIINAYIKGNYIYIRDNLEKYKNLLTYK

SEQ ID NO: 26209 - protein, 85 aa, unidentified
  REGION 1..85: note = Description of Unknown:cds_NC_003214.2_cds_NP_445687.1_22 target sequence
IKTFDYKEGKYTEEEILLAWQKSYGFVTLRGLYWKLKNIANFDLKPFTNLRFYDIQLKNFEMRNYQINSIKSWVSDVNVIGNGII

SEQ ID NO: 26210 - protein, 85 aa, unidentified
  REGION 1..85: note = Description of Unknown:cds_NC_003214.2_cds_NP_445687.1_22 target sequence
KAPTGSGKSVIAILSALEILKNKNNAKIVYAVNSTTLLKQFQNFAKKEDLPFVLVSGEIDEIKKGERSDFIALSISYYYSKKKRN

SEQ ID NO: 26211 - protein, 85 aa, unidentified
  REGION 1..85: note = Description of Unknown:cds_NC_003214.2_cds_NP_445687.1_22 target sequence
EHEKLKELVTNADLVIIDEAHHTPANIVKSLLLDSPNSIRLGLSATPIREDGKELEIMGLLGKISFTIDYTELVRNRYLVPIEYI

SEQ ID NO: 26212 - protein, 85 aa, unidentified
  REGION 1..85: note = Description of Unknown:cds_NC_003214.2_cds_NP_445687.1_22 target sequence
RYIPEIPKKLKLKIQDLDDNKDPENFAKYYSSLLRSFEHSPNTNKQIISKIKQLNQYPCLVIVRRIAIAKKLAEIMRENGIIADW

SEQ ID NO: 26213 - protein, 85 aa, unidentified
  REGION 1..85: note = Description of Unknown:cds_NC_003214.2_cds_NP_445687.1_22 target sequence
VSSKTKLEERMEKIEALKNEKLQVLISTSLADEGLDIPNLRLVVLLTQGKSRIKLIQRIGRVMRVSQNKRKGYILDVIYNHDLFI

SEQ ID NO: 26214 - protein, 85 aa, unidentified
  REGION 1..85: note = Description of Unknown:hvTR_C5ILC2 target sequence
SQSKEVKSFLWLQTLRRELSPFCTDVRAKVVKDAVSLINGLDFSMVSDVQRLMRKDKRNDEDLMKLRELNQTVDGLVDLKSSNKK

SEQ ID NO: 26215 - protein, 85 aa, unidentified
  REGION 1..85: note = Description of Unknown:hvTR_C5ILC2 target sequence
NRVGVGKLTSDELMILATDLEKLKKKVTRTEARGPGVYRGNLSQDQLGRRSELLNMIGMGTPRPTRNTVVRVWDVKDSSLLNNQF

SEQ ID NO: 26216 - protein, 85 aa, unidentified
  REGION 1..85: note = Description of Unknown:hvTR_C5ILC2 target sequence
GTMPSLTLACLTRQTRVDLNDSVQACVDLGLIYTAKFPNMDDLDKLKNKHPVLDYVSNCDSAINISGYNLSLASLVKAGASLMKG

SEQ ID NO: 26217 - protein, 85 aa, unidentified
  REGION 1..85: note = Description of Unknown:hvTR_C5ILC2 target sequence
GDMLETIELNSRNIDDVIKATLTARNKVQMFVSEVPGERNPYENLLYKICLSGEGWPYISSRTSIKGRSWDNTVIDMTPKDPTPP

SEQ ID NO: 26218 - protein, 85 aa, unidentified
  REGION 1..85: note = Description of Unknown:hvTR_C5ILC2 target sequence
QNERAKAPHQFPVGVSFSQSQLLDDIMKNLNPKGRTWMDIEGRPDDPVEIAIFQPEERLCLHFYREPTDQKQFKNDSKYCHGMDF

SEQ ID NO: 26219 - protein, 85 aa, unidentified
  REGION 1..85: note = Description of Unknown:hvTR_C5ILC2 target sequence
TQLCSTQPGLTTAVLERLPLGMVITCQGKDDIEKLLHSQGRRDVKFIDIQMSKEASRKFEDQVWDSYKTFCNQHTGIVVTKSKKG

SEQ ID NO: 26220 - protein, 84 aa, unidentified
  REGION 1..84: note = Description of Unknown:hvTR_C5ILC2 target sequence
IQMSKEASRKFEDQVWDSYKTFCNQHTGIVVTKSKKGKKEITPHCALMDCIMYESAVNGQLYQEPIRNLLPADMIFRTAAKLSL

SEQ ID NO: 26221 - protein, 85 aa, unidentified
  REGION 1..85: note = Description of Unknown:hvTR_C5ILC2 target sequence
AKVVKDAVSLINGLDFSMVSDVQRLMRKDKRNDEDLMKLRELNQTVDGLVDLKSSNKKNRVGVGKLTSDELMILATDLEKLKKKV

SEQ ID NO: 26222 - protein, 85 aa, unidentified
  REGION 1..85: note = Description of Unknown:hvTR_C5ILC2 target sequence
TRTEARGPGVYRGNLSQDQLGRRSELLNMIGMGTPRPTRNTVVRVWDVKDSSLLNNQFGTMPSLTLACLTRQTRVDLNDSVQACV

SEQ ID NO: 26223 - protein, 85 aa, unidentified
  REGION 1..85: note = Description of Unknown:hvTR_C5ILC2 target sequence
DLGLIYTAKFPNMDDLDKLKNKHPVLDYVSNCDSAINISGYNLSLASLVKAGASLMKGGDMLETIELNSRNIDDVIKATLTARNK

SEQ ID NO: 26224 - protein, 85 aa, unidentified
  REGION 1..85: note = Description of Unknown:hvTR_C5ILC2 target sequence
VQMFVSEVPGERNPYENLLYKICLSGEGWPYISSRTSIKGRSWDNTVIDMTPKDPTPPQNERAKAPHQFPVGVSFSQSQLLDDIM

SEQ ID NO: 26225 - protein, 85 aa, unidentified
  REGION 1..85: note = Description of Unknown:hvTR_C5ILC2 target sequence
KNLNPKGRTWMDIEGRPDDPVEIAIFQPEERLCLHFYREPTDQKQFKNDSKYCHGMDFTQLCSTQPGLTTAVLERLPLGMVITCQ

SEQ ID NO: 26226 - protein, 85 aa, unidentified
  REGION 1..85: note = Description of Unknown:hvTR_C5ILC2 target sequence
GKDDIEKLLHSQGRRDVKFIDIQMSKEASRKFEDQVWDSYKTFCNQHTGIVVTKSKKGKKEITPHCALMDCIMYESAVNGQLYQE

SEQ ID NO: 26227 - protein, 85 aa, unidentified
  REGION 1..85: note = Description of Unknown:hvTR_P07400 target sequence
SLSKEVKSFQWTQALRRELQGFTSDVKAAVIKDATSLLNGLDFSEVSNVQRIMRKERRDDKDLQRLRSLNQTVHSLVDPKSTSKK

SEQ ID NO: 26228 - protein, 85 aa, unidentified
  REGION 1..85: note = Description of Unknown:hvTR_P07400 target sequence
NVLKVGRLSAEELMTLAADLEKLKAKIMRTERPQASGVYMGNLTAQQLDQRSQILQMVGMRRPQQGASGVVRVWDVKDSSLLNNQ

SEQ ID NO: 26229 - protein, 85 aa, unidentified
  REGION 1..85: note = Description of Unknown:hvTR_P07400 target sequence
FGTMPSLTMACMAKQSQTPLNDVVQALTDLGLLYTVKYPNLSDLERLKDKHPVLGVITEQQSSINISGYNFSLGAAVKAGAALLH

SEQ ID NO: 26230 - protein, 85 aa, unidentified
  REGION 1..85: note = Description of Unknown:hvTR_P07400 target sequence
GGNMLESILIKPSNSEDLLKAVLGAKKKLNMFVSDQVGDRNPYENILYKVCLSGEGWPYIACRTSVVGRAWENTTIDLTNEKLVA

SEQ ID NO: 26231 - protein, 85 aa, unidentified
  REGION 1..85: note = Description of Unknown:hvTR_P07400 target sequence
NSSRPVPGAAGPPQVGLSYSQTMLLKDLMGGIDPNAPTWIDIEGRFNDPVEIAIFQPQNGQFIHFYREPTDQKQFKQDSKYSHGM

SEQ ID NO: 26232 - protein, 85 aa, unidentified
  REGION 1..85: note = Description of Unknown:hvTR_P07400 target sequence
DLADLFNAQAGLTSSVIGALPQGMVLSCQGSDDIRKLLDSQNRRDIKLIDVEMTKEASREYEDKVWDKYGWLCKMHTGVVRDKKK

SEQ ID NO: 26233 - protein, 84 aa, unidentified
  REGION 1..84: note = Description of Unknown:hvTR_P07400 target sequence
IDVEMTKEASREYEDKVWDKYGWLCKMHTGVVRDKKKKEITPHCALMDCIIFESASKARLPDLKTVHNILPHDLIFRGPNVVTL

SEQ ID NO: 26234 - protein, 85 aa, unidentified
  REGION 1..85: note = Description of Unknown:hvTR_P07400 target sequence
AAVIKDATSLLNGLDFSEVSNVQRIMRKERRDDKDLQRLRSLNQTVHSLVDPKSTSKKNVLKVGRLSAEELMTLAADLEKLKAKI

SEQ ID NO: 26235 - protein, 85 aa, unidentified
  REGION 1..85: note = Description of Unknown:hvTR_P07400 target sequence
MRTERPQASGVYMGNLTAQQLDQRSQILQMVGMRRPQQGASGVVRVWDVKDSSLLNNQFGTMPSLTMACMAKQSQTPLNDVVQAL

SEQ ID NO: 26236 - protein, 85 aa, unidentified
  REGION 1..85: note = Description of Unknown:hvTR_P07400 target sequence
TDLGLLYTVKYPNLSDLERLKDKHPVLGVITEQQSSINISGYNFSLGAAVKAGAALLHGGNMLESILIKPSNSEDLLKAVLGAKK

SEQ ID NO: 26237 - protein, 85 aa, unidentified
  REGION 1..85: note = Description of Unknown:hvTR_P07400 target sequence
KLNMFVSDQVGDRNPYENILYKVCLSGEGWPYIACRTSVVGRAWENTTIDLTNEKLVANSSRPVPGAAGPPQVGLSYSQTMLLKD

SEQ ID NO: 26238 - protein, 85 aa, unidentified
  REGION 1..85: note = Description of Unknown:hvTR_P07400 target sequence
LMGGIDPNAPTWIDIEGRFNDPVEIAIFQPQNGQFIHFYREPTDQKQFKQDSKYSHGMDLADLFNAQAGLTSSVIGALPQGMVLS

SEQ ID NO: 26239 - protein, 85 aa, unidentified
  REGION 1..85: note = Description of Unknown:hvTR_P07400 target sequence
CQGSDDIRKLLDSQNRRDIKLIDVEMTKEASREYEDKVWDKYGWLCKMHTGVVRDKKKKEITPHCALMDCIIFESASKARLPDLK

SEQ ID NO: 26240 - protein, 85 aa, unidentified
  REGION 1..85: note = Description of Unknown:cds_NZ_WFIY01000004.1_cds_WP_155862753.1_565 target sequence
ERKKILALTNTSIGIFMAFANYNMIIIALPAIFKGLNFNPTSPDSLGYLIWVILGYMVVTASLVVTFGRISDLKGRARFYTIGFL

SEQ ID NO: 26241 - protein, 85 aa, unidentified
  REGION 1..85: note = Description of Unknown:cds_NZ_WFIY01000004.1_cds_WP_155862753.1_565 target sequence
IFAIASALLASITSTGNLGVLEMIIFRLLQGVGGGLLMVNSTAVLTDYFDRNELGKALGLNQVAGLIGGVAGLIIGGVLSIYNWR

SEQ ID NO: 26242 - protein, 85 aa, unidentified
  REGION 1..85: note = Description of Unknown:cds_NZ_WFIY01000004.1_cds_WP_155862753.1_565 target sequence
YIFVFSAVVGIIGTIWSALTLKDVQKPIRRSIDVVGNTLFALGITILLISVTYGLLPYNNQPLGWGNPWVIAGIVVSIGLISSFV

SEQ ID NO: 26243 - protein, 85 aa, unidentified
  REGION 1..85: note = Description of Unknown:cds_NZ_WFIY01000004.1_cds_WP_155862753.1_565 target sequence
FVERKVKDPMFDLSLFKNKDFSTSNTANMIASLARQGILLMLLVLLQGIWLPLHGVPYCDTPFWAGIYLIPNVLGFAVFGPISGI

SEQ ID NO: 26244 - protein, 85 aa, unidentified
  REGION 1..85: note = Description of Unknown:cds_NZ_WFIY01000004.1_cds_WP_155862753.1_565 target sequence
LSDKYGGKILTSIGLTISGIGFLLLTLLPYNFNLYEFFAITFIQGAGMGLFTAPNTADMMASVPINKRGSASGMRAALQNTASAF

SEQ ID NO: 26245 - protein, 85 aa, unidentified
  REGION 1..85: note = Description of Unknown:cds_NZ_WFIY01000004.1_cds_WP_155862753.1_565 target sequence
SVVFYFSILISAMTGSLDSSISSALSSYGIHVNANIPASVVIFSVLLGYDPLSAFSSSLQHSIAVKIDNPQFFVETIAPSFMSSL

SEQ ID NO: 26246 - protein, 84 aa, unidentified
  REGION 1..84: note = Description of Unknown:cds_NZ_WFIY01000004.1_cds_WP_155862753.1_565 target sequence
YDPLSAFSSSLQHSIAVKIDNPQFFVETIAPSFMSSLRLTLYISAGLLFMSALISAFRESGRVGRLGNNTQGEQKAERAITKGS

SEQ ID NO: 26247 - protein, 85 aa, unidentified
  REGION 1..85: note = Description of Unknown:cds_NZ_WFIY01000004.1_cds_WP_155862753.1_565 target sequence
ALPAIFKGLNFNPTSPDSLGYLIWVILGYMVVTASLVVTFGRISDLKGRARFYTIGFLIFAIASALLASITSTGNLGVLEMIIFR

SEQ ID NO: 26248 - protein, 85 aa, unidentified
  REGION 1..85: note = Description of Unknown:cds_NZ_WFIY01000004.1_cds_WP_155862753.1_565 target sequence
LLQGVGGGLLMVNSTAVLTDYFDRNELGKALGLNQVAGLIGGVAGLIIGGVLSIYNWRYIFVFSAVVGIIGTIWSALTLKDVQKP

SEQ ID NO: 26249 - protein, 85 aa, unidentified
  REGION 1..85: note = Description of Unknown:cds_NZ_WFIY01000004.1_cds_WP_155862753.1_565 target sequence
IRRSIDVVGNTLFALGITILLISVTYGLLPYNNQPLGWGNPWVIAGIVVSIGLISSFVFVERKVKDPMFDLSLFKNKDFSTSNTA

SEQ ID NO: 26250 - protein, 85 aa, unidentified
  REGION 1..85: note = Description of Unknown:cds_NZ_WFIY01000004.1_cds_WP_155862753.1_565 target sequence
NMIASLARQGILLMLLVLLQGIWLPLHGVPYCDTPFWAGIYLIPNVLGFAVFGPISGILSDKYGGKILTSIGLTISGIGFLLLTL

SEQ ID NO: 26251 - protein, 85 aa, unidentified
  REGION 1..85: note = Description of Unknown:cds_NZ_WFIY01000004.1_cds_WP_155862753.1_565 target sequence
LPYNFNLYEFFAITFIQGAGMGLFTAPNTADMMASVPINKRGSASGMRAALQNTASAFSVVFYFSILISAMTGSLDSSISSALSS

SEQ ID NO: 26252 - protein, 85 aa, unidentified
  REGION 1..85: note = Description of Unknown:cds_NZ_WFIY01000004.1_cds_WP_155862753.1_565 target sequence
YGIHVNANIPASVVIFSVLLGYDPLSAFSSSLQHSIAVKIDNPQFFVETIAPSFMSSLRLTLYISAGLLFMSALISAFRESGRVG

SEQ ID NO: 26253 - protein, 85 aa, unidentified
  REGION 1..85: note = Description of Unknown:cds_NZ_WFIY01000004.1_cds_WP_155863329.1_1295 target sequence
VSRRINKILTIFTIVIVASTVGLSILYLFTPILIGYQITSNGIIEYFKNVIDPSFIIKAYLNNAPVNAIISVYINQPQKVIFYKE

SEQ ID NO: 26254 - protein, 85 aa, unidentified
  REGION 1..85: note = Description of Unknown:cds_NZ_WFIY01000004.1_cds_WP_155863329.1_1295 target sequence
FYGESLKIPFTSIENYVKPWKKYYVKPWKKYENENTSLLVIATYTKGNETFTSAEEIEYNPNWVLKNQPIQIVAKINIIPQLIKL

SEQ ID NO: 26255 - protein, 85 aa, unidentified
  REGION 1..85: note = Description of Unknown:cds_NZ_WFIY01000004.1_cds_WP_155863329.1_1295 target sequence
NNTIIQQENNKIHKEVYEGTPGCSGCCYGRSGEKYAYIVNMSKEVYEEPPVLVGGKCEYVPVTCVIYFYNFSVPLNWITISNNVN

SEQ ID NO: 26256 - protein, 85 aa, unidentified
  REGION 1..85: note = Description of Unknown:cds_NZ_WFIY01000004.1_cds_WP_155863329.1_1295 target sequence
KNDNYTIISLFTILEGKVSWYAVSNSSNYGGPYIGVSYSANVNWETHAAYYKSHVSKLFDPTIYTYYNATIAVVIYQVYEYEPSH

SEQ ID NO: 26257 - protein, 85 aa, unidentified
  REGION 1..85: note = Description of Unknown:cds_NZ_WFIY01000004.1_cds_WP_155863329.1_1295 target sequence
VKNYGTPYVPLNDYLTVFEILWASPCIGYAIESCNGLTRVIYTNSTGEYTYYLKTGNGSVTLFYNYFEEFIGNQKSGQYGYVQWR

SEQ ID NO: 26258 - protein, 85 aa, unidentified
  REGION 1..85: note = Description of Unknown:cds_NZ_WFIY01000004.1_cds_WP_155863329.1_1295 target sequence
DGKITTTGNIYINKLGFCFCANSFEEYVHNNRIASVALDALDLVISILALEVGIESPIVDALIGFDANEYFFFSSSNQIENYFIF

SEQ ID NO: 26259 - protein, 84 aa, unidentified
  REGION 1..84: note = Description of Unknown:cds_NZ_WFIY01000004.1_cds_WP_155863329.1_1295 target sequence
LEVGIESPIVDALIGFDANEYFFFSSSNQIENYFIFINTIVNVYLPFDTYTCQVLGAGHVYVSYLNYSPLLGFVMNYSSYYYGG

SEQ ID NO: 26260 - protein, 85 aa, unidentified
  REGION 1..85: note = Description of Unknown:cds_NZ_WFIY01000004.1_cds_WP_155863329.1_1295 target sequence
LFTPILIGYQITSNGIIEYFKNVIDPSFIIKAYLNNAPVNAIISVYINQPQKVIFYKEFYGESLKIPFTSIENYVKPWKKYYVKP

SEQ ID NO: 26261 - protein, 85 aa, unidentified
  REGION 1..85: note = Description of Unknown:cds_NZ_WFIY01000004.1_cds_WP_155863329.1_1295 target sequence
WKKYENENTSLLVIATYTKGNETFTSAEEIEYNPNWVLKNQPIQIVAKINIIPQLIKLNNTIIQQENNKIHKEVYEGTPGCSGCC

SEQ ID NO: 26262 - protein, 85 aa, unidentified
  REGION 1..85: note = Description of Unknown:cds_NZ_WFIY01000004.1_cds_WP_155863329.1_1295 target sequence
YGRSGEKYAYIVNMSKEVYEEPPVLVGGKCEYVPVTCVIYFYNFSVPLNWITISNNVNKNDNYTIISLFTILEGKVSWYAVSNSS

SEQ ID NO: 26263 - protein, 85 aa, unidentified
  REGION 1..85: note = Description of Unknown:cds_NZ_WFIY01000004.1_cds_WP_155863329.1_1295 target sequence
NYGGPYIGVSYSANVNWETHAAYYKSHVSKLFDPTIYTYYNATIAVVIYQVYEYEPSHVKNYGTPYVPLNDYLTVFEILWASPCI

SEQ ID NO: 26264 - protein, 85 aa, unidentified
  REGION 1..85: note = Description of Unknown:cds_NZ_WFIY01000004.1_cds_WP_155863329.1_1295 target sequence
GYAIESCNGLTRVIYTNSTGEYTYYLKTGNGSVTLFYNYFEEFIGNQKSGQYGYVQWRDGKITTTGNIYINKLGFCFCANSFEEY

SEQ ID NO: 26265 - protein, 85 aa, unidentified
  REGION 1..85: note = Description of Unknown:cds_NZ_WFIY01000004.1_cds_WP_155863329.1_1295 target sequence
VHNNRIASVALDALDLVISILALEVGIESPIVDALIGFDANEYFFFSSSNQIENYFIFINTIVNVYLPFDTYTCQVLGAGHVYVS

SEQ ID NO: 26266 - protein, 85 aa, unidentified
  REGION 1..85: note = Description of Unknown:cds_NZ_WFIY01000004.1_cds_WP_155863779.1_1659 target sequence
IQKIRSEKVYGGYEKAPNRAFLRAMGLNDDDISKPLIGIAAAWNEAGPCNIHVLALANVAKEGVREAGGTPRIFTTPVVIDGIAM

SEQ ID NO: 26267 - protein, 85 aa, unidentified
  REGION 1..85: note = Description of Unknown:cds_NZ_WFIY01000004.1_cds_WP_155863779.1_1659 target sequence
GSEGMKYSLVSREVIADTVELTVNAHGYDGFVALGGCDKTGPGLMMAMARLNIPSIYMYGGTTLPGNYKGKPIAIGDVYEAVGAY

SEQ ID NO: 26268 - protein, 85 aa, unidentified
  REGION 1..85: note = Description of Unknown:cds_NZ_WFIY01000004.1_cds_WP_155863779.1_1659 target sequence
AAGKLSAEDLRIMELNAIPGPGTCGGLYTANTMGMISEALGVALPGSASPPAVDAEKVRFAKETGKALLHLMEIGLKPRDIMTFE

SEQ ID NO: 26269 - protein, 85 aa, unidentified
  REGION 1..85: note = Description of Unknown:cds_NZ_WFIY01000004.1_cds_WP_155863779.1_1659 target sequence
AFENAITVLMASGGSTNAVLHLLAIAHEAGVNLTLDDFDRISKKVPEIVNMKPGGEYVMADLHRVGGVPLILKKLLDAGLLHGDV

SEQ ID NO: 26270 - protein, 85 aa, unidentified
  REGION 1..85: note = Description of Unknown:cds_NZ_WFIY01000004.1_cds_WP_155863779.1_1659 target sequence
ITVTGKTMEQNLKEYKIPDVPHSHIVRDVKNPYSPTGGIRILKGNLATEGAVIKASASKVKYHRGPARVFNSEEEAFRAVLNGQI

SEQ ID NO: 26271 - protein, 85 aa, unidentified
  REGION 1..85: note = Description of Unknown:cds_NZ_WFIY01000004.1_cds_WP_155863779.1_1659 target sequence
KEKEVVVIRYEGPKGGPGMREMLAVTSAIVGQGLGESVALVTDGRFSGATRGIMVGHVAPEAAVGGTIAIVEDGDIITIDVDNGK

SEQ ID NO: 26272 - protein, 84 aa, unidentified
  REGION 1..84: note = Description of Unknown:cds_NZ_WFIY01000004.1_cds_WP_155863779.1_1659 target sequence
ATRGIMVGHVAPEAAVGGTIAIVEDGDIITIDVDNGKLEVELSDKEIKERLENWKPPEPKYKTGLLAQYARLVSSSSKGAVLLG

SEQ ID NO: 26273 - protein, 85 aa, unidentified
  REGION 1..85: note = Description of Unknown:cds_NZ_WFIY01000004.1_cds_WP_155863779.1_1659 target sequence
NDDDISKPLIGIAAAWNEAGPCNIHVLALANVAKEGVREAGGTPRIFTTPVVIDGIAMGSEGMKYSLVSREVIADTVELTVNAHG

SEQ ID NO: 26274 - protein, 85 aa, unidentified
  REGION 1..85: note = Description of Unknown:cds_NZ_WFIY01000004.1_cds_WP_155863779.1_1659 target sequence
YDGFVALGGCDKTGPGLMMAMARLNIPSIYMYGGTTLPGNYKGKPIAIGDVYEAVGAYAAGKLSAEDLRIMELNAIPGPGTCGGL

SEQ ID NO: 26275 - protein, 85 aa, unidentified
  REGION 1..85: note = Description of Unknown:cds_NZ_WFIY01000004.1_cds_WP_155863779.1_1659 target sequence
YTANTMGMISEALGVALPGSASPPAVDAEKVRFAKETGKALLHLMEIGLKPRDIMTFEAFENAITVLMASGGSTNAVLHLLAIAH

SEQ ID NO: 26276 - protein, 85 aa, unidentified
  REGION 1..85: note = Description of Unknown:cds_NZ_WFIY01000004.1_cds_WP_155863779.1_1659 target sequence
EAGVNLTLDDFDRISKKVPEIVNMKPGGEYVMADLHRVGGVPLILKKLLDAGLLHGDVITVTGKTMEQNLKEYKIPDVPHSHIVR

SEQ ID NO: 26277 - protein, 85 aa, unidentified
  REGION 1..85: note = Description of Unknown:cds_NZ_WFIY01000004.1_cds_WP_155863779.1_1659 target sequence
DVKNPYSPTGGIRILKGNLATEGAVIKASASKVKYHRGPARVFNSEEEAFRAVLNGQIKEKEVVVIRYEGPKGGPGMREMLAVTS

SEQ ID NO: 26278 - protein, 85 aa, unidentified
  REGION 1..85: note = Description of Unknown:cds_NZ_WFIY01000004.1_cds_WP_155863779.1_1659 target sequence
AIVGQGLGESVALVTDGRFSGATRGIMVGHVAPEAAVGGTIAIVEDGDIITIDVDNGKLEVELSDKEIKERLENWKPPEPKYKTG

SEQ ID NO: 26279 - protein, 85 aa, unidentified
  REGION 1..85: note = Description of Unknown:cds_NC_025351.1_cds_YP_009094085.1_5 target sequence
SNKRTTVLIIISYTLFYLNNAAIVGFDFDKLNKIGVVQGRVLNYKIKGDPMTKDLVLKFIPNIVNITECVREPLSRYNETVRRLL

SEQ ID NO: 26280 - protein, 85 aa, unidentified
  REGION 1..85: note = Description of Unknown:cds_NC_025351.1_cds_YP_009094085.1_5 target sequence
LPIHNMLGLYLNNTNAKMTGLMIAGVIMGGIAIGIATAAQITAGFALYEAKKNTENIQKLTDSIMKTQDSIDKLTDSVGTSILIL

SEQ ID NO: 26281 - protein, 85 aa, unidentified
  REGION 1..85: note = Description of Unknown:cds_NC_025351.1_cds_YP_009094085.1_5 target sequence
NKLQTYINNQLVPNLELLSCRQNKIEFDLMLTKYLVDLMTVIGPNINNPVNKDMTIQSLSLLFDGNYDIMMSELGYTPQDFLDLI

SEQ ID NO: 26282 - protein, 85 aa, unidentified
  REGION 1..85: note = Description of Unknown:cds_NC_025351.1_cds_YP_009094085.1_5 target sequence
ESKSITGQIIYVDMENLYVVIRTYLPTLIEVPDAQIYEFNKITMSSNGGEYLSTIPNFILIRGNYMSNIDVATCYMTKASVICNQ

SEQ ID NO: 26283 - protein, 85 aa, unidentified
  REGION 1..85: note = Description of Unknown:cds_NC_025351.1_cds_YP_009094085.1_5 target sequence
DYSLPMSQNLRSCYQGETEYCPVEAVIASHSPRFALTNGVIFANCINTICRCQDNGKTITQNINQFVSMIDNSTCNDVMVDKFTI

SEQ ID NO: 26284 - protein, 85 aa, unidentified
  REGION 1..85: note = Description of Unknown:cds_NC_025351.1_cds_YP_009094085.1_5 target sequence
KVGKYMGRKDINNINIQIGPQIIIDKVDLSNEINKMNQSLKDSIFYLREAKRILDSVNISLISPSVQLFLIIISVLSFIILLIII

SEQ ID NO: 26285 - protein, 84 aa, unidentified
  REGION 1..84: note = Description of Unknown:cds_NC_025351.1_cds_YP_009094085.1_5 target sequence
REAKRILDSVNISLISPSVQLFLIIISVLSFIILLIIIVYLYCKSKHSYKYNKFIDDPDYYNDYKRERINGKASKSNNIYYVGD

SEQ ID NO: 26286 - protein, 85 aa, unidentified
  REGION 1..85: note = Description of Unknown:cds_NC_025351.1_cds_YP_009094085.1_5 target sequence
FDKLNKIGVVQGRVLNYKIKGDPMTKDLVLKFIPNIVNITECVREPLSRYNETVRRLLLPIHNMLGLYLNNTNAKMTGLMIAGVI

SEQ ID NO: 26287 - protein, 85 aa, unidentified
  REGION 1..85: note = Description of Unknown:cds_NC_025351.1_cds_YP_009094085.1_5 target sequence
MGGIAIGIATAAQITAGFALYEAKKNTENIQKLTDSIMKTQDSIDKLTDSVGTSILILNKLQTYINNQLVPNLELLSCRQNKIEF

SEQ ID NO: 26288 - protein, 85 aa, unidentified
  REGION 1..85: note = Description of Unknown:cds_NC_025351.1_cds_YP_009094085.1_5 target sequence
DLMLTKYLVDLMTVIGPNINNPVNKDMTIQSLSLLFDGNYDIMMSELGYTPQDFLDLIESKSITGQIIYVDMENLYVVIRTYLPT

SEQ ID NO: 26289 - protein, 85 aa, unidentified
  REGION 1..85: note = Description of Unknown:cds_NC_025351.1_cds_YP_009094085.1_5 target sequence
LIEVPDAQIYEFNKITMSSNGGEYLSTIPNFILIRGNYMSNIDVATCYMTKASVICNQDYSLPMSQNLRSCYQGETEYCPVEAVI

SEQ ID NO: 26290 - protein, 85 aa, unidentified
  REGION 1..85: note = Description of Unknown:cds_NC_025351.1_cds_YP_009094085.1_5 target sequence
ASHSPRFALTNGVIFANCINTICRCQDNGKTITQNINQFVSMIDNSTCNDVMVDKFTIKVGKYMGRKDINNINIQIGPQIIIDKV

SEQ ID NO: 26291 - protein, 85 aa, unidentified
  REGION 1..85: note = Description of Unknown:cds_NC_025351.1_cds_YP_009094085.1_5 target sequence
DLSNEINKMNQSLKDSIFYLREAKRILDSVNISLISPSVQLFLIIISVLSFIILLIIIVYLYCKSKHSYKYNKFIDDPDYYNDYK

SEQ ID NO: 26292 - protein, 85 aa, unidentified
  REGION 1..85: note = Description of Unknown:cds_NZ_WFIY01000004.1_cds_WP_155862950.1_809 target sequence
SSTATVATTPEGIPVIILKEGSSRTYGKEAVRLNIAAVKAVEEALKSTYGPRGMDKMLVDSLGDITITNDGATILDKMDLQHPAA

SEQ ID NO: 26293 - protein, 85 aa, unidentified
  REGION 1..85: note = Description of Unknown:cds_NZ_WFIY01000004.1_cds_WP_155862950.1_809 target sequence
KLLVQIAKGQDEETADGTKTAVILAGELVKKAEDLLYKDIHPTIIISGYKKAEEVALKTIQEIAQPVSINDTDLLKKVAMTSLSS

SEQ ID NO: 26294 - protein, 85 aa, unidentified
  REGION 1..85: note = Description of Unknown:cds_NZ_WFIY01000004.1_cds_WP_155862950.1_809 target sequence
KSVAGAREYLADIVVKAVTQVSELRGDKWYVDLDNIQIVKKAGGGINDTQLVYGIIVDKEVVHPGMPKRIENAKIALLDASLEAE

SEQ ID NO: 26295 - protein, 85 aa, unidentified
  REGION 1..85: note = Description of Unknown:cds_NZ_WFIY01000004.1_cds_WP_155862950.1_809 target sequence
KPELDAEIRINDPSQMQKFLEEEDNLLKEKVDKIAATGANVVICQKGIDEVAQSYLAKKGILAVRRAKKSDLEKLARATGGRVVS

SEQ ID NO: 26296 - protein, 85 aa, unidentified
  REGION 1..85: note = Description of Unknown:cds_NZ_WFIY01000004.1_cds_WP_155862950.1_809 target sequence
NIDELSPQDLGYAALVEERKVGEDKMVFVEGAKNPKAISILIRGGLERVVDETERALRDALGTVADVIKDGRAVAGGGAIEIEIA

SEQ ID NO: 26297 - protein, 85 aa, unidentified
  REGION 1..85: note = Description of Unknown:cds_NZ_WFIY01000004.1_cds_WP_155862950.1_809 target sequence
KALRKYAPQVGGKEQLAIEAYASALESLVMILIENAGFDPIDLLMKLRSAHENENNKWVGVDLYAGQPVDMWQKGVIDPALVKMN

SEQ ID NO: 26298 - protein, 84 aa, unidentified
  REGION 1..84: note = Description of Unknown:cds_NZ_WFIY01000004.1_cds_WP_155862950.1_809 target sequence
MKLRSAHENENNKWVGVDLYAGQPVDMWQKGVIDPALVKMNAIKAATEAVTLILRIDDLVAAGKKSTSSGSESKSGESKPSEED

SEQ ID NO: 26299 - protein, 85 aa, unidentified
  REGION 1..85: note = Description of Unknown:cds_NZ_WFIY01000004.1_cds_WP_155862950.1_809 target sequence
KEAVRLNIAAVKAVEEALKSTYGPRGMDKMLVDSLGDITITNDGATILDKMDLQHPAAKLLVQIAKGQDEETADGTKTAVILAGE

SEQ ID NO: 26300 - protein, 85 aa, unidentified
  REGION 1..85: note = Description of Unknown:cds_NZ_WFIY01000004.1_cds_WP_155862950.1_809 target sequence
LVKKAEDLLYKDIHPTIIISGYKKAEEVALKTIQEIAQPVSINDTDLLKKVAMTSLSSKSVAGAREYLADIVVKAVTQVSELRGD

SEQ ID NO: 26301 - protein, 85 aa, unidentified
  REGION 1..85: note = Description of Unknown:cds_NZ_WFIY01000004.1_cds_WP_155862950.1_809 target sequence
KWYVDLDNIQIVKKAGGGINDTQLVYGIIVDKEVVHPGMPKRIENAKIALLDASLEAEKPELDAEIRINDPSQMQKFLEEEDNLL

SEQ ID NO: 26302 - protein, 85 aa, unidentified
  REGION 1..85: note = Description of Unknown:cds_NZ_WFIY01000004.1_cds_WP_155862950.1_809 target sequence
KEKVDKIAATGANVVICQKGIDEVAQSYLAKKGILAVRRAKKSDLEKLARATGGRVVSNIDELSPQDLGYAALVEERKVGEDKMV

SEQ ID NO: 26303 - protein, 85 aa, unidentified
  REGION 1..85: note = Description of Unknown:cds_NZ_WFIY01000004.1_cds_WP_155862950.1_809 target sequence
FVEGAKNPKAISILIRGGLERVVDETERALRDALGTVADVIKDGRAVAGGGAIEIEIAKALRKYAPQVGGKEQLAIEAYASALES

SEQ ID NO: 26304 - protein, 85 aa, unidentified
  REGION 1..85: note = Description of Unknown:cds_NZ_WFIY01000004.1_cds_WP_155862950.1_809 target sequence
LVMILIENAGFDPIDLLMKLRSAHENENNKWVGVDLYAGQPVDMWQKGVIDPALVKMNAIKAATEAVTLILRIDDLVAAGKKSTS

SEQ ID NO: 26305 - protein, 85 aa, unidentified
  REGION 1..85: note = Description of Unknown:cds_NZ_WFIY01000004.1_cds_WP_155863703.1_1558 target sequence
RRFYLFFIVTLVFYVIVFRTVFEVNAFSLIDTEPSYLFYRQYLFSITTPFSYFYNFLNSIWWNSPEKIFTVLPFILGTTLFYVMS

SEQ ID NO: 26306 - protein, 85 aa, unidentified
  REGION 1..85: note = Description of Unknown:cds_NZ_WFIY01000004.1_cds_WP_155863703.1_1558 target sequence
SYFNLIEWKKWILSFLFMLNPGTALILYIGDAPGILMSYAFAPLVFLLGYRLAKNINLKNFLILSLVLIVANWIYFESFILDFIF

SEQ ID NO: 26307 - protein, 85 aa, unidentified
  REGION 1..85: note = Description of Unknown:cds_NZ_WFIY01000004.1_cds_WP_155863703.1_1558 target sequence
LLPILFFASNKIKFLLASLASSALSFLSLVNYEVLVYEIVVPSLNVTNAHYIPLYVKEIYYISFYLGIFSIYLFIKKYKIPSAVV

SEQ ID NO: 26308 - protein, 85 aa, unidentified
  REGION 1..85: note = Description of Unknown:cds_NZ_WFIY01000004.1_cds_WP_155863703.1_1558 target sequence
SVALILLLTWLAVFVKIPNIPLINAIYLIFESFQQKFILFISGLVVISFVFLKSWKYIFFILFLMSLANMPCINLYTQEHVTAYA

SEQ ID NO: 26309 - protein, 85 aa, unidentified
  REGION 1..85: note = Description of Unknown:cds_NZ_WFIY01000004.1_cds_WP_155863703.1_1558 target sequence
ILTFNANNYAVCEEFFKLQKFIYEHPGFYYIGINKTFLLECNLYSIYKYESLIPNLLPVSFSIFGVNAKQLAYEGIKYYLVVSNE

SEQ ID NO: 26310 - protein, 85 aa, unidentified
  REGION 1..85: note = Description of Unknown:cds_NZ_WFIY01000004.1_cds_WP_155863703.1_1558 target sequence
TPNYSNFKLVFSCGKFHLYENECFKSIAFSASGEPLNVTVTPCKVIVIGNSTFAKVLVPYYGLWKGARDCNGYLGIPMNKGYGEA

SEQ ID NO: 26311 - protein, 84 aa, unidentified
  REGION 1..84: note = Description of Unknown:cds_NZ_WFIY01000004.1_cds_WP_155863703.1_1558 target sequence
VIVIGNSTFAKVLVPYYGLWKGARDCNGYLGIPMNKGYGEAINEAYYINQYLIIVDFIVLLIISGLLVKLCWSKLRSVIWLKRT

SEQ ID NO: 26312 - protein, 85 aa, unidentified
  REGION 1..85: note = Description of Unknown:cds_NZ_WFIY01000004.1_cds_WP_155863703.1_1558 target sequence
SLIDTEPSYLFYRQYLFSITTPFSYFYNFLNSIWWNSPEKIFTVLPFILGTTLFYVMSSYFNLIEWKKWILSFLFMLNPGTALIL

SEQ ID NO: 26313 - protein, 85 aa, unidentified
  REGION 1..85: note = Description of Unknown:cds_NZ_WFIY01000004.1_cds_WP_155863703.1_1558 target sequence
YIGDAPGILMSYAFAPLVFLLGYRLAKNINLKNFLILSLVLIVANWIYFESFILDFIFLLPILFFASNKIKFLLASLASSALSFL

SEQ ID NO: 26314 - protein, 85 aa, unidentified
  REGION 1..85: note = Description of Unknown:cds_NZ_WFIY01000004.1_cds_WP_155863703.1_1558 target sequence
SLVNYEVLVYEIVVPSLNVTNAHYIPLYVKEIYYISFYLGIFSIYLFIKKYKIPSAVVSVALILLLTWLAVFVKIPNIPLINAIY

SEQ ID NO: 26315 - protein, 85 aa, unidentified
  REGION 1..85: note = Description of Unknown:cds_NZ_WFIY01000004.1_cds_WP_155863703.1_1558 target sequence
LIFESFQQKFILFISGLVVISFVFLKSWKYIFFILFLMSLANMPCINLYTQEHVTAYAILTFNANNYAVCEEFFKLQKFIYEHPG

SEQ ID NO: 26316 - protein, 85 aa, unidentified
  REGION 1..85: note = Description of Unknown:cds_NZ_WFIY01000004.1_cds_WP_155863703.1_1558 target sequence
FYYIGINKTFLLECNLYSIYKYESLIPNLLPVSFSIFGVNAKQLAYEGIKYYLVVSNETPNYSNFKLVFSCGKFHLYENECFKSI

SEQ ID NO: 26317 - protein, 85 aa, unidentified
  REGION 1..85: note = Description of Unknown:cds_NZ_WFIY01000004.1_cds_WP_155863703.1_1558 target sequence
AFSASGEPLNVTVTPCKVIVIGNSTFAKVLVPYYGLWKGARDCNGYLGIPMNKGYGEAINEAYYINQYLIIVDFIVLLIISGLLV

SEQ ID NO: 26318 - protein, 85 aa, unidentified
  REGION 1..85: note = Description of Unknown:cds_NC_009884.1_cds_YP_001496959.1_34 target sequence
LVFLNNCDFYFVLDFYFSHTFLSSLRVYKISMSFITGIEKDITNFFSGASDTFSGVVNFGSNIVNGVQNAVQGVVHSIANIAQGI

SEQ ID NO: 26319 - protein, 85 aa, unidentified
  REGION 1..85: note = Description of Unknown:cds_NC_009884.1_cds_YP_001496959.1_34 target sequence
YNGILSIGSDIVNIFGQIGGAIWHGLVSFATAFGTFFYEAFHIVSSAVYGAFQRVASAFEYVGKWIWGGITHIGDALSAFGNWLY

SEQ ID NO: 26320 - protein, 85 aa, unidentified
  REGION 1..85: note = Description of Unknown:cds_NC_009884.1_cds_YP_001496959.1_34 target sequence
NGFREIGIDLLNLGVTASFIYADIKSFFITIWNGLVVIGEDIANAFKAFASSVESLFNTASSYASNLLNDVMYIPEDASKYVASK

SEQ ID NO: 26321 - protein, 85 aa, unidentified
  REGION 1..85: note = Description of Unknown:cds_NC_009884.1_cds_YP_001496959.1_34 target sequence
VSSVLPRVASYNLFFEEMKSLDRLSETMGWRKTIAPILLKIGSPFIAGFTSLIAETALKSFFPEVTGVSPRARRTVAPPPSSDVV

SEQ ID NO: 26322 - protein, 85 aa, unidentified
  REGION 1..85: note = Description of Unknown:cds_NC_009884.1_cds_YP_001496959.1_34 target sequence
SSLSVPNPFQNSISQFTPPTVSPPPQSSVSLSPSPTFEKYVVGAREEDEELLVELPTVLNKLASPYPNSAIVLDEFTVGGYIVQT

SEQ ID NO: 26323 - protein, 85 aa, unidentified
  REGION 1..85: note = Description of Unknown:cds_NC_009884.1_cds_YP_001496959.1_34 target sequence
TREFISFSSVNNVYVIPYATLKIRKVSEESSATVDFTGGVLVETYLLGIPICPASANNASTSSISGAINDGVNSSVQVCLEIGNV

SEQ ID NO: 26324 - protein, 84 aa, unidentified
  REGION 1..84: note = Description of Unknown:cds_NC_009884.1_cds_YP_001496959.1_34 target sequence
LLGIPICPASANNASTSSISGAINDGVNSSVQVCLEIGNVASDSGNFSATAYQGVVAPVIPAISQSSSDNQNVSLSVYQSTSMP

SEQ ID NO: 26325 - protein, 85 aa, unidentified
  REGION 1..85: note = Description of Unknown:cds_NC_009884.1_cds_YP_001496959.1_34 target sequence
YKISMSFITGIEKDITNFFSGASDTFSGVVNFGSNIVNGVQNAVQGVVHSIANIAQGIYNGILSIGSDIVNIFGQIGGAIWHGLV

SEQ ID NO: 26326 - protein, 85 aa, unidentified
  REGION 1..85: note = Description of Unknown:cds_NC_009884.1_cds_YP_001496959.1_34 target sequence
SFATAFGTFFYEAFHIVSSAVYGAFQRVASAFEYVGKWIWGGITHIGDALSAFGNWLYNGFREIGIDLLNLGVTASFIYADIKSF

SEQ ID NO: 26327 - protein, 85 aa, unidentified
  REGION 1..85: note = Description of Unknown:cds_NC_009884.1_cds_YP_001496959.1_34 target sequence
FITIWNGLVVIGEDIANAFKAFASSVESLFNTASSYASNLLNDVMYIPEDASKYVASKVSSVLPRVASYNLFFEEMKSLDRLSET

SEQ ID NO: 26328 - protein, 85 aa, unidentified
  REGION 1..85: note = Description of Unknown:cds_NC_009884.1_cds_YP_001496959.1_34 target sequence
MGWRKTIAPILLKIGSPFIAGFTSLIAETALKSFFPEVTGVSPRARRTVAPPPSSDVVSSLSVPNPFQNSISQFTPPTVSPPPQS

SEQ ID NO: 26329 - protein, 85 aa, unidentified
  REGION 1..85: note = Description of Unknown:cds_NC_009884.1_cds_YP_001496959.1_34 target sequence
SVSLSPSPTFEKYVVGAREEDEELLVELPTVLNKLASPYPNSAIVLDEFTVGGYIVQTTREFISFSSVNNVYVIPYATLKIRKVS

SEQ ID NO: 26330 - protein, 85 aa, unidentified
  REGION 1..85: note = Description of Unknown:cds_NC_009884.1_cds_YP_001496959.1_34 target sequence
EESSATVDFTGGVLVETYLLGIPICPASANNASTSSISGAINDGVNSSVQVCLEIGNVASDSGNFSATAYQGVVAPVIPAISQSS

SEQ ID NO: 26331 - protein, 85 aa, unidentified
  REGION 1..85: note = Description of Unknown:cds_NZ_WFIY01000004.1_cds_WP_155862999.1_876 target sequence
QEIRHGIFLTIVILGLILPRLILAGYPLESVYTSFGIFVSLFVDAILSYILFGSIIVSLVYFLTVLSLIDILNYTNLVNIYILFP

SEQ ID NO: 26332 - protein, 85 aa, unidentified
  REGION 1..85: note = Description of Unknown:cds_NZ_WFIY01000004.1_cds_WP_155862999.1_876 target sequence
YSMGLATALFFGLIIRRKYDDEFLSSLKKISITFNFYTILVSLVFLILAIIIYLYIYYSQLLLIGSVIAFLLLLISGKKEDSPLI

SEQ ID NO: 26333 - protein, 85 aa, unidentified
  REGION 1..85: note = Description of Unknown:cds_NZ_WFIY01000004.1_cds_WP_155862999.1_876 target sequence
LSSWIFLPYLMSQIGSNREEKGICIGEIIGILKRASFSSSKISTNSNYKWVSYKSKFYINMEKNKNFNIIIVGGSGSGKSHLAKN

SEQ ID NO: 26334 - protein, 85 aa, unidentified
  REGION 1..85: note = Description of Unknown:cds_NZ_WFIY01000004.1_cds_WP_155862999.1_876 target sequence
IIRKGKFHFLIFDIHGEYDVNAKRIDVSKISINPLSLFGQSPRQRALEVAYMIKSIFNLGSLQTIDLSNIIIDAYGEKGIFEDDE

SEQ ID NO: 26335 - protein, 85 aa, unidentified
  REGION 1..85: note = Description of Unknown:cds_NZ_WFIY01000004.1_cds_WP_155862999.1_876 target sequence
RTWNLPPPNFRDVLMLLEKKKKLVTTAQELNKIQSLEPYIYFLATNTFMDNSINLYDLIIDDYVLDFSKVTIPEIKYVIIETILR

SEQ ID NO: 26336 - protein, 85 aa, unidentified
  REGION 1..85: note = Description of Unknown:cds_NZ_WFIY01000004.1_cds_WP_155862999.1_876 target sequence
SILAFMYISGQSNFRKMIVIDEAPFILSKESGEQIMERLFAESRKFGFGFILISQSVEYVRKLIPNTSYVFALNIVDPTEIDFIS

SEQ ID NO: 26337 - protein, 84 aa, unidentified
  REGION 1..84: note = Description of Unknown:cds_NZ_WFIY01000004.1_cds_WP_155862999.1_876 target sequence
RKFGFGFILISQSVEYVRKLIPNTSYVFALNIVDPTEIDFISRLIGGQDPDIFKAIYNSLPKLERGLIITRDILRDEIILVRSN

SEQ ID NO: 26338 - protein, 85 aa, unidentified
  REGION 1..85: note = Description of Unknown:cds_NZ_WFIY01000004.1_cds_WP_155862999.1_876 target sequence
LESVYTSFGIFVSLFVDAILSYILFGSIIVSLVYFLTVLSLIDILNYTNLVNIYILFPYSMGLATALFFGLIIRRKYDDEFLSSL

SEQ ID NO: 26339 - protein, 85 aa, unidentified
  REGION 1..85: note = Description of Unknown:cds_NZ_WFIY01000004.1_cds_WP_155862999.1_876 target sequence
KKISITFNFYTILVSLVFLILAIIIYLYIYYSQLLLIGSVIAFLLLLISGKKEDSPLILSSWIFLPYLMSQIGSNREEKGICIGE

SEQ ID NO: 26340 - protein, 85 aa, unidentified
  REGION 1..85: note = Description of Unknown:cds_NZ_WFIY01000004.1_cds_WP_155862999.1_876 target sequence
IIGILKRASFSSSKISTNSNYKWVSYKSKFYINMEKNKNFNIIIVGGSGSGKSHLAKNIIRKGKFHFLIFDIHGEYDVNAKRIDV

SEQ ID NO: 26341 - protein, 85 aa, unidentified
  REGION 1..85: note = Description of Unknown:cds_NZ_WFIY01000004.1_cds_WP_155862999.1_876 target sequence
SKISINPLSLFGQSPRQRALEVAYMIKSIFNLGSLQTIDLSNIIIDAYGEKGIFEDDERTWNLPPPNFRDVLMLLEKKKKLVTTA

SEQ ID NO: 26342 - protein, 85 aa, unidentified
  REGION 1..85: note = Description of Unknown:cds_NZ_WFIY01000004.1_cds_WP_155862999.1_876 target sequence
QELNKIQSLEPYIYFLATNTFMDNSINLYDLIIDDYVLDFSKVTIPEIKYVIIETILRSILAFMYISGQSNFRKMIVIDEAPFIL

SEQ ID NO: 26343 - protein, 85 aa, unidentified
  REGION 1..85: note = Description of Unknown:cds_NZ_WFIY01000004.1_cds_WP_155862999.1_876 target sequence
SKESGEQIMERLFAESRKFGFGFILISQSVEYVRKLIPNTSYVFALNIVDPTEIDFISRLIGGQDPDIFKAIYNSLPKLERGLII

SEQ ID NO: 26344 - protein, 85 aa, unidentified
  REGION 1..85: note = Description of Unknown:cds_NZ_WFIY01000004.1_cds_1163 target sequence
VSLRKVLTKSELTFLSLGGIIGSGWLFSPLAAASYAGPLSIASWIIGGLMMIVIALAYAEISSAFPESGGIIRYPHYTHGSTLGF

SEQ ID NO: 26345 - protein, 85 aa, unidentified
  REGION 1..85: note = Description of Unknown:cds_NZ_WFIY01000004.1_cds_1163 target sequence
IMAWSYIISAISTVAIEAVATTTYISHFIPSLYSGNQLTTEGIMVTYVLLIIFFLINYYGVKFLGRVSHGIGWWKIIIPTTTAVL

SEQ ID NO: 26346 - protein, 85 aa, unidentified
  REGION 1..85: note = Description of Unknown:cds_NZ_WFIY01000004.1_cds_1163 target sequence
LLAYFNPSNVVFGKTACYQGLNGMLYAIPASGIVFSYLGFRQAIEYGGEGKNPQKDIPFAVISSLLISMSIFVALQLGFLGVVKT

SEQ ID NO: 26347 - protein, 85 aa, unidentified
  REGION 1..85: note = Description of Unknown:cds_NZ_WFIY01000004.1_cds_1163 target sequence
DGNWAELLNSPLANAPLISVIDMLPVVFSFWVGILLFDAIISPAGTGIIYLGTTARSIYASAKNGYFPKFLTRINERGIPLLALI

SEQ ID NO: 26348 - protein, 85 aa, unidentified
  REGION 1..85: note = Description of Unknown:cds_NZ_WFIY01000004.1_cds_1163 target sequence
VSLISSALFLLPIPSWYQIVGISSSATVLTYIMGGIGVESMRRIAPDVKRTYVLSYIKVLAPLATIFAGLLVYWSGFSTLFYIVT

SEQ ID NO: 26349 - protein, 85 aa, unidentified
  REGION 1..85: note = Description of Unknown:cds_NZ_WFIY01000004.1_cds_1163 target sequence
LVILGLSLYKRGVKGIISGVIALLNSYELYVETSALTSPSWYFIPFIIIDTVIISYLILTSAEGKFSAWAIPLLSGTLVLSYISP

SEQ ID NO: 26350 - protein, 84 aa, unidentified
  REGION 1..84: note = Description of Unknown:cds_NZ_WFIY01000004.1_cds_1163 target sequence
PFIIIDTVIISYLILTSAEGKFSAWAIPLLSGTLVLSYISPFGLYDLMPFPYDIIIASVFFFIIHKIAVRSSLPALKIESPINS

SEQ ID NO: 26351 - protein, 85 aa, unidentified
  REGION 1..85: note = Description of Unknown:cds_NZ_WFIY01000004.1_cds_1163 target sequence
SPLAAASYAGPLSIASWIIGGLMMIVIALAYAEISSAFPESGGIIRYPHYTHGSTLGFIMAWSYIISAISTVAIEAVATTTYISH

SEQ ID NO: 26352 - protein, 85 aa, unidentified
  REGION 1..85: note = Description of Unknown:cds_NZ_WFIY01000004.1_cds_1163 target sequence
FIPSLYSGNQLTTEGIMVTYVLLIIFFLINYYGVKFLGRVSHGIGWWKIIIPTTTAVLLLAYFNPSNVVFGKTACYQGLNGMLYA

SEQ ID NO: 26353 - protein, 85 aa, unidentified
  REGION 1..85: note = Description of Unknown:cds_NZ_WFIY01000004.1_cds_1163 target sequence
IPASGIVFSYLGFRQAIEYGGEGKNPQKDIPFAVISSLLISMSIFVALQLGFLGVVKTDGNWAELLNSPLANAPLISVIDMLPVV

SEQ ID NO: 26354 - protein, 85 aa, unidentified
  REGION 1..85: note = Description of Unknown:cds_NZ_WFIY01000004.1_cds_1163 target sequence
FSFWVGILLFDAIISPAGTGIIYLGTTARSIYASAKNGYFPKFLTRINERGIPLLALIVSLISSALFLLPIPSWYQIVGISSSAT

SEQ ID NO: 26355 - protein, 85 aa, unidentified
  REGION 1..85: note = Description of Unknown:cds_NZ_WFIY01000004.1_cds_1163 target sequence
VLTYIMGGIGVESMRRIAPDVKRTYVLSYIKVLAPLATIFAGLLVYWSGFSTLFYIVTLVILGLSLYKRGVKGIISGVIALLNSY

SEQ ID NO: 26356 - protein, 85 aa, unidentified
  REGION 1..85: note = Description of Unknown:cds_NZ_WFIY01000004.1_cds_1163 target sequence
ELYVETSALTSPSWYFIPFIIIDTVIISYLILTSAEGKFSAWAIPLLSGTLVLSYISPFGLYDLMPFPYDIIIASVFFFIIHKIA

SEQ ID NO: 26357 - protein, 85 aa, unidentified
  REGION 1..85: note = Description of Unknown:cds_NZ_WFIY01000004.1_cds_WP_155863259.1_1212 target sequence
ERKKGFLDSILDRIGINEAPLFRTPDYMYNVSYWLGALVTAAFAYTVITGLILLLLYEPAAAYCSTENIIYHVPYGPVLLFSHLY

SEQ ID NO: 26358 - protein, 85 aa, unidentified
  REGION 1..85: note = Description of Unknown:cds_NZ_WFIY01000004.1_cds_WP_155863259.1_1212 target sequence
GAYIMIVLVYIHMFRNFYKGAYKKPRELQWVTGVLLLALTLGASFFGYSLVGDVLGIDAVDIGSSLLIGTGFPGATTIVGWLFGP

SEQ ID NO: 26359 - protein, 85 aa, unidentified
  REGION 1..85: note = Description of Unknown:cds_NZ_WFIY01000004.1_cds_WP_155863259.1_1212 target sequence
GIDAVQSSNPIVRSEFFDRILGWHIIMVALIGLLFAFHLMLAERYGMTPSAKEKPRVPAFYTKEEQEKFNPWWPRNFVYMLSVVL

SEQ ID NO: 26360 - protein, 85 aa, unidentified
  REGION 1..85: note = Description of Unknown:cds_NZ_WFIY01000004.1_cds_WP_155863259.1_1212 target sequence
MTWGVILIVPNVLANINGATILGHKITLPLVINPYPAPQAFTTAAEHTAPYPPWFFLFLYKFVDFLLPNGLPLLPSMVIAILIIG

SEQ ID NO: 26361 - protein, 85 aa, unidentified
  REGION 1..85: note = Description of Unknown:cds_NZ_WFIY01000004.1_cds_WP_155863259.1_1212 target sequence
LVVLMLIPFFENSELMFISSRKFWTWVMSVLAYSLVALSIWGYLEPGVPAPFTQQVEIIGIPAIILAIIIYLIPSKKKKEVSATK

SEQ ID NO: 26362 - protein, 85 aa, unidentified
  REGION 1..85: note = Description of Unknown:cds_NZ_WFIY01000004.1_cds_WP_155863259.1_1212 target sequence
PFGPLSILGTSVSVLLFAGTLGDFLIYPSLLGLLMLLPLGVMVYHYVTRMVRIINSANLGGGYSLSKKAAFVGIPVIFVITIFLF

SEQ ID NO: 26363 - protein, 84 aa, unidentified
  REGION 1..84: note = Description of Unknown:cds_NZ_WFIY01000004.1_cds_WP_155863259.1_1212 target sequence
YHYVTRMVRIINSANLGGGYSLSKKAAFVGIPVIFVITIFLFILLTRIPSVGIQSTYAGIDLGVILFLWGYAINLYHYLVYVKE

SEQ ID NO: 26364 - protein, 85 aa, unidentified
  REGION 1..85: note = Description of Unknown:cds_NZ_WFIY01000004.1_cds_WP_155863259.1_1212 target sequence
MYNVSYWLGALVTAAFAYTVITGLILLLLYEPAAAYCSTENIIYHVPYGPVLLFSHLYGAYIMIVLVYIHMFRNFYKGAYKKPRE

SEQ ID NO: 26365 - protein, 85 aa, unidentified
  REGION 1..85: note = Description of Unknown:cds_NZ_WFIY01000004.1_cds_WP_155863259.1_1212 target sequence
LQWVTGVLLLALTLGASFFGYSLVGDVLGIDAVDIGSSLLIGTGFPGATTIVGWLFGPGIDAVQSSNPIVRSEFFDRILGWHIIM

SEQ ID NO: 26366 - protein, 85 aa, unidentified
  REGION 1..85: note = Description of Unknown:cds_NZ_WFIY01000004.1_cds_WP_155863259.1_1212 target sequence
VALIGLLFAFHLMLAERYGMTPSAKEKPRVPAFYTKEEQEKFNPWWPRNFVYMLSVVLMTWGVILIVPNVLANINGATILGHKIT

SEQ ID NO: 26367 - protein, 85 aa, unidentified
  REGION 1..85: note = Description of Unknown:cds_NZ_WFIY01000004.1_cds_WP_155863259.1_1212 target sequence
LPLVINPYPAPQAFTTAAEHTAPYPPWFFLFLYKFVDFLLPNGLPLLPSMVIAILIIGLVVLMLIPFFENSELMFISSRKFWTWV

SEQ ID NO: 26368 - protein, 85 aa, unidentified
  REGION 1..85: note = Description of Unknown:cds_NZ_WFIY01000004.1_cds_WP_155863259.1_1212 target sequence
MSVLAYSLVALSIWGYLEPGVPAPFTQQVEIIGIPAIILAIIIYLIPSKKKKEVSATKPFGPLSILGTSVSVLLFAGTLGDFLIY

SEQ ID NO: 26369 - protein, 85 aa, unidentified
  REGION 1..85: note = Description of Unknown:cds_NZ_WFIY01000004.1_cds_WP_155863259.1_1212 target sequence
PSLLGLLMLLPLGVMVYHYVTRMVRIINSANLGGGYSLSKKAAFVGIPVIFVITIFLFILLTRIPSVGIQSTYAGIDLGVILFLW

SEQ ID NO: 26370 - protein, 85 aa, unidentified
  REGION 1..85: note = Description of Unknown:cds_NZ_WFIY01000004.1_cds_WP_155864279.1_2272 target sequence
SVSKRISNWFSERLKLDELPFFRTPDYMYHVSDWLGALVAAAFIYTVISGLILLLYYDPDNGYESTQFIINQVPYGSVVLYSHLY

SEQ ID NO: 26371 - protein, 85 aa, unidentified
  REGION 1..85: note = Description of Unknown:cds_NZ_WFIY01000004.1_cds_WP_155864279.1_2272 target sequence
GAYAMIILAYIHMFRNYFVGAYKKPRELLWIIGVLLLVLTMGASFLGYSLIGDVLATSAVDVGAGIIESIPGMQWLVPFLFGNYD

SEQ ID NO: 26372 - protein, 85 aa, unidentified
  REGION 1..85: note = Description of Unknown:cds_NZ_WFIY01000004.1_cds_WP_155864279.1_2272 target sequence
NGQYGRVLAWHIIFVALIGLLFIFHFFLAESYGMMPSRKVKSKAPAVYTREEWMKFNPWWPRNFVYMLSLILMTWGFILIIPNAL

SEQ ID NO: 26373 - protein, 85 aa, unidentified
  REGION 1..85: note = Description of Unknown:cds_NZ_WFIY01000004.1_cds_WP_155864279.1_2272 target sequence
AYLNGLPQYYNPFLNPKPAPPPTSPLAAKVTTYPPWFFLFFYKIADFSSNVLLDLVIGAIIPLAYLILLPFLDRSEELHPLKRKI

SEQ ID NO: 26374 - protein, 85 aa, unidentified
  REGION 1..85: note = Description of Unknown:cds_NZ_WFIY01000004.1_cds_WP_155864279.1_2272 target sequence
FTGIGILMIIYLIQTTLWGDIAPGVPVAFKCQVVALLPPAVIVAIGLWMLPSKKSSEGPRVKHSLIHLGKALAPLAILGFVIISL

SEQ ID NO: 26375 - protein, 85 aa, unidentified
  REGION 1..85: note = Description of Unknown:cds_NZ_WFIY01000004.1_cds_WP_155864279.1_2272 target sequence
LFVGGLAEFVNYPSPITFAILLPIASLFVIGAKRIAPIILRMEQQNTSTTPSPEVSKLETKKKFAQYIIVVLFILSLVLMATLWT

SEQ ID NO: 26376 - protein, 84 aa, unidentified
  REGION 1..84: note = Description of Unknown:cds_NZ_WFIY01000004.1_cds_WP_155864279.1_2272 target sequence
QQNTSTTPSPEVSKLETKKKFAQYIIVVLFILSLVLMATLWTIPPTGYESNMFGVDLGLIFVMWGEAISLYHYIVYKKPNESYE

SEQ ID NO: 26377 - protein, 85 aa, unidentified
  REGION 1..85: note = Description of Unknown:cds_NZ_WFIY01000004.1_cds_WP_155864279.1_2272 target sequence
MYHVSDWLGALVAAAFIYTVISGLILLLYYDPDNGYESTQFIINQVPYGSVVLYSHLYGAYAMIILAYIHMFRNYFVGAYKKPRE

SEQ ID NO: 26378 - protein, 85 aa, unidentified
  REGION 1..85: note = Description of Unknown:cds_NZ_WFIY01000004.1_cds_WP_155864279.1_2272 target sequence
LLWIIGVLLLVLTMGASFLGYSLIGDVLATSAVDVGAGIIESIPGMQWLVPFLFGNYDNGQYGRVLAWHIIFVALIGLLFIFHFF

SEQ ID NO: 26379 - protein, 85 aa, unidentified
  REGION 1..85: note = Description of Unknown:cds_NZ_WFIY01000004.1_cds_WP_155864279.1_2272 target sequence
LAESYGMMPSRKVKSKAPAVYTREEWMKFNPWWPRNFVYMLSLILMTWGFILIIPNALAYLNGLPQYYNPFLNPKPAPPPTSPLA

SEQ ID NO: 26380 - protein, 85 aa, unidentified
  REGION 1..85: note = Description of Unknown:cds_NZ_WFIY01000004.1_cds_WP_155864279.1_2272 target sequence
AKVTTYPPWFFLFFYKIADFSSNVLLDLVIGAIIPLAYLILLPFLDRSEELHPLKRKIFTGIGILMIIYLIQTTLWGDIAPGVPV

SEQ ID NO: 26381 - protein, 85 aa, unidentified
  REGION 1..85: note = Description of Unknown:cds_NZ_WFIY01000004.1_cds_WP_155864279.1_2272 target sequence
AFKCQVVALLPPAVIVAIGLWMLPSKKSSEGPRVKHSLIHLGKALAPLAILGFVIISLLFVGGLAEFVNYPSPITFAILLPIASL

SEQ ID NO: 26382 - protein, 85 aa, unidentified
  REGION 1..85: note = Description of Unknown:cds_NZ_WFIY01000004.1_cds_WP_155864279.1_2272 target sequence
FVIGAKRIAPIILRMEQQNTSTTPSPEVSKLETKKKFAQYIIVVLFILSLVLMATLWTIPPTGYESNMFGVDLGLIFVMWGEAIS

SEQ ID NO: 26383 - protein, 85 aa, unidentified
  REGION 1..85: note = Description of Unknown:cds_NC_039223.1_cds_YP_009513197.1_4 target sequence
GSKPSTRIPAPLMLITRTMLILGCICPTSSLDGRPLAAAGIVVTGDKAVNVYTSSRTGSIIVKLLPNMPRDKEACAKAPLEAYNR

SEQ ID NO: 26384 - protein, 85 aa, unidentified
  REGION 1..85: note = Description of Unknown:cds_NC_039223.1_cds_YP_009513197.1_4 target sequence
TLTTLLTPLGDSIRKIQGSVSTSGGRRQKRFIGAVIGSVALGVATAAQITAAAALIQANQNAANILRLKESIAATNEAVHEVTDG

SEQ ID NO: 26385 - protein, 85 aa, unidentified
  REGION 1..85: note = Description of Unknown:cds_NC_039223.1_cds_YP_009513197.1_4 target sequence
LSQLSVAVGKMQQFVNDQFNNTARELDCIKITQQVGVELNLYLTELTTVFGPQITSPALTQLTIQALYNLAGGNMDYLLTRLGIG

SEQ ID NO: 26386 - protein, 85 aa, unidentified
  REGION 1..85: note = Description of Unknown:cds_NC_039223.1_cds_YP_009513197.1_4 target sequence
NNQLSSLIGSGLITGYPILHDSQTQLLGIQVNLPSVGNLNNMRATYLETLSVSTTKGYASALVPKVVTQVGSVIEELDTSYCIGS

SEQ ID NO: 26387 - protein, 85 aa, unidentified
  REGION 1..85: note = Description of Unknown:cds_NC_039223.1_cds_YP_009513197.1_4 target sequence
DLDLYCTRIVTFPMSPGIYSCLSGNTSACMYSKTEGALTTPYMALKGSVIANCKITTCRCTDPPGIISQNYGEAVSLIDRHSCNV

SEQ ID NO: 26388 - protein, 85 aa, unidentified
  REGION 1..85: note = Description of Unknown:cds_NC_039223.1_cds_YP_009513197.1_4 target sequence
LSLDGITLRLSGEFDATYQKNISILDSQVIVTGNLDISTELGNVNNSISNALDRLAESNSKLEKVNVRLTSTSALITYIVLTVIS

SEQ ID NO: 26389 - protein, 84 aa, unidentified
  REGION 1..84: note = Description of Unknown:cds_NC_039223.1_cds_YP_009513197.1_4 target sequence
VNNSISNALDRLAESNSKLEKVNVRLTSTSALITYIVLTVISLVFGALSLGLACYLMYRQKAQQKTLLWLGNNTLDQMRATTRA

SEQ ID NO: 26390 - protein, 85 aa, unidentified
  REGION 1..85: note = Description of Unknown:cds_NC_039223.1_cds_YP_009513197.1_4 target sequence
TSSLDGRPLAAAGIVVTGDKAVNVYTSSRTGSIIVKLLPNMPRDKEACAKAPLEAYNRTLTTLLTPLGDSIRKIQGSVSTSGGRR

SEQ ID NO: 26391 - protein, 85 aa, unidentified
  REGION 1..85: note = Description of Unknown:cds_NC_039223.1_cds_YP_009513197.1_4 target sequence
QKRFIGAVIGSVALGVATAAQITAAAALIQANQNAANILRLKESIAATNEAVHEVTDGLSQLSVAVGKMQQFVNDQFNNTARELD

SEQ ID NO: 26392 - protein, 85 aa, unidentified
  REGION 1..85: note = Description of Unknown:cds_NC_039223.1_cds_YP_009513197.1_4 target sequence
CIKITQQVGVELNLYLTELTTVFGPQITSPALTQLTIQALYNLAGGNMDYLLTRLGIGNNQLSSLIGSGLITGYPILHDSQTQLL

SEQ ID NO: 26393 - protein, 85 aa, unidentified
  REGION 1..85: note = Description of Unknown:cds_NC_039223.1_cds_YP_009513197.1_4 target sequence
GIQVNLPSVGNLNNMRATYLETLSVSTTKGYASALVPKVVTQVGSVIEELDTSYCIGSDLDLYCTRIVTFPMSPGIYSCLSGNTS

SEQ ID NO: 26394 - protein, 85 aa, unidentified
  REGION 1..85: note = Description of Unknown:cds_NC_039223.1_cds_YP_009513197.1_4 target sequence
ACMYSKTEGALTTPYMALKGSVIANCKITTCRCTDPPGIISQNYGEAVSLIDRHSCNVLSLDGITLRLSGEFDATYQKNISILDS

SEQ ID NO: 26395 - protein, 85 aa, unidentified
  REGION 1..85: note = Description of Unknown:cds_NC_039223.1_cds_YP_009513197.1_4 target sequence
QVIVTGNLDISTELGNVNNSISNALDRLAESNSKLEKVNVRLTSTSALITYIVLTVISLVFGALSLGLACYLMYRQKAQQKTLLW

SEQ ID NO: 26396 - protein, 85 aa, unidentified
  REGION 1..85: note = Description of Unknown:cds_NZ_WFIY01000004.1_cds_WP_155863893.1_1799 target sequence
DIDEKIKEWNNLYTSWIAKRKERKQKFITPSGIEVKPLYTPLDLKGNYVDKIGFPGMYPFTRGIYPNMYRGRIWTIRQYAGFGSA

SEQ ID NO: 26397 - protein, 85 aa, unidentified
  REGION 1..85: note = Description of Unknown:cds_NZ_WFIY01000004.1_cds_WP_155863893.1_1799 target sequence
EDTNLRFRKLLEAGQTGLSMAFDLPTQLGLDPDQELAFTEVGVVGVSMFHWKEMDLVMNQIPMDKVTTSMTINATAMELMSMYIA

SEQ ID NO: 26398 - protein, 85 aa, unidentified
  REGION 1..85: note = Description of Unknown:cds_NZ_WFIY01000004.1_cds_WP_155863893.1_1799 target sequence
TAESRGIDKKVLDGTVQNDILKEYIARKNFIYPPEPSLRYAIDLIEYSYKNIPKWHPISISGYHIREAGADAILEVAFTLADGIE

SEQ ID NO: 26399 - protein, 85 aa, unidentified
  REGION 1..85: note = Description of Unknown:cds_NZ_WFIY01000004.1_cds_WP_155863893.1_1799 target sequence
YVRKTLERGINVDDFAPTLSFFFAGYTNIFEEVAKFRAARRMWAKIMKEWFNAKKPDSMTLKFHTQTGGAELTAQQPEINIIRTT

SEQ ID NO: 26400 - protein, 85 aa, unidentified
  REGION 1..85: note = Description of Unknown:cds_NZ_WFIY01000004.1_cds_WP_155863893.1_1799 target sequence
LQALAAVLGGTQSLHVNSYDEALALPSEKAAKIAIRVQQIIAYESGATETVDPLAGSYYIEWLTDEIEERAWKVIDNIEKMGGML

SEQ ID NO: 26401 - protein, 85 aa, unidentified
  REGION 1..85: note = Description of Unknown:cds_NZ_WFIY01000004.1_cds_WP_155863893.1_1799 target sequence
KAIEKGYPQAEIAESSYRLQKRIEEGDIIKVGVNFAYEPDWIGTTEIFRVNPAVRERVITRLKQYRENRDNIKWKDRLEKLRKAA

SEQ ID NO: 26402 - protein, 84 aa, unidentified
  REGION 1..84: note = Description of Unknown:cds_NZ_WFIY01000004.1_cds_WP_155863893.1_1799 target sequence
IGTTEIFRVNPAVRERVITRLKQYRENRDNIKWKDRLEKLRKAAEGNGNLFPYVLDAIKAGATVGEISSVLREVWGEYKEPIIF

SEQ ID NO: 26403 - protein, 85 aa, unidentified
  REGION 1..85: note = Description of Unknown:cds_NZ_WFIY01000004.1_cds_WP_155863893.1_1799 target sequence
ITPSGIEVKPLYTPLDLKGNYVDKIGFPGMYPFTRGIYPNMYRGRIWTIRQYAGFGSAEDTNLRFRKLLEAGQTGLSMAFDLPTQ

SEQ ID NO: 26404 - protein, 85 aa, unidentified
  REGION 1..85: note = Description of Unknown:cds_NZ_WFIY01000004.1_cds_WP_155863893.1_1799 target sequence
LGLDPDQELAFTEVGVVGVSMFHWKEMDLVMNQIPMDKVTTSMTINATAMELMSMYIATAESRGIDKKVLDGTVQNDILKEYIAR

SEQ ID NO: 26405 - protein, 85 aa, unidentified
  REGION 1..85: note = Description of Unknown:cds_NZ_WFIY01000004.1_cds_WP_155863893.1_1799 target sequence
KNFIYPPEPSLRYAIDLIEYSYKNIPKWHPISISGYHIREAGADAILEVAFTLADGIEYVRKTLERGINVDDFAPTLSFFFAGYT

SEQ ID NO: 26406 - protein, 85 aa, unidentified
  REGION 1..85: note = Description of Unknown:cds_NZ_WFIY01000004.1_cds_WP_155863893.1_1799 target sequence
NIFEEVAKFRAARRMWAKIMKEWFNAKKPDSMTLKFHTQTGGAELTAQQPEINIIRTTLQALAAVLGGTQSLHVNSYDEALALPS

SEQ ID NO: 26407 - protein, 85 aa, unidentified
  REGION 1..85: note = Description of Unknown:cds_NZ_WFIY01000004.1_cds_WP_155863893.1_1799 target sequence
EKAAKIAIRVQQIIAYESGATETVDPLAGSYYIEWLTDEIEERAWKVIDNIEKMGGMLKAIEKGYPQAEIAESSYRLQKRIEEGD

SEQ ID NO: 26408 - protein, 85 aa, unidentified
  REGION 1..85: note = Description of Unknown:cds_NZ_WFIY01000004.1_cds_WP_155863893.1_1799 target sequence
IIKVGVNFAYEPDWIGTTEIFRVNPAVRERVITRLKQYRENRDNIKWKDRLEKLRKAAEGNGNLFPYVLDAIKAGATVGEISSVL

SEQ ID NO: 26409 - protein, 85 aa, unidentified
  REGION 1..85: note = Description of Unknown:cds_NC_030656.1_cds_YP_009268808.1_93 target sequence
NNTVISLLSADDGVKRANVFGVDEHQPTLYMPQYITMQGISFKDCTNSQTNTFEIRDQYITAINNLVLSIELPDVKGLGRFGFVP

SEQ ID NO: 26410 - protein, 85 aa, unidentified
  REGION 1..85: note = Description of Unknown:cds_NC_030656.1_cds_YP_009268808.1_93 target sequence
YVGYKLIKHVSISSDHGTIWEKSGEEIFDSCSSNESAMQLSGFTRELNDISTGLTQNDTIKEATTVYVYLKTAFDVENTFSSLKL

SEQ ID NO: 26411 - protein, 85 aa, unidentified
  REGION 1..85: note = Description of Unknown:cds_NC_030656.1_cds_YP_009268808.1_93 target sequence
ANSKITVTVTFHSISEVIVYDSTFDVEAFVKSFVYVTELSFIGYMVRNVQLKPTFIEMTRKQISQINQSTAAITDVHATTFVSVY

SEQ ID NO: 26412 - protein, 85 aa, unidentified
  REGION 1..85: note = Description of Unknown:cds_NC_030656.1_cds_YP_009268808.1_93 target sequence
VKPCYSTADNRFISYPGYAQTEKDYVCAFVERLLEDMVIVSDQVPCGKFPPSADIVEVPDNGIVYLQDVEVLVKIDNVPDDMNVY

SEQ ID NO: 26413 - protein, 85 aa, unidentified
  REGION 1..85: note = Description of Unknown:cds_NC_030656.1_cds_YP_009268808.1_93 target sequence
FHSNLLVFGTRKNSIVYNLSKKFSVIAGYYSVATNRIIFTSVSHSINISDASIPVSLWSCQRNVYNGDNRSESSKSKDLFVNDPF

SEQ ID NO: 26414 - protein, 85 aa, unidentified
  REGION 1..85: note = Description of Unknown:cds_NC_030656.1_cds_YP_009268808.1_93 target sequence
IKGIDFKNKIDVISRLDVRFGNDVLYSETSPISKVYGELFGRPKSVRTLIFNFTPHTFFKPTTLNSNTSRGKDKLMIRVIYANLD

SEQ ID NO: 26415 - protein, 84 aa, unidentified
  REGION 1..84: note = Description of Unknown:cds_NC_030656.1_cds_YP_009268808.1_93 target sequence
FGRPKSVRTLIFNFTPHTFFKPTTLNSNTSRGKDKLMIRVIYANLDQNNPIYYVPKQLVVISSDLYKLTNDNGILAIKVTSDHQ

SEQ ID NO: 26416 - protein, 85 aa, unidentified
  REGION 1..85: note = Description of Unknown:cds_NC_030656.1_cds_YP_009268808.1_93 target sequence
TLYMPQYITMQGISFKDCTNSQTNTFEIRDQYITAINNLVLSIELPDVKGLGRFGFVPYVGYKLIKHVSISSDHGTIWEKSGEEI

SEQ ID NO: 26417 - protein, 85 aa, unidentified
  REGION 1..85: note = Description of Unknown:cds_NC_030656.1_cds_YP_009268808.1_93 target sequence
FDSCSSNESAMQLSGFTRELNDISTGLTQNDTIKEATTVYVYLKTAFDVENTFSSLKLANSKITVTVTFHSISEVIVYDSTFDVE

SEQ ID NO: 26418 - protein, 85 aa, unidentified
  REGION 1..85: note = Description of Unknown:cds_NC_030656.1_cds_YP_009268808.1_93 target sequence
AFVKSFVYVTELSFIGYMVRNVQLKPTFIEMTRKQISQINQSTAAITDVHATTFVSVYVKPCYSTADNRFISYPGYAQTEKDYVC

SEQ ID NO: 26419 - protein, 85 aa, unidentified
  REGION 1..85: note = Description of Unknown:cds_NC_030656.1_cds_YP_009268808.1_93 target sequence
AFVERLLEDMVIVSDQVPCGKFPPSADIVEVPDNGIVYLQDVEVLVKIDNVPDDMNVYFHSNLLVFGTRKNSIVYNLSKKFSVIA

SEQ ID NO: 26420 - protein, 85 aa, unidentified
  REGION 1..85: note = Description of Unknown:cds_NC_030656.1_cds_YP_009268808.1_93 target sequence
GYYSVATNRIIFTSVSHSINISDASIPVSLWSCQRNVYNGDNRSESSKSKDLFVNDPFIKGIDFKNKIDVISRLDVRFGNDVLYS

SEQ ID NO: 26421 - protein, 85 aa, unidentified
  REGION 1..85: note = Description of Unknown:cds_NC_030656.1_cds_YP_009268808.1_93 target sequence
ETSPISKVYGELFGRPKSVRTLIFNFTPHTFFKPTTLNSNTSRGKDKLMIRVIYANLDQNNPIYYVPKQLVVISSDLYKLTNDNG

SEQ ID NO: 26422 - protein, 85 aa, unidentified
  REGION 1..85: note = Description of Unknown:cds_NZ_WFIY01000004.1_cds_WP_155862812.1_640 target sequence
DFQDLFKLRPVYAFDVNNGKISYVMRDKIPSVYIHGEGKVPLEDVYAEDVEWITDKKLAIIGDPGGSEKREIYIYDRNKVFPLLK

SEQ ID NO: 26423 - protein, 85 aa, unidentified
  REGION 1..85: note = Description of Unknown:cds_NZ_WFIY01000004.1_cds_WP_155862812.1_640 target sequence
DQYDNFGTYFINEDKFLFISNRDGKTLHLYLYDKGDIIQVSKGDDPVESYCLSPSKKRVVYSQGIYNNDLYVYDLDRGEVISKIS

SEQ ID NO: 26424 - protein, 85 aa, unidentified
  REGION 1..85: note = Description of Unknown:cds_NZ_WFIY01000004.1_cds_WP_155862812.1_640 target sequence
YPNSEETVSLYCFKDEDNFLFISNKDNYFDIYNFNIGKGEISEVIKSEHEKHEVVHIANKIIYTEDVYGDFKIKIHKGNELVTEG

SEQ ID NO: 26425 - protein, 85 aa, unidentified
  REGION 1..85: note = Description of Unknown:cds_NZ_WFIY01000004.1_cds_WP_155862812.1_640 target sequence
FNSYLTPDQDYVYYIGSTYNRHFDLYRVNILTGKIERLTNSMDDIKGDFVKPKVVKYESEGGIEINALLYEKGGEDKGVVYIHGG

SEQ ID NO: 26426 - protein, 85 aa, unidentified
  REGION 1..85: note = Description of Unknown:cds_NZ_WFIY01000004.1_cds_WP_155862812.1_640 target sequence
PDWECTNSFNPEIQFLVDRGFKVICPNYRGSTGYGRRFNHLNDKDLGGGDLKDVINSAKLLGVKKLAVTGASYGGYLTMMAVTKY

SEQ ID NO: 26427 - protein, 85 aa, unidentified
  REGION 1..85: note = Description of Unknown:cds_NZ_WFIY01000004.1_cds_WP_155862812.1_640 target sequence
PDMWCSAAAVVPFVNWFTEKKFEREVLQQYDEMKMGNDENLLRDRSPIFFIDNIKSPLLILAGENDPRCPAEETRQVIEKLKERN

SEQ ID NO: 26428 - protein, 84 aa, unidentified
  REGION 1..84: note = Description of Unknown:cds_NZ_WFIY01000004.1_cds_WP_155862812.1_640 target sequence
ENLLRDRSPIFFIDNIKSPLLILAGENDPRCPAEETRQVIEKLKERNIEVEYKIYEDEGHGFSKIENYVDSIKRVVEFIERHCK

SEQ ID NO: 26429 - protein, 85 aa, unidentified
  REGION 1..85: note = Description of Unknown:cds_NZ_WFIY01000004.1_cds_WP_155862812.1_640 target sequence
KIPSVYIHGEGKVPLEDVYAEDVEWITDKKLAIIGDPGGSEKREIYIYDRNKVFPLLKDQYDNFGTYFINEDKFLFISNRDGKTL

SEQ ID NO: 26430 - protein, 85 aa, unidentified
  REGION 1..85: note = Description of Unknown:cds_NZ_WFIY01000004.1_cds_WP_155862812.1_640 target sequence
HLYLYDKGDIIQVSKGDDPVESYCLSPSKKRVVYSQGIYNNDLYVYDLDRGEVISKISYPNSEETVSLYCFKDEDNFLFISNKDN

SEQ ID NO: 26431 - protein, 85 aa, unidentified
  REGION 1..85: note = Description of Unknown:cds_NZ_WFIY01000004.1_cds_WP_155862812.1_640 target sequence
YFDIYNFNIGKGEISEVIKSEHEKHEVVHIANKIIYTEDVYGDFKIKIHKGNELVTEGFNSYLTPDQDYVYYIGSTYNRHFDLYR

SEQ ID NO: 26432 - protein, 85 aa, unidentified
  REGION 1..85: note = Description of Unknown:cds_NZ_WFIY01000004.1_cds_WP_155862812.1_640 target sequence
VNILTGKIERLTNSMDDIKGDFVKPKVVKYESEGGIEINALLYEKGGEDKGVVYIHGGPDWECTNSFNPEIQFLVDRGFKVICPN

SEQ ID NO: 26433 - protein, 85 aa, unidentified
  REGION 1..85: note = Description of Unknown:cds_NZ_WFIY01000004.1_cds_WP_155862812.1_640 target sequence
YRGSTGYGRRFNHLNDKDLGGGDLKDVINSAKLLGVKKLAVTGASYGGYLTMMAVTKYPDMWCSAAAVVPFVNWFTEKKFEREVL

SEQ ID NO: 26434 - protein, 85 aa, unidentified
  REGION 1..85: note = Description of Unknown:cds_NZ_WFIY01000004.1_cds_WP_155862812.1_640 target sequence
QQYDEMKMGNDENLLRDRSPIFFIDNIKSPLLILAGENDPRCPAEETRQVIEKLKERNIEVEYKIYEDEGHGFSKIENYVDSIKR

SEQ ID NO: 26435 - protein, 85 aa, unidentified
  REGION 1..85: note = Description of Unknown:cds_NZ_WFIY01000004.1_cds_WP_155863611.1_1514 target sequence
LKYSIPYLGYILGFGIIPFALTFALVGLNFKTAFQGINLVPLNVIVYNTFFFSFFTALFSSIIGTFLAVGIDIISKGKRALSLLI

SEQ ID NO: 26436 - protein, 85 aa, unidentified
  REGION 1..85: note = Description of Unknown:cds_NZ_WFIY01000004.1_cds_WP_155863611.1_1514 target sequence
MLPYTIPFTSSALIWTISLYGGYGWFTYFLGLKFDPLYMKCTALYAVTLVSIWSSIPMPFLIMLSALRSIPSYVKEAAEIDNLSL

SEQ ID NO: 26437 - protein, 85 aa, unidentified
  REGION 1..85: note = Description of Unknown:cds_NZ_WFIY01000004.1_cds_WP_155863611.1_1514 target sequence
SEYYFRVALPMVGKAFWLSFLLEFILALGNFDLPYVLTSGGPGYATTTLPLLVYEEMFSYDNFSGGSLAAAILSIIATIPSIALL

SEQ ID NO: 26438 - protein, 85 aa, unidentified
  REGION 1..85: note = Description of Unknown:cds_NZ_WFIY01000004.1_cds_WP_155863611.1_1514 target sequence
SLLRSKRTGWISLKIRIPNKVFKGIIFAFLALMLFFLDFPVYWMFLVAFRNSSLDFHYPPILIPKCLTSSYFSSASIQAVPYLIS

SEQ ID NO: 26439 - protein, 85 aa, unidentified
  REGION 1..85: note = Description of Unknown:cds_NZ_WFIY01000004.1_cds_WP_155863611.1_1514 target sequence
SAIVAITASVFTIFIALPSAYEVSKGKLKFILPLSIYLYSLPSTSFVIPLYDFFSSEGLLNTWWALILSTPIFTATFAVWLFFNF

SEQ ID NO: 26440 - protein, 85 aa, unidentified
  REGION 1..85: note = Description of Unknown:cds_NZ_WFIY01000004.1_cds_WP_155863611.1_1514 target sequence
FLSFPKSYEDAAEVFSIKRKMTRIIMPLSRPALFSVFLLSFIFNWHLLFYPLIFTSTPYNYSFPPEGAQTITIFALLAIGDESIN

SEQ ID NO: 26441 - protein, 84 aa, unidentified
  REGION 1..84: note = Description of Unknown:cds_NZ_WFIY01000004.1_cds_WP_155863611.1_1514 target sequence
SFIFNWHLLFYPLIFTSTPYNYSFPPEGAQTITIFALLAIGDESINWGLLASSALVAALPVMVVTLFAIDRILKGSYSGGLKFI

SEQ ID NO: 26442 - protein, 85 aa, unidentified
  REGION 1..85: note = Description of Unknown:cds_NZ_WFIY01000004.1_cds_WP_155863611.1_1514 target sequence
LNFKTAFQGINLVPLNVIVYNTFFFSFFTALFSSIIGTFLAVGIDIISKGKRALSLLIMLPYTIPFTSSALIWTISLYGGYGWFT

SEQ ID NO: 26443 - protein, 85 aa, unidentified
  REGION 1..85: note = Description of Unknown:cds_NZ_WFIY01000004.1_cds_WP_155863611.1_1514 target sequence
YFLGLKFDPLYMKCTALYAVTLVSIWSSIPMPFLIMLSALRSIPSYVKEAAEIDNLSLSEYYFRVALPMVGKAFWLSFLLEFILA

SEQ ID NO: 26444 - protein, 85 aa, unidentified
  REGION 1..85: note = Description of Unknown:cds_NZ_WFIY01000004.1_cds_WP_155863611.1_1514 target sequence
LGNFDLPYVLTSGGPGYATTTLPLLVYEEMFSYDNFSGGSLAAAILSIIATIPSIALLSLLRSKRTGWISLKIRIPNKVFKGIIF

SEQ ID NO: 26445 - protein, 85 aa, unidentified
  REGION 1..85: note = Description of Unknown:cds_NZ_WFIY01000004.1_cds_WP_155863611.1_1514 target sequence
AFLALMLFFLDFPVYWMFLVAFRNSSLDFHYPPILIPKCLTSSYFSSASIQAVPYLISSAIVAITASVFTIFIALPSAYEVSKGK

SEQ ID NO: 26446 - protein, 85 aa, unidentified
  REGION 1..85: note = Description of Unknown:cds_NZ_WFIY01000004.1_cds_WP_155863611.1_1514 target sequence
LKFILPLSIYLYSLPSTSFVIPLYDFFSSEGLLNTWWALILSTPIFTATFAVWLFFNFFLSFPKSYEDAAEVFSIKRKMTRIIMP

SEQ ID NO: 26447 - protein, 85 aa, unidentified
  REGION 1..85: note = Description of Unknown:cds_NZ_WFIY01000004.1_cds_WP_155863611.1_1514 target sequence
LSRPALFSVFLLSFIFNWHLLFYPLIFTSTPYNYSFPPEGAQTITIFALLAIGDESINWGLLASSALVAALPVMVVTLFAIDRIL

SEQ ID NO: 26448 - protein, 85 aa, unidentified
  REGION 1..85: note = Description of Unknown:cds_NC_002728.1_cds_NP_112026.1_7 target sequence
VVILDKRCYCNLLILILMISECSVGILHYEKLSKIGLVKGVTRKYKIKSNPLTKDIVIKMIPNVSNMSQCTGSVMENYKTRLNGI

SEQ ID NO: 26449 - protein, 85 aa, unidentified
  REGION 1..85: note = Description of Unknown:cds_NC_002728.1_cds_NP_112026.1_7 target sequence
LTPIKGALEIYKNNTHDLVGDVRLAGVIMAGVAIGIATAAQITAGVALYEAMKNADNINKLKSSIESTNEAVVKLQETAEKTVYV

SEQ ID NO: 26450 - protein, 85 aa, unidentified
  REGION 1..85: note = Description of Unknown:cds_NC_002728.1_cds_NP_112026.1_7 target sequence
LTALQDYINTNLVPTIDKISCKQTELSLDLALSKYLSDLLFVFGPNLQDPVSNSMTIQAISQAFGGNYETLLRTLGYATEDFDDL

SEQ ID NO: 26451 - protein, 85 aa, unidentified
  REGION 1..85: note = Description of Unknown:cds_NC_002728.1_cds_NP_112026.1_7 target sequence
LESDSITGQIIYVDLSSYYIIVRVYFPILTEIQQAYIQELLPVSFNNDNSEWISIVPNFILVRNTLISNIEIGFCLITKRSVICN

SEQ ID NO: 26452 - protein, 85 aa, unidentified
  REGION 1..85: note = Description of Unknown:cds_NC_002728.1_cds_NP_112026.1_7 target sequence
QDYATPMTNNMRECLTGSTEKCPRELVVSSHVPRFALSNGVLFANCISVTCQCQTTGRAISQSGEQTLLMIDNTTCPTAVLGNVI

SEQ ID NO: 26453 - protein, 85 aa, unidentified
  REGION 1..85: note = Description of Unknown:cds_NC_002728.1_cds_NP_112026.1_7 target sequence
ISLGKYLGSVNYNSEGIAIGPPVFTDKVDISSQISSMNQSLQQSKDYIKEAQRLLDTVNPSLISMLSMIILYVLSIASLCIGLIT

SEQ ID NO: 26454 - protein, 84 aa, unidentified
  REGION 1..84: note = Description of Unknown:cds_NC_002728.1_cds_NP_112026.1_7 target sequence
MNQSLQQSKDYIKEAQRLLDTVNPSLISMLSMIILYVLSIASLCIGLITFISFIIVEKKRNTYSRLEDRRVRPTSSGDLYYIGT

SEQ ID NO: 26455 - protein, 85 aa, unidentified
  REGION 1..85: note = Description of Unknown:cds_NC_002728.1_cds_NP_112026.1_7 target sequence
HYEKLSKIGLVKGVTRKYKIKSNPLTKDIVIKMIPNVSNMSQCTGSVMENYKTRLNGILTPIKGALEIYKNNTHDLVGDVRLAGV

SEQ ID NO: 26456 - protein, 85 aa, unidentified
  REGION 1..85: note = Description of Unknown:cds_NC_002728.1_cds_NP_112026.1_7 target sequence
IMAGVAIGIATAAQITAGVALYEAMKNADNINKLKSSIESTNEAVVKLQETAEKTVYVLTALQDYINTNLVPTIDKISCKQTELS

SEQ ID NO: 26457 - protein, 85 aa, unidentified
  REGION 1..85: note = Description of Unknown:cds_NC_002728.1_cds_NP_112026.1_7 target sequence
LDLALSKYLSDLLFVFGPNLQDPVSNSMTIQAISQAFGGNYETLLRTLGYATEDFDDLLESDSITGQIIYVDLSSYYIIVRVYFP

SEQ ID NO: 26458 - protein, 85 aa, unidentified
  REGION 1..85: note = Description of Unknown:cds_NC_002728.1_cds_NP_112026.1_7 target sequence
ILTEIQQAYIQELLPVSFNNDNSEWISIVPNFILVRNTLISNIEIGFCLITKRSVICNQDYATPMTNNMRECLTGSTEKCPRELV

SEQ ID NO: 26459 - protein, 85 aa, unidentified
  REGION 1..85: note = Description of Unknown:cds_NC_002728.1_cds_NP_112026.1_7 target sequence
VSSHVPRFALSNGVLFANCISVTCQCQTTGRAISQSGEQTLLMIDNTTCPTAVLGNVIISLGKYLGSVNYNSEGIAIGPPVFTDK

SEQ ID NO: 26460 - protein, 85 aa, unidentified
  REGION 1..85: note = Description of Unknown:cds_NC_002728.1_cds_NP_112026.1_7 target sequence
VDISSQISSMNQSLQQSKDYIKEAQRLLDTVNPSLISMLSMIILYVLSIASLCIGLITFISFIIVEKKRNTYSRLEDRRVRPTSS

SEQ ID NO: 26461 - protein, 85 aa, unidentified
  REGION 1..85: note = Description of Unknown:cds_NC_001906.3_cds_NP_047111.2_6 target sequence
ATQEVRLKCLLCGIIVLVLSLEGLGILHYEKLSKIGLVKGITRKYKIKSNPLTKDIVIKMIPNVSNVSKCTGTVMENYKSRLTGI

SEQ ID NO: 26462 - protein, 85 aa, unidentified
  REGION 1..85: note = Description of Unknown:cds_NC_001906.3_cds_NP_047111.2_6 target sequence
LSPIKGAIELYNNNTHDLVGDVKLAGVVMAGIAIGIATAAQITAGVALYEAMKNADNINKLKSSIESTNEAVVKLQETAEKTVYV

SEQ ID NO: 26463 - protein, 85 aa, unidentified
  REGION 1..85: note = Description of Unknown:cds_NC_001906.3_cds_NP_047111.2_6 target sequence
LTALQDYINTNLVPTIDQISCKQTELALDLALSKYLSDLLFVFGPNLQDPVSNSMTIQAISQAFGGNYETLLRTLGYATEDFDDL

SEQ ID NO: 26464 - protein, 85 aa, unidentified
  REGION 1..85: note = Description of Unknown:cds_NC_001906.3_cds_NP_047111.2_6 target sequence
LESDSIAGQIVYVDLSSYYIIVRVYFPILTEIQQAYVQELLPVSFNNDNSEWISIVPNFVLIRNTLISNIEVKYCLITKKSVICN

SEQ ID NO: 26465 - protein, 85 aa, unidentified
  REGION 1..85: note = Description of Unknown:cds_NC_001906.3_cds_NP_047111.2_6 target sequence
QDYATPMTASVRECLTGSTDKCPRELVVSSHVPRFALSGGVLFANCISVTCQCQTTGRAISQSGEQTLLMIDNTTCTTVVLGNII

SEQ ID NO: 26466 - protein, 85 aa, unidentified
  REGION 1..85: note = Description of Unknown:cds_NC_001906.3_cds_NP_047111.2_6 target sequence
ISLGKYLGSINYNSESIAVGPPVYTDKVDISSQISSMNQSLQQSKDYIKEAQKILDTVNPSLISMLSMIILYVLSIAALCIGLIT

SEQ ID NO: 26467 - protein, 84 aa, unidentified
  REGION 1..84: note = Description of Unknown:cds_NC_001906.3_cds_NP_047111.2_6 target sequence
MNQSLQQSKDYIKEAQKILDTVNPSLISMLSMIILYVLSIAALCIGLITFISFVIVEKKRGNYSRLDDRQVRPVSNGDLYYIGT

SEQ ID NO: 26468 - protein, 85 aa, unidentified
  REGION 1..85: note = Description of Unknown:cds_NC_001906.3_cds_NP_047111.2_6 target sequence
HYEKLSKIGLVKGITRKYKIKSNPLTKDIVIKMIPNVSNVSKCTGTVMENYKSRLTGILSPIKGAIELYNNNTHDLVGDVKLAGV

SEQ ID NO: 26469 - protein, 85 aa, unidentified
  REGION 1..85: note = Description of Unknown:cds_NC_001906.3_cds_NP_047111.2_6 target sequence
VMAGIAIGIATAAQITAGVALYEAMKNADNINKLKSSIESTNEAVVKLQETAEKTVYVLTALQDYINTNLVPTIDQISCKQTELA

SEQ ID NO: 26470 - protein, 85 aa, unidentified
  REGION 1..85: note = Description of Unknown:cds_NC_001906.3_cds_NP_047111.2_6 target sequence
LDLALSKYLSDLLFVFGPNLQDPVSNSMTIQAISQAFGGNYETLLRTLGYATEDFDDLLESDSIAGQIVYVDLSSYYIIVRVYFP

SEQ ID NO: 26471 - protein, 85 aa, unidentified
  REGION 1..85: note = Description of Unknown:cds_NC_001906.3_cds_NP_047111.2_6 target sequence
ILTEIQQAYVQELLPVSFNNDNSEWISIVPNFVLIRNTLISNIEVKYCLITKKSVICNQDYATPMTASVRECLTGSTDKCPRELV

SEQ ID NO: 26472 - protein, 85 aa, unidentified
  REGION 1..85: note = Description of Unknown:cds_NC_001906.3_cds_NP_047111.2_6 target sequence
VSSHVPRFALSGGVLFANCISVTCQCQTTGRAISQSGEQTLLMIDNTTCTTVVLGNIIISLGKYLGSINYNSESIAVGPPVYTDK

SEQ ID NO: 26473 - protein, 85 aa, unidentified
  REGION 1..85: note = Description of Unknown:cds_NC_001906.3_cds_NP_047111.2_6 target sequence
VDISSQISSMNQSLQQSKDYIKEAQKILDTVNPSLISMLSMIILYVLSIAALCIGLITFISFVIVEKKRGNYSRLDDRQVRPVSN

SEQ ID NO: 26474 - protein, 85 aa, unidentified
  REGION 1..85: note = Description of Unknown:cds_NZ_WFIY01000004.1_cds_WP_155862292.1_5 target sequence
EETSPSDMIEEAKKRARGTIIGMVSRVYPAEYGEEEREVKIEVSFDTYLRSKILIGSYLGISLPISRTLMLSRVKAVARQDILSI

SEQ ID NO: 26475 - protein, 85 aa, unidentified
  REGION 1..85: note = Description of Unknown:cds_NZ_WFIY01000004.1_cds_WP_155862292.1_5 target sequence
SKVPSLFPQENPSGIVTPLIITVELLSEEVNGEVVPPSSPIDPQSPVFLPSLDFIKEMLGIPEEGVRIGKVMEGYREIEVDVKLS

SEQ ID NO: 26476 - protein, 85 aa, unidentified
  REGION 1..85: note = Description of Unknown:cds_NZ_WFIY01000004.1_cds_WP_155862292.1_5 target sequence
KEALKHHVLVVGTTGAGKTNLLKVIMKNSETPLIVFDIQGDYIKPAVDMGGSIIVPMTRDYEMGVTQFVDVFLKRSNLTGYKISK

SEQ ID NO: 26477 - protein, 85 aa, unidentified
  REGION 1..85: note = Description of Unknown:cds_NZ_WFIY01000004.1_cds_WP_155862292.1_5 target sequence
VEENKLVLSNGNSSFNLYLIGFRLPENYELLPDVSPYFTPQGGEFFKIISKECVGKNDVIDDWEDNCRDYMKHMNMHQETQKNII

SEQ ID NO: 26478 - protein, 85 aa, unidentified
  REGION 1..85: note = Description of Unknown:cds_NZ_WFIY01000004.1_cds_WP_155862292.1_5 target sequence
RSVYLLSQSGIIDVSFGNGYYKEPNYEEIMKSKAVVDLRWALEREVNSATIASFIIISKIFKIIDDRYKKEGKETEYLMIFDEAH

SEQ ID NO: 26479 - protein, 85 aa, unidentified
  REGION 1..85: note = Description of Unknown:cds_NZ_WFIY01000004.1_cds_WP_155862292.1_5 target sequence
EYFPQGRREENKEPLERLINKIMRLGRVRGIGTILATHRPTDLNDLILTLTNTKIAMRADEDALKRIGMEKYSKMLNASPPGFGI

SEQ ID NO: 26480 - protein, 84 aa, unidentified
  REGION 1..84: note = Description of Unknown:cds_NZ_WFIY01000004.1_cds_WP_155862292.1_5 target sequence
ATHRPTDLNDLILTLTNTKIAMRADEDALKRIGMEKYSKMLNASPPGFGIISSYTIKVNNLAFRSEKYESGEEIFNPFKEEFME

SEQ ID NO: 26481 - protein, 85 aa, unidentified
  REGION 1..85: note = Description of Unknown:cds_NZ_WFIY01000004.1_cds_WP_155862292.1_5 target sequence
YPAEYGEEEREVKIEVSFDTYLRSKILIGSYLGISLPISRTLMLSRVKAVARQDILSISKVPSLFPQENPSGIVTPLIITVELLS

SEQ ID NO: 26482 - protein, 85 aa, unidentified
  REGION 1..85: note = Description of Unknown:cds_NZ_WFIY01000004.1_cds_WP_155862292.1_5 target sequence
EEVNGEVVPPSSPIDPQSPVFLPSLDFIKEMLGIPEEGVRIGKVMEGYREIEVDVKLSKEALKHHVLVVGTTGAGKTNLLKVIMK

SEQ ID NO: 26483 - protein, 85 aa, unidentified
  REGION 1..85: note = Description of Unknown:cds_NZ_WFIY01000004.1_cds_WP_155862292.1_5 target sequence
NSETPLIVFDIQGDYIKPAVDMGGSIIVPMTRDYEMGVTQFVDVFLKRSNLTGYKISKVEENKLVLSNGNSSFNLYLIGFRLPEN

SEQ ID NO: 26484 - protein, 85 aa, unidentified
  REGION 1..85: note = Description of Unknown:cds_NZ_WFIY01000004.1_cds_WP_155862292.1_5 target sequence
YELLPDVSPYFTPQGGEFFKIISKECVGKNDVIDDWEDNCRDYMKHMNMHQETQKNIIRSVYLLSQSGIIDVSFGNGYYKEPNYE

SEQ ID NO: 26485 - protein, 85 aa, unidentified
  REGION 1..85: note = Description of Unknown:cds_NZ_WFIY01000004.1_cds_WP_155862292.1_5 target sequence
EIMKSKAVVDLRWALEREVNSATIASFIIISKIFKIIDDRYKKEGKETEYLMIFDEAHEYFPQGRREENKEPLERLINKIMRLGR

SEQ ID NO: 26486 - protein, 85 aa, unidentified
  REGION 1..85: note = Description of Unknown:cds_NZ_WFIY01000004.1_cds_WP_155862292.1_5 target sequence
VRGIGTILATHRPTDLNDLILTLTNTKIAMRADEDALKRIGMEKYSKMLNASPPGFGIISSYTIKVNNLAFRSEKYESGEEIFNP

SEQ ID NO: 26487 - protein, 85 aa, unidentified
  REGION 1..85: note = Description of Unknown:cds_NZ_WFIY01000004.1_cds_WP_155863556.1_1486 target sequence
LNLRRFKKTFKELLKTWQFLLSFIILLGLVSTIVVGNIVYAKCCPYNPSYYYAAAPFARPSWATLFCGNLPPDIKVPSSYNLIAA

SEQ ID NO: 26488 - protein, 85 aa, unidentified
  REGION 1..85: note = Description of Unknown:cds_NZ_WFIY01000004.1_cds_WP_155863556.1_1486 target sequence
KCPGVLSYWHLRNETLNGDKIEVIWNSTFGPYNETLTEENLATFGNTGPGSIEIKIIGDNPVNITLYHCFDYTYKLPSIHNIYLM

SEQ ID NO: 26489 - protein, 85 aa, unidentified
  REGION 1..85: note = Description of Unknown:cds_NZ_WFIY01000004.1_cds_WP_155863556.1_1486 target sequence
QYSVYSNTSQLYIIPGKIIGPNGTSICVLYHGSGFPTFIKNPEFYSYIFNPNNKYEIIEGKWNFFQAGSNIPTFTPYYYTLPPNK

SEQ ID NO: 26490 - protein, 85 aa, unidentified
  REGION 1..85: note = Description of Unknown:cds_NZ_WFIY01000004.1_cds_WP_155863556.1_1486 target sequence
QALASFYMIHNLFSKDGIYNVTFTIMYYPSPINGNCTTIYLSDVYFEFLGSVYGIFGTDANGANVFAEFVKGGIFDLELAGLAGL

SEQ ID NO: 26491 - protein, 85 aa, unidentified
  REGION 1..85: note = Description of Unknown:cds_NZ_WFIY01000004.1_cds_WP_155863556.1_1486 target sequence
AIVAIGAVVGILAGYYGGIRDMMLVSTTDFVLLLPGLIIILLIEEILILYDPKVLDTYRPLILAGIITILSWPITARVIRGETYV

SEQ ID NO: 26492 - protein, 85 aa, unidentified
  REGION 1..85: note = Description of Unknown:cds_NZ_WFIY01000004.1_cds_WP_155863556.1_1486 target sequence
VRSKPFIEAARALGESNLQVLRKHIFPNLLPIIFAQLTLDVTAVVYTESTLDFLGIGIPISEFPTWGNMLGYAQDYIASAPSFAW

SEQ ID NO: 26493 - protein, 84 aa, unidentified
  REGION 1..84: note = Description of Unknown:cds_NZ_WFIY01000004.1_cds_WP_155863556.1_1486 target sequence
LTLDVTAVVYTESTLDFLGIGIPISEFPTWGNMLGYAQDYIASAPSFAWWWILPPALALVLLGISLFYLGEAILERYRVKTGVS

SEQ ID NO: 26494 - protein, 85 aa, unidentified
  REGION 1..85: note = Description of Unknown:cds_NZ_WFIY01000004.1_cds_WP_155863556.1_1486 target sequence
GLVSTIVVGNIVYAKCCPYNPSYYYAAAPFARPSWATLFCGNLPPDIKVPSSYNLIAAKCPGVLSYWHLRNETLNGDKIEVIWNS

SEQ ID NO: 26495 - protein, 85 aa, unidentified
  REGION 1..85: note = Description of Unknown:cds_NZ_WFIY01000004.1_cds_WP_155863556.1_1486 target sequence
TFGPYNETLTEENLATFGNTGPGSIEIKIIGDNPVNITLYHCFDYTYKLPSIHNIYLMQYSVYSNTSQLYIIPGKIIGPNGTSIC

SEQ ID NO: 26496 - protein, 85 aa, unidentified
  REGION 1..85: note = Description of Unknown:cds_NZ_WFIY01000004.1_cds_WP_155863556.1_1486 target sequence
VLYHGSGFPTFIKNPEFYSYIFNPNNKYEIIEGKWNFFQAGSNIPTFTPYYYTLPPNKQALASFYMIHNLFSKDGIYNVTFTIMY

SEQ ID NO: 26497 - protein, 85 aa, unidentified
  REGION 1..85: note = Description of Unknown:cds_NZ_WFIY01000004.1_cds_WP_155863556.1_1486 target sequence
YPSPINGNCTTIYLSDVYFEFLGSVYGIFGTDANGANVFAEFVKGGIFDLELAGLAGLAIVAIGAVVGILAGYYGGIRDMMLVST

SEQ ID NO: 26498 - protein, 85 aa, unidentified
  REGION 1..85: note = Description of Unknown:cds_NZ_WFIY01000004.1_cds_WP_155863556.1_1486 target sequence
TDFVLLLPGLIIILLIEEILILYDPKVLDTYRPLILAGIITILSWPITARVIRGETYVVRSKPFIEAARALGESNLQVLRKHIFP

SEQ ID NO: 26499 - protein, 85 aa, unidentified
  REGION 1..85: note = Description of Unknown:cds_NZ_WFIY01000004.1_cds_WP_155863556.1_1486 target sequence
NLLPIIFAQLTLDVTAVVYTESTLDFLGIGIPISEFPTWGNMLGYAQDYIASAPSFAWWWILPPALALVLLGISLFYLGEAILER

SEQ ID NO: 26500 - protein, 85 aa, unidentified
  REGION 1..85: note = Description of Unknown:cds_NC_007409.1_cds_YP_319898.1_67 target sequence
LLRHRNCLCEKTFKLVRLTSSRQRVLSFGFLTISPSNSLMEPKKSFNFLVFVVALSYIFSLYQVLALTPEGIILYALLFLLNFVF

SEQ ID NO: 26501 - protein, 85 aa, unidentified
  REGION 1..85: note = Description of Unknown:cds_NC_007409.1_cds_YP_319898.1_67 target sequence
AFVVNDTAIAIKYLFVLMAMRAINLIYSLPLDEDAIRMFAGYRLLHGVNPYLPMPTVFNHYDVPIGLRTLTEYGGFVERLIYPGL

SEQ ID NO: 26502 - protein, 85 aa, unidentified
  REGION 1..85: note = Description of Unknown:cds_NC_007409.1_cds_YP_319898.1_67 target sequence
SVFAGVAEYALGYVIFNVVIYVTFILISYVFLRNKSTEALIFAVLWLLFGGVNLATLLLTVGILLRKYNGFFVGLAISYNQLYTL

SEQ ID NO: 26503 - protein, 85 aa, unidentified
  REGION 1..85: note = Description of Unknown:cds_NC_007409.1_cds_YP_319898.1_67 target sequence
IAPFLVIYYLAEGKKEVLRQVAYALFGFLITNVPFMVWDFKLWFSAMLYSVSQPIVPIGFSISRETYMGFFPIPFKVYEYLFITM

SEQ ID NO: 26504 - protein, 85 aa, unidentified
  REGION 1..85: note = Description of Unknown:cds_NC_007409.1_cds_YP_319898.1_67 target sequence
YIASIVIYAIMFKIVAKWAYVFPAISMIAYPRTLLGYITSWLPPAFFFFFTRTEGNVKVAKLKPLGTAVLIAIMIMPIFVPALTS

SEQ ID NO: 26505 - protein, 85 aa, unidentified
  REGION 1..85: note = Description of Unknown:cds_NC_007409.1_cds_YP_319898.1_67 target sequence
TDVNTPFTFKVTKVYVGTYGNVYKMSINATVYSPTVKNITFVVIPDFYPFYNTYLWWSTVNVTVGQNYFNITPLAPSQEIGFNNA

SEQ ID NO: 26506 - protein, 84 aa, unidentified
  REGION 1..84: note = Description of Unknown:cds_NC_007409.1_cds_YP_319898.1_67 target sequence
KNITFVVIPDFYPFYNTYLWWSTVNVTVGQNYFNITPLAPSQEIGFNNATYTVVGVYGPYYYFVTLVLVSNGTMFSNFTYTPKE

SEQ ID NO: 26507 - protein, 85 aa, unidentified
  REGION 1..85: note = Description of Unknown:cds_NC_007409.1_cds_YP_319898.1_67 target sequence
FGFLTISPSNSLMEPKKSFNFLVFVVALSYIFSLYQVLALTPEGIILYALLFLLNFVFAFVVNDTAIAIKYLFVLMAMRAINLIY

SEQ ID NO: 26508 - protein, 85 aa, unidentified
  REGION 1..85: note = Description of Unknown:cds_NC_007409.1_cds_YP_319898.1_67 target sequence
SLPLDEDAIRMFAGYRLLHGVNPYLPMPTVFNHYDVPIGLRTLTEYGGFVERLIYPGLSVFAGVAEYALGYVIFNVVIYVTFILI

SEQ ID NO: 26509 - protein, 85 aa, unidentified
  REGION 1..85: note = Description of Unknown:cds_NC_007409.1_cds_YP_319898.1_67 target sequence
SYVFLRNKSTEALIFAVLWLLFGGVNLATLLLTVGILLRKYNGFFVGLAISYNQLYTLIAPFLVIYYLAEGKKEVLRQVAYALFG

SEQ ID NO: 26510 - protein, 85 aa, unidentified
  REGION 1..85: note = Description of Unknown:cds_NC_007409.1_cds_YP_319898.1_67 target sequence
FLITNVPFMVWDFKLWFSAMLYSVSQPIVPIGFSISRETYMGFFPIPFKVYEYLFITMYIASIVIYAIMFKIVAKWAYVFPAISM

SEQ ID NO: 26511 - protein, 85 aa, unidentified
  REGION 1..85: note = Description of Unknown:cds_NC_007409.1_cds_YP_319898.1_67 target sequence
IAYPRTLLGYITSWLPPAFFFFFTRTEGNVKVAKLKPLGTAVLIAIMIMPIFVPALTSTDVNTPFTFKVTKVYVGTYGNVYKMSI

SEQ ID NO: 26512 - protein, 85 aa, unidentified
  REGION 1..85: note = Description of Unknown:cds_NC_007409.1_cds_YP_319898.1_67 target sequence
NATVYSPTVKNITFVVIPDFYPFYNTYLWWSTVNVTVGQNYFNITPLAPSQEIGFNNATYTVVGVYGPYYYFVTLVLVSNGTMFS

SEQ ID NO: 26513 - protein, 85 aa, unidentified
  REGION 1..85: note = Description of Unknown:cds_NZ_WFIY01000004.1_cds_WP_155862443.1_192 target sequence
FSKTFYLTRWLDEDTFSKLLTFARFLGRENGVSEFVIDIERARKNRVRVEEIKETLKDIGVSLTEEEYRELQKLLPTYDVEFSIN

SEQ ID NO: 26514 - protein, 85 aa, unidentified
  REGION 1..85: note = Description of Unknown:cds_NZ_WFIY01000004.1_cds_WP_155862443.1_192 target sequence
RGKLIIIPHVYVMDIIKKSEGKIPIKYNKQDKIFETYPYYYYDLKELFIENGLTVKELNLEFKKFDFSLSVTLRDYQNEAIQKWK

SEQ ID NO: 26515 - protein, 85 aa, unidentified
  REGION 1..85: note = Description of Unknown:cds_NZ_WFIY01000004.1_cds_WP_155862443.1_192 target sequence
DNNYRGVIALPTGAGKTIIGIKAIEETKVPTLIVTFTREQMLQWKETIMKFSSIRPEVGLYYSNEKEIKQITLSTYQTAFRHVTE

SEQ ID NO: 26516 - protein, 85 aa, unidentified
  REGION 1..85: note = Description of Unknown:cds_NZ_WFIY01000004.1_cds_WP_155862443.1_192 target sequence
LSDKFDLLIIDEAHHLPADKFREVALGILATKRLGLSATPFREDGRHEELFKLMGGIVYYKPVDELIKKGYLAPYDIVQVKVFLT

SEQ ID NO: 26517 - protein, 85 aa, unidentified
  REGION 1..85: note = Description of Unknown:cds_NZ_WFIY01000004.1_cds_WP_155862443.1_192 target sequence
AEERKKYLTLLNKFRVLSKNKKLKELIILAKNGDSNAIEAIKVYNEIKKVVNFAQNKMLKIEEILNKEKGKKILIFTQYVDQAKE

SEQ ID NO: 26518 - protein, 85 aa, unidentified
  REGION 1..85: note = Description of Unknown:cds_NZ_WFIY01000004.1_cds_WP_155862443.1_192 target sequence
IARRFNTLLISGKMSKNERKKVLDTFKFMKSGVLTLTTVGDEGLDIPDASVGIIVTGTSSRRQFIQRLGRILRPVNGKRAILYEI

SEQ ID NO: 26519 - protein, 84 aa, unidentified
  REGION 1..84: note = Description of Unknown:cds_NZ_WFIY01000004.1_cds_WP_155862443.1_192 target sequence
TLTTVGDEGLDIPDASVGIIVTGTSSRRQFIQRLGRILRPVNGKRAILYEIIVAGTQEEYQSKKRKEDSILDEIQISSEYSDDM

SEQ ID NO: 26520 - protein, 85 aa, unidentified
  REGION 1..85: note = Description of Unknown:cds_NZ_WFIY01000004.1_cds_WP_155862443.1_192 target sequence
RENGVSEFVIDIERARKNRVRVEEIKETLKDIGVSLTEEEYRELQKLLPTYDVEFSINRGKLIIIPHVYVMDIIKKSEGKIPIKY

SEQ ID NO: 26521 - protein, 85 aa, unidentified
  REGION 1..85: note = Description of Unknown:cds_NZ_WFIY01000004.1_cds_WP_155862443.1_192 target sequence
NKQDKIFETYPYYYYDLKELFIENGLTVKELNLEFKKFDFSLSVTLRDYQNEAIQKWKDNNYRGVIALPTGAGKTIIGIKAIEET

SEQ ID NO: 26522 - protein, 85 aa, unidentified
  REGION 1..85: note = Description of Unknown:cds_NZ_WFIY01000004.1_cds_WP_155862443.1_192 target sequence
KVPTLIVTFTREQMLQWKETIMKFSSIRPEVGLYYSNEKEIKQITLSTYQTAFRHVTELSDKFDLLIIDEAHHLPADKFREVALG

SEQ ID NO: 26523 - protein, 85 aa, unidentified
  REGION 1..85: note = Description of Unknown:cds_NZ_WFIY01000004.1_cds_WP_155862443.1_192 target sequence
ILATKRLGLSATPFREDGRHEELFKLMGGIVYYKPVDELIKKGYLAPYDIVQVKVFLTAEERKKYLTLLNKFRVLSKNKKLKELI

SEQ ID NO: 26524 - protein, 85 aa, unidentified
  REGION 1..85: note = Description of Unknown:cds_NZ_WFIY01000004.1_cds_WP_155862443.1_192 target sequence
ILAKNGDSNAIEAIKVYNEIKKVVNFAQNKMLKIEEILNKEKGKKILIFTQYVDQAKEIARRFNTLLISGKMSKNERKKVLDTFK

SEQ ID NO: 26525 - protein, 85 aa, unidentified
  REGION 1..85: note = Description of Unknown:cds_NZ_WFIY01000004.1_cds_WP_155862443.1_192 target sequence
FMKSGVLTLTTVGDEGLDIPDASVGIIVTGTSSRRQFIQRLGRILRPVNGKRAILYEIIVAGTQEEYQSKKRKEDSILDEIQISS

SEQ ID NO: 26526 - protein, 85 aa, unidentified
  REGION 1..85: note = Description of Unknown:cds_NZ_WFIY01000004.1_cds_WP_155863967.1_1890 target sequence
FDIWLAIYDTLLTLGRVFIDIAFAIITGWLLAYASLKSKTFENIYISLSEIFESVPVISFFPVVLIFFVFSIGGSLGIELAVLFL

SEQ ID NO: 26527 - protein, 85 aa, unidentified
  REGION 1..85: note = Description of Unknown:cds_NZ_WFIY01000004.1_cds_WP_155863967.1_1890 target sequence
VFTAVVWNIWMGIYQAFKTVPSEMEEVIRNYRFGFVGKMLRLYIPFSMPRIAANLIPSFADALFYITVSEVFSIGTKCYEVPGIG

SEQ ID NO: 26528 - protein, 85 aa, unidentified
  REGION 1..85: note = Description of Unknown:cds_NZ_WFIY01000004.1_cds_WP_155863967.1_1890 target sequence
SLIAQYTAEGDYTDAIYALIVLGIFTTTITLLLREFAEYSVKKYGLDTEASLKSFKRGRFRIRYSARLSNSKGVFAKLGKYLTKP

SEQ ID NO: 26529 - protein, 85 aa, unidentified
  REGION 1..85: note = Description of Unknown:cds_NZ_WFIY01000004.1_cds_WP_155863967.1_1890 target sequence
PYFTRQNRLMEEEEEAKKRKIPINMISAGIGILLLIIILYGAYSVIISVKPSTWSYLISTLPQDLTDLGVDYLRVAVIALMSFIF

SEQ ID NO: 26530 - protein, 85 aa, unidentified
  REGION 1..85: note = Description of Unknown:cds_NZ_WFIY01000004.1_cds_WP_155863967.1_1890 target sequence
AVFVGYYLARHTNADRVIVPIIQTFSAFPAPAYFPLLYGFTYTYVSSIFGPFTNEFYVLLLGFISTFYYVFYSFWIGVKNLPSEY

SEQ ID NO: 26531 - protein, 85 aa, unidentified
  REGION 1..85: note = Description of Unknown:cds_NZ_WFIY01000004.1_cds_WP_155863967.1_1890 target sequence
WELMDNLKLGFWTKMRKIILPATFPYIISGMSSTINSAWGGLAIGEYWPDIYQSHTLEVRTGLMKALAIADNQGNLALVGWLSLI

SEQ ID NO: 26532 - protein, 84 aa, unidentified
  REGION 1..84: note = Description of Unknown:cds_NZ_WFIY01000004.1_cds_WP_155863967.1_1890 target sequence
INSAWGGLAIGEYWPDIYQSHTLEVRTGLMKALAIADNQGNLALVGWLSLIFAIIVVIYSVLFTRKMMDLARKKYVAEEGIYAA

SEQ ID NO: 26533 - protein, 85 aa, unidentified
  REGION 1..85: note = Description of Unknown:cds_NZ_WFIY01000004.1_cds_WP_155863967.1_1890 target sequence
GWLLAYASLKSKTFENIYISLSEIFESVPVISFFPVVLIFFVFSIGGSLGIELAVLFLVFTAVVWNIWMGIYQAFKTVPSEMEEV

SEQ ID NO: 26534 - protein, 85 aa, unidentified
  REGION 1..85: note = Description of Unknown:cds_NZ_WFIY01000004.1_cds_WP_155863967.1_1890 target sequence
IRNYRFGFVGKMLRLYIPFSMPRIAANLIPSFADALFYITVSEVFSIGTKCYEVPGIGSLIAQYTAEGDYTDAIYALIVLGIFTT

SEQ ID NO: 26535 - protein, 85 aa, unidentified
  REGION 1..85: note = Description of Unknown:cds_NZ_WFIY01000004.1_cds_WP_155863967.1_1890 target sequence
TITLLLREFAEYSVKKYGLDTEASLKSFKRGRFRIRYSARLSNSKGVFAKLGKYLTKPPYFTRQNRLMEEEEEAKKRKIPINMIS

SEQ ID NO: 26536 - protein, 85 aa, unidentified
  REGION 1..85: note = Description of Unknown:cds_NZ_WFIY01000004.1_cds_WP_155863967.1_1890 target sequence
AGIGILLLIIILYGAYSVIISVKPSTWSYLISTLPQDLTDLGVDYLRVAVIALMSFIFAVFVGYYLARHTNADRVIVPIIQTFSA

SEQ ID NO: 26537 - protein, 85 aa, unidentified
  REGION 1..85: note = Description of Unknown:cds_NZ_WFIY01000004.1_cds_WP_155863967.1_1890 target sequence
FPAPAYFPLLYGFTYTYVSSIFGPFTNEFYVLLLGFISTFYYVFYSFWIGVKNLPSEYWELMDNLKLGFWTKMRKIILPATFPYI

SEQ ID NO: 26538 - protein, 85 aa, unidentified
  REGION 1..85: note = Description of Unknown:cds_NZ_WFIY01000004.1_cds_WP_155863967.1_1890 target sequence
ISGMSSTINSAWGGLAIGEYWPDIYQSHTLEVRTGLMKALAIADNQGNLALVGWLSLIFAIIVVIYSVLFTRKMMDLARKKYVAE

SEQ ID NO: 26539 - protein, 85 aa, unidentified
  REGION 1..85: note = Description of Unknown:cds_NZ_WFIY01000004.1_cds_WP_155862993.1_870 target sequence
SQQQLEVIAEQSADYEYNIYNYFVVKQQNSITAEELEQYPKIALMNKAPTLTQEDVKCQVQGNSEAYSGNKFWLYPAIIIPETIS

SEQ ID NO: 26540 - protein, 85 aa, unidentified
  REGION 1..85: note = Description of Unknown:cds_NZ_WFIY01000004.1_cds_WP_155862993.1_870 target sequence
SSTKSLVDIIRQGIVITSNEEGILYFIGGCVNYNSGYWRSGKYLIFQGGAQFGAAGRMPITMSGGTRINTAALKEYAKTLTEESL

SEQ ID NO: 26541 - protein, 85 aa, unidentified
  REGION 1..85: note = Description of Unknown:cds_NZ_WFIY01000004.1_cds_WP_155862993.1_870 target sequence
QQICVIPILSRFSNPASGWINPTYYRAANNVSYEESVNELILPSATAQLLTYQPELNHLAIKREKDFYYRSDTSTYISKSLPDQL

SEQ ID NO: 26542 - protein, 85 aa, unidentified
  REGION 1..85: note = Description of Unknown:cds_NZ_WFIY01000004.1_cds_WP_155862993.1_870 target sequence
LDISSRFPYPYPAYYTSGIEYTGNFPTQLFLGYLRVVIVDFPKQSPFYSNDLLYPEFYNGYSSDIFMLNNMSIGAPVYLSKYNPN

SEQ ID NO: 26543 - protein, 85 aa, unidentified
  REGION 1..85: note = Description of Unknown:cds_NZ_WFIY01000004.1_cds_WP_155862993.1_870 target sequence
NGKPCTDYGVLGLVSAITNFNADIKGNIVTDRSLLSQLPSDFIAGYYILTLVKAPEPSNIDQYIKWLGQENAVNMVLDGIRKAKR

SEQ ID NO: 26544 - protein, 85 aa, unidentified
  REGION 1..85: note = Description of Unknown:cds_NZ_WFIY01000004.1_cds_WP_155862993.1_870 target sequence
AISSLISSGILAGIAFSAVMAVEEWESEDQITRDAKPYVDKLNKLYNEALNYATSCIESLPNLPRNAKIIYIQQVQQYLSGLMYE

SEQ ID NO: 26545 - protein, 84 aa, unidentified
  REGION 1..84: note = Description of Unknown:cds_NZ_WFIY01000004.1_cds_WP_155862993.1_870 target sequence
DAKPYVDKLNKLYNEALNYATSCIESLPNLPRNAKIIYIQQVQQYLSGLMYEVNAEASEEDILSWLESEIQEYLSNQGIIPACP

SEQ ID NO: 26546 - protein, 85 aa, unidentified
  REGION 1..85: note = Description of Unknown:cds_NZ_WFIY01000004.1_cds_WP_155862993.1_870 target sequence
QNSITAEELEQYPKIALMNKAPTLTQEDVKCQVQGNSEAYSGNKFWLYPAIIIPETISSSTKSLVDIIRQGIVITSNEEGILYFI

SEQ ID NO: 26547 - protein, 85 aa, unidentified
  REGION 1..85: note = Description of Unknown:cds_NZ_WFIY01000004.1_cds_WP_155862993.1_870 target sequence
GGCVNYNSGYWRSGKYLIFQGGAQFGAAGRMPITMSGGTRINTAALKEYAKTLTEESLQQICVIPILSRFSNPASGWINPTYYRA

SEQ ID NO: 26548 - protein, 85 aa, unidentified
  REGION 1..85: note = Description of Unknown:cds_NZ_WFIY01000004.1_cds_WP_155862993.1_870 target sequence
ANNVSYEESVNELILPSATAQLLTYQPELNHLAIKREKDFYYRSDTSTYISKSLPDQLLDISSRFPYPYPAYYTSGIEYTGNFPT

SEQ ID NO: 26549 - protein, 85 aa, unidentified
  REGION 1..85: note = Description of Unknown:cds_NZ_WFIY01000004.1_cds_WP_155862993.1_870 target sequence
QLFLGYLRVVIVDFPKQSPFYSNDLLYPEFYNGYSSDIFMLNNMSIGAPVYLSKYNPNNGKPCTDYGVLGLVSAITNFNADIKGN

SEQ ID NO: 26550 - protein, 85 aa, unidentified
  REGION 1..85: note = Description of Unknown:cds_NZ_WFIY01000004.1_cds_WP_155862993.1_870 target sequence
IVTDRSLLSQLPSDFIAGYYILTLVKAPEPSNIDQYIKWLGQENAVNMVLDGIRKAKRAISSLISSGILAGIAFSAVMAVEEWES

SEQ ID NO: 26551 - protein, 85 aa, unidentified
  REGION 1..85: note = Description of Unknown:cds_NZ_WFIY01000004.1_cds_WP_155862993.1_870 target sequence
EDQITRDAKPYVDKLNKLYNEALNYATSCIESLPNLPRNAKIIYIQQVQQYLSGLMYEVNAEASEEDILSWLESEIQEYLSNQGI

SEQ ID NO: 26552 - protein, 85 aa, unidentified
  REGION 1..85: note = Description of Unknown:cds_NZ_WFIY01000004.1_cds_WP_155863269.1_1224 target sequence
VDTNRISKNMFLRESSGLVKEFGLKDIASLNLSNLLFGIGLIYIINDGYLFPNGSMILGTAIMALLGIFPAIVYGMLTHAVGKTY

SEQ ID NO: 26553 - protein, 85 aa, unidentified
  REGION 1..85: note = Description of Unknown:cds_NZ_WFIY01000004.1_cds_WP_155863269.1_1224 target sequence
SDYVTVARSSHPALGTAIAISTLFWAWLWAATFVYFFITYALPITLTEIGYFLGIPSLINISTQLTTTPYILGLGILTIVAFIFI

SEQ ID NO: 26554 - protein, 85 aa, unidentified
  REGION 1..85: note = Description of Unknown:cds_NZ_WFIY01000004.1_cds_WP_155863269.1_1224 target sequence
AVRSNKALMNIVTISIGLGTLANIIVIISLLMVSHSQFVNIFNSYAAHFVSNTNYYSYIISEAQKLGYSSTSFSFYCTLGIVGLA

SEQ ID NO: 26555 - protein, 85 aa, unidentified
  REGION 1..85: note = Description of Unknown:cds_NZ_WFIY01000004.1_cds_WP_155863269.1_1224 target sequence
AWTFLYVSVQQYVAAEIKGRTKISLYGTLIPLAISGIISILTIVLFIDKVGLTFINSIDYLANTDPSAYSLPVSPSYFYLASIIA

SEQ ID NO: 26556 - protein, 85 aa, unidentified
  REGION 1..85: note = Description of Unknown:cds_NZ_WFIY01000004.1_cds_WP_155863269.1_1224 target sequence
NYINPALSILIGIGFITWNFALIPFNFLIGSRVVLALSMDRLLPGFFGSVKENWHTPYASHIINGSLMIVMIIVYSTVGSSLLSL

SEQ ID NO: 26557 - protein, 85 aa, unidentified
  REGION 1..85: note = Description of Unknown:cds_NZ_WFIY01000004.1_cds_WP_155863269.1_1224 target sequence
NAVFGNILAWIIEALVFIFLPFLRKSNMLIEGTIIEKWKIGDLPVFSIASIGWLATLGLIAYLYLTNASFGVNGIPSLVTVSLVT

SEQ ID NO: 26558 - protein, 84 aa, unidentified
  REGION 1..84: note = Description of Unknown:cds_NZ_WFIY01000004.1_cds_WP_155863269.1_1224 target sequence
IIEKWKIGDLPVFSIASIGWLATLGLIAYLYLTNASFGVNGIPSLVTVSLVTVGGAIYYFLAKLIRERKDNIDLSLLFKEIPPD

SEQ ID NO: 26559 - protein, 85 aa, unidentified
  REGION 1..85: note = Description of Unknown:cds_NZ_WFIY01000004.1_cds_WP_155863269.1_1224 target sequence
ASLNLSNLLFGIGLIYIINDGYLFPNGSMILGTAIMALLGIFPAIVYGMLTHAVGKTYSDYVTVARSSHPALGTAIAISTLFWAW

SEQ ID NO: 26560 - protein, 85 aa, unidentified
  REGION 1..85: note = Description of Unknown:cds_NZ_WFIY01000004.1_cds_WP_155863269.1_1224 target sequence
LWAATFVYFFITYALPITLTEIGYFLGIPSLINISTQLTTTPYILGLGILTIVAFIFIAVRSNKALMNIVTISIGLGTLANIIVI

SEQ ID NO: 26561 - protein, 85 aa, unidentified
  REGION 1..85: note = Description of Unknown:cds_NZ_WFIY01000004.1_cds_WP_155863269.1_1224 target sequence
ISLLMVSHSQFVNIFNSYAAHFVSNTNYYSYIISEAQKLGYSSTSFSFYCTLGIVGLAAWTFLYVSVQQYVAAEIKGRTKISLYG

SEQ ID NO: 26562 - protein, 85 aa, unidentified
  REGION 1..85: note = Description of Unknown:cds_NZ_WFIY01000004.1_cds_WP_155863269.1_1224 target sequence
TLIPLAISGIISILTIVLFIDKVGLTFINSIDYLANTDPSAYSLPVSPSYFYLASIIANYINPALSILIGIGFITWNFALIPFNF

SEQ ID NO: 26563 - protein, 85 aa, unidentified
  REGION 1..85: note = Description of Unknown:cds_NZ_WFIY01000004.1_cds_WP_155863269.1_1224 target sequence
LIGSRVVLALSMDRLLPGFFGSVKENWHTPYASHIINGSLMIVMIIVYSTVGSSLLSLNAVFGNILAWIIEALVFIFLPFLRKSN

SEQ ID NO: 26564 - protein, 85 aa, unidentified
  REGION 1..85: note = Description of Unknown:cds_NZ_WFIY01000004.1_cds_WP_155863269.1_1224 target sequence
MLIEGTIIEKWKIGDLPVFSIASIGWLATLGLIAYLYLTNASFGVNGIPSLVTVSLVTVGGAIYYFLAKLIRERKDNIDLSLLFK

SEQ ID NO: 26565 - protein, 85 aa, unidentified
  REGION 1..85: note = Description of Unknown:cds_NZ_WFIY01000004.1_cds_WP_155863786.1_1667 target sequence
DLRRLVTYIIIGSTILSAIFIISFRINILNNPVIAAVLALSFFSAIAIFVIALDPYILNPNRKINMIDDIIVIISILTYTLISVF

SEQ ID NO: 26566 - protein, 85 aa, unidentified
  REGION 1..85: note = Description of Unknown:cds_NZ_WFIY01000004.1_cds_WP_155863786.1_1667 target sequence
LINGYGTDDMEYIATAINYLIHGINPYLQSYHPHNVEPTYLLNGNIASSYIYPPLSFLLYTPLYLILDLLKIKLYYINILNIIFE

SEQ ID NO: 26567 - protein, 85 aa, unidentified
  REGION 1..85: note = Description of Unknown:cds_NZ_WFIY01000004.1_cds_WP_155863786.1_1667 target sequence
DLLAIIIYLQGRKRKDPIATLPIIFIFITSGLLAPSFAGVNSSVWAVFIALSYVYNGKKSGIFLALADSFNQIPWVITPFLLIYK

SEQ ID NO: 26568 - protein, 85 aa, unidentified
  REGION 1..85: note = Description of Unknown:cds_NZ_WFIY01000004.1_cds_WP_155863786.1_1667 target sequence
KKDLLNVLKGFLTSILLINVPFLIWNPYAFLHIITLDEKTIPVAFTGFTILNFTTLFSVEPWFFTYAMALSGAFLIYIYYRFFDR

SEQ ID NO: 26569 - protein, 85 aa, unidentified
  REGION 1..85: note = Description of Unknown:cds_NZ_WFIY01000004.1_cds_WP_155863786.1_1667 target sequence
LKESLWIFPLIIMWFSWRTLTSYFIMWPQLMFLSIFNINSYNMEIPKIHLSINRKEILSVLFVLLISLVSAGEFSHIQYVDQDPI

SEQ ID NO: 26570 - protein, 85 aa, unidentified
  REGION 1..85: note = Description of Unknown:cds_NZ_WFIY01000004.1_cds_WP_155863786.1_1667 target sequence
QIINVIIPESEHNSTYINQLYIVVKNIKNETINITLVRVSIPNCLNMVWNFTKVEIPPNSTGVVFAYTQNPALYINSTSFTVQVY

SEQ ID NO: 26571 - protein, 84 aa, unidentified
  REGION 1..84: note = Description of Unknown:cds_NZ_WFIY01000004.1_cds_WP_155863786.1_1667 target sequence
ITLVRVSIPNCLNMVWNFTKVEIPPNSTGVVFAYTQNPALYINSTSFTVQVYSNCYISSYKVIRNFTEYNTTLTHEYSISASGT

SEQ ID NO: 26572 - protein, 85 aa, unidentified
  REGION 1..85: note = Description of Unknown:cds_NZ_WFIY01000004.1_cds_WP_155863786.1_1667 target sequence
ILNNPVIAAVLALSFFSAIAIFVIALDPYILNPNRKINMIDDIIVIISILTYTLISVFLINGYGTDDMEYIATAINYLIHGINPY

SEQ ID NO: 26573 - protein, 85 aa, unidentified
  REGION 1..85: note = Description of Unknown:cds_NZ_WFIY01000004.1_cds_WP_155863786.1_1667 target sequence
LQSYHPHNVEPTYLLNGNIASSYIYPPLSFLLYTPLYLILDLLKIKLYYINILNIIFEDLLAIIIYLQGRKRKDPIATLPIIFIF

SEQ ID NO: 26574 - protein, 85 aa, unidentified
  REGION 1..85: note = Description of Unknown:cds_NZ_WFIY01000004.1_cds_WP_155863786.1_1667 target sequence
ITSGLLAPSFAGVNSSVWAVFIALSYVYNGKKSGIFLALADSFNQIPWVITPFLLIYKKKDLLNVLKGFLTSILLINVPFLIWNP

SEQ ID NO: 26575 - protein, 85 aa, unidentified
  REGION 1..85: note = Description of Unknown:cds_NZ_WFIY01000004.1_cds_WP_155863786.1_1667 target sequence
YAFLHIITLDEKTIPVAFTGFTILNFTTLFSVEPWFFTYAMALSGAFLIYIYYRFFDRLKESLWIFPLIIMWFSWRTLTSYFIMW

SEQ ID NO: 26576 - protein, 85 aa, unidentified
  REGION 1..85: note = Description of Unknown:cds_NZ_WFIY01000004.1_cds_WP_155863786.1_1667 target sequence
PQLMFLSIFNINSYNMEIPKIHLSINRKEILSVLFVLLISLVSAGEFSHIQYVDQDPIQIINVIIPESEHNSTYINQLYIVVKNI

SEQ ID NO: 26577 - protein, 85 aa, unidentified
  REGION 1..85: note = Description of Unknown:cds_NZ_WFIY01000004.1_cds_WP_155863786.1_1667 target sequence
KNETINITLVRVSIPNCLNMVWNFTKVEIPPNSTGVVFAYTQNPALYINSTSFTVQVYSNCYISSYKVIRNFTEYNTTLTHEYSI

SEQ ID NO: 26578 - protein, 85 aa, unidentified
  REGION 1..85: note = Description of Unknown:cds_NZ_WFIY01000004.1_cds_WP_155862390.1_127 target sequence
EEYKGVWLKGGIILAFNLLADGKKAVAVGLGERDFYVDVEMDSSMTLAEAKKYAKEGNYEIKIEGKKAKAGNYEVSLESNVTPSG

SEQ ID NO: 26579 - protein, 85 aa, unidentified
  REGION 1..85: note = Description of Unknown:cds_NZ_WFIY01000004.1_cds_WP_155862390.1_127 target sequence
NPKYFEILNISVHHPTPDKQYVRIRGVAFETEEQLKDYMNWLEKASETDHRILGEKMDLFSFPEEAGPGLVLYHPKGQIIRNELI

SEQ ID NO: 26580 - protein, 85 aa, unidentified
  REGION 1..85: note = Description of Unknown:cds_NZ_WFIY01000004.1_cds_WP_155862390.1_127 target sequence
EYMREINASMGYQEVYTTHVYRTILWKISGHYEMYKDKMLIFTHDDEELGIKPMNCPAHILIYKSRTRSYKDLPIRFSEFGNVYR

SEQ ID NO: 26581 - protein, 85 aa, unidentified
  REGION 1..85: note = Description of Unknown:cds_NZ_WFIY01000004.1_cds_WP_155862390.1_127 target sequence
WEQKGELYGLLRVRGFTQDDGHVFLREDQLENEVKMLISKTLEVLAKFGFKGDDVRINLSTRPDESIGTDEQWEKATNALVNALR

SEQ ID NO: 26582 - protein, 85 aa, unidentified
  REGION 1..85: note = Description of Unknown:cds_NZ_WFIY01000004.1_cds_WP_155862390.1_127 target sequence
SLNLKYQVKEKEGAFYGPKIDFDIRDSLGRWWQLSTIQVDFNLPERFKLEYVDKDGNKKRPVMVHRAIYGSIDRFLAILLEHFKG

SEQ ID NO: 26583 - protein, 85 aa, unidentified
  REGION 1..85: note = Description of Unknown:cds_NZ_WFIY01000004.1_cds_WP_155862390.1_127 target sequence
KLPTWLSPVQVRILPINPEVREYAEKVLFKLVSVKIRAEIDSEEETLSKRIKRAYDDGVPYILIVGKKEAESNSVTIRARGNIEV

SEQ ID NO: 26584 - protein, 84 aa, unidentified
  REGION 1..84: note = Description of Unknown:cds_NZ_WFIY01000004.1_cds_WP_155862390.1_127 target sequence
SVKIRAEIDSEEETLSKRIKRAYDDGVPYILIVGKKEAESNSVTIRARGNIEVKGVPLDKCVDAILKEIQNRDLTNTAIEKVKQ

SEQ ID NO: 26585 - protein, 85 aa, unidentified
  REGION 1..85: note = Description of Unknown:cds_NZ_WFIY01000004.1_cds_WP_155862390.1_127 target sequence
VGLGERDFYVDVEMDSSMTLAEAKKYAKEGNYEIKIEGKKAKAGNYEVSLESNVTPSGNPKYFEILNISVHHPTPDKQYVRIRGV

SEQ ID NO: 26586 - protein, 85 aa, unidentified
  REGION 1..85: note = Description of Unknown:cds_NZ_WFIY01000004.1_cds_WP_155862390.1_127 target sequence
AFETEEQLKDYMNWLEKASETDHRILGEKMDLFSFPEEAGPGLVLYHPKGQIIRNELIEYMREINASMGYQEVYTTHVYRTILWK

SEQ ID NO: 26587 - protein, 85 aa, unidentified
  REGION 1..85: note = Description of Unknown:cds_NZ_WFIY01000004.1_cds_WP_155862390.1_127 target sequence
ISGHYEMYKDKMLIFTHDDEELGIKPMNCPAHILIYKSRTRSYKDLPIRFSEFGNVYRWEQKGELYGLLRVRGFTQDDGHVFLRE

SEQ ID NO: 26588 - protein, 85 aa, unidentified
  REGION 1..85: note = Description of Unknown:cds_NZ_WFIY01000004.1_cds_WP_155862390.1_127 target sequence
DQLENEVKMLISKTLEVLAKFGFKGDDVRINLSTRPDESIGTDEQWEKATNALVNALRSLNLKYQVKEKEGAFYGPKIDFDIRDS

SEQ ID NO: 26589 - protein, 85 aa, unidentified
  REGION 1..85: note = Description of Unknown:cds_NZ_WFIY01000004.1_cds_WP_155862390.1_127 target sequence
LGRWWQLSTIQVDFNLPERFKLEYVDKDGNKKRPVMVHRAIYGSIDRFLAILLEHFKGKLPTWLSPVQVRILPINPEVREYAEKV

SEQ ID NO: 26590 - protein, 85 aa, unidentified
  REGION 1..85: note = Description of Unknown:cds_NZ_WFIY01000004.1_cds_WP_155862390.1_127 target sequence
LFKLVSVKIRAEIDSEEETLSKRIKRAYDDGVPYILIVGKKEAESNSVTIRARGNIEVKGVPLDKCVDAILKEIQNRDLTNTAIE

SEQ ID NO: 26591 - protein, 85 aa, unidentified
  REGION 1..85: note = Description of Unknown:cds_NC_029316.1_cds_YP_009230286.1_33 target sequence
NSLSVLKDAILSLSNKFVDREEDVLALTSSLVLGKLGANMLLIGYPGTAKSSLVKEFCRTLNLSYGELVLTPTMLPSSSLYYIDQ

SEQ ID NO: 26592 - protein, 85 aa, unidentified
  REGION 1..85: note = Description of Unknown:cds_NC_029316.1_cds_YP_009230286.1_33 target sequence
IKLIKENKVEVNPSSLSYADIAFLDEIGRANDIMLHSILSYLLDREFFIDQITAKMKTRTLTVVGATNFVNLDSKFDAVYDRFTY

SEQ ID NO: 26593 - protein, 85 aa, unidentified
  REGION 1..85: note = Description of Unknown:cds_NC_029316.1_cds_YP_009230286.1_33 target sequence
SIVTFPPNSDEFEAVYEKGVEILNRKLDDGDGNVEVIPITVNSKKPKLDREEIIELARVALSEVNQTDILIAKKIYSAFNMDKIG

SEQ ID NO: 26594 - protein, 85 aa, unidentified
  REGION 1..85: note = Description of Unknown:cds_NC_029316.1_cds_YP_009230286.1_33 target sequence
ENRLIKITVDELSKPLADIFKKYVGDREVLFPVKSSMRKLQLLPPTLALLRMLGYYDEVNIAKAISWFFIIPDEQYFPLYIKSRE

SEQ ID NO: 26595 - protein, 85 aa, unidentified
  REGION 1..85: note = Description of Unknown:cds_NC_029316.1_cds_YP_009230286.1_33 target sequence
EGISILQKKILNIIRDLLPKVVQPTFNDKMLNEAEMIIRFLSNALISIKKIPTHVKDVITVESNDIIIHVDTLLNILSKEGKLSD

SEQ ID NO: 26596 - protein, 85 aa, unidentified
  REGION 1..85: note = Description of Unknown:cds_NC_029316.1_cds_YP_009230286.1_33 target sequence
FQLFNFGLYGVNKPVFKLIRKIVSLYDKDMINMLDMQKKLEIQKKLQSAIPLIATIISDVYDVYVAYNNGIEDNMSKALFKRMLN

SEQ ID NO: 26597 - protein, 84 aa, unidentified
  REGION 1..84: note = Description of Unknown:cds_NC_029316.1_cds_YP_009230286.1_33 target sequence
MLDMQKKLEIQKKLQSAIPLIATIISDVYDVYVAYNNGIEDNMSKALFKRMLNNAGLVTSADINDFKKRMLEDIKGELLTKIST

SEQ ID NO: 26598 - protein, 85 aa, unidentified
  REGION 1..85: note = Description of Unknown:cds_NC_029316.1_cds_YP_009230286.1_33 target sequence
TSSLVLGKLGANMLLIGYPGTAKSSLVKEFCRTLNLSYGELVLTPTMLPSSSLYYIDQIKLIKENKVEVNPSSLSYADIAFLDEI

SEQ ID NO: 26599 - protein, 85 aa, unidentified
  REGION 1..85: note = Description of Unknown:cds_NC_029316.1_cds_YP_009230286.1_33 target sequence
GRANDIMLHSILSYLLDREFFIDQITAKMKTRTLTVVGATNFVNLDSKFDAVYDRFTYSIVTFPPNSDEFEAVYEKGVEILNRKL

SEQ ID NO: 26600 - protein, 85 aa, unidentified
  REGION 1..85: note = Description of Unknown:cds_NC_029316.1_cds_YP_009230286.1_33 target sequence
DDGDGNVEVIPITVNSKKPKLDREEIIELARVALSEVNQTDILIAKKIYSAFNMDKIGENRLIKITVDELSKPLADIFKKYVGDR

SEQ ID NO: 26601 - protein, 85 aa, unidentified
  REGION 1..85: note = Description of Unknown:cds_NC_029316.1_cds_YP_009230286.1_33 target sequence
EVLFPVKSSMRKLQLLPPTLALLRMLGYYDEVNIAKAISWFFIIPDEQYFPLYIKSREEGISILQKKILNIIRDLLPKVVQPTFN

SEQ ID NO: 26602 - protein, 85 aa, unidentified
  REGION 1..85: note = Description of Unknown:cds_NC_029316.1_cds_YP_009230286.1_33 target sequence
DKMLNEAEMIIRFLSNALISIKKIPTHVKDVITVESNDIIIHVDTLLNILSKEGKLSDFQLFNFGLYGVNKPVFKLIRKIVSLYD

SEQ ID NO: 26603 - protein, 85 aa, unidentified
  REGION 1..85: note = Description of Unknown:cds_NC_029316.1_cds_YP_009230286.1_33 target sequence
KDMINMLDMQKKLEIQKKLQSAIPLIATIISDVYDVYVAYNNGIEDNMSKALFKRMLNNAGLVTSADINDFKKRMLEDIKGELLT

SEQ ID NO: 26604 - protein, 85 aa, unidentified
  REGION 1..85: note = Description of Unknown:cds_NZ_WFIY01000004.1_cds_WP_048054849.1_1182 target sequence
LASIFRENTSRESGKDVILSNITAVRTLAEMLKTSLGPRGLDKMMVSSTNDITITNDGATIVKDLEVQHPAARIVVETAKVQDSE

SEQ ID NO: 26605 - protein, 85 aa, unidentified
  REGION 1..85: note = Description of Unknown:cds_NZ_WFIY01000004.1_cds_WP_048054849.1_1182 target sequence
VGDGTTTAVVLSGFLLDEAGKLLDQNIHPTTIIEGFKKALDKALAISKEIAIKINPEDRNYLREVAYTTLSSKFFSEGEELDKII

SEQ ID NO: 26606 - protein, 85 aa, unidentified
  REGION 1..85: note = Description of Unknown:cds_NZ_WFIY01000004.1_cds_WP_048054849.1_1182 target sequence
DLSIDAVLSVMDKVGDEYVIDLSNIKMVKKRGESVEDTELIKGFVLDKEVAHEGMPRRIDEAKIAVIDFPLEVQKTEISSKLSLT

SEQ ID NO: 26607 - protein, 85 aa, unidentified
  REGION 1..85: note = Description of Unknown:cds_NZ_WFIY01000004.1_cds_WP_048054849.1_1182 target sequence
SPEQIKAALDEQAKYLRGIVDKIAATGANVVICQKGMDDIAQYFLAKKKIMGIKNVSRSDLEKIAKTTGATIISSEMDLDSSALG

SEQ ID NO: 26608 - protein, 85 aa, unidentified
  REGION 1..85: note = Description of Unknown:cds_NZ_WFIY01000004.1_cds_WP_048054849.1_1182 target sequence
YAKVVEERTVGKDKAIFIEGVKNAKVVTILIRGATDIAMDEVERSLNDVLNSVRNVIIYPYVVAGGGAFEEELAMRLRKETLPGK

SEQ ID NO: 26609 - protein, 85 aa, unidentified
  REGION 1..85: note = Description of Unknown:cds_NZ_WFIY01000004.1_cds_WP_048054849.1_1182 target sequence
EQLALEAYANALEEIAVTLAETAGLDPTEALVNLRTMHAKGLDKSGVDVMQGKLVEDMTKIKVVDSLKVKEQVLKGATEAATAIL

SEQ ID NO: 26610 - protein, 84 aa, unidentified
  REGION 1..84: note = Description of Unknown:cds_NZ_WFIY01000004.1_cds_WP_048054849.1_1182 target sequence
NLRTMHAKGLDKSGVDVMQGKLVEDMTKIKVVDSLKVKEQVLKGATEAATAILKIDDLIAAAPAKQQPQQQEGGYPGMSGMPGM

SEQ ID NO: 26611 - protein, 85 aa, unidentified
  REGION 1..85: note = Description of Unknown:cds_NZ_WFIY01000004.1_cds_WP_048054849.1_1182 target sequence
LAEMLKTSLGPRGLDKMMVSSTNDITITNDGATIVKDLEVQHPAARIVVETAKVQDSEVGDGTTTAVVLSGFLLDEAGKLLDQNI

SEQ ID NO: 26612 - protein, 85 aa, unidentified
  REGION 1..85: note = Description of Unknown:cds_NZ_WFIY01000004.1_cds_WP_048054849.1_1182 target sequence
HPTTIIEGFKKALDKALAISKEIAIKINPEDRNYLREVAYTTLSSKFFSEGEELDKIIDLSIDAVLSVMDKVGDEYVIDLSNIKM

SEQ ID NO: 26613 - protein, 85 aa, unidentified
  REGION 1..85: note = Description of Unknown:cds_NZ_WFIY01000004.1_cds_WP_048054849.1_1182 target sequence
VKKRGESVEDTELIKGFVLDKEVAHEGMPRRIDEAKIAVIDFPLEVQKTEISSKLSLTSPEQIKAALDEQAKYLRGIVDKIAATG

SEQ ID NO: 26614 - protein, 85 aa, unidentified
  REGION 1..85: note = Description of Unknown:cds_NZ_WFIY01000004.1_cds_WP_048054849.1_1182 target sequence
ANVVICQKGMDDIAQYFLAKKKIMGIKNVSRSDLEKIAKTTGATIISSEMDLDSSALGYAKVVEERTVGKDKAIFIEGVKNAKVV

SEQ ID NO: 26615 - protein, 85 aa, unidentified
  REGION 1..85: note = Description of Unknown:cds_NZ_WFIY01000004.1_cds_WP_048054849.1_1182 target sequence
TILIRGATDIAMDEVERSLNDVLNSVRNVIIYPYVVAGGGAFEEELAMRLRKETLPGKEQLALEAYANALEEIAVTLAETAGLDP

SEQ ID NO: 26616 - protein, 85 aa, unidentified
  REGION 1..85: note = Description of Unknown:cds_NZ_WFIY01000004.1_cds_WP_048054849.1_1182 target sequence
TEALVNLRTMHAKGLDKSGVDVMQGKLVEDMTKIKVVDSLKVKEQVLKGATEAATAILKIDDLIAAAPAKQQPQQQEGGYPGMSG

SEQ ID NO: 26617 - protein, 85 aa, unidentified
  REGION 1..85: note = Description of Unknown:cds_NZ_WFIY01000004.1_cds_WP_155864351.1_2365 target sequence
SQNIDELFMNALEAYHPFIGSENWKYSDVLTAFIHSVSAAYSAYKLSLVLGNDDDFAEKAFFIGLFHDFYQKFGKKVEDLREVVK

SEQ ID NO: 26618 - protein, 85 aa, unidentified
  REGION 1..85: note = Description of Unknown:cds_NZ_WFIY01000004.1_cds_WP_155864351.1_2365 target sequence
MFVDDKEVLDGINYNLAENPSLNPKFGKIVWFADMMQSSNMSFLDLFNLVKKVDPSLNAYFFTVSLPQIGTRSAIMKKVVEKVEE

SEQ ID NO: 26619 - protein, 85 aa, unidentified
  REGION 1..85: note = Description of Unknown:cds_NZ_WFIY01000004.1_cds_WP_155864351.1_2365 target sequence
MTDNSLIVLTKDGVVVITNKDIELPIRVNWDELKIPRDGGEWAEIEKRDKELINDFFGNGKPSANFKGFFYNVEVDDIEHKEGGE

SEQ ID NO: 26620 - protein, 85 aa, unidentified
  REGION 1..85: note = Description of Unknown:cds_NZ_WFIY01000004.1_cds_WP_155864351.1_2365 target sequence
RCFLCGIESPKLYVPQAYGYALYSKASNEKWSPKVEPLSNLHYKFDKKYGICFWCAYDALYLSKHSFAASRGQTKYFLVGYFTRP

SEQ ID NO: 26621 - protein, 85 aa, unidentified
  REGION 1..85: note = Description of Unknown:cds_NZ_WFIY01000004.1_cds_WP_155864351.1_2365 target sequence
TPKEVAENFSILLGINVDFKTVGNVRLDEIENDLYSWRDFVHDVIPNMAGDRMETILDYSSAMILRDFGSIYREGKRSYLLREQP

SEQ ID NO: 26622 - protein, 85 aa, unidentified
  REGION 1..85: note = Description of Unknown:cds_NZ_WFIY01000004.1_cds_WP_155864351.1_2365 target sequence
IKGFVELIPSLSALLLISSFYPVKVTPHPDQVIERRILTFGKPFPIIDYDPAMEDKLPPFSLSLLFSSRLLEEKDRFDLMDFDFS

SEQ ID NO: 26623 - protein, 84 aa, unidentified
  REGION 1..84: note = Description of Unknown:cds_NZ_WFIY01000004.1_cds_WP_155864351.1_2365 target sequence
VIERRILTFGKPFPIIDYDPAMEDKLPPFSLSLLFSSRLLEEKDRFDLMDFDFSLTTTLLSSVNPRIAEAIKGFKSKPKVYYNG

SEQ ID NO: 26624 - protein, 85 aa, unidentified
  REGION 1..85: note = Description of Unknown:cds_NZ_WFIY01000004.1_cds_WP_155864351.1_2365 target sequence
DVLTAFIHSVSAAYSAYKLSLVLGNDDDFAEKAFFIGLFHDFYQKFGKKVEDLREVVKMFVDDKEVLDGINYNLAENPSLNPKFG

SEQ ID NO: 26625 - protein, 85 aa, unidentified
  REGION 1..85: note = Description of Unknown:cds_NZ_WFIY01000004.1_cds_WP_155864351.1_2365 target sequence
KIVWFADMMQSSNMSFLDLFNLVKKVDPSLNAYFFTVSLPQIGTRSAIMKKVVEKVEEMTDNSLIVLTKDGVVVITNKDIELPIR

SEQ ID NO: 26626 - protein, 85 aa, unidentified
  REGION 1..85: note = Description of Unknown:cds_NZ_WFIY01000004.1_cds_WP_155864351.1_2365 target sequence
VNWDELKIPRDGGEWAEIEKRDKELINDFFGNGKPSANFKGFFYNVEVDDIEHKEGGERCFLCGIESPKLYVPQAYGYALYSKAS

SEQ ID NO: 26627 - protein, 85 aa, unidentified
  REGION 1..85: note = Description of Unknown:cds_NZ_WFIY01000004.1_cds_WP_155864351.1_2365 target sequence
NEKWSPKVEPLSNLHYKFDKKYGICFWCAYDALYLSKHSFAASRGQTKYFLVGYFTRPTPKEVAENFSILLGINVDFKTVGNVRL

SEQ ID NO: 26628 - protein, 85 aa, unidentified
  REGION 1..85: note = Description of Unknown:cds_NZ_WFIY01000004.1_cds_WP_155864351.1_2365 target sequence
DEIENDLYSWRDFVHDVIPNMAGDRMETILDYSSAMILRDFGSIYREGKRSYLLREQPIKGFVELIPSLSALLLISSFYPVKVTP

SEQ ID NO: 26629 - protein, 85 aa, unidentified
  REGION 1..85: note = Description of Unknown:cds_NZ_WFIY01000004.1_cds_WP_155864351.1_2365 target sequence
HPDQVIERRILTFGKPFPIIDYDPAMEDKLPPFSLSLLFSSRLLEEKDRFDLMDFDFSLTTTLLSSVNPRIAEAIKGFKSKPKVY

SEQ ID NO: 26630 - protein, 85 aa, unidentified
  REGION 1..85: note = Description of Unknown:cds_NZ_WFIY01000004.1_cds_WP_155863067.1_973 target sequence
LSAPKRKEETVGKEMTGDEALAYVLKEIGTKKVFTTISLPENLRERLKEYEIEQDISLNSRDALLLAETYAMENNTAGVVIQIPG

SEQ ID NO: 26631 - protein, 85 aa, unidentified
  REGION 1..85: note = Description of Unknown:cds_NZ_WFIY01000004.1_cds_WP_155863067.1_973 target sequence
TEILNGIDVIAQAYADSVPLLIIGSLRSYRDVGRARVGELRTPDDLSSTLAPITKLRERAISIEEITVTVEKANKEALSNRPRPA

SEQ ID NO: 26632 - protein, 85 aa, unidentified
  REGION 1..85: note = Description of Unknown:cds_NZ_WFIY01000004.1_cds_WP_155863067.1_973 target sequence
FVEIAEDLFKMKAYPLSPAEQKPEKRTPDKNTVAKVAEVLSNSKLPVIVAGYGVITSEAHNELIELAELLDAPVITTIKGKGSFP

SEQ ID NO: 26633 - protein, 85 aa, unidentified
  REGION 1..85: note = Description of Unknown:cds_NZ_WFIY01000004.1_cds_WP_155863067.1_973 target sequence
ASHQLFAGEGLGIIGTDIGNKLLAEADSILFLGTRLTQLSTGGWSMKFKGFTMHNNIDGEDIGKVIMPHLPIVADTGLFLKELLV

SEQ ID NO: 26634 - protein, 85 aa, unidentified
  REGION 1..85: note = Description of Unknown:cds_NZ_WFIY01000004.1_cds_WP_155863067.1_973 target sequence
LLKQKIKDKIDRGIRYEILRSKKEPELRTHSGLWPWDVVKTLTDFKFSKIFVDLSAVTFDMIRYPVDKPVWFTSESIISKGLGIA

SEQ ID NO: 26635 - protein, 85 aa, unidentified
  REGION 1..85: note = Description of Unknown:cds_NZ_WFIY01000004.1_cds_WP_155863067.1_973 target sequence
GVIQSKDKNALGVTDLPSITRNLGLLQSKRDEAKGTLIVFNDKASTYLDTTASDAPTIKRSWSSINIDLKFLGAIDVNSTAELKE

SEQ ID NO: 26636 - protein, 84 aa, unidentified
  REGION 1..84: note = Description of Unknown:cds_NZ_WFIY01000004.1_cds_WP_155863067.1_973 target sequence
EAKGTLIVFNDKASTYLDTTASDAPTIKRSWSSINIDLKFLGAIDVNSTAELKEALNNNEGDNKLRIINVNIDPQYDSVVLIRM

SEQ ID NO: 26637 - protein, 85 aa, unidentified
  REGION 1..85: note = Description of Unknown:cds_NZ_WFIY01000004.1_cds_WP_155863067.1_973 target sequence
IGTKKVFTTISLPENLRERLKEYEIEQDISLNSRDALLLAETYAMENNTAGVVIQIPGTEILNGIDVIAQAYADSVPLLIIGSLR

SEQ ID NO: 26638 - protein, 85 aa, unidentified
  REGION 1..85: note = Description of Unknown:cds_NZ_WFIY01000004.1_cds_WP_155863067.1_973 target sequence
SYRDVGRARVGELRTPDDLSSTLAPITKLRERAISIEEITVTVEKANKEALSNRPRPAFVEIAEDLFKMKAYPLSPAEQKPEKRT

SEQ ID NO: 26639 - protein, 85 aa, unidentified
  REGION 1..85: note = Description of Unknown:cds_NZ_WFIY01000004.1_cds_WP_155863067.1_973 target sequence
PDKNTVAKVAEVLSNSKLPVIVAGYGVITSEAHNELIELAELLDAPVITTIKGKGSFPASHQLFAGEGLGIIGTDIGNKLLAEAD

SEQ ID NO: 26640 - protein, 85 aa, unidentified
  REGION 1..85: note = Description of Unknown:cds_NZ_WFIY01000004.1_cds_WP_155863067.1_973 target sequence
SILFLGTRLTQLSTGGWSMKFKGFTMHNNIDGEDIGKVIMPHLPIVADTGLFLKELLVLLKQKIKDKIDRGIRYEILRSKKEPEL

SEQ ID NO: 26641 - protein, 85 aa, unidentified
  REGION 1..85: note = Description of Unknown:cds_NZ_WFIY01000004.1_cds_WP_155863067.1_973 target sequence
RTHSGLWPWDVVKTLTDFKFSKIFVDLSAVTFDMIRYPVDKPVWFTSESIISKGLGIAGVIQSKDKNALGVTDLPSITRNLGLLQ

SEQ ID NO: 26642 - protein, 85 aa, unidentified
  REGION 1..85: note = Description of Unknown:cds_NZ_WFIY01000004.1_cds_WP_155863067.1_973 target sequence
SKRDEAKGTLIVFNDKASTYLDTTASDAPTIKRSWSSINIDLKFLGAIDVNSTAELKEALNNNEGDNKLRIINVNIDPQYDSVVL

SEQ ID NO: 26643 - protein, 85 aa, unidentified
  REGION 1..85: note = Description of Unknown:cds_NZ_WFIY01000004.1_cds_WP_155864437.1_1566 target sequence
MMRANRIANRHKKVVSYIPSTRLEDLYDLKDVKKRLEEIAEEVKKGKTYGVILFGPPGTGKTSLSKAIANKLGWNFFQLNASDIL

SEQ ID NO: 26644 - protein, 85 aa, unidentified
  REGION 1..85: note = Description of Unknown:cds_NZ_WFIY01000004.1_cds_WP_155864437.1_1566 target sequence
SKWYGESEILLTSFLDKVESNQPAVLFIDEIDSFTMSREDDVHEVTHRLINILLNRIQEFHDKGDKILIIGTTNLPQEIDEAFLR

SEQ ID NO: 26645 - protein, 85 aa, unidentified
  REGION 1..85: note = Description of Unknown:cds_NZ_WFIY01000004.1_cds_WP_155864437.1_1566 target sequence
PGRFDEIIYVPLPDEEGREEIWKGYIKDPNINYKLLAKRSERFSPADIKLIVDEVKSKIQNPTTEDYLKFIENFKPSVKISTLIK

SEQ ID NO: 26646 - protein, 85 aa, unidentified
  REGION 1..85: note = Description of Unknown:cds_NZ_WFIY01000004.1_cds_WP_155864437.1_1566 target sequence
FENLAKKYSREKMIDKPFGVPDITWDDLGDLEKVKEIIRESVELPIKNREFAEKLGIKPVKGILLYGPPGTGKTSIAKAMANELK

SEQ ID NO: 26647 - protein, 85 aa, unidentified
  REGION 1..85: note = Description of Unknown:cds_NZ_WFIY01000004.1_cds_WP_155864437.1_1566 target sequence
ASFIILSGEEIASAQMRAPEVIAEKFNIARDNSPAVIFIDEIDMIAKNRMFNEWRNALTELLTQIDGIRETDDIILVGATNRPWD

SEQ ID NO: 26648 - protein, 85 aa, unidentified
  REGION 1..85: note = Description of Unknown:cds_NZ_WFIY01000004.1_cds_WP_155864437.1_1566 target sequence
LDPAILRPGRIDKLIYVPPPDYEGRIKVLKVLTKGLEVDEKTIDEVAKITENYTPADLKLVVDEIRRNLLKEASITNTLRIKVNI

SEQ ID NO: 26649 - protein, 84 aa, unidentified
  REGION 1..84: note = Description of Unknown:cds_NZ_WFIY01000004.1_cds_WP_155864437.1_1566 target sequence
VLTKGLEVDEKTIDEVAKITENYTPADLKLVVDEIRRNLLKEASITNTLRIKVNIDDFKNVLDKVKPSITKEELRMYESFKARF

SEQ ID NO: 26650 - protein, 85 aa, unidentified
  REGION 1..85: note = Description of Unknown:cds_NZ_WFIY01000004.1_cds_WP_155864437.1_1566 target sequence
DLKDVKKRLEEIAEEVKKGKTYGVILFGPPGTGKTSLSKAIANKLGWNFFQLNASDILSKWYGESEILLTSFLDKVESNQPAVLF

SEQ ID NO: 26651 - protein, 85 aa, unidentified
  REGION 1..85: note = Description of Unknown:cds_NZ_WFIY01000004.1_cds_WP_155864437.1_1566 target sequence
IDEIDSFTMSREDDVHEVTHRLINILLNRIQEFHDKGDKILIIGTTNLPQEIDEAFLRPGRFDEIIYVPLPDEEGREEIWKGYIK

SEQ ID NO: 26652 - protein, 85 aa, unidentified
  REGION 1..85: note = Description of Unknown:cds_NZ_WFIY01000004.1_cds_WP_155864437.1_1566 target sequence
DPNINYKLLAKRSERFSPADIKLIVDEVKSKIQNPTTEDYLKFIENFKPSVKISTLIKFENLAKKYSREKMIDKPFGVPDITWDD

SEQ ID NO: 26653 - protein, 85 aa, unidentified
  REGION 1..85: note = Description of Unknown:cds_NZ_WFIY01000004.1_cds_WP_155864437.1_1566 target sequence
LGDLEKVKEIIRESVELPIKNREFAEKLGIKPVKGILLYGPPGTGKTSIAKAMANELKASFIILSGEEIASAQMRAPEVIAEKFN

SEQ ID NO: 26654 - protein, 85 aa, unidentified
  REGION 1..85: note = Description of Unknown:cds_NZ_WFIY01000004.1_cds_WP_155864437.1_1566 target sequence
IARDNSPAVIFIDEIDMIAKNRMFNEWRNALTELLTQIDGIRETDDIILVGATNRPWDLDPAILRPGRIDKLIYVPPPDYEGRIK

SEQ ID NO: 26655 - protein, 85 aa, unidentified
  REGION 1..85: note = Description of Unknown:cds_NZ_WFIY01000004.1_cds_WP_155864437.1_1566 target sequence
VLKVLTKGLEVDEKTIDEVAKITENYTPADLKLVVDEIRRNLLKEASITNTLRIKVNIDDFKNVLDKVKPSITKEELRMYESFKA

SEQ ID NO: 26656 - protein, 85 aa, unidentified
  REGION 1..85: note = Description of Unknown:cds_NZ_WFIY01000004.1_cds_WP_155862951.1_810 target sequence
NFNKIGPIVLFILGFGLILLQYHLIYIHIFDSEYFVLIIPIIFSFIIILLRKKNIISNVLVKNNIFIIKSNNAVIIGIAFRILGK

SEQ ID NO: 26657 - protein, 85 aa, unidentified
  REGION 1..85: note = Description of Unknown:cds_NZ_WFIY01000004.1_cds_WP_155862951.1_810 target sequence
QDINNSDSNLQRELDNLVDVLSRKSDSIKYSIVTYIYNRRKSSALIMFKECKDENYTICETEVIQEYEILKKLAESIAPHITLEP

SEQ ID NO: 26658 - protein, 85 aa, unidentified
  REGION 1..85: note = Description of Unknown:cds_NZ_WFIY01000004.1_cds_WP_155862951.1_810 target sequence
IKASNETLPIPNDFGNLTYARVFEKQYEIPKSENIQVDYDIELGYVITSSLAKIPIGIRSNDVLRHIGIFGTTGSGKSNTAAIIA

SEQ ID NO: 26659 - protein, 85 aa, unidentified
  REGION 1..85: note = Description of Unknown:cds_NZ_WFIY01000004.1_cds_WP_155862951.1_810 target sequence
SQLANKGFNVIILDWHGEYIDKLKDFKIYNESNPLRLNILKLYNLEETVEIFQDVLELTDPQRYILYIILSELRKYKRFSLSALY

SEQ ID NO: 26660 - protein, 85 aa, unidentified
  REGION 1..85: note = Description of Unknown:cds_NZ_WFIY01000004.1_cds_WP_155862951.1_810 target sequence
DAVSRIKDEYTWIKDVKLALLRRMNSILYRPVRLLLISNINMEDELANNSKIIIDLSFIPDISVRRLYALFIIRAITDIYIKKKI

SEQ ID NO: 26661 - protein, 85 aa, unidentified
  REGION 1..85: note = Description of Unknown:cds_NZ_WFIY01000004.1_cds_WP_155862951.1_810 target sequence
KNKPTLIVLEEAQNYFTTSNNEMVSRLLNEIRKFGIGLCIITQSPSSVSPDVIKNTNIKIIHAIKSNIDKKIIVDSLALDPNLSN

SEQ ID NO: 26662 - protein, 84 aa, unidentified
  REGION 1..84: note = Description of Unknown:cds_NZ_WFIY01000004.1_cds_WP_155862951.1_810 target sequence
EIRKFGIGLCIITQSPSSVSPDVIKNTNIKIIHAIKSNIDKKIIVDSLALDPNLSNILDKLDIGDAIISAPNIKQPILIKIKEI

SEQ ID NO: 26663 - protein, 85 aa, unidentified
  REGION 1..85: note = Description of Unknown:cds_NZ_WFIY01000004.1_cds_WP_155862951.1_810 target sequence
HIFDSEYFVLIIPIIFSFIIILLRKKNIISNVLVKNNIFIIKSNNAVIIGIAFRILGKQDINNSDSNLQRELDNLVDVLSRKSDS

SEQ ID NO: 26664 - protein, 85 aa, unidentified
  REGION 1..85: note = Description of Unknown:cds_NZ_WFIY01000004.1_cds_WP_155862951.1_810 target sequence
IKYSIVTYIYNRRKSSALIMFKECKDENYTICETEVIQEYEILKKLAESIAPHITLEPIKASNETLPIPNDFGNLTYARVFEKQY

SEQ ID NO: 26665 - protein, 85 aa, unidentified
  REGION 1..85: note = Description of Unknown:cds_NZ_WFIY01000004.1_cds_WP_155862951.1_810 target sequence
EIPKSENIQVDYDIELGYVITSSLAKIPIGIRSNDVLRHIGIFGTTGSGKSNTAAIIASQLANKGFNVIILDWHGEYIDKLKDFK

SEQ ID NO: 26666 - protein, 85 aa, unidentified
  REGION 1..85: note = Description of Unknown:cds_NZ_WFIY01000004.1_cds_WP_155862951.1_810 target sequence
IYNESNPLRLNILKLYNLEETVEIFQDVLELTDPQRYILYIILSELRKYKRFSLSALYDAVSRIKDEYTWIKDVKLALLRRMNSI

SEQ ID NO: 26667 - protein, 85 aa, unidentified
  REGION 1..85: note = Description of Unknown:cds_NZ_WFIY01000004.1_cds_WP_155862951.1_810 target sequence
LYRPVRLLLISNINMEDELANNSKIIIDLSFIPDISVRRLYALFIIRAITDIYIKKKIKNKPTLIVLEEAQNYFTTSNNEMVSRL

SEQ ID NO: 26668 - protein, 85 aa, unidentified
  REGION 1..85: note = Description of Unknown:cds_NZ_WFIY01000004.1_cds_WP_155862951.1_810 target sequence
LNEIRKFGIGLCIITQSPSSVSPDVIKNTNIKIIHAIKSNIDKKIIVDSLALDPNLSNILDKLDIGDAIISAPNIKQPILIKIKE

SEQ ID NO: 26669 - protein, 85 aa, unidentified
  REGION 1..85: note = Description of Unknown:cds_NZ_WFIY01000004.1_cds_WP_155863107.1_1024 target sequence
VNIVLKESRLLNLLGLEEKELNDVLFNLKSEVEKRGEDELEIEINSDRLDMLSPEGIKRAVDGILGRKLGEAKYEVVPTNYQLII

SEQ ID NO: 26670 - protein, 85 aa, unidentified
  REGION 1..85: note = Description of Unknown:cds_NZ_WFIY01000004.1_cds_WP_155863107.1_1024 target sequence
DDVESRPYALAAVVYDVKLDDDRIKELIQFQEKLHCTIGRKRKKVAIGIHDLDKIDGKVIRYSKVPLDYRFIPLNSDKEMSISAV

SEQ ID NO: 26671 - protein, 85 aa, unidentified
  REGION 1..85: note = Description of Unknown:cds_NZ_WFIY01000004.1_cds_WP_155863107.1_1024 target sequence
ISSTEQGKLYGNISIKDNYSPAILQEDGQVLSIPPVINSNKTKIDSSTKNLFIDVTGTNFDAVAQTLDLLVSNFAEGGSKIGTVK

SEQ ID NO: 26672 - protein, 85 aa, unidentified
  REGION 1..85: note = Description of Unknown:cds_NZ_WFIY01000004.1_cds_WP_155863107.1_1024 target sequence
VSRYASSSPLLIHNKLVVKTSDINKRLGLSLSTEEIAKYVRMMRMDANINGDEVEVIVPQYRIDIMTYVDVAEDVAMAYGYKSFS

SEQ ID NO: 26673 - protein, 85 aa, unidentified
  REGION 1..85: note = Description of Unknown:cds_NZ_WFIY01000004.1_cds_WP_155863107.1_1024 target sequence
LPQYTSKGIGELLPITRLERAFRDLAIGGGFQEIFTFVLNKSSYLLYNDFVKIQNPITVEYDAVRNSLIWNMLKFLAKNQHARFP

SEQ ID NO: 26674 - protein, 85 aa, unidentified
  REGION 1..85: note = Description of Unknown:cds_NZ_WFIY01000004.1_cds_WP_155863107.1_1024 target sequence
IKVFEVGDVVVKSEESDTGYKNDARACLAIMNSRVSYEELQSVVHQILYNLKGKEPRYARQDKDYFIKGRSAKIMFDNNVVGEIG

SEQ ID NO: 26675 - protein, 84 aa, unidentified
  REGION 1..84: note = Description of Unknown:cds_NZ_WFIY01000004.1_cds_WP_155863107.1_1024 target sequence
IMNSRVSYEELQSVVHQILYNLKGKEPRYARQDKDYFIKGRSAKIMFDNNVVGEIGEISPQVLEKFNIENPVVIAEIYLEKLCE

SEQ ID NO: 26676 - protein, 85 aa, unidentified
  REGION 1..85: note = Description of Unknown:cds_NZ_WFIY01000004.1_cds_WP_155863107.1_1024 target sequence
LKSEVEKRGEDELEIEINSDRLDMLSPEGIKRAVDGILGRKLGEAKYEVVPTNYQLIIDDVESRPYALAAVVYDVKLDDDRIKEL

SEQ ID NO: 26677 - protein, 85 aa, unidentified
  REGION 1..85: note = Description of Unknown:cds_NZ_WFIY01000004.1_cds_WP_155863107.1_1024 target sequence
IQFQEKLHCTIGRKRKKVAIGIHDLDKIDGKVIRYSKVPLDYRFIPLNSDKEMSISAVISSTEQGKLYGNISIKDNYSPAILQED

SEQ ID NO: 26678 - protein, 85 aa, unidentified
  REGION 1..85: note = Description of Unknown:cds_NZ_WFIY01000004.1_cds_WP_155863107.1_1024 target sequence
GQVLSIPPVINSNKTKIDSSTKNLFIDVTGTNFDAVAQTLDLLVSNFAEGGSKIGTVKVSRYASSSPLLIHNKLVVKTSDINKRL

SEQ ID NO: 26679 - protein, 85 aa, unidentified
  REGION 1..85: note = Description of Unknown:cds_NZ_WFIY01000004.1_cds_WP_155863107.1_1024 target sequence
GLSLSTEEIAKYVRMMRMDANINGDEVEVIVPQYRIDIMTYVDVAEDVAMAYGYKSFSLPQYTSKGIGELLPITRLERAFRDLAI

SEQ ID NO: 26680 - protein, 85 aa, unidentified
  REGION 1..85: note = Description of Unknown:cds_NZ_WFIY01000004.1_cds_WP_155863107.1_1024 target sequence
GGGFQEIFTFVLNKSSYLLYNDFVKIQNPITVEYDAVRNSLIWNMLKFLAKNQHARFPIKVFEVGDVVVKSEESDTGYKNDARAC

SEQ ID NO: 26681 - protein, 85 aa, unidentified
  REGION 1..85: note = Description of Unknown:cds_NZ_WFIY01000004.1_cds_WP_155863107.1_1024 target sequence
LAIMNSRVSYEELQSVVHQILYNLKGKEPRYARQDKDYFIKGRSAKIMFDNNVVGEIGEISPQVLEKFNIENPVVIAEIYLEKLC

SEQ ID NO: 26682 - protein, 85 aa, unidentified
  REGION 1..85: note = Description of Unknown:cds_NZ_WFIY01000004.1_cds_WP_155863754.1_1627 target sequence
LAEGKTIGIVLQKSEASSIQGLLTPEYEVSPGQLFLIKDNNKLSLARLENYEYINEFYDEKIPIVKNILSENTSFDLLNMNTVIK

SEQ ID NO: 26683 - protein, 85 aa, unidentified
  REGION 1..85: note = Description of Unknown:cds_NZ_WFIY01000004.1_cds_WP_155863754.1_1627 target sequence
AEMSIIKRYGHNSSPMPGSLIKTLPEEKDESFLSEFYGVKNAADYVKYGRLAGSDIPLLLDLNAVTMHVGIFGETGSGKSYNMRY

SEQ ID NO: 26684 - protein, 85 aa, unidentified
  REGION 1..85: note = Description of Unknown:cds_NZ_WFIY01000004.1_cds_WP_155863754.1_1627 target sequence
LIYLFSNLKIMGKNTALPMIIIDANGDYVDFSNINIDLVSGGRKWIKKYVIRDPKSDTETRLTIDLSLFTPKDLADFIISLKYGG

SEQ ID NO: 26685 - protein, 85 aa, unidentified
  REGION 1..85: note = Description of Unknown:cds_NZ_WFIY01000004.1_cds_WP_155863754.1_1627 target sequence
NEINSLQSNLLDYIISQHDQKEYNNLLGKEEGISLIQQEISSNQNLKELGFSSSTARAVISALEIFKDRIVKRYKLISNSSSINE

SEQ ID NO: 26686 - protein, 85 aa, unidentified
  REGION 1..85: note = Description of Unknown:cds_NZ_WFIY01000004.1_cds_WP_155863754.1_1627 target sequence
QILDVIWKEKGLAIIDFSADGSPGVDIPTKQLIVSYISRLLLNYLTKAKYSGSQRLIAFVIEEAQNYIPSNDYPISANITKESLV

SEQ ID NO: 26687 - protein, 85 aa, unidentified
  REGION 1..85: note = Description of Unknown:cds_NZ_WFIY01000004.1_cds_WP_155863754.1_1627 target sequence
TLATQGRKFGVSLFLVSQRPAFVDKYVLSMLNTFFFHRIYHEDLKYVMSASGGLPESLAKGLTSLDTGYVIVSGLMSALKVPALV

SEQ ID NO: 26688 - protein, 84 aa, unidentified
  REGION 1..84: note = Description of Unknown:cds_NZ_WFIY01000004.1_cds_WP_155863754.1_1627 target sequence
MLNTFFFHRIYHEDLKYVMSASGGLPESLAKGLTSLDTGYVIVSGLMSALKVPALVRIPWDPRLGSYAGSVERIDRVLIEDSSK

SEQ ID NO: 26689 - protein, 85 aa, unidentified
  REGION 1..85: note = Description of Unknown:cds_NZ_WFIY01000004.1_cds_WP_155863754.1_1627 target sequence
EVSPGQLFLIKDNNKLSLARLENYEYINEFYDEKIPIVKNILSENTSFDLLNMNTVIKAEMSIIKRYGHNSSPMPGSLIKTLPEE

SEQ ID NO: 26690 - protein, 85 aa, unidentified
  REGION 1..85: note = Description of Unknown:cds_NZ_WFIY01000004.1_cds_WP_155863754.1_1627 target sequence
KDESFLSEFYGVKNAADYVKYGRLAGSDIPLLLDLNAVTMHVGIFGETGSGKSYNMRYLIYLFSNLKIMGKNTALPMIIIDANGD

SEQ ID NO: 26691 - protein, 85 aa, unidentified
  REGION 1..85: note = Description of Unknown:cds_NZ_WFIY01000004.1_cds_WP_155863754.1_1627 target sequence
YVDFSNINIDLVSGGRKWIKKYVIRDPKSDTETRLTIDLSLFTPKDLADFIISLKYGGNEINSLQSNLLDYIISQHDQKEYNNLL

SEQ ID NO: 26692 - protein, 85 aa, unidentified
  REGION 1..85: note = Description of Unknown:cds_NZ_WFIY01000004.1_cds_WP_155863754.1_1627 target sequence
GKEEGISLIQQEISSNQNLKELGFSSSTARAVISALEIFKDRIVKRYKLISNSSSINEQILDVIWKEKGLAIIDFSADGSPGVDI

SEQ ID NO: 26693 - protein, 85 aa, unidentified
  REGION 1..85: note = Description of Unknown:cds_NZ_WFIY01000004.1_cds_WP_155863754.1_1627 target sequence
PTKQLIVSYISRLLLNYLTKAKYSGSQRLIAFVIEEAQNYIPSNDYPISANITKESLVTLATQGRKFGVSLFLVSQRPAFVDKYV

SEQ ID NO: 26694 - protein, 85 aa, unidentified
  REGION 1..85: note = Description of Unknown:cds_NZ_WFIY01000004.1_cds_WP_155863754.1_1627 target sequence
LSMLNTFFFHRIYHEDLKYVMSASGGLPESLAKGLTSLDTGYVIVSGLMSALKVPALVRIPWDPRLGSYAGSVERIDRVLIEDSS

SEQ ID NO: 26695 - protein, 85 aa, unidentified
  REGION 1..85: note = Description of Unknown:cds_NC_025348.1_cds_YP_009094065.1_5 target sequence
APCVLFLSSLLLISTISPSHGINQPALRRIGAIVSSVKQLKFYSKTKPNYIIVKLLPTINLSKSNCNLTSINRYKESVIEIIKPL

SEQ ID NO: 26696 - protein, 85 aa, unidentified
  REGION 1..85: note = Description of Unknown:cds_NC_025348.1_cds_YP_009094065.1_5 target sequence
ADNIDNLNQKLLPKNRRKRMAGVAIGLAALGVAAAAQATAAVALVEARKNTQMIQSLADSIQDTNAAVQAVNIGLQNSAVAIQAI

SEQ ID NO: 26697 - protein, 85 aa, unidentified
  REGION 1..85: note = Description of Unknown:cds_NC_025348.1_cds_YP_009094065.1_5 target sequence
QNQINNVINPALDRLNCEVLDAQIASILNLYLIKSVTIFQNQLTNPALQQLSIQMLSIVMQDTAKILGNFTIGDKFDQHDLLGSG

SEQ ID NO: 26698 - protein, 85 aa, unidentified
  REGION 1..85: note = Description of Unknown:cds_NC_025348.1_cds_YP_009094065.1_5 target sequence
LITGQVVGVNLTNLQLIIAAFIPSIAPLPQAYIIDLISITISVNDTEAVIQIPERIMEHGSSIYQFGGKQCVYGQFSAYCPFSDA

SEQ ID NO: 26699 - protein, 85 aa, unidentified
  REGION 1..85: note = Description of Unknown:cds_NC_025348.1_cds_YP_009094065.1_5 target sequence
VLMTQDLQLCMKGNIEHCIFSSVLGSFPNRFASVDGVFYANCKYMSCACSDPLQVIHQDDSVNLMVIDSSVCRSLTLGHVTFPII

SEQ ID NO: 26700 - protein, 85 aa, unidentified
  REGION 1..85: note = Description of Unknown:cds_NC_025348.1_cds_YP_009094065.1_5 target sequence
AFSNVSYQMKTNISIEQMIVTSPLDLSTELKQINNSVNIANTFLDSSNRALKTSIFGTSSQIILIVLLIFTCLLILYVIFLTYII

SEQ ID NO: 26701 - protein, 84 aa, unidentified
  REGION 1..84: note = Description of Unknown:cds_NC_025348.1_cds_YP_009094065.1_5 target sequence
LKQINNSVNIANTFLDSSNRALKTSIFGTSSQIILIVLLIFTCLLILYVIFLTYIIKILIKEVKRLRDGNSRTGSKLSFINPDV

SEQ ID NO: 26702 - protein, 85 aa, unidentified
  REGION 1..85: note = Description of Unknown:cds_NC_025348.1_cds_YP_009094065.1_5 target sequence
RRIGAIVSSVKQLKFYSKTKPNYIIVKLLPTINLSKSNCNLTSINRYKESVIEIIKPLADNIDNLNQKLLPKNRRKRMAGVAIGL

SEQ ID NO: 26703 - protein, 85 aa, unidentified
  REGION 1..85: note = Description of Unknown:cds_NC_025348.1_cds_YP_009094065.1_5 target sequence
AALGVAAAAQATAAVALVEARKNTQMIQSLADSIQDTNAAVQAVNIGLQNSAVAIQAIQNQINNVINPALDRLNCEVLDAQIASI

SEQ ID NO: 26704 - protein, 85 aa, unidentified
  REGION 1..85: note = Description of Unknown:cds_NC_025348.1_cds_YP_009094065.1_5 target sequence
LNLYLIKSVTIFQNQLTNPALQQLSIQMLSIVMQDTAKILGNFTIGDKFDQHDLLGSGLITGQVVGVNLTNLQLIIAAFIPSIAP

SEQ ID NO: 26705 - protein, 85 aa, unidentified
  REGION 1..85: note = Description of Unknown:cds_NC_025348.1_cds_YP_009094065.1_5 target sequence
LPQAYIIDLISITISVNDTEAVIQIPERIMEHGSSIYQFGGKQCVYGQFSAYCPFSDAVLMTQDLQLCMKGNIEHCIFSSVLGSF

SEQ ID NO: 26706 - protein, 85 aa, unidentified
  REGION 1..85: note = Description of Unknown:cds_NC_025348.1_cds_YP_009094065.1_5 target sequence
PNRFASVDGVFYANCKYMSCACSDPLQVIHQDDSVNLMVIDSSVCRSLTLGHVTFPIIAFSNVSYQMKTNISIEQMIVTSPLDLS

SEQ ID NO: 26707 - protein, 85 aa, unidentified
  REGION 1..85: note = Description of Unknown:cds_NC_025348.1_cds_YP_009094065.1_5 target sequence
TELKQINNSVNIANTFLDSSNRALKTSIFGTSSQIILIVLLIFTCLLILYVIFLTYIIKILIKEVKRLRDGNSRTGSKLSFINPD

SEQ ID NO: 26708 - protein, 85 aa, unidentified
  REGION 1..85: note = Description of Unknown:cds_NZ_WFIY01000004.1_cds_WP_155863933.1_1849 target sequence
RAILPEDSLLSAQEAISLFISKVPPERKIKEIEITDALNKISAEDVYSPIDLPPFSRSTVDGFAVKSSSTPGKFKIIGKINIGEY

SEQ ID NO: 26709 - protein, 85 aa, unidentified
  REGION 1..85: note = Description of Unknown:cds_NZ_WFIY01000004.1_cds_WP_155863933.1_1849 target sequence
KEIEISDNEAVEVDTGAMIPKGADAVIKIEETRIEGEYVEITKKLNFGTNIAWIGSDVPRGTQILYKGEKITPEKIAFLASAGIS

SEQ ID NO: 26710 - protein, 85 aa, unidentified
  REGION 1..85: note = Description of Unknown:cds_NZ_WFIY01000004.1_cds_WP_155863933.1_1849 target sequence
KVKVYEAPSVYVISTGDELVEPGKELKPGKIYESNLHFLISRLKNDGYNVVGHKLVGDNKDKIEEAIEEASKIADVIIITGGTSA

SEQ ID NO: 26711 - protein, 85 aa, unidentified
  REGION 1..85: note = Description of Unknown:cds_NZ_WFIY01000004.1_cds_WP_155863933.1_1849 target sequence
GEKDLVHQIIREKGEIIVHGLKFKPGKPTLLGKFNGKPVFGLPGNIVSTIMIYDRVIKNYLLLMKGEENITEETEYAQLLLPVKA

SEQ ID NO: 26712 - protein, 85 aa, unidentified
  REGION 1..85: note = Description of Unknown:cds_NZ_WFIY01000004.1_cds_WP_155863933.1_1849 target sequence
DKKRFTYIPVYLVQGFAIPIPFDSYMVGSFSLADGFIGLEPGIELKEGDKVEVIIKRKDMRITLIGEEDKRFDNLNVRKIYLGSQ

SEQ ID NO: 26713 - protein, 85 aa, unidentified
  REGION 1..85: note = Description of Unknown:cds_NZ_WFIY01000004.1_cds_WP_155863933.1_1849 target sequence
VSCKALEKGIGDIVVVSSLFCTPNNYDYSIERRILEQGDGDEIGYFDWLGLSKFNRNPSVKLKSPSTVLNFLGKAKVFAPEGYLK

SEQ ID NO: 26714 - protein, 84 aa, unidentified
  REGION 1..84: note = Description of Unknown:cds_NZ_WFIY01000004.1_cds_WP_155863933.1_1849 target sequence
SIERRILEQGDGDEIGYFDWLGLSKFNRNPSVKLKSPSTVLNFLGKAKVFAPEGYLKEGKELGKEKLFIIVRNKEAFKFLNGIF

SEQ ID NO: 26715 - protein, 85 aa, unidentified
  REGION 1..85: note = Description of Unknown:cds_NZ_WFIY01000004.1_cds_WP_155863933.1_1849 target sequence
KIKEIEITDALNKISAEDVYSPIDLPPFSRSTVDGFAVKSSSTPGKFKIIGKINIGEYKEIEISDNEAVEVDTGAMIPKGADAVI

SEQ ID NO: 26716 - protein, 85 aa, unidentified
  REGION 1..85: note = Description of Unknown:cds_NZ_WFIY01000004.1_cds_WP_155863933.1_1849 target sequence
KIEETRIEGEYVEITKKLNFGTNIAWIGSDVPRGTQILYKGEKITPEKIAFLASAGISKVKVYEAPSVYVISTGDELVEPGKELK

SEQ ID NO: 26717 - protein, 85 aa, unidentified
  REGION 1..85: note = Description of Unknown:cds_NZ_WFIY01000004.1_cds_WP_155863933.1_1849 target sequence
PGKIYESNLHFLISRLKNDGYNVVGHKLVGDNKDKIEEAIEEASKIADVIIITGGTSAGEKDLVHQIIREKGEIIVHGLKFKPGK

SEQ ID NO: 26718 - protein, 85 aa, unidentified
  REGION 1..85: note = Description of Unknown:cds_NZ_WFIY01000004.1_cds_WP_155863933.1_1849 target sequence
PTLLGKFNGKPVFGLPGNIVSTIMIYDRVIKNYLLLMKGEENITEETEYAQLLLPVKADKKRFTYIPVYLVQGFAIPIPFDSYMV

SEQ ID NO: 26719 - protein, 85 aa, unidentified
  REGION 1..85: note = Description of Unknown:cds_NZ_WFIY01000004.1_cds_WP_155863933.1_1849 target sequence
GSFSLADGFIGLEPGIELKEGDKVEVIIKRKDMRITLIGEEDKRFDNLNVRKIYLGSQVSCKALEKGIGDIVVVSSLFCTPNNYD

SEQ ID NO: 26720 - protein, 85 aa, unidentified
  REGION 1..85: note = Description of Unknown:cds_NZ_WFIY01000004.1_cds_WP_155863933.1_1849 target sequence
YSIERRILEQGDGDEIGYFDWLGLSKFNRNPSVKLKSPSTVLNFLGKAKVFAPEGYLKEGKELGKEKLFIIVRNKEAFKFLNGIF

SEQ ID NO: 26721 - protein, 85 aa, unidentified
  REGION 1..85: note = Description of Unknown:cds_NC_039198.1_cds_YP_009512976.1_5 target sequence
NLLKVHLLLMLYPSCICGINKDKLLSIGLVHKSVKNLMFYSQGSPSYIVVKLVPTLGNLPENCTLNSLKRYKSTVTSLLTPLSDN

SEQ ID NO: 26722 - protein, 85 aa, unidentified
  REGION 1..85: note = Description of Unknown:cds_NC_039198.1_cds_YP_009512976.1_5 target sequence
LNYLQQTLTVSKGSRRRRFAGVAIGLAALGVAAAAQATAAVALVEARQNAAQIQSLSESIQNTNLAVNELKTAIGASAVAIQAIQ

SEQ ID NO: 26723 - protein, 85 aa, unidentified
  REGION 1..85: note = Description of Unknown:cds_NC_039198.1_cds_YP_009512976.1_5 target sequence
TQVNDVINPAINRLSCEVLDAQLASMLNLYLIHLTTVFQNQITNPALSPLSIQSLQSLLQSTSGILTNMTAGSNLVLNDALATGL

SEQ ID NO: 26724 - protein, 85 aa, unidentified
  REGION 1..85: note = Description of Unknown:cds_NC_039198.1_cds_YP_009512976.1_5 target sequence
ITGQVVGMNLTSLQIVIAAYVPNVAKLTNAIVHQFIRITTSVNGTEVIVQSPTQIMEQNEVMYELRSDHCSESVMNIYCPYIDAQ

SEQ ID NO: 26725 - protein, 85 aa, unidentified
  REGION 1..85: note = Description of Unknown:cds_NC_039198.1_cds_YP_009512976.1_5 target sequence
LMPPTSTNCINGQLNDCTFSKVVGSFPTRFAAVEGAILANCKYLQCNCLVPPYIITPLKGEMISMINLSKCQRLDLGTVVFEINN

SEQ ID NO: 26726 - protein, 85 aa, unidentified
  REGION 1..85: note = Description of Unknown:cds_NC_039198.1_cds_YP_009512976.1_5 target sequence
PVNVTFNGNYRADVGQLIVTNPLDISAELNQINTSLSNAQTFLSKSDAWLRVSQWLSNSGTIFIILLIGLGIGVIYMVINTYVVV

SEQ ID NO: 26727 - protein, 84 aa, unidentified
  REGION 1..84: note = Description of Unknown:cds_NC_039198.1_cds_YP_009512976.1_5 target sequence
LNQINTSLSNAQTFLSKSDAWLRVSQWLSNSGTIFIILLIGLGIGVIYMVINTYVVVQIIKEINRIRDKDRAHLLKGSVSSISM

SEQ ID NO: 26728 - protein, 85 aa, unidentified
  REGION 1..85: note = Description of Unknown:cds_NC_039198.1_cds_YP_009512976.1_5 target sequence
GLVHKSVKNLMFYSQGSPSYIVVKLVPTLGNLPENCTLNSLKRYKSTVTSLLTPLSDNLNYLQQTLTVSKGSRRRRFAGVAIGLA

SEQ ID NO: 26729 - protein, 85 aa, unidentified
  REGION 1..85: note = Description of Unknown:cds_NC_039198.1_cds_YP_009512976.1_5 target sequence
ALGVAAAAQATAAVALVEARQNAAQIQSLSESIQNTNLAVNELKTAIGASAVAIQAIQTQVNDVINPAINRLSCEVLDAQLASML

SEQ ID NO: 26730 - protein, 85 aa, unidentified
  REGION 1..85: note = Description of Unknown:cds_NC_039198.1_cds_YP_009512976.1_5 target sequence
NLYLIHLTTVFQNQITNPALSPLSIQSLQSLLQSTSGILTNMTAGSNLVLNDALATGLITGQVVGMNLTSLQIVIAAYVPNVAKL

SEQ ID NO: 26731 - protein, 85 aa, unidentified
  REGION 1..85: note = Description of Unknown:cds_NC_039198.1_cds_YP_009512976.1_5 target sequence
TNAIVHQFIRITTSVNGTEVIVQSPTQIMEQNEVMYELRSDHCSESVMNIYCPYIDAQLMPPTSTNCINGQLNDCTFSKVVGSFP

SEQ ID NO: 26732 - protein, 85 aa, unidentified
  REGION 1..85: note = Description of Unknown:cds_NC_039198.1_cds_YP_009512976.1_5 target sequence
TRFAAVEGAILANCKYLQCNCLVPPYIITPLKGEMISMINLSKCQRLDLGTVVFEINNPVNVTFNGNYRADVGQLIVTNPLDISA

SEQ ID NO: 26733 - protein, 85 aa, unidentified
  REGION 1..85: note = Description of Unknown:cds_NC_039198.1_cds_YP_009512976.1_5 target sequence
ELNQINTSLSNAQTFLSKSDAWLRVSQWLSNSGTIFIILLIGLGIGVIYMVINTYVVVQIIKEINRIRDKDRAHLLKGSVSSISM

SEQ ID NO: 26734 - protein, 85 aa, unidentified
  REGION 1..85: note = Description of Unknown:cds_NC_004074.1_cds_NP_665869.1_6 target sequence
RIALTAVIVSIHFDLAFPMNKNSLLSVGLVHKSVKNLYFYSQGSPSYIVVKLVPTLGNVPGNCTLNSLVRYKSTVSSLLSPLAEN

SEQ ID NO: 26735 - protein, 85 aa, unidentified
  REGION 1..85: note = Description of Unknown:cds_NC_004074.1_cds_NP_665869.1_6 target sequence
LEYLQKTLTVSRGGRRRRFAGVAIGLAALGVAAAAQATAAVALVEARQNAAQIQSLSEAIQNTNLAVNELKTAIGASATAIQAIQ

SEQ ID NO: 26736 - protein, 85 aa, unidentified
  REGION 1..85: note = Description of Unknown:cds_NC_004074.1_cds_NP_665869.1_6 target sequence
TQINEVINPAINRLSCEILDAQLASMLNLYLIHLTTVFQNQLTNPALTPLSIQSLQSLLQGTSSVLTNITSSSKLALNDALVTGL

SEQ ID NO: 26737 - protein, 85 aa, unidentified
  REGION 1..85: note = Description of Unknown:cds_NC_004074.1_cds_NP_665869.1_6 target sequence
ITGQVVGLNMTSLQIVIAAYVPSVAKLSNAVVHNFIRITTSVNGTEVIIQSPTIIMEQNEVMYDLKTGHCTESDLNIYCPYVDAQ

SEQ ID NO: 26738 - protein, 85 aa, unidentified
  REGION 1..85: note = Description of Unknown:cds_NC_004074.1_cds_NP_665869.1_6 target sequence
LLSPGMTNCINGRLNDCTFSKVVGSFPTRFAAVEGAILANCKYLQCNCLTPPYIITPLNGEMISMIDLSKCQRLDLGTIVFDINN

SEQ ID NO: 26739 - protein, 85 aa, unidentified
  REGION 1..85: note = Description of Unknown:cds_NC_004074.1_cds_NP_665869.1_6 target sequence
PVNVTFNGNYRADVGQMIVTNPLDISAELNQINTSLSNAQGFLSKSDAWLHVSQWVTNSGTIFIILIIGLIVGIVYMIINTYVVV

SEQ ID NO: 26740 - protein, 84 aa, unidentified
  REGION 1..84: note = Description of Unknown:cds_NC_004074.1_cds_NP_665869.1_6 target sequence
LNQINTSLSNAQGFLSKSDAWLHVSQWVTNSGTIFIILIIGLIVGIVYMIINTYVVVQIIKEINRMRTSDRAHLLKGSISSIST

SEQ ID NO: 26741 - protein, 85 aa, unidentified
  REGION 1..85: note = Description of Unknown:cds_NC_004074.1_cds_NP_665869.1_6 target sequence
GLVHKSVKNLYFYSQGSPSYIVVKLVPTLGNVPGNCTLNSLVRYKSTVSSLLSPLAENLEYLQKTLTVSRGGRRRRFAGVAIGLA

SEQ ID NO: 26742 - protein, 85 aa, unidentified
  REGION 1..85: note = Description of Unknown:cds_NC_004074.1_cds_NP_665869.1_6 target sequence
ALGVAAAAQATAAVALVEARQNAAQIQSLSEAIQNTNLAVNELKTAIGASATAIQAIQTQINEVINPAINRLSCEILDAQLASML

SEQ ID NO: 26743 - protein, 85 aa, unidentified
  REGION 1..85: note = Description of Unknown:cds_NC_004074.1_cds_NP_665869.1_6 target sequence
NLYLIHLTTVFQNQLTNPALTPLSIQSLQSLLQGTSSVLTNITSSSKLALNDALVTGLITGQVVGLNMTSLQIVIAAYVPSVAKL

SEQ ID NO: 26744 - protein, 85 aa, unidentified
  REGION 1..85: note = Description of Unknown:cds_NC_004074.1_cds_NP_665869.1_6 target sequence
SNAVVHNFIRITTSVNGTEVIIQSPTIIMEQNEVMYDLKTGHCTESDLNIYCPYVDAQLLSPGMTNCINGRLNDCTFSKVVGSFP

SEQ ID NO: 26745 - protein, 85 aa, unidentified
  REGION 1..85: note = Description of Unknown:cds_NC_004074.1_cds_NP_665869.1_6 target sequence
TRFAAVEGAILANCKYLQCNCLTPPYIITPLNGEMISMIDLSKCQRLDLGTIVFDINNPVNVTFNGNYRADVGQMIVTNPLDISA

SEQ ID NO: 26746 - protein, 85 aa, unidentified
  REGION 1..85: note = Description of Unknown:cds_NC_004074.1_cds_NP_665869.1_6 target sequence
ELNQINTSLSNAQGFLSKSDAWLHVSQWVTNSGTIFIILIIGLIVGIVYMIINTYVVVQIIKEINRMRTSDRAHLLKGSISSIST

SEQ ID NO: 26747 - protein, 85 aa, unidentified
  REGION 1..85: note = Description of Unknown:hvTR_P0DOQ3.1 target sequence
NTILRYAPEITKDCIFINYDDQNFRNKFFTNIKTINSKSRICVIIDECHNFISKSLIKEDGKIRPTRSVYNFLSKTIALKNHKMI

SEQ ID NO: 26748 - protein, 85 aa, unidentified
  REGION 1..85: note = Description of Unknown:hvTR_P0DOQ3.1 target sequence
CLSATPIVNSVQEFTMLVNLLRPGSLQHQSLFENKRLVNEKELVSKLGGLCSYIVNNEFSIFDDVEGSASFAKKTVLMRYVNMSK

SEQ ID NO: 26749 - protein, 85 aa, unidentified
  REGION 1..85: note = Description of Unknown:hvTR_P0DOQ3.1 target sequence
KQEEIYQKAKLTEIKTGISSFRILRRMATTFTFDSFPERQNRDPGEYAQEIATLYNDFKRSLRDREFSKSALDTFKKGELLGGDA

SEQ ID NO: 26750 - protein, 85 aa, unidentified
  REGION 1..85: note = Description of Unknown:hvTR_P0DOQ3.1 target sequence
SAADISLFTELKEKSAKFIDVCLGILASHGKCLVFEPFVNQSGIEILLLYFKVFGISNIEFSSRTKDTRIKAVAEFNQESNTNGE

SEQ ID NO: 26751 - protein, 85 aa, unidentified
  REGION 1..85: note = Description of Unknown:hvTR_P0DOQ3.1 target sequence
CIKTCVFSSSGGEGISFFSINDIFILDMTWNEASLRQIVGRAIRLNSHVLTPPERRYVNVHFIMARLSNGMPTVDEDLFEIIQSK

SEQ ID NO: 26752 - protein, 85 aa, unidentified
  REGION 1..85: note = Description of Unknown:hvTR_P0DOQ3.1 target sequence
SKEFVQLFRVFKHTSLEWIHANEKDFSPIDNESGWKTLVSRAIDLSSKKNITNKLIEGTNIWYSNSNRLMSINRGFKGVDGRVYD

SEQ ID NO: 26753 - protein, 85 aa, unidentified
  REGION 1..85: note = Description of Unknown:hvTR_P0DOQ3.1 target sequence
FFTNIKTINSKSRICVIIDECHNFISKSLIKEDGKIRPTRSVYNFLSKTIALKNHKMICLSATPIVNSVQEFTMLVNLLRPGSLQ

SEQ ID NO: 26754 - protein, 85 aa, unidentified
  REGION 1..85: note = Description of Unknown:hvTR_P0DOQ3.1 target sequence
HQSLFENKRLVNEKELVSKLGGLCSYIVNNEFSIFDDVEGSASFAKKTVLMRYVNMSKKQEEIYQKAKLTEIKTGISSFRILRRM

SEQ ID NO: 26755 - protein, 85 aa, unidentified
  REGION 1..85: note = Description of Unknown:hvTR_P0DOQ3.1 target sequence
ATTFTFDSFPERQNRDPGEYAQEIATLYNDFKRSLRDREFSKSALDTFKKGELLGGDASAADISLFTELKEKSAKFIDVCLGILA

SEQ ID NO: 26756 - protein, 85 aa, unidentified
  REGION 1..85: note = Description of Unknown:hvTR_P0DOQ3.1 target sequence
SHGKCLVFEPFVNQSGIEILLLYFKVFGISNIEFSSRTKDTRIKAVAEFNQESNTNGECIKTCVFSSSGGEGISFFSINDIFILD

SEQ ID NO: 26757 - protein, 85 aa, unidentified
  REGION 1..85: note = Description of Unknown:hvTR_P0DOQ3.1 target sequence
MTWNEASLRQIVGRAIRLNSHVLTPPERRYVNVHFIMARLSNGMPTVDEDLFEIIQSKSKEFVQLFRVFKHTSLEWIHANEKDFS

SEQ ID NO: 26758 - protein, 85 aa, unidentified
  REGION 1..85: note = Description of Unknown:cds_NZ_WFIY01000004.1_cds_WP_155863747.1_1618 target sequence
STKSNPLVTLINAVFQLDKDWVSRVSMAMIVMSLIWGILGIIDALMARIQEMVWGLSQTLVFTSQEYYGGITLHGVRDLFGFAVQ

SEQ ID NO: 26759 - protein, 85 aa, unidentified
  REGION 1..85: note = Description of Unknown:cds_NZ_WFIY01000004.1_cds_WP_155863747.1_1618 target sequence
LEVAIFIFLSYKILNFQPRAKWFLNIGFILFNIAFMLIEGPIVAFPTFNDNYFGATGWYYLNPLGIPNYSEYVISPLWFLGYELM

SEQ ID NO: 26760 - protein, 85 aa, unidentified
  REGION 1..85: note = Description of Unknown:cds_NZ_WFIY01000004.1_cds_WP_155863747.1_1618 target sequence
DIGVYIYVIWLIYHYYLVSRNMKEKLPIFAVFALMTSLMIAIGWSGETAANTWDILAYYGLVGLDPIANQIAFWILGHSIVYIVW

SEQ ID NO: 26761 - protein, 85 aa, unidentified
  REGION 1..85: note = Description of Unknown:cds_NZ_WFIY01000004.1_cds_WP_155863747.1_1618 target sequence
MPAVASMYYLIPLLAGKPLYSDKMGRIAALLYLIFSNNVPIHHLYMVDLPVSVKIMQEVLTYAVVVPSMMTFFNLWATVKGAQFK

SEQ ID NO: 26762 - protein, 85 aa, unidentified
  REGION 1..85: note = Description of Unknown:cds_NZ_WFIY01000004.1_cds_WP_155863747.1_1618 target sequence
PNLISVWISISFAGAIAAGVTGIANANISFDSIIHNSMWVPGHFHAMIFWSIVPAGFATLYYMIPMLTGRMWYSTKLGWIHMVGY

SEQ ID NO: 26763 - protein, 85 aa, unidentified
  REGION 1..85: note = Description of Unknown:cds_NZ_WFIY01000004.1_cds_WP_155863747.1_1618 target sequence
MIGTAMIIVGFDALGLAGLIRRAEIYPLIPAYVTPEVVASVGAMIADFATLIWLGNLVITLLKGRSANVEGLSVSDTITTIAMQL

SEQ ID NO: 26764 - protein, 84 aa, unidentified
  REGION 1..84: note = Description of Unknown:cds_NZ_WFIY01000004.1_cds_WP_155863747.1_1618 target sequence
LIPAYVTPEVVASVGAMIADFATLIWLGNLVITLLKGRSANVEGLSVSDTITTIAMQLGYEGPSLNEISNKLTTAVSRIVKIKE

SEQ ID NO: 26765 - protein, 85 aa, unidentified
  REGION 1..85: note = Description of Unknown:cds_NZ_WFIY01000004.1_cds_WP_155863747.1_1618 target sequence
AMIVMSLIWGILGIIDALMARIQEMVWGLSQTLVFTSQEYYGGITLHGVRDLFGFAVQLEVAIFIFLSYKILNFQPRAKWFLNIG

SEQ ID NO: 26766 - protein, 85 aa, unidentified
  REGION 1..85: note = Description of Unknown:cds_NZ_WFIY01000004.1_cds_WP_155863747.1_1618 target sequence
FILFNIAFMLIEGPIVAFPTFNDNYFGATGWYYLNPLGIPNYSEYVISPLWFLGYELMDIGVYIYVIWLIYHYYLVSRNMKEKLP

SEQ ID NO: 26767 - protein, 85 aa, unidentified
  REGION 1..85: note = Description of Unknown:cds_NZ_WFIY01000004.1_cds_WP_155863747.1_1618 target sequence
IFAVFALMTSLMIAIGWSGETAANTWDILAYYGLVGLDPIANQIAFWILGHSIVYIVWMPAVASMYYLIPLLAGKPLYSDKMGRI

SEQ ID NO: 26768 - protein, 85 aa, unidentified
  REGION 1..85: note = Description of Unknown:cds_NZ_WFIY01000004.1_cds_WP_155863747.1_1618 target sequence
AALLYLIFSNNVPIHHLYMVDLPVSVKIMQEVLTYAVVVPSMMTFFNLWATVKGAQFKPNLISVWISISFAGAIAAGVTGIANAN

SEQ ID NO: 26769 - protein, 85 aa, unidentified
  REGION 1..85: note = Description of Unknown:cds_NZ_WFIY01000004.1_cds_WP_155863747.1_1618 target sequence
ISFDSIIHNSMWVPGHFHAMIFWSIVPAGFATLYYMIPMLTGRMWYSTKLGWIHMVGYMIGTAMIIVGFDALGLAGLIRRAEIYP

SEQ ID NO: 26770 - protein, 85 aa, unidentified
  REGION 1..85: note = Description of Unknown:cds_NZ_WFIY01000004.1_cds_WP_155864006.1_1934 target sequence
SSVSKGLINLVNAVFQLDKDWVSRISMAMIVMSLIWGILGIIDALMVRIQELSWGVSQTLVFTSQEYYAGIGLHAMRDLFGFAVQ

SEQ ID NO: 26771 - protein, 85 aa, unidentified
  REGION 1..85: note = Description of Unknown:cds_NZ_WFIY01000004.1_cds_WP_155864006.1_1934 target sequence
LEIAIFVFLSYKILNFQPRAKWFLNIGFILFNIAFMLLEGPIVAYPTFNDNYFPAESWYYLSPYGLPAYSQDVVSPLWFFGWELM

SEQ ID NO: 26772 - protein, 85 aa, unidentified
  REGION 1..85: note = Description of Unknown:cds_NZ_WFIY01000004.1_cds_WP_155864006.1_1934 target sequence
DIGVYIYVIWLIYHYYLATKTYKEKLPIFGVFALMTSLMIAIGWSGEVAANTWDILNYYGLVGLNVISNQIAFGILWHSIVYIVW

SEQ ID NO: 26773 - protein, 85 aa, unidentified
  REGION 1..85: note = Description of Unknown:cds_NZ_WFIY01000004.1_cds_WP_155864006.1_1934 target sequence
MPAVGAMYYLIPLLAGKPLYSDKMGRIAALLYLVFSNNVPIHHLYMVDLPVYLKILQEVLTYGVVVPSMMTFFNLWATVKGAQVK

SEQ ID NO: 26774 - protein, 85 aa, unidentified
  REGION 1..85: note = Description of Unknown:cds_NZ_WFIY01000004.1_cds_WP_155864006.1_1934 target sequence
MNLITAWISISFAGAIAAGVTGIANGDISFDAIIHDSMWVVGHFHAMIFWSIVPAGFATLYYMIPMLTGRMWYSTKLGWIHMVGY

SEQ ID NO: 26775 - protein, 85 aa, unidentified
  REGION 1..85: note = Description of Unknown:cds_NZ_WFIY01000004.1_cds_WP_155864006.1_1934 target sequence
MIGTAMIIVGFDALGLSGLVRKAEIYPLIPAYVTPEVVASVGAMIADFATLIWLGNLVLTLLKGKTQNFEGVSLDNAVSFIASTL

SEQ ID NO: 26776 - protein, 84 aa, unidentified
  REGION 1..84: note = Description of Unknown:cds_NZ_WFIY01000004.1_cds_WP_155864006.1_1934 target sequence
LIPAYVTPEVVASVGAMIADFATLIWLGNLVLTLLKGKTQNFEGVSLDNAVSFIASTLEAPRLDKIEVPLQSLKSALIRAFEKK

SEQ ID NO: 26777 - protein, 85 aa, unidentified
  REGION 1..85: note = Description of Unknown:cds_NZ_WFIY01000004.1_cds_WP_155864006.1_1934 target sequence
AMIVMSLIWGILGIIDALMVRIQELSWGVSQTLVFTSQEYYAGIGLHAMRDLFGFAVQLEIAIFVFLSYKILNFQPRAKWFLNIG

SEQ ID NO: 26778 - protein, 85 aa, unidentified
  REGION 1..85: note = Description of Unknown:cds_NZ_WFIY01000004.1_cds_WP_155864006.1_1934 target sequence
FILFNIAFMLLEGPIVAYPTFNDNYFPAESWYYLSPYGLPAYSQDVVSPLWFFGWELMDIGVYIYVIWLIYHYYLATKTYKEKLP

SEQ ID NO: 26779 - protein, 85 aa, unidentified
  REGION 1..85: note = Description of Unknown:cds_NZ_WFIY01000004.1_cds_WP_155864006.1_1934 target sequence
IFGVFALMTSLMIAIGWSGEVAANTWDILNYYGLVGLNVISNQIAFGILWHSIVYIVWMPAVGAMYYLIPLLAGKPLYSDKMGRI

SEQ ID NO: 26780 - protein, 85 aa, unidentified
  REGION 1..85: note = Description of Unknown:cds_NZ_WFIY01000004.1_cds_WP_155864006.1_1934 target sequence
AALLYLVFSNNVPIHHLYMVDLPVYLKILQEVLTYGVVVPSMMTFFNLWATVKGAQVKMNLITAWISISFAGAIAAGVTGIANGD

SEQ ID NO: 26781 - protein, 85 aa, unidentified
  REGION 1..85: note = Description of Unknown:cds_NZ_WFIY01000004.1_cds_WP_155864006.1_1934 target sequence
ISFDAIIHDSMWVVGHFHAMIFWSIVPAGFATLYYMIPMLTGRMWYSTKLGWIHMVGYMIGTAMIIVGFDALGLSGLVRKAEIYP

SEQ ID NO: 26782 - protein, 85 aa, unidentified
  REGION 1..85: note = Description of Unknown:cds_NC_035460.1_cds_YP_009408106.1_155 target sequence
ITNRFNLEKTYEISMMQEKGTFCDVTLIANNEKIQAHKIILSSASDYFKAMLSNNFKESSMTEITIYGIDALTLKQLIKYIYTGD

SEQ ID NO: 26783 - protein, 85 aa, unidentified
  REGION 1..85: note = Description of Unknown:cds_NC_035460.1_cds_YP_009408106.1_155 target sequence
LQISESNVEVLLMKADYLQITSVVKLCELFLLKKLSIYNCVKMYNFTKEFNRYEIAKTILQFIIENIMDVITDPMFKTLTFNDMY

SEQ ID NO: 26784 - protein, 85 aa, unidentified
  REGION 1..85: note = Description of Unknown:cds_NC_035460.1_cds_YP_009408106.1_155 target sequence
NILKSDDLNINDEDMAAIILTKWLTETSNICTKKLLNCIRIQLLSKYAIQILQQHICINENLECVKILSSSIQNIEQIPRINTLE

SEQ ID NO: 26785 - protein, 85 aa, unidentified
  REGION 1..85: note = Description of Unknown:cds_NC_035460.1_cds_YP_009408106.1_155 target sequence
SVIALGTKKFSLLKVPITSPITKKWSVESFLPVHRQKFSVAILDSNIYIAGGIVNGSPKASVLCYDTINKLWKNVTSLSSPRYCA

SEQ ID NO: 26786 - protein, 85 aa, unidentified
  REGION 1..85: note = Description of Unknown:cds_NC_035460.1_cds_YP_009408106.1_155 target sequence
SMVVYKNRLVIIGGKTNYHHFLDNVESWRPGKNSWSKLPSLNEPCCDIASVVVDNKIYNIGGLIQRKNKYNVKIRSTNVVETLTK

SEQ ID NO: 26787 - protein, 85 aa, unidentified
  REGION 1..85: note = Description of Unknown:cds_NC_035460.1_cds_YP_009408106.1_155 target sequence
YGWISCSSLPEPRSAMSIITYENYIYATGGYITGLCGSKSFFKSLIFYKYDIITNSWSVIAPAIKSAYTPSHGMEKKLFIVGGFP

SEQ ID NO: 26788 - protein, 84 aa, unidentified
  REGION 1..84: note = Description of Unknown:cds_NC_035460.1_cds_YP_009408106.1_155 target sequence
TGGYITGLCGSKSFFKSLIFYKYDIITNSWSVIAPAIKSAYTPSHGMEKKLFIVGGFPYCNYSKTVEKYNVNKNEWQNILSNFV

SEQ ID NO: 26789 - protein, 85 aa, unidentified
  REGION 1..85: note = Description of Unknown:cds_NC_035460.1_cds_YP_009408106.1_155 target sequence
IANNEKIQAHKIILSSASDYFKAMLSNNFKESSMTEITIYGIDALTLKQLIKYIYTGDLQISESNVEVLLMKADYLQITSVVKLC

SEQ ID NO: 26790 - protein, 85 aa, unidentified
  REGION 1..85: note = Description of Unknown:cds_NC_035460.1_cds_YP_009408106.1_155 target sequence
ELFLLKKLSIYNCVKMYNFTKEFNRYEIAKTILQFIIENIMDVITDPMFKTLTFNDMYNILKSDDLNINDEDMAAIILTKWLTET

SEQ ID NO: 26791 - protein, 85 aa, unidentified
  REGION 1..85: note = Description of Unknown:cds_NC_035460.1_cds_YP_009408106.1_155 target sequence
SNICTKKLLNCIRIQLLSKYAIQILQQHICINENLECVKILSSSIQNIEQIPRINTLESVIALGTKKFSLLKVPITSPITKKWSV

SEQ ID NO: 26792 - protein, 85 aa, unidentified
  REGION 1..85: note = Description of Unknown:cds_NC_035460.1_cds_YP_009408106.1_155 target sequence
ESFLPVHRQKFSVAILDSNIYIAGGIVNGSPKASVLCYDTINKLWKNVTSLSSPRYCASMVVYKNRLVIIGGKTNYHHFLDNVES

SEQ ID NO: 26793 - protein, 85 aa, unidentified
  REGION 1..85: note = Description of Unknown:cds_NC_035460.1_cds_YP_009408106.1_155 target sequence
WRPGKNSWSKLPSLNEPCCDIASVVVDNKIYNIGGLIQRKNKYNVKIRSTNVVETLTKYGWISCSSLPEPRSAMSIITYENYIYA

SEQ ID NO: 26794 - protein, 85 aa, unidentified
  REGION 1..85: note = Description of Unknown:cds_NC_009489.1_cds_YP_001249270.1_1 target sequence
SSVLSMFERFTMEQELQDRGAEGTLPPETIKSTIKVFILNSDDPRLRWKMMNFCLRLIMSDAAKISRKVGAMITLFSLPASGMQN

SEQ ID NO: 26795 - protein, 85 aa, unidentified
  REGION 1..85: note = Description of Unknown:cds_NC_009489.1_cds_YP_001249270.1_1 target sequence
HVRLADRSPDAQIERIEIEGFAPDSFKLILNERSSMTQEEINSLDFMARELPKGFQGKTVYLNVDAEGLVCDEVEQFLDRAYTVL

SEQ ID NO: 26796 - protein, 85 aa, unidentified
  REGION 1..85: note = Description of Unknown:cds_NC_009489.1_cds_YP_001249270.1_1 target sequence
LQVWILACKCMTAYDQPAASIKKRTDKYKQQGRFLATYTLQAQAQATLQNVIRQSLIVRQFMAYELQISRHQGTITNRYYALVGD

SEQ ID NO: 26797 - protein, 85 aa, unidentified
  REGION 1..85: note = Description of Unknown:cds_NC_009489.1_cds_YP_001249270.1_1 target sequence
IGKYIENAGMSAFFLTIKYALGTRWQPLALAAFSGELTKIKSLMMLYRDLGENARYLALLEAPQMMEFAPANYPLLYSYAMGIGT

SEQ ID NO: 26798 - protein, 85 aa, unidentified
  REGION 1..85: note = Description of Unknown:cds_NC_009489.1_cds_YP_001249270.1_1 target sequence
VLDAQMRNYKYGRDFLNPVFFQFGVETARKQQSAVDVKMAAELGVTTTDKEEMAQTLTRLGAARRTDASAYAATPFSGPAQQAQA

SEQ ID NO: 26799 - protein, 85 aa, unidentified
  REGION 1..85: note = Description of Unknown:cds_NC_009489.1_cds_YP_001249270.1_1 target sequence
MPAPQAIDSRDSTAQPAAPDPVPDDSFSSKYQSYLIMQEKMKDPALIDGIRANLLSDPNCPEDISASDLQGAVERYVHEVIERVR

SEQ ID NO: 26800 - protein, 84 aa, unidentified
  REGION 1..84: note = Description of Unknown:cds_NC_009489.1_cds_YP_001249270.1_1 target sequence
SSKYQSYLIMQEKMKDPALIDGIRANLLSDPNCPEDISASDLQGAVERYVHEVIERVRQQGDYTGIWPSAGATAAEDAIGDFQS

SEQ ID NO: 26801 - protein, 85 aa, unidentified
  REGION 1..85: note = Description of Unknown:cds_NC_009489.1_cds_YP_001249270.1_1 target sequence
ETIKSTIKVFILNSDDPRLRWKMMNFCLRLIMSDAAKISRKVGAMITLFSLPASGMQNHVRLADRSPDAQIERIEIEGFAPDSFK

SEQ ID NO: 26802 - protein, 85 aa, unidentified
  REGION 1..85: note = Description of Unknown:cds_NC_009489.1_cds_YP_001249270.1_1 target sequence
LILNERSSMTQEEINSLDFMARELPKGFQGKTVYLNVDAEGLVCDEVEQFLDRAYTVLLQVWILACKCMTAYDQPAASIKKRTDK

SEQ ID NO: 26803 - protein, 85 aa, unidentified
  REGION 1..85: note = Description of Unknown:cds_NC_009489.1_cds_YP_001249270.1_1 target sequence
YKQQGRFLATYTLQAQAQATLQNVIRQSLIVRQFMAYELQISRHQGTITNRYYALVGDIGKYIENAGMSAFFLTIKYALGTRWQP

SEQ ID NO: 26804 - protein, 85 aa, unidentified
  REGION 1..85: note = Description of Unknown:cds_NC_009489.1_cds_YP_001249270.1_1 target sequence
LALAAFSGELTKIKSLMMLYRDLGENARYLALLEAPQMMEFAPANYPLLYSYAMGIGTVLDAQMRNYKYGRDFLNPVFFQFGVET

SEQ ID NO: 26805 - protein, 85 aa, unidentified
  REGION 1..85: note = Description of Unknown:cds_NC_009489.1_cds_YP_001249270.1_1 target sequence
ARKQQSAVDVKMAAELGVTTTDKEEMAQTLTRLGAARRTDASAYAATPFSGPAQQAQAMPAPQAIDSRDSTAQPAAPDPVPDDSF

SEQ ID NO: 26806 - protein, 85 aa, unidentified
  REGION 1..85: note = Description of Unknown:cds_NC_009489.1_cds_YP_001249276.1_7 target sequence
RSSLFLVLTLLVPFAHSIDSITLEQYGTVITSVRSLAYFLETNPTYISVRLMPAIQTDSSHCSYHSIENYNLTLTKLLLPLQENL

SEQ ID NO: 26807 - protein, 85 aa, unidentified
  REGION 1..85: note = Description of Unknown:cds_NC_009489.1_cds_YP_001249276.1_7 target sequence
HQITDSLSSRRRKKRFAGVAVGLAALGVATAAQVTAAIAVVKAKENSAKIAQLTSAISETNRAVQDLIEGSKQLAVAVQAIQDQI

SEQ ID NO: 26808 - protein, 85 aa, unidentified
  REGION 1..85: note = Description of Unknown:cds_NC_009489.1_cds_YP_001249276.1_7 target sequence
NNVIQPQLTNLSCQVADAQVGTILNMYLTELTTVFHPQITNSALTPITIQALRSLLGSTLPQVVTSTIKTDVPLQDLLTSGLLKG

SEQ ID NO: 26809 - protein, 85 aa, unidentified
  REGION 1..85: note = Description of Unknown:cds_NC_009489.1_cds_YP_001249276.1_7 target sequence
QIVYLDLQSMIMVVSVSVPTIALHSMAKVYTLKAISAHVNNAEVQMQVPSRVMELGSEIMGYDIDQCEETSRYLFCPYNGGSILS

SEQ ID NO: 26810 - protein, 85 aa, unidentified
  REGION 1..85: note = Description of Unknown:cds_NC_009489.1_cds_YP_001249276.1_7 target sequence
ATMKMCLNGNISQCVFTPIYGSFLQRFVLVDGVIVANCRDMTCACKSPSKIITQPDSLPVTIIDSTSCSNLVLDTLELPIISINN

SEQ ID NO: 26811 - protein, 85 aa, unidentified
  REGION 1..85: note = Description of Unknown:cds_NC_009489.1_cds_YP_001249276.1_7 target sequence
ATYRPVQYVGPNQIIFSQPLDLLSQLGKINSSLSDAIEHLAKSDEILEQIQWDSPQGYTLIALTSVLAFVVVAIVGLLISTRYLI

SEQ ID NO: 26812 - protein, 84 aa, unidentified
  REGION 1..84: note = Description of Unknown:cds_NC_009489.1_cds_YP_001249276.1_7 target sequence
KINSSLSDAIEHLAKSDEILEQIQWDSPQGYTLIALTSVLAFVVVAIVGLLISTRYLIFEIRRINTTLTQQLSSYVLSNKIIQY

SEQ ID NO: 26813 - protein, 85 aa, unidentified
  REGION 1..85: note = Description of Unknown:cds_NC_009489.1_cds_YP_001249276.1_7 target sequence
TVITSVRSLAYFLETNPTYISVRLMPAIQTDSSHCSYHSIENYNLTLTKLLLPLQENLHQITDSLSSRRRKKRFAGVAVGLAALG

SEQ ID NO: 26814 - protein, 85 aa, unidentified
  REGION 1..85: note = Description of Unknown:cds_NC_009489.1_cds_YP_001249276.1_7 target sequence
VATAAQVTAAIAVVKAKENSAKIAQLTSAISETNRAVQDLIEGSKQLAVAVQAIQDQINNVIQPQLTNLSCQVADAQVGTILNMY

SEQ ID NO: 26815 - protein, 85 aa, unidentified
  REGION 1..85: note = Description of Unknown:cds_NC_009489.1_cds_YP_001249276.1_7 target sequence
LTELTTVFHPQITNSALTPITIQALRSLLGSTLPQVVTSTIKTDVPLQDLLTSGLLKGQIVYLDLQSMIMVVSVSVPTIALHSMA

SEQ ID NO: 26816 - protein, 85 aa, unidentified
  REGION 1..85: note = Description of Unknown:cds_NC_009489.1_cds_YP_001249276.1_7 target sequence
KVYTLKAISAHVNNAEVQMQVPSRVMELGSEIMGYDIDQCEETSRYLFCPYNGGSILSATMKMCLNGNISQCVFTPIYGSFLQRF

SEQ ID NO: 26817 - protein, 85 aa, unidentified
  REGION 1..85: note = Description of Unknown:cds_NC_009489.1_cds_YP_001249276.1_7 target sequence
VLVDGVIVANCRDMTCACKSPSKIITQPDSLPVTIIDSTSCSNLVLDTLELPIISINNATYRPVQYVGPNQIIFSQPLDLLSQLG

SEQ ID NO: 26818 - protein, 85 aa, unidentified
  REGION 1..85: note = Description of Unknown:cds_NC_025350.1_cds_YP_009094078.1_5 target sequence
LWLTILIALVGNHESTCMNINFLQSLGQINSQKRFLNFYTQQPPSYMVIRLVPTLQLSANNCTLGSIVRYRNAIKELIQPMDENL

SEQ ID NO: 26819 - protein, 85 aa, unidentified
  REGION 1..85: note = Description of Unknown:cds_NC_025350.1_cds_YP_009094078.1_5 target sequence
RWLSSNLIPQRRGKRFAGVAVGLAALGVAVAAQATAAVALVEARANAEKIASMSQSIQETNKAVTSLSQAVSASGIAIQAIQNEI

SEQ ID NO: 26820 - protein, 85 aa, unidentified
  REGION 1..85: note = Description of Unknown:cds_NC_025350.1_cds_YP_009094078.1_5 target sequence
NNVIHPILNQVQCDVLDARVGNILNLYLIKVTTIFQNQLTNPALQRLSTQALSMLMQSTSSYLRNLSSSESAINADLSMTNLIEA

SEQ ID NO: 26821 - protein, 85 aa, unidentified
  REGION 1..85: note = Description of Unknown:cds_NC_025350.1_cds_YP_009094078.1_5 target sequence
QIVGINMTNLQLVLAVFIPSIARLNGALLYDFISITISSNQTEVMLQIPHRVLEIGNSLYTFEGTQCEMTKLNAYCLYSDAIPVT

SEQ ID NO: 26822 - protein, 85 aa, unidentified
  REGION 1..85: note = Description of Unknown:cds_NC_025350.1_cds_YP_009094078.1_5 target sequence
ESLRDCMNGLFSQCGFVRIIGSFANRFASVNGVIYANCKHLTCSCLQPDEIITQDTNVPLTIIDTKRCTKISLGHLTFTIREYAN

SEQ ID NO: 26823 - protein, 85 aa, unidentified
  REGION 1..85: note = Description of Unknown:cds_NC_025350.1_cds_YP_009094078.1_5 target sequence
VTYSLRTEIANSQITVVSPLDLSSQLTTINNSLADATNHIMNSDRILDRLNSGLYSKWVIIFLICASIVSLIGLVFLGFLIRGLI

SEQ ID NO: 26824 - protein, 84 aa, unidentified
  REGION 1..84: note = Description of Unknown:cds_NC_025350.1_cds_YP_009094078.1_5 target sequence
TINNSLADATNHIMNSDRILDRLNSGLYSKWVIIFLICASIVSLIGLVFLGFLIRGLILELRSKHRSNLNKASTYSIDSSIGLT

SEQ ID NO: 26825 - protein, 85 aa, unidentified
  REGION 1..85: note = Description of Unknown:cds_NC_025350.1_cds_YP_009094078.1_5 target sequence
QINSQKRFLNFYTQQPPSYMVIRLVPTLQLSANNCTLGSIVRYRNAIKELIQPMDENLRWLSSNLIPQRRGKRFAGVAVGLAALG

SEQ ID NO: 26826 - protein, 85 aa, unidentified
  REGION 1..85: note = Description of Unknown:cds_NC_025350.1_cds_YP_009094078.1_5 target sequence
VAVAAQATAAVALVEARANAEKIASMSQSIQETNKAVTSLSQAVSASGIAIQAIQNEINNVIHPILNQVQCDVLDARVGNILNLY

SEQ ID NO: 26827 - protein, 85 aa, unidentified
  REGION 1..85: note = Description of Unknown:cds_NC_025350.1_cds_YP_009094078.1_5 target sequence
LIKVTTIFQNQLTNPALQRLSTQALSMLMQSTSSYLRNLSSSESAINADLSMTNLIEAQIVGINMTNLQLVLAVFIPSIARLNGA

SEQ ID NO: 26828 - protein, 85 aa, unidentified
  REGION 1..85: note = Description of Unknown:cds_NC_025350.1_cds_YP_009094078.1_5 target sequence
LLYDFISITISSNQTEVMLQIPHRVLEIGNSLYTFEGTQCEMTKLNAYCLYSDAIPVTESLRDCMNGLFSQCGFVRIIGSFANRF

SEQ ID NO: 26829 - protein, 85 aa, unidentified
  REGION 1..85: note = Description of Unknown:cds_NC_025350.1_cds_YP_009094078.1_5 target sequence
ASVNGVIYANCKHLTCSCLQPDEIITQDTNVPLTIIDTKRCTKISLGHLTFTIREYANVTYSLRTEIANSQITVVSPLDLSSQLT

SEQ ID NO: 26830 - protein, 84 aa, unidentified
  REGION 1..84: note = Description of Unknown:hvTR_P03132 target sequence
RLDHDFGKVTKQEVKDFFRWAKDHVVEVEHEFYVKKGGAKKRPAPSDADISEPKRVRESVAQPSTSDAEASINYADRLARGHSL

SEQ ID NO: 26831 - protein, 85 aa, unidentified
  REGION 1..85: note = Description of Unknown:cds_NZ_WFIY01000004.1_cds_WP_155864269.1_2261 target sequence
NLKFLVGFLVLGIIILSAITFLNFTSIVAQDKGDQQPKGPIVYTYDEYNGTYFPHILTVVYYPCNATCSNLGFPSVWPVSNENQC

SEQ ID NO: 26832 - protein, 85 aa, unidentified
  REGION 1..85: note = Description of Unknown:cds_NZ_WFIY01000004.1_cds_WP_155864269.1_2261 target sequence
HNAVVNTTCQALLEGVDWQLPLLNYVGGVAIPLSTPPCKLPWAQQLGVKGALVYYTQMVGEPLGVTLACGLLYATEDSMPGSITA

SEQ ID NO: 26833 - protein, 85 aa, unidentified
  REGION 1..85: note = Description of Unknown:cds_NZ_WFIY01000004.1_cds_WP_155864269.1_2261 target sequence
INPVTGKIVWMANGLAGPAMNNPVVWHGIVYVSVGGVCFTFSQFVHFEEHQYCKIHRGRCGAVYAFNATDGQLLWMRFTYGEAMP

SEQ ID NO: 26834 - protein, 85 aa, unidentified
  REGION 1..85: note = Description of Unknown:cds_NZ_WFIY01000004.1_cds_WP_155864269.1_2261 target sequence
APAIYDGILAYVTGGGCFVGVNATTGQTLWVDHFPGFMANMASVNYYVLPNGTPLFIAGFTYAAPPYGYIIAVNGLNGHEAWNAT

SEQ ID NO: 26835 - protein, 85 aa, unidentified
  REGION 1..85: note = Description of Unknown:cds_NZ_WFIY01000004.1_cds_WP_155864269.1_2261 target sequence
MPAPYIGANTGLGDVAPAVDQQLGIVVDNDIANFSNGYVDMVTFALNATNGKPLWAVNTGRGPIPPAYKGGMPLIVGNVVYDGNP

SEQ ID NO: 26836 - protein, 85 aa, unidentified
  REGION 1..85: note = Description of Unknown:cds_NZ_WFIY01000004.1_cds_WP_155864269.1_2261 target sequence
SLGTVNAICIKTGKILWSTKLPCLQTPPKFPGGPRGSPTYYHGLLWVSAGQYVYVINPKNGDILSFYWIGGRLGIMNPVIAGNTM

SEQ ID NO: 26837 - protein, 84 aa, unidentified
  REGION 1..84: note = Description of Unknown:cds_NZ_WFIY01000004.1_cds_WP_155864269.1_2261 target sequence
TPPKFPGGPRGSPTYYHGLLWVSAGQYVYVINPKNGDILSFYWIGGRLGIMNPVIAGNTMFLSNSYGWIIAIPLSQIYPAYIYY

SEQ ID NO: 26838 - protein, 85 aa, unidentified
  REGION 1..85: note = Description of Unknown:cds_NZ_WFIY01000004.1_cds_WP_155864269.1_2261 target sequence
VAQDKGDQQPKGPIVYTYDEYNGTYFPHILTVVYYPCNATCSNLGFPSVWPVSNENQCHNAVVNTTCQALLEGVDWQLPLLNYVG

SEQ ID NO: 26839 - protein, 85 aa, unidentified
  REGION 1..85: note = Description of Unknown:cds_NZ_WFIY01000004.1_cds_WP_155864269.1_2261 target sequence
GVAIPLSTPPCKLPWAQQLGVKGALVYYTQMVGEPLGVTLACGLLYATEDSMPGSITAINPVTGKIVWMANGLAGPAMNNPVVWH

SEQ ID NO: 26840 - protein, 85 aa, unidentified
  REGION 1..85: note = Description of Unknown:cds_NZ_WFIY01000004.1_cds_WP_155864269.1_2261 target sequence
GIVYVSVGGVCFTFSQFVHFEEHQYCKIHRGRCGAVYAFNATDGQLLWMRFTYGEAMPAPAIYDGILAYVTGGGCFVGVNATTGQ

SEQ ID NO: 26841 - protein, 85 aa, unidentified
  REGION 1..85: note = Description of Unknown:cds_NZ_WFIY01000004.1_cds_WP_155864269.1_2261 target sequence
TLWVDHFPGFMANMASVNYYVLPNGTPLFIAGFTYAAPPYGYIIAVNGLNGHEAWNATMPAPYIGANTGLGDVAPAVDQQLGIVV

SEQ ID NO: 26842 - protein, 85 aa, unidentified
  REGION 1..85: note = Description of Unknown:cds_NZ_WFIY01000004.1_cds_WP_155864269.1_2261 target sequence
DNDIANFSNGYVDMVTFALNATNGKPLWAVNTGRGPIPPAYKGGMPLIVGNVVYDGNPSLGTVNAICIKTGKILWSTKLPCLQTP

SEQ ID NO: 26843 - protein, 85 aa, unidentified
  REGION 1..85: note = Description of Unknown:vpeps_4P37_1 target sequence
GPGSSENRNRKLSYQEYYVDGDYEEVRKKLPEIIKQARIKASQVMEPTIYEKRVVMEIIKDFIRDKGRKVYGGTALNETIKKKNP

SEQ ID NO: 26844 - protein, 85 aa, unidentified
  REGION 1..85: note = Description of Unknown:vpeps_4P37_1 target sequence
EDAIYDSYLFSDIEFYSPTPVPDLKELCDILYHKGYDPVQGKEAQHEETYSIFVNLQLYCDITYVPTKVYHGIKTIEIDGINYTH

SEQ ID NO: 26845 - protein, 85 aa, unidentified
  REGION 1..85: note = Description of Unknown:vpeps_4P37_1 target sequence
PHFMLIDYLRMINQPLTAAEQRWEKAFDRMYVLLKNYPMEKYDNSMRITSPRDDIQMYIGKVKSEFMKIPEIQESCLISGFDAYN

SEQ ID NO: 26846 - protein, 85 aa, unidentified
  REGION 1..85: note = Description of Unknown:vpeps_4P37_1 target sequence
FFIRHAMGDRKVEQMARIKNDYNSLKNFITVLPFMELISVKYKDTVEKLYNFLREKVVNPDLITIDEYFPLFQFTGYSVSINYDG

SEQ ID NO: 26847 - protein, 85 aa, unidentified
  REGION 1..85: note = Description of Unknown:vpeps_4P37_1 target sequence
IPIVKVYEADGYCVPDIKTTSGYRYVSYQYILMIMYISKFKAHLDKNKEMYFNYGIAISNLVQARNSYLNQKNIGVINDTVFSEF

SEQ ID NO: 26848 - protein, 85 aa, unidentified
  REGION 1..85: note = Description of Unknown:vpeps_4P37_1 target sequence
RIGCIGTTVSYTRMSRLRMLEKKKQGKVIQFVYTPKQYFSQTPEQQNNFDESMKKYRFKNTSGNKITIPKNLLFKIDERGNISEE

SEQ ID NO: 26849 - protein, 85 aa, unidentified
  REGION 1..85: note = Description of Unknown:vpeps_4P37_1 target sequence
QGKVIQFVYTPKQYFSQTPEQQNNFDESMKKYRFKNTSGNKITIPKNLLFKIDERGNISEEISTEEAYITEDTTSINTTTDINTN

SEQ ID NO: 26850 - protein, 85 aa, unidentified
  REGION 1..85: note = Description of Unknown:vpeps_4P37_1 target sequence
KKLPEIIKQARIKASQVMEPTIYEKRVVMEIIKDFIRDKGRKVYGGTALNETIKKKNPEDAIYDSYLFSDIEFYSPTPVPDLKEL

SEQ ID NO: 26851 - protein, 85 aa, unidentified
  REGION 1..85: note = Description of Unknown:vpeps_4P37_1 target sequence
CDILYHKGYDPVQGKEAQHEETYSIFVNLQLYCDITYVPTKVYHGIKTIEIDGINYTHPHFMLIDYLRMINQPLTAAEQRWEKAF

SEQ ID NO: 26852 - protein, 85 aa, unidentified
  REGION 1..85: note = Description of Unknown:vpeps_4P37_1 target sequence
DRMYVLLKNYPMEKYDNSMRITSPRDDIQMYIGKVKSEFMKIPEIQESCLISGFDAYNFFIRHAMGDRKVEQMARIKNDYNSLKN

SEQ ID NO: 26853 - protein, 85 aa, unidentified
  REGION 1..85: note = Description of Unknown:vpeps_4P37_1 target sequence
FITVLPFMELISVKYKDTVEKLYNFLREKVVNPDLITIDEYFPLFQFTGYSVSINYDGIPIVKVYEADGYCVPDIKTTSGYRYVS

SEQ ID NO: 26854 - protein, 85 aa, unidentified
  REGION 1..85: note = Description of Unknown:vpeps_4P37_1 target sequence
YQYILMIMYISKFKAHLDKNKEMYFNYGIAISNLVQARNSYLNQKNIGVINDTVFSEFRIGCIGTTVSYTRMSRLRMLEKKKQGK

SEQ ID NO: 26855 - protein, 85 aa, unidentified
  REGION 1..85: note = Description of Unknown:cds_NC_030656.1_cds_YP_009268741.1_26 target sequence
TDALLIHMITRFFDDVYDIVDCSQAKSLLMLIQAKKIKQSTFCMCLEQAVMRKTWTLPGEILGEVEELDVAFMHRINCIRDNING

SEQ ID NO: 26856 - protein, 85 aa, unidentified
  REGION 1..85: note = Description of Unknown:cds_NC_030656.1_cds_YP_009268741.1_26 target sequence
VMQISLYDWERVEDDFQVDSYFIKLFESKFRCLIDAKLRYMLKSHKFYVDLGEWFWNAESLFKYETLVNLNKSILRNYHVIVNNI

SEQ ID NO: 26857 - protein, 85 aa, unidentified
  REGION 1..85: note = Description of Unknown:cds_NC_030656.1_cds_YP_009268741.1_26 target sequence
VCYHENNIINMYQLIIDMFKYKNDSGALSSFLKKLISKVSKGIAVRDYEALTNSCYEISSSVTEYIELMQSLLPKEHFNKSVLKA

SEQ ID NO: 26858 - protein, 85 aa, unidentified
  REGION 1..85: note = Description of Unknown:cds_NC_030656.1_cds_YP_009268741.1_26 target sequence
INEEYEKSKKTNDESLYFKLVSMYYEIIKEKNIKKYSFFQCPAKWYRKIVAYIDDESKSQQEIESFMTYIFDILNKIDYKDFTEM

SEQ ID NO: 26859 - protein, 85 aa, unidentified
  REGION 1..85: note = Description of Unknown:cds_NC_030656.1_cds_YP_009268741.1_26 target sequence
QNYTSVKVMKRLLTSDIVDRGTLLLVKKVLKLPLEVVAKYIYNLETTFMRITNIYAFYVDSYNTPIMLNDELDIEKHAPELVNVI

SEQ ID NO: 26860 - protein, 85 aa, unidentified
  REGION 1..85: note = Description of Unknown:cds_NC_030656.1_cds_YP_009268741.1_26 target sequence
NFAKSWIPDADFIVTPHSGYIEFTISDETDKVDVIGNTAHYLIYNKSYESKSGISIDDLNAMLKSELLVKTAIKAMVNEKLITVA

SEQ ID NO: 26861 - protein, 84 aa, unidentified
  REGION 1..84: note = Description of Unknown:cds_NC_030656.1_cds_YP_009268741.1_26 target sequence
TISDETDKVDVIGNTAHYLIYNKSYESKSGISIDDLNAMLKSELLVKTAIKAMVNEKLITVANGIVYANRFIQQTGVDRIVLNN

SEQ ID NO: 26862 - protein, 85 aa, unidentified
  REGION 1..85: note = Description of Unknown:cds_NC_030656.1_cds_YP_009268741.1_26 target sequence
LLMLIQAKKIKQSTFCMCLEQAVMRKTWTLPGEILGEVEELDVAFMHRINCIRDNINGVMQISLYDWERVEDDFQVDSYFIKLFE

SEQ ID NO: 26863 - protein, 85 aa, unidentified
  REGION 1..85: note = Description of Unknown:cds_NC_030656.1_cds_YP_009268741.1_26 target sequence
SKFRCLIDAKLRYMLKSHKFYVDLGEWFWNAESLFKYETLVNLNKSILRNYHVIVNNIVCYHENNIINMYQLIIDMFKYKNDSGA

SEQ ID NO: 26864 - protein, 85 aa, unidentified
  REGION 1..85: note = Description of Unknown:cds_NC_030656.1_cds_YP_009268741.1_26 target sequence
LSSFLKKLISKVSKGIAVRDYEALTNSCYEISSSVTEYIELMQSLLPKEHFNKSVLKAINEEYEKSKKTNDESLYFKLVSMYYEI

SEQ ID NO: 26865 - protein, 85 aa, unidentified
  REGION 1..85: note = Description of Unknown:cds_NC_030656.1_cds_YP_009268741.1_26 target sequence
IKEKNIKKYSFFQCPAKWYRKIVAYIDDESKSQQEIESFMTYIFDILNKIDYKDFTEMQNYTSVKVMKRLLTSDIVDRGTLLLVK

SEQ ID NO: 26866 - protein, 85 aa, unidentified
  REGION 1..85: note = Description of Unknown:cds_NC_030656.1_cds_YP_009268741.1_26 target sequence
KVLKLPLEVVAKYIYNLETTFMRITNIYAFYVDSYNTPIMLNDELDIEKHAPELVNVINFAKSWIPDADFIVTPHSGYIEFTISD

SEQ ID NO: 26867 - protein, 85 aa, unidentified
  REGION 1..85: note = Description of Unknown:cds_NC_020810.1_cds_YP_007641405.1_4 target sequence
PLNAVIFTLLLRCSICLGKFPIYTIPDKLGPWSPIDIHHLSCPNNLVVEDEGCTTLTPFSYMELKVGYITSIKVSGFTCTGVVTE

SEQ ID NO: 26868 - protein, 85 aa, unidentified
  REGION 1..85: note = Description of Unknown:cds_NC_020810.1_cds_YP_007641405.1_4 target sequence
AETYTNFVGYVTTTFRRRHFRPSVNSCRDAYNWKIAGDPRYEESLHNPYPDSHWLRTVKTTKESLLIISPSVADMDAYDKKLYSK

SEQ ID NO: 26869 - protein, 85 aa, unidentified
  REGION 1..85: note = Description of Unknown:cds_NC_020810.1_cds_YP_007641405.1_4 target sequence
MFPNGRCSEISPGSPFCPTNHEYTIWMPESSNPGISCDIFTRSMGKKATKDGQLCGFVDERGLYKSLKGACRLRLCGISGLRLMD

SEQ ID NO: 26870 - protein, 85 aa, unidentified
  REGION 1..85: note = Description of Unknown:cds_NC_020810.1_cds_YP_007641405.1_4 target sequence
GSWVSLPQVNNSEWCSPDQLVNIHDFHSDEIEHLVADELVKKREDCLDALETIIFTKSISFRRLSRLRKLVPGFGKAYTIINRTL

SEQ ID NO: 26871 - protein, 85 aa, unidentified
  REGION 1..85: note = Description of Unknown:cds_NC_020810.1_cds_YP_007641405.1_4 target sequence
MEAEAHYKSVREWKEIIPSKGCLKAGGRCYPHHNGIFFNGIILGPGGEILIPEMQSALLQQHIELLESSVVPLKHPLADPSTVFK

SEQ ID NO: 26872 - protein, 85 aa, unidentified
  REGION 1..85: note = Description of Unknown:cds_NC_020810.1_cds_YP_007641405.1_4 target sequence
NDDEAESFVDVHLPDTNQKISGIDLGLPEWKRYFLIGVSAVALLALSIIIAVCCKRFRKRRKSKPSPVELTRKVSVISKGNGPVP

SEQ ID NO: 26873 - protein, 84 aa, unidentified
  REGION 1..84: note = Description of Unknown:cds_NC_020810.1_cds_YP_007641405.1_4 target sequence
DLGLPEWKRYFLIGVSAVALLALSIIIAVCCKRFRKRRKSKPSPVELTRKVSVISKGNGPVPSWESYKEGTTGDVRNTTPSTRE

SEQ ID NO: 26874 - protein, 85 aa, unidentified
  REGION 1..85: note = Description of Unknown:cds_NC_020810.1_cds_YP_007641405.1_4 target sequence
KLGPWSPIDIHHLSCPNNLVVEDEGCTTLTPFSYMELKVGYITSIKVSGFTCTGVVTEAETYTNFVGYVTTTFRRRHFRPSVNSC

SEQ ID NO: 26875 - protein, 85 aa, unidentified
  REGION 1..85: note = Description of Unknown:cds_NC_020810.1_cds_YP_007641405.1_4 target sequence
RDAYNWKIAGDPRYEESLHNPYPDSHWLRTVKTTKESLLIISPSVADMDAYDKKLYSKMFPNGRCSEISPGSPFCPTNHEYTIWM

SEQ ID NO: 26876 - protein, 85 aa, unidentified
  REGION 1..85: note = Description of Unknown:cds_NC_020810.1_cds_YP_007641405.1_4 target sequence
PESSNPGISCDIFTRSMGKKATKDGQLCGFVDERGLYKSLKGACRLRLCGISGLRLMDGSWVSLPQVNNSEWCSPDQLVNIHDFH

SEQ ID NO: 26877 - protein, 85 aa, unidentified
  REGION 1..85: note = Description of Unknown:cds_NC_020810.1_cds_YP_007641405.1_4 target sequence
SDEIEHLVADELVKKREDCLDALETIIFTKSISFRRLSRLRKLVPGFGKAYTIINRTLMEAEAHYKSVREWKEIIPSKGCLKAGG

SEQ ID NO: 26878 - protein, 85 aa, unidentified
  REGION 1..85: note = Description of Unknown:cds_NC_020810.1_cds_YP_007641405.1_4 target sequence
RCYPHHNGIFFNGIILGPGGEILIPEMQSALLQQHIELLESSVVPLKHPLADPSTVFKNDDEAESFVDVHLPDTNQKISGIDLGL

SEQ ID NO: 26879 - protein, 85 aa, unidentified
  REGION 1..85: note = Description of Unknown:cds_NC_002728.1_cds_NP_112021.1_1 target sequence
SDIFEEAASFRSYQSKLGRDGRASAATATLTTKIRIFVPATNSPELRWELTLFALDVIRSPSAAESMKVGAAFTLISMYSERPGA

SEQ ID NO: 26880 - protein, 85 aa, unidentified
  REGION 1..85: note = Description of Unknown:cds_NC_002728.1_cds_NP_112021.1_1 target sequence
LIRSLLNDPDIEAVIIDVGSMVNGIPVMERRGDKAQEEMEGLMRILKTARDSSKGKTPFVDSRAYGLRITDMSTLVSAVITIEAQ

SEQ ID NO: 26881 - protein, 85 aa, unidentified
  REGION 1..85: note = Description of Unknown:cds_NC_002728.1_cds_NP_112021.1_1 target sequence
IWILIAKAVTAPDTAEESETRRWAKYVQQKRVNPFFALTQQWLTEMRNLLSQSLSVRKFMVEILIEVKKGGSAKGRAVEIISDIG

SEQ ID NO: 26882 - protein, 85 aa, unidentified
  REGION 1..85: note = Description of Unknown:cds_NC_002728.1_cds_NP_112021.1_1 target sequence
NYVEETGMAGFFATIRFGLETRYPALALNEFQSDLNTIKSLMLLYREIGPRAPYMVLLEESIQTKFAPGGYPLLWSFAMGVATTI

SEQ ID NO: 26883 - protein, 85 aa, unidentified
  REGION 1..85: note = Description of Unknown:cds_NC_002728.1_cds_NP_112021.1_1 target sequence
DRSMGALNINRGYLEPMYFRLGQKSARHHAGGIDQNMANRLGLSSDQVAELAAAVQETSAGRQESNVQAREAKFAAGGVLIGGSD

SEQ ID NO: 26884 - protein, 85 aa, unidentified
  REGION 1..85: note = Description of Unknown:cds_NC_002728.1_cds_NP_112021.1_1 target sequence
QDIDEGEEPIEQSGRQSVTFKREMSISSLANSVPSSSVSTSGGTRLTNSLLNLRSRLAAKAAKEAASSNATDDPAISNRTQGESE

SEQ ID NO: 26885 - protein, 84 aa, unidentified
  REGION 1..84: note = Description of Unknown:cds_NC_002728.1_cds_NP_112021.1_1 target sequence
EMSISSLANSVPSSSVSTSGGTRLTNSLLNLRSRLAAKAAKEAASSNATDDPAISNRTQGESEKKNNQDLKPAQNDLDFVRADV

SEQ ID NO: 26886 - protein, 85 aa, unidentified
  REGION 1..85: note = Description of Unknown:cds_NC_002728.1_cds_NP_112021.1_1 target sequence
ATLTTKIRIFVPATNSPELRWELTLFALDVIRSPSAAESMKVGAAFTLISMYSERPGALIRSLLNDPDIEAVIIDVGSMVNGIPV

SEQ ID NO: 26887 - protein, 85 aa, unidentified
  REGION 1..85: note = Description of Unknown:cds_NC_002728.1_cds_NP_112021.1_1 target sequence
MERRGDKAQEEMEGLMRILKTARDSSKGKTPFVDSRAYGLRITDMSTLVSAVITIEAQIWILIAKAVTAPDTAEESETRRWAKYV

SEQ ID NO: 26888 - protein, 85 aa, unidentified
  REGION 1..85: note = Description of Unknown:cds_NC_002728.1_cds_NP_112021.1_1 target sequence
QQKRVNPFFALTQQWLTEMRNLLSQSLSVRKFMVEILIEVKKGGSAKGRAVEIISDIGNYVEETGMAGFFATIRFGLETRYPALA

SEQ ID NO: 26889 - protein, 85 aa, unidentified
  REGION 1..85: note = Description of Unknown:cds_NC_002728.1_cds_NP_112021.1_1 target sequence
LNEFQSDLNTIKSLMLLYREIGPRAPYMVLLEESIQTKFAPGGYPLLWSFAMGVATTIDRSMGALNINRGYLEPMYFRLGQKSAR

SEQ ID NO: 26890 - protein, 85 aa, unidentified
  REGION 1..85: note = Description of Unknown:cds_NC_002728.1_cds_NP_112021.1_1 target sequence
HHAGGIDQNMANRLGLSSDQVAELAAAVQETSAGRQESNVQAREAKFAAGGVLIGGSDQDIDEGEEPIEQSGRQSVTFKREMSIS

SEQ ID NO: 26891 - protein, 85 aa, unidentified
  REGION 1..85: note = Description of Unknown:cds_NC_001906.3_cds_NP_047106.1_1 target sequence
SDIFDEAASFRSYQSKLGRDGRASAATATLTTKIRIFVPATNSPELRWELTLFALDVIRSPSAAESMKIGAAFTLISMYSERPGA

SEQ ID NO: 26892 - protein, 85 aa, unidentified
  REGION 1..85: note = Description of Unknown:cds_NC_001906.3_cds_NP_047106.1_1 target sequence
LIRSLLNDPDIEAVIIDVGSMLNGIPVMERRGDKAQEEMEGLMRILKTARESSKGKTPFVDSRAYGLRITDMSTLVSAVITIEAQ

SEQ ID NO: 26893 - protein, 85 aa, unidentified
  REGION 1..85: note = Description of Unknown:cds_NC_001906.3_cds_NP_047106.1_1 target sequence
IWILIAKAVTAPDTAEESETRRWAKYVQQKRVNPFFALTQQWLTEMRNLLSQSLSVRKFMVEILMEVKKGGSAKGRAVEIISDIG

SEQ ID NO: 26894 - protein, 85 aa, unidentified
  REGION 1..85: note = Description of Unknown:cds_NC_001906.3_cds_NP_047106.1_1 target sequence
NYVEETGMAGFFATIRFGLETRYPALALNEFQSDLNTIKGLMLLYREIGPRAPYMVLLEESIQTKFAPGGYPLLWSFAMGVATTI

SEQ ID NO: 26895 - protein, 85 aa, unidentified
  REGION 1..85: note = Description of Unknown:cds_NC_001906.3_cds_NP_047106.1_1 target sequence
DRSMGALNINRGYLEPMYFRLGQKSARHHAGGIDQNMANKLGLNSDQVAELAAAVQETSVGRQDNNMQAREAKFAAGGVLVGGGE

SEQ ID NO: 26896 - protein, 85 aa, unidentified
  REGION 1..85: note = Description of Unknown:cds_NC_001906.3_cds_NP_047106.1_1 target sequence
QDIDEEEEPIEHSGRQSVTFKREMSMSSLADSVPSSSVSTSGGTRLTNSLLNLRSRLAAKAIKESTAQSSSERNPPNNRPQADSG

SEQ ID NO: 26897 - protein, 84 aa, unidentified
  REGION 1..84: note = Description of Unknown:cds_NC_001906.3_cds_NP_047106.1_1 target sequence
EMSMSSLADSVPSSSVSTSGGTRLTNSLLNLRSRLAAKAIKESTAQSSSERNPPNNRPQADSGRKDDQEPKPAQNDLDFVRADV

SEQ ID NO: 26898 - protein, 85 aa, unidentified
  REGION 1..85: note = Description of Unknown:cds_NC_001906.3_cds_NP_047106.1_1 target sequence
ATLTTKIRIFVPATNSPELRWELTLFALDVIRSPSAAESMKIGAAFTLISMYSERPGALIRSLLNDPDIEAVIIDVGSMLNGIPV

SEQ ID NO: 26899 - protein, 85 aa, unidentified
  REGION 1..85: note = Description of Unknown:cds_NC_001906.3_cds_NP_047106.1_1 target sequence
MERRGDKAQEEMEGLMRILKTARESSKGKTPFVDSRAYGLRITDMSTLVSAVITIEAQIWILIAKAVTAPDTAEESETRRWAKYV

SEQ ID NO: 26900 - protein, 85 aa, unidentified
  REGION 1..85: note = Description of Unknown:cds_NC_001906.3_cds_NP_047106.1_1 target sequence
QQKRVNPFFALTQQWLTEMRNLLSQSLSVRKFMVEILMEVKKGGSAKGRAVEIISDIGNYVEETGMAGFFATIRFGLETRYPALA

SEQ ID NO: 26901 - protein, 85 aa, unidentified
  REGION 1..85: note = Description of Unknown:cds_NC_001906.3_cds_NP_047106.1_1 target sequence
LNEFQSDLNTIKGLMLLYREIGPRAPYMVLLEESIQTKFAPGGYPLLWSFAMGVATTIDRSMGALNINRGYLEPMYFRLGQKSAR

SEQ ID NO: 26902 - protein, 85 aa, unidentified
  REGION 1..85: note = Description of Unknown:cds_NC_001906.3_cds_NP_047106.1_1 target sequence
HHAGGIDQNMANKLGLNSDQVAELAAAVQETSVGRQDNNMQAREAKFAAGGVLVGGGEQDIDEEEEPIEHSGRQSVTFKREMSMS

SEQ ID NO: 26903 - protein, 85 aa, unidentified
  REGION 1..85: note = Description of Unknown:cds_NC_025410.1_cds_YP_009094496.1_5 target sequence
VTIIKPLILLVTVILQISGHIDTTALTSIGAVIASSKEIMYYAQSTPNYIVIKLIPNLPNIPSQCNFSSIAYYNKTLLDLFTPIS

SEQ ID NO: 26904 - protein, 85 aa, unidentified
  REGION 1..85: note = Description of Unknown:cds_NC_025410.1_cds_YP_009094496.1_5 target sequence
DNINMLHQRLSNTGRNRRFAGVAIGLAALGVATAAQVTAAFALVEAKSNTAKIAQIGQAIQNTNAAINSLNAGIGGAVTAIQAIQ

SEQ ID NO: 26905 - protein, 85 aa, unidentified
  REGION 1..85: note = Description of Unknown:cds_NC_025410.1_cds_YP_009094496.1_5 target sequence
TQINGIITDQINAATCTALDAQIGTLLNMYLLQLTTTFQPQIQNPALQPLSIQALHRIMQGTSIVLSNLTDSSKYGLNDALSAGL

SEQ ID NO: 26906 - protein, 85 aa, unidentified
  REGION 1..85: note = Description of Unknown:cds_NC_025410.1_cds_YP_009094496.1_5 target sequence
ITGQIVSVDLRLMQITIAANVPTLSRLENAIAHDIMRITTNVNNTEVIVQLPETIMEHAGRLYQFNKDHCLSSTQRFFCPYSDAK

SEQ ID NO: 26907 - protein, 85 aa, unidentified
  REGION 1..85: note = Description of Unknown:cds_NC_025410.1_cds_YP_009094496.1_5 target sequence
LLTSKISSCLSGIRGDCIFSPVVGNFATRFISVKGVIIANCKFIRCTCLQPEGIISQLDDHTLTVIDLKLCNKLDLGLIQFDLQV

SEQ ID NO: 26908 - protein, 85 aa, unidentified
  REGION 1..85: note = Description of Unknown:cds_NC_025410.1_cds_YP_009094496.1_5 target sequence
LSNISYEMTLNTSQNQLILTDPLDLSSELQTMNQSINNAANFIEKSNSLLNSSTYEFNRSVALLVALILLSLTILYVIVLTCVVK

SEQ ID NO: 26909 - protein, 84 aa, unidentified
  REGION 1..84: note = Description of Unknown:cds_NC_025410.1_cds_YP_009094496.1_5 target sequence
LDLSSELQTMNQSINNAANFIEKSNSLLNSSTYEFNRSVALLVALILLSLTILYVIVLTCVVKLLVHEVSKNRRHIQDLESHHK

SEQ ID NO: 26910 - protein, 85 aa, unidentified
  REGION 1..85: note = Description of Unknown:cds_NC_025410.1_cds_YP_009094496.1_5 target sequence
SIGAVIASSKEIMYYAQSTPNYIVIKLIPNLPNIPSQCNFSSIAYYNKTLLDLFTPISDNINMLHQRLSNTGRNRRFAGVAIGLA

SEQ ID NO: 26911 - protein, 85 aa, unidentified
  REGION 1..85: note = Description of Unknown:cds_NC_025410.1_cds_YP_009094496.1_5 target sequence
ALGVATAAQVTAAFALVEAKSNTAKIAQIGQAIQNTNAAINSLNAGIGGAVTAIQAIQTQINGIITDQINAATCTALDAQIGTLL

SEQ ID NO: 26912 - protein, 85 aa, unidentified
  REGION 1..85: note = Description of Unknown:cds_NC_025410.1_cds_YP_009094496.1_5 target sequence
NMYLLQLTTTFQPQIQNPALQPLSIQALHRIMQGTSIVLSNLTDSSKYGLNDALSAGLITGQIVSVDLRLMQITIAANVPTLSRL

SEQ ID NO: 26913 - protein, 85 aa, unidentified
  REGION 1..85: note = Description of Unknown:cds_NC_025410.1_cds_YP_009094496.1_5 target sequence
ENAIAHDIMRITTNVNNTEVIVQLPETIMEHAGRLYQFNKDHCLSSTQRFFCPYSDAKLLTSKISSCLSGIRGDCIFSPVVGNFA

SEQ ID NO: 26914 - protein, 85 aa, unidentified
  REGION 1..85: note = Description of Unknown:cds_NC_025410.1_cds_YP_009094496.1_5 target sequence
TRFISVKGVIIANCKFIRCTCLQPEGIISQLDDHTLTVIDLKLCNKLDLGLIQFDLQVLSNISYEMTLNTSQNQLILTDPLDLSS

SEQ ID NO: 26915 - protein, 85 aa, unidentified
  REGION 1..85: note = Description of Unknown:hvTR_P16801 target sequence
MAAAVVRAEVRRQRREERKKMAAARTTEDPPENHVVADVARGTGAVTRSSSSSLVVSSSSASGSDESSSASPLSFPVSSPSTAVR

SEQ ID NO: 26916 - protein, 85 aa, unidentified
  REGION 1..85: note = Description of Unknown:hvTR_P16801 target sequence
SPGSAGVSTSLCSVERMVELSAQSPAADFSVSEAWRFEEAVNMALVACEAVSPYDRFRLIETPDENFLLVTNVIPRESAEVPVLD

SEQ ID NO: 26917 - protein, 85 aa, unidentified
  REGION 1..85: note = Description of Unknown:hvTR_P16801 target sequence
SSSSGGDSGPEDKKKNVGNKTAGEKNGGGSRAKRRRRRRAPKNDAATPSFLRRHDVLERFAAAAKPLPSLCVRDYALRNADRVTY

SEQ ID NO: 26918 - protein, 85 aa, unidentified
  REGION 1..85: note = Description of Unknown:hvTR_P16801 target sequence
DGELIYGSYLLYRKAHVELSLSSNKVQHVEAVLRQVYTPGLLDHHNVCDVEALLWLLYCGPRSFCARDTCFGREKNGCPFPALLP

SEQ ID NO: 26919 - protein, 85 aa, unidentified
  REGION 1..85: note = Description of Unknown:hvTR_P16801 target sequence
KLFYEPVRDYMTYMNLAELYVFVWYRGYEFPAPTPQATTAGGGGGSGGGGGAGACAVETSASAGRVDDAGDEVHLPLKPVSLDRL

SEQ ID NO: 26920 - protein, 85 aa, unidentified
  REGION 1..85: note = Description of Unknown:hvTR_P16801 target sequence
REVLQAVRGRFSGREVPAWPASSRTCLLCALYSQNRLCLDLARDEARTVSYSPIVIQDCAAAVTDVTLSHILPGQSTVSLFPVYH

SEQ ID NO: 26921 - protein, 84 aa, unidentified
  REGION 1..84: note = Description of Unknown:hvTR_P16801 target sequence
SSRTCLLCALYSQNRLCLDLARDEARTVSYSPIVIQDCAAAVTDVTLSHILPGQSTVSLFPVYHVGKLLDALSLNDAGLITLNL

SEQ ID NO: 26922 - protein, 85 aa, unidentified
  REGION 1..85: note = Description of Unknown:hvTR_P16801 target sequence
EDPPENHVVADVARGTGAVTRSSSSSLVVSSSSASGSDESSSASPLSFPVSSPSTAVRSPGSAGVSTSLCSVERMVELSAQSPAA

SEQ ID NO: 26923 - protein, 85 aa, unidentified
  REGION 1..85: note = Description of Unknown:hvTR_P16801 target sequence
DFSVSEAWRFEEAVNMALVACEAVSPYDRFRLIETPDENFLLVTNVIPRESAEVPVLDSSSSGGDSGPEDKKKNVGNKTAGEKNG

SEQ ID NO: 26924 - protein, 85 aa, unidentified
  REGION 1..85: note = Description of Unknown:hvTR_P16801 target sequence
GGSRAKRRRRRRAPKNDAATPSFLRRHDVLERFAAAAKPLPSLCVRDYALRNADRVTYDGELIYGSYLLYRKAHVELSLSSNKVQ

SEQ ID NO: 26925 - protein, 85 aa, unidentified
  REGION 1..85: note = Description of Unknown:hvTR_P16801 target sequence
HVEAVLRQVYTPGLLDHHNVCDVEALLWLLYCGPRSFCARDTCFGREKNGCPFPALLPKLFYEPVRDYMTYMNLAELYVFVWYRG

SEQ ID NO: 26926 - protein, 85 aa, unidentified
  REGION 1..85: note = Description of Unknown:hvTR_P16801 target sequence
YEFPAPTPQATTAGGGGGSGGGGGAGACAVETSASAGRVDDAGDEVHLPLKPVSLDRLREVLQAVRGRFSGREVPAWPASSRTCL

SEQ ID NO: 26927 - protein, 85 aa, unidentified
  REGION 1..85: note = Description of Unknown:cds_NZ_WFIY01000004.1_cds_WP_155863080.1_992 target sequence
LKVILTIIDGMAFHLVDNFLYHLNTLYKFSQEGVYSRLESVYPAITPIALASLFTGLQPKNHGIVAPKIFVKGRKLSYPLTAYNS

SEQ ID NO: 26928 - protein, 85 aa, unidentified
  REGION 1..85: note = Description of Unknown:cds_NZ_WFIY01000004.1_cds_WP_155863080.1_992 target sequence
SSLTAEPIWSILGKKGYKVLVTSAPQALPDKWKLDNVILFDPYKSKIKKCTKGYVIKEGENRILGNKWNVKIDNNTFYITLPDGK

SEQ ID NO: 26929 - protein, 85 aa, unidentified
  REGION 1..85: note = Description of Unknown:cds_NZ_WFIY01000004.1_cds_WP_155863080.1_992 target sequence
EVKLAQGEWSNPIEFNAKCGGKDVNGIAFLHAREKDIYLTPPSFFTDWGNNKILLEEVWKNIALKEGIILDGDYKSLNKGLISFE

SEQ ID NO: 26930 - protein, 85 aa, unidentified
  REGION 1..85: note = Description of Unknown:cds_NZ_WFIY01000004.1_cds_WP_155863080.1_992 target sequence
EYMKTVELSYNFFYKYTEYLLTKTSWDFAITYLPTIDNLQHLLYGIDDSRALDAIFNAYKLADKFVELNSRYADTIFICSDHGIS

SEQ ID NO: 26931 - protein, 85 aa, unidentified
  REGION 1..85: note = Description of Unknown:cds_NZ_WFIY01000004.1_cds_WP_155863080.1_992 target sequence
KIRKKIYINKVLEKINVLKIEDGKIDWRRTKAFYGGGGIIRINLKDREENGIVSKEEFPKLVKYIVRNLENIVDDGEKVFTRIYE

SEQ ID NO: 26932 - protein, 85 aa, unidentified
  REGION 1..85: note = Description of Unknown:cds_NZ_WFIY01000004.1_cds_WP_155863080.1_992 target sequence
KESPAGDREGDIEITPRYLYGMSSDVESTDDEIIKQVIPYKTSTGDHGYFRKEDMYGVFFAYGDKIRKTREKMEVRIIDIAPTIL

SEQ ID NO: 26933 - protein, 84 aa, unidentified
  REGION 1..84: note = Description of Unknown:cds_NZ_WFIY01000004.1_cds_WP_155863080.1_992 target sequence
SSDVESTDDEIIKQVIPYKTSTGDHGYFRKEDMYGVFFAYGDKIRKTREKMEVRIIDIAPTILKLFNVQNKKSDGRALVEVLRL

SEQ ID NO: 26934 - protein, 85 aa, unidentified
  REGION 1..85: note = Description of Unknown:cds_NZ_WFIY01000004.1_cds_WP_155863080.1_992 target sequence
KFSQEGVYSRLESVYPAITPIALASLFTGLQPKNHGIVAPKIFVKGRKLSYPLTAYNSSSLTAEPIWSILGKKGYKVLVTSAPQA

SEQ ID NO: 26935 - protein, 85 aa, unidentified
  REGION 1..85: note = Description of Unknown:cds_NZ_WFIY01000004.1_cds_WP_155863080.1_992 target sequence
LPDKWKLDNVILFDPYKSKIKKCTKGYVIKEGENRILGNKWNVKIDNNTFYITLPDGKEVKLAQGEWSNPIEFNAKCGGKDVNGI

SEQ ID NO: 26936 - protein, 85 aa, unidentified
  REGION 1..85: note = Description of Unknown:cds_NZ_WFIY01000004.1_cds_WP_155863080.1_992 target sequence
AFLHAREKDIYLTPPSFFTDWGNNKILLEEVWKNIALKEGIILDGDYKSLNKGLISFEEYMKTVELSYNFFYKYTEYLLTKTSWD

SEQ ID NO: 26937 - protein, 85 aa, unidentified
  REGION 1..85: note = Description of Unknown:cds_NZ_WFIY01000004.1_cds_WP_155863080.1_992 target sequence
FAITYLPTIDNLQHLLYGIDDSRALDAIFNAYKLADKFVELNSRYADTIFICSDHGISKIRKKIYINKVLEKINVLKIEDGKIDW

SEQ ID NO: 26938 - protein, 85 aa, unidentified
  REGION 1..85: note = Description of Unknown:cds_NZ_WFIY01000004.1_cds_WP_155863080.1_992 target sequence
RRTKAFYGGGGIIRINLKDREENGIVSKEEFPKLVKYIVRNLENIVDDGEKVFTRIYEKESPAGDREGDIEITPRYLYGMSSDVE

SEQ ID NO: 26939 - protein, 85 aa, unidentified
  REGION 1..85: note = Description of Unknown:cds_NZ_WFIY01000004.1_cds_WP_155863095.1_1009 target sequence
LTKFVIVTGGVLSSVGKGTVAASIGLLLKARGYKISVVKVDPYINVDAGTMNPYMHGEVFVTDDGAETDLDLGHYERFLDINMSK

SEQ ID NO: 26940 - protein, 85 aa, unidentified
  REGION 1..85: note = Description of Unknown:cds_NZ_WFIY01000004.1_cds_WP_155863095.1_1009 target sequence
HNNITAGKVYFEVIKKEREGKYLGQTVQIIPHVTDEIKSMIRKVAELDKADIVIVEIGGTVGDIESLPFLEAVRQMKLEEEEHDI

SEQ ID NO: 26941 - protein, 85 aa, unidentified
  REGION 1..85: note = Description of Unknown:cds_NZ_WFIY01000004.1_cds_WP_155863095.1_1009 target sequence
VFIHVALVEYLNVTGELKTKPLQHSVQELRRIGIQPDIIIARSIVPIDEETKKKIALFTNVKPEYIFSNYDVSTAYEVPLILEKQ

SEQ ID NO: 26942 - protein, 85 aa, unidentified
  REGION 1..85: note = Description of Unknown:cds_NZ_WFIY01000004.1_cds_WP_155863095.1_1009 target sequence
SLPSKLLSKLDLKDTPPKLDDWVNFVNAIKNGNKVVRIGLVGKYTKLKDSYLSIKEAIYHAAAMLHLKPQIVWIESTDLEKDNAV

SEQ ID NO: 26943 - protein, 85 aa, unidentified
  REGION 1..85: note = Description of Unknown:cds_NZ_WFIY01000004.1_cds_WP_155863095.1_1009 target sequence
EEKLKGLDGIVVLPGFGARGVEGKLKAIKYARENNVPYLGICYGLQLAVVEFARNVLGLKGAHTTEVDPNTPYPVVTLLDEQKRV

SEQ ID NO: 26944 - protein, 85 aa, unidentified
  REGION 1..85: note = Description of Unknown:cds_NZ_WFIY01000004.1_cds_WP_155863095.1_1009 target sequence
TQVGGTMRLGAQKIILKEGTIAYSLYGKSEVYERHRHRYEVNPEYVDKLQSAGMIISGVSESGLVEMIELKDHKFFVATQAHPEF

SEQ ID NO: 26945 - protein, 84 aa, unidentified
  REGION 1..84: note = Description of Unknown:cds_NZ_WFIY01000004.1_cds_WP_155863095.1_1009 target sequence
YSLYGKSEVYERHRHRYEVNPEYVDKLQSAGMIISGVSESGLVEMIELKDHKFFVATQAHPEFKSRPLRPSPLFVGFLKAAAGL

SEQ ID NO: 26946 - protein, 85 aa, unidentified
  REGION 1..85: note = Description of Unknown:cds_NZ_WFIY01000004.1_cds_WP_155863095.1_1009 target sequence
LKARGYKISVVKVDPYINVDAGTMNPYMHGEVFVTDDGAETDLDLGHYERFLDINMSKHNNITAGKVYFEVIKKEREGKYLGQTV

SEQ ID NO: 26947 - protein, 85 aa, unidentified
  REGION 1..85: note = Description of Unknown:cds_NZ_WFIY01000004.1_cds_WP_155863095.1_1009 target sequence
QIIPHVTDEIKSMIRKVAELDKADIVIVEIGGTVGDIESLPFLEAVRQMKLEEEEHDIVFIHVALVEYLNVTGELKTKPLQHSVQ

SEQ ID NO: 26948 - protein, 85 aa, unidentified
  REGION 1..85: note = Description of Unknown:cds_NZ_WFIY01000004.1_cds_WP_155863095.1_1009 target sequence
ELRRIGIQPDIIIARSIVPIDEETKKKIALFTNVKPEYIFSNYDVSTAYEVPLILEKQSLPSKLLSKLDLKDTPPKLDDWVNFVN

SEQ ID NO: 26949 - protein, 85 aa, unidentified
  REGION 1..85: note = Description of Unknown:cds_NZ_WFIY01000004.1_cds_WP_155863095.1_1009 target sequence
AIKNGNKVVRIGLVGKYTKLKDSYLSIKEAIYHAAAMLHLKPQIVWIESTDLEKDNAVEEKLKGLDGIVVLPGFGARGVEGKLKA

SEQ ID NO: 26950 - protein, 85 aa, unidentified
  REGION 1..85: note = Description of Unknown:cds_NZ_WFIY01000004.1_cds_WP_155863095.1_1009 target sequence
IKYARENNVPYLGICYGLQLAVVEFARNVLGLKGAHTTEVDPNTPYPVVTLLDEQKRVTQVGGTMRLGAQKIILKEGTIAYSLYG

SEQ ID NO: 26951 - protein, 85 aa, unidentified
  REGION 1..85: note = Description of Unknown:cds_NZ_WFIY01000004.1_cds_WP_155863338.1_1304 target sequence
TEKLLDRVSITKFYPERGQVELNAVFPEEKLLWNADVHPIPVKNRNWGPTTYFLIWVSMVFIIPSWTLASVGLIFGLNILESISM

SEQ ID NO: 26952 - protein, 85 aa, unidentified
  REGION 1..85: note = Description of Unknown:cds_NZ_WFIY01000004.1_cds_WP_155863338.1_1304 target sequence
VFLGNLIVLIPMIIQSHGGARYGLAEPQLTRSRWGIYGAIFPSWVRAIIGAGWWGIESYIITEAATAIYAILAGKLSVVAYTVSH

SEQ ID NO: 26953 - protein, 85 aa, unidentified
  REGION 1..85: note = Description of Unknown:cds_NZ_WFIY01000004.1_cds_WP_155863338.1_1304 target sequence
YACYPFILSKDFPTIFWGTFIAVILAQIAVFYFSPINKSQPVLKWLARIGGPIILIAFIAVWAYFMSQVGWSANIFTLSPTTSSP

SEQ ID NO: 26954 - protein, 85 aa, unidentified
  REGION 1..85: note = Description of Unknown:cds_NZ_WFIY01000004.1_cds_WP_155863338.1_1304 target sequence
SILSILAFLNANIAYWATMALTMPDYTRFAKSQFAQTLGQIPMPFLMLAVAIMGTMTTAAALKLYGQPIWDPIVLVTLHLSAPTS

SEQ ID NO: 26955 - protein, 85 aa, unidentified
  REGION 1..85: note = Description of Unknown:cds_NZ_WFIY01000004.1_cds_WP_155863338.1_1304 target sequence
ILILLAFILATFMVNVFANAVGPAYDIANTFPKHLSWFKGSLILIAIGLALGAWSYYGNAYSYIDNWLLTYGGLLGSVEGVIIFD

SEQ ID NO: 26956 - protein, 85 aa, unidentified
  REGION 1..85: note = Description of Unknown:cds_NZ_WFIY01000004.1_cds_WP_155863338.1_1304 target sequence
YAVIRHFKFDLADIFLSKGRFRYWKGINPAAVITFIIVSAVLYLPYPGESIALDNAWILSFLLSGAIYIPLMVFWVIPKYQKELN

SEQ ID NO: 26957 - protein, 84 aa, unidentified
  REGION 1..84: note = Description of Unknown:cds_NZ_WFIY01000004.1_cds_WP_155863338.1_1304 target sequence
RYWKGINPAAVITFIIVSAVLYLPYPGESIALDNAWILSFLLSGAIYIPLMVFWVIPKYQKELNGSILNGYYSEETRKIFGVKQ

SEQ ID NO: 26958 - protein, 85 aa, unidentified
  REGION 1..85: note = Description of Unknown:cds_NZ_WFIY01000004.1_cds_WP_155863338.1_1304 target sequence
EEKLLWNADVHPIPVKNRNWGPTTYFLIWVSMVFIIPSWTLASVGLIFGLNILESISMVFLGNLIVLIPMIIQSHGGARYGLAEP

SEQ ID NO: 26959 - protein, 85 aa, unidentified
  REGION 1..85: note = Description of Unknown:cds_NZ_WFIY01000004.1_cds_WP_155863338.1_1304 target sequence
QLTRSRWGIYGAIFPSWVRAIIGAGWWGIESYIITEAATAIYAILAGKLSVVAYTVSHYACYPFILSKDFPTIFWGTFIAVILAQ

SEQ ID NO: 26960 - protein, 85 aa, unidentified
  REGION 1..85: note = Description of Unknown:cds_NZ_WFIY01000004.1_cds_WP_155863338.1_1304 target sequence
IAVFYFSPINKSQPVLKWLARIGGPIILIAFIAVWAYFMSQVGWSANIFTLSPTTSSPSILSILAFLNANIAYWATMALTMPDYT

SEQ ID NO: 26961 - protein, 85 aa, unidentified
  REGION 1..85: note = Description of Unknown:cds_NZ_WFIY01000004.1_cds_WP_155863338.1_1304 target sequence
RFAKSQFAQTLGQIPMPFLMLAVAIMGTMTTAAALKLYGQPIWDPIVLVTLHLSAPTSILILLAFILATFMVNVFANAVGPAYDI

SEQ ID NO: 26962 - protein, 85 aa, unidentified
  REGION 1..85: note = Description of Unknown:cds_NZ_WFIY01000004.1_cds_WP_155863338.1_1304 target sequence
ANTFPKHLSWFKGSLILIAIGLALGAWSYYGNAYSYIDNWLLTYGGLLGSVEGVIIFDYAVIRHFKFDLADIFLSKGRFRYWKGI

SEQ ID NO: 26963 - protein, 85 aa, unidentified
  REGION 1..85: note = Description of Unknown:cds_NC_029316.1_cds_YP_009230312.1_59 target sequence
QTRIFFVAISYSMLVYVIMFFEYYSLNIPVWDMGHALQTLYNIHNCHGSLTFFISTILYQGDRFLLFFVPTNVNSLILLQALSVG

SEQ ID NO: 26964 - protein, 85 aa, unidentified
  REGION 1..85: note = Description of Unknown:cds_NC_029316.1_cds_YP_009230312.1_59 target sequence
LAIIPLYYITKIKLKDEKLRILTVILFMLYAPLWGNYFFPYHFQSLFTLFFFSMYYFTLKDNKILSIIFSILASLVRFPFVILIV

SEQ ID NO: 26965 - protein, 85 aa, unidentified
  REGION 1..85: note = Description of Unknown:cds_NC_029316.1_cds_YP_009230312.1_59 target sequence
FYSAVELAFRKNVKINKYVLAVSAIILIASYVMSNVCPTIIPGIEKEAKLDATPSYKIPLIDKILTIPALLLPFSMVPLLSYFII

SEQ ID NO: 26966 - protein, 85 aa, unidentified
  REGION 1..85: note = Description of Unknown:cds_NC_029316.1_cds_YP_009230312.1_59 target sequence
NLVPYTVLIFITCSAGFVFPKLFIFQYSSLYTYAVFIAFIDAISKFRIKEIISIAIILLTFFSFFMFSYVSPFYPYANYPAVFFT

SEQ ID NO: 26967 - protein, 85 aa, unidentified
  REGION 1..85: note = Description of Unknown:cds_NC_029316.1_cds_YP_009230312.1_59 target sequence
PNNARELCYVVNIIPRNATILVQDNMPEFYPRTYLPDNYPLVIGDTELVYSNYSFEHNNYLVVFCLGKFNTSICYVAVDTVNDFF

SEQ ID NO: 26968 - protein, 85 aa, unidentified
  REGION 1..85: note = Description of Unknown:cds_NC_029316.1_cds_YP_009230312.1_59 target sequence
WQSLNMTNLFYSHGYGIYIIYDYIIILKYNYSSPPIINTGYSFVIPGHVSVDLPLIPGIYELNATACVCGRYTNFVIMKDFGFVH

SEQ ID NO: 26969 - protein, 84 aa, unidentified
  REGION 1..84: note = Description of Unknown:cds_NC_029316.1_cds_YP_009230312.1_59 target sequence
YDYIIILKYNYSSPPIINTGYSFVIPGHVSVDLPLIPGIYELNATACVCGRYTNFVIMKDFGFVHISTNSRTELTLIDVFDIKA

SEQ ID NO: 26970 - protein, 85 aa, unidentified
  REGION 1..85: note = Description of Unknown:cds_NC_029316.1_cds_YP_009230312.1_59 target sequence
IPVWDMGHALQTLYNIHNCHGSLTFFISTILYQGDRFLLFFVPTNVNSLILLQALSVGLAIIPLYYITKIKLKDEKLRILTVILF

SEQ ID NO: 26971 - protein, 85 aa, unidentified
  REGION 1..85: note = Description of Unknown:cds_NC_029316.1_cds_YP_009230312.1_59 target sequence
MLYAPLWGNYFFPYHFQSLFTLFFFSMYYFTLKDNKILSIIFSILASLVRFPFVILIVFYSAVELAFRKNVKINKYVLAVSAIIL

SEQ ID NO: 26972 - protein, 85 aa, unidentified
  REGION 1..85: note = Description of Unknown:cds_NC_029316.1_cds_YP_009230312.1_59 target sequence
IASYVMSNVCPTIIPGIEKEAKLDATPSYKIPLIDKILTIPALLLPFSMVPLLSYFIINLVPYTVLIFITCSAGFVFPKLFIFQY

SEQ ID NO: 26973 - protein, 85 aa, unidentified
  REGION 1..85: note = Description of Unknown:cds_NC_029316.1_cds_YP_009230312.1_59 target sequence
SSLYTYAVFIAFIDAISKFRIKEIISIAIILLTFFSFFMFSYVSPFYPYANYPAVFFTPNNARELCYVVNIIPRNATILVQDNMP

SEQ ID NO: 26974 - protein, 85 aa, unidentified
  REGION 1..85: note = Description of Unknown:cds_NC_029316.1_cds_YP_009230312.1_59 target sequence
EFYPRTYLPDNYPLVIGDTELVYSNYSFEHNNYLVVFCLGKFNTSICYVAVDTVNDFFWQSLNMTNLFYSHGYGIYIIYDYIIIL

SEQ ID NO: 26975 - protein, 85 aa, unidentified
  REGION 1..85: note = Description of Unknown:hvTR_P03264 target sequence
ASREEEQRETTPERGRGAARRPPTMEDVSSPSPSPPPPRAPPKKRLRRRLESEDEEDSSQDALVPRTPSPRPSTSTADLAIASKK

SEQ ID NO: 26976 - protein, 85 aa, unidentified
  REGION 1..85: note = Description of Unknown:hvTR_P03264 target sequence
KKKRPSPKPERPPSPEVIVDSEEEREDVALQMVGFSNPPVLIKHGKGGKRTVRRLNEDDPVARGMRTQEEKEESSEAESESTVIN

SEQ ID NO: 26977 - protein, 85 aa, unidentified
  REGION 1..85: note = Description of Unknown:hvTR_P03264 target sequence
PLSLPIVSAWEKGMEAARALMDKYHVDNDLKANFKLLPDQVEALAAVCKTWLNEEHRGLQLTFTSNKTFVTMMGRFLQAYLQSFA

SEQ ID NO: 26978 - protein, 85 aa, unidentified
  REGION 1..85: note = Description of Unknown:hvTR_P03264 target sequence
EVTYKHHEPTGCALWLHRCAEIEGELKCLHGSIMINKEHVIEMDVTSENGQRALKEQSSKAKIVKNRWGRNVVQISNTDARCCVH

SEQ ID NO: 26979 - protein, 85 aa, unidentified
  REGION 1..85: note = Description of Unknown:hvTR_P03264 target sequence
DAACPANQFSGKSCGMFFSEGAKAQVAFKQIKAFMQALYPNAQTGHGHLLMPLRCECNSKPGHAPFLGRQLPKLTPFALSNAEDL

SEQ ID NO: 26980 - protein, 85 aa, unidentified
  REGION 1..85: note = Description of Unknown:hvTR_P03264 target sequence
DADLISDKSVLASVHHPALIVFQCCNPVYRNSRAQGGGPNCDFKISAPDLLNALVMVRSLWSENFTELPRMVVPEFKWSTKHQYR

SEQ ID NO: 26981 - protein, 84 aa, unidentified
  REGION 1..84: note = Description of Unknown:hvTR_P03264 target sequence
IVFQCCNPVYRNSRAQGGGPNCDFKISAPDLLNALVMVRSLWSENFTELPRMVVPEFKWSTKHQYRNVSLPVAHSDARQNPFDF

SEQ ID NO: 26982 - protein, 85 aa, unidentified
  REGION 1..85: note = Description of Unknown:hvTR_P03264 target sequence
VSSPSPSPPPPRAPPKKRLRRRLESEDEEDSSQDALVPRTPSPRPSTSTADLAIASKKKKKRPSPKPERPPSPEVIVDSEEERED

SEQ ID NO: 26983 - protein, 85 aa, unidentified
  REGION 1..85: note = Description of Unknown:hvTR_P03264 target sequence
VALQMVGFSNPPVLIKHGKGGKRTVRRLNEDDPVARGMRTQEEKEESSEAESESTVINPLSLPIVSAWEKGMEAARALMDKYHVD

SEQ ID NO: 26984 - protein, 85 aa, unidentified
  REGION 1..85: note = Description of Unknown:hvTR_P03264 target sequence
NDLKANFKLLPDQVEALAAVCKTWLNEEHRGLQLTFTSNKTFVTMMGRFLQAYLQSFAEVTYKHHEPTGCALWLHRCAEIEGELK

SEQ ID NO: 26985 - protein, 85 aa, unidentified
  REGION 1..85: note = Description of Unknown:hvTR_P03264 target sequence
CLHGSIMINKEHVIEMDVTSENGQRALKEQSSKAKIVKNRWGRNVVQISNTDARCCVHDAACPANQFSGKSCGMFFSEGAKAQVA

SEQ ID NO: 26986 - protein, 85 aa, unidentified
  REGION 1..85: note = Description of Unknown:hvTR_P03264 target sequence
FKQIKAFMQALYPNAQTGHGHLLMPLRCECNSKPGHAPFLGRQLPKLTPFALSNAEDLDADLISDKSVLASVHHPALIVFQCCNP

SEQ ID NO: 26987 - protein, 85 aa, unidentified
  REGION 1..85: note = Description of Unknown:cds_NZ_WFIY01000004.1_cds_WP_155862818.1_647 target sequence
NVNYLTLSVFVILFAIFSFLGFYGARWRKGDLNKLSEWGLGGRRLGTLLVWFLLGADLFTAYSFIAVPAGIFASGSLYFFAIPYV

SEQ ID NO: 26988 - protein, 85 aa, unidentified
  REGION 1..85: note = Description of Unknown:cds_NZ_WFIY01000004.1_cds_WP_155862818.1_647 target sequence
AWGFGVALLTMPRLWNASRNKGYITAADFVKDRFNSRSLAIIVALTGVVAELPYIALQIVGMEAVLAVLLAGLGISSKIVTEISL

SEQ ID NO: 26989 - protein, 85 aa, unidentified
  REGION 1..85: note = Description of Unknown:cds_NZ_WFIY01000004.1_cds_WP_155862818.1_647 target sequence
ILAFIILAAFTFVSGLRGAALTGVFKDALIWITVITVIVLVPIEIGGFSKAFSDLSTNFAAYHLAKVTGSKVPPAMETLPIKLAP

SEQ ID NO: 26990 - protein, 85 aa, unidentified
  REGION 1..85: note = Description of Unknown:cds_NZ_WFIY01000004.1_cds_WP_155862818.1_647 target sequence
AYFSLALGSSFALYLYPHAINGSLSSESEKKLVYSTSFLPIYGIGLALISLFGILVYAVPGALGLIAKTGNGALAIPALIACTMP

SEQ ID NO: 26991 - protein, 85 aa, unidentified
  REGION 1..85: note = Description of Unknown:cds_NZ_WFIY01000004.1_cds_WP_155862818.1_647 target sequence
CWFVGLAFLAIFVGGLVPASIMAIAVANLFVRNVIKEFKPDLPPYSEAKLAKWTSTIFKFLALGFVFVVPATYAIQLQLLGGIII

SEQ ID NO: 26992 - protein, 85 aa, unidentified
  REGION 1..85: note = Description of Unknown:cds_NZ_WFIY01000004.1_cds_WP_155862818.1_647 target sequence
SQTLPAVFLGLYTDKLEPKSLIAGWTAGIISGVGLEYYVNFIQYHFGVFKTSLMTTPLGPLFIAIFALAINLAVTLIGTAIAYSM

SEQ ID NO: 26993 - protein, 84 aa, unidentified
  REGION 1..84: note = Description of Unknown:cds_NZ_WFIY01000004.1_cds_WP_155862818.1_647 target sequence
SLIAGWTAGIISGVGLEYYVNFIQYHFGVFKTSLMTTPLGPLFIAIFALAINLAVTLIGTAIAYSMGWRPKSKITQEEIIKTTQ

SEQ ID NO: 26994 - protein, 85 aa, unidentified
  REGION 1..85: note = Description of Unknown:cds_NZ_WFIY01000004.1_cds_WP_155862818.1_647 target sequence
RKGDLNKLSEWGLGGRRLGTLLVWFLLGADLFTAYSFIAVPAGIFASGSLYFFAIPYVAWGFGVALLTMPRLWNASRNKGYITAA

SEQ ID NO: 26995 - protein, 85 aa, unidentified
  REGION 1..85: note = Description of Unknown:cds_NZ_WFIY01000004.1_cds_WP_155862818.1_647 target sequence
DFVKDRFNSRSLAIIVALTGVVAELPYIALQIVGMEAVLAVLLAGLGISSKIVTEISLILAFIILAAFTFVSGLRGAALTGVFKD

SEQ ID NO: 26996 - protein, 85 aa, unidentified
  REGION 1..85: note = Description of Unknown:cds_NZ_WFIY01000004.1_cds_WP_155862818.1_647 target sequence
ALIWITVITVIVLVPIEIGGFSKAFSDLSTNFAAYHLAKVTGSKVPPAMETLPIKLAPAYFSLALGSSFALYLYPHAINGSLSSE

SEQ ID NO: 26997 - protein, 85 aa, unidentified
  REGION 1..85: note = Description of Unknown:cds_NZ_WFIY01000004.1_cds_WP_155862818.1_647 target sequence
SEKKLVYSTSFLPIYGIGLALISLFGILVYAVPGALGLIAKTGNGALAIPALIACTMPCWFVGLAFLAIFVGGLVPASIMAIAVA

SEQ ID NO: 26998 - protein, 85 aa, unidentified
  REGION 1..85: note = Description of Unknown:cds_NZ_WFIY01000004.1_cds_WP_155862818.1_647 target sequence
NLFVRNVIKEFKPDLPPYSEAKLAKWTSTIFKFLALGFVFVVPATYAIQLQLLGGIIISQTLPAVFLGLYTDKLEPKSLIAGWTA

SEQ ID NO: 26999 - protein, 85 aa, unidentified
  REGION 1..85: note = Description of Unknown:cds_NZ_WFIY01000004.1_cds_WP_155863689.1_1552 target sequence
AQRKDLFIRESSGLVREVSPWASLSATFGLVTGGVPILILSWLFTAPGANWVLSFLLMLPPTLGTAFLFYVAGISMPRAGGDYVF

SEQ ID NO: 27000 - protein, 85 aa, unidentified
  REGION 1..85: note = Description of Unknown:cds_NZ_WFIY01000004.1_cds_WP_155863689.1_1552 target sequence
NSRAVHPAIGFINYFGLFVAFALSLGYYSYLAAQWFGYLFSSIGLAYSNQFFLSLGCWFSSTTGSVIVGILVVFLSIILSIIPRV

SEQ ID NO: 27001 - protein, 85 aa, unidentified
  REGION 1..85: note = Description of Unknown:cds_NZ_WFIY01000004.1_cds_WP_155863689.1_1552 target sequence
QWRFVFWGGIITLVSSIIMFIFLLQITPTSFSIALSSSTGIPNAYNEVINDAMSNGLKFYPPLYATFLAGPVIWYYYTWYNLPAS

SEQ ID NO: 27002 - protein, 85 aa, unidentified
  REGION 1..85: note = Description of Unknown:cds_NZ_WFIY01000004.1_cds_WP_155863689.1_1552 target sequence
WSGEMKQVRKNVLYSIIVAILIISAYYIVFTYINLRAFGCRFLTSWSYISNCEINDPVYKSLSSIGDFTPYFALIVDHNLLIFMI

SEQ ID NO: 27003 - protein, 85 aa, unidentified
  REGION 1..85: note = Description of Unknown:cds_NZ_WFIY01000004.1_cds_WP_155863689.1_1552 target sequence
MFIALWLPNFYSNPPLVTSLVRYLFSWSFDRLMPSWLADVNDNLKAPVKATLLVGAMGIIGVLLYAFNTVVALVDVTVIFEIGYA

SEQ ID NO: 27004 - protein, 85 aa, unidentified
  REGION 1..85: note = Description of Unknown:cds_NZ_WFIY01000004.1_cds_WP_155863689.1_1552 target sequence
IFALSVALMPYVRKQVYERSVPIKRKILGIPLVSLIGFSVFAFLMFILAITWGNPILLPINIETLASLGIIYVTGSIIYFIATQL

SEQ ID NO: 27005 - protein, 84 aa, unidentified
  REGION 1..84: note = Description of Unknown:cds_NZ_WFIY01000004.1_cds_WP_155863689.1_1552 target sequence
SVPIKRKILGIPLVSLIGFSVFAFLMFILAITWGNPILLPINIETLASLGIIYVTGSIIYFIATQLNKRKGIEMSLLFQEIPPE

SEQ ID NO: 27006 - protein, 85 aa, unidentified
  REGION 1..85: note = Description of Unknown:cds_NZ_WFIY01000004.1_cds_WP_155863689.1_1552 target sequence
FGLVTGGVPILILSWLFTAPGANWVLSFLLMLPPTLGTAFLFYVAGISMPRAGGDYVFNSRAVHPAIGFINYFGLFVAFALSLGY

SEQ ID NO: 27007 - protein, 85 aa, unidentified
  REGION 1..85: note = Description of Unknown:cds_NZ_WFIY01000004.1_cds_WP_155863689.1_1552 target sequence
YSYLAAQWFGYLFSSIGLAYSNQFFLSLGCWFSSTTGSVIVGILVVFLSIILSIIPRVQWRFVFWGGIITLVSSIIMFIFLLQIT

SEQ ID NO: 27008 - protein, 85 aa, unidentified
  REGION 1..85: note = Description of Unknown:cds_NZ_WFIY01000004.1_cds_WP_155863689.1_1552 target sequence
PTSFSIALSSSTGIPNAYNEVINDAMSNGLKFYPPLYATFLAGPVIWYYYTWYNLPASWSGEMKQVRKNVLYSIIVAILIISAYY

SEQ ID NO: 27009 - protein, 85 aa, unidentified
  REGION 1..85: note = Description of Unknown:cds_NZ_WFIY01000004.1_cds_WP_155863689.1_1552 target sequence
IVFTYINLRAFGCRFLTSWSYISNCEINDPVYKSLSSIGDFTPYFALIVDHNLLIFMIMFIALWLPNFYSNPPLVTSLVRYLFSW

SEQ ID NO: 27010 - protein, 85 aa, unidentified
  REGION 1..85: note = Description of Unknown:cds_NZ_WFIY01000004.1_cds_WP_155863689.1_1552 target sequence
SFDRLMPSWLADVNDNLKAPVKATLLVGAMGIIGVLLYAFNTVVALVDVTVIFEIGYAIFALSVALMPYVRKQVYERSVPIKRKI

SEQ ID NO: 27011 - protein, 85 aa, unidentified
  REGION 1..85: note = Description of Unknown:cds_NC_007409.1_cds_YP_319884.1_53 target sequence
LFFKNLFPFSIMGGICRKVVLSPTSLFIPTNGDTITADGQEVLFAYPNNCLFVKDLTKVVRNKTIIQEKKYDENHYIIYYDNKEL

SEQ ID NO: 27012 - protein, 85 aa, unidentified
  REGION 1..85: note = Description of Unknown:cds_NC_007409.1_cds_YP_319884.1_53 target sequence
FLPKQIWEPVKSAVNAFIEKGYLDGGILLYGAPGMGKSELAKLISKWLGIGMIQKRADDIMSKYLGESEQNMARLFKEEIPQNLP

SEQ ID NO: 27013 - protein, 85 aa, unidentified
  REGION 1..85: note = Description of Unknown:cds_NC_007409.1_cds_YP_319884.1_53 target sequence
TIVFMDEVDWLGVRRRFGSTTADTASTTVGQILTVFLQLFQDEVIEKRLPVLFIATTNARLEDLDDAFKRRFPFKIYFTPPSQEM

SEQ ID NO: 27014 - protein, 85 aa, unidentified
  REGION 1..85: note = Description of Unknown:cds_NC_007409.1_cds_YP_319884.1_53 target sequence
IEYFTDKYIKKTGKDTFVVHGKQLSKKQFVNFIVGTGISIAEFKTLLETQSFDSISSSSTYLRRVIPADIPEKVFDATRVKLNGY

SEQ ID NO: 27015 - protein, 85 aa, unidentified
  REGION 1..85: note = Description of Unknown:cds_NC_007409.1_cds_YP_319884.1_53 target sequence
ISFNCDDFNGRTKFHVASFPWISWAILGSYIMLQCKKPIFELLPTDNLSVEELVSGLKQYEPTFFLMFSSSRDDYRLAILASRLK

SEQ ID NO: 27016 - protein, 85 aa, unidentified
  REGION 1..85: note = Description of Unknown:cds_NC_007409.1_cds_YP_319884.1_53 target sequence
RERGIDVVFFSEDNKLFPESVMLTPYYDISNISFVNEEEKKQLIDTVIHFYGVEAKPDELNILISSRIKGGNSTSDFLNSLQTYI

SEQ ID NO: 27017 - protein, 84 aa, unidentified
  REGION 1..84: note = Description of Unknown:cds_NC_007409.1_cds_YP_319884.1_53 target sequence
VMLTPYYDISNISFVNEEEKKQLIDTVIHFYGVEAKPDELNILISSRIKGGNSTSDFLNSLQTYILAKSKITDTEKVKDVVKLY

SEQ ID NO: 27018 - protein, 85 aa, unidentified
  REGION 1..85: note = Description of Unknown:cds_NC_007409.1_cds_YP_319884.1_53 target sequence
IPTNGDTITADGQEVLFAYPNNCLFVKDLTKVVRNKTIIQEKKYDENHYIIYYDNKELFLPKQIWEPVKSAVNAFIEKGYLDGGI

SEQ ID NO: 27019 - protein, 85 aa, unidentified
  REGION 1..85: note = Description of Unknown:cds_NC_007409.1_cds_YP_319884.1_53 target sequence
LLYGAPGMGKSELAKLISKWLGIGMIQKRADDIMSKYLGESEQNMARLFKEEIPQNLPTIVFMDEVDWLGVRRRFGSTTADTAST

SEQ ID NO: 27020 - protein, 85 aa, unidentified
  REGION 1..85: note = Description of Unknown:cds_NC_007409.1_cds_YP_319884.1_53 target sequence
TVGQILTVFLQLFQDEVIEKRLPVLFIATTNARLEDLDDAFKRRFPFKIYFTPPSQEMIEYFTDKYIKKTGKDTFVVHGKQLSKK

SEQ ID NO: 27021 - protein, 85 aa, unidentified
  REGION 1..85: note = Description of Unknown:cds_NC_007409.1_cds_YP_319884.1_53 target sequence
QFVNFIVGTGISIAEFKTLLETQSFDSISSSSTYLRRVIPADIPEKVFDATRVKLNGYISFNCDDFNGRTKFHVASFPWISWAIL

SEQ ID NO: 27022 - protein, 85 aa, unidentified
  REGION 1..85: note = Description of Unknown:cds_NC_007409.1_cds_YP_319884.1_53 target sequence
GSYIMLQCKKPIFELLPTDNLSVEELVSGLKQYEPTFFLMFSSSRDDYRLAILASRLKRERGIDVVFFSEDNKLFPESVMLTPYY

SEQ ID NO: 27023 - protein, 85 aa, unidentified
  REGION 1..85: note = Description of Unknown:cds_NZ_WFIY01000004.1_cds_WP_155863298.1_1256 target sequence
SKGLFIRESSGLVRQMDARHSFSKVFVFINPLSVYYTLLYAPALPSASWSIGIILPVILALPVFLVYLFLSEYVPRSSGEYIYIS

SEQ ID NO: 27024 - protein, 85 aa, unidentified
  REGION 1..85: note = Description of Unknown:cds_NZ_WFIY01000004.1_cds_WP_155863298.1_1256 target sequence
RILGPIPASIQAYATIIFNVLIAAIASQLEVTAGISPALQIIGLSLHDSSLFNLGTSLSTTYFFPLTTALIVIFWLISLLSPKYF

SEQ ID NO: 27025 - protein, 85 aa, unidentified
  REGION 1..85: note = Description of Unknown:cds_NZ_WFIY01000004.1_cds_WP_155863298.1_1256 target sequence
STYIYVVAIMDTLGSILISYLLLSSGIEVYSNVFNHFSSLFSGPTYQSLYSQGLNYYSTNISPLQTLVFSVLMLMWVYVWFFGPS

SEQ ID NO: 27026 - protein, 85 aa, unidentified
  REGION 1..85: note = Description of Unknown:cds_NZ_WFIY01000004.1_cds_WP_155863298.1_1256 target sequence
YFAGEYKQATRTLKLGMISGYLIASVITILLVLGVSYTISIPFFNFVALQGWGNIPISPSEGFLAWTGILTLPHPFFAIITMALS

SEQ ID NO: 27027 - protein, 85 aa, unidentified
  REGION 1..85: note = Description of Unknown:cds_NZ_WFIY01000004.1_cds_WP_155863298.1_1256 target sequence
ASIFMAIPLNFALPSRVILAMAFDRLLPEKLAYVSPRLKTPIIASAVLLPISIFFNYATIYLNLSVSLIGLVILIFIYQFLLATI

SEQ ID NO: 27028 - protein, 85 aa, unidentified
  REGION 1..85: note = Description of Unknown:cds_NZ_WFIY01000004.1_cds_WP_155863298.1_1256 target sequence
SAAIAGFKGIKGVSLTSNEKLKLMISGFLASIILGLSIVVTLWYGYINSLFGSMVFAGNELGTLILIAIDPLLGILTYILAKWYR

SEQ ID NO: 27029 - protein, 84 aa, unidentified
  REGION 1..84: note = Description of Unknown:cds_NZ_WFIY01000004.1_cds_WP_155863298.1_1256 target sequence
EKLKLMISGFLASIILGLSIVVTLWYGYINSLFGSMVFAGNELGTLILIAIDPLLGILTYILAKWYRNRQGIDVNLVFNEIPPD

SEQ ID NO: 27030 - protein, 85 aa, unidentified
  REGION 1..85: note = Description of Unknown:cds_NZ_WFIY01000004.1_cds_WP_155863298.1_1256 target sequence
FINPLSVYYTLLYAPALPSASWSIGIILPVILALPVFLVYLFLSEYVPRSSGEYIYISRILGPIPASIQAYATIIFNVLIAAIAS

SEQ ID NO: 27031 - protein, 85 aa, unidentified
  REGION 1..85: note = Description of Unknown:cds_NZ_WFIY01000004.1_cds_WP_155863298.1_1256 target sequence
QLEVTAGISPALQIIGLSLHDSSLFNLGTSLSTTYFFPLTTALIVIFWLISLLSPKYFSTYIYVVAIMDTLGSILISYLLLSSGI

SEQ ID NO: 27032 - protein, 85 aa, unidentified
  REGION 1..85: note = Description of Unknown:cds_NZ_WFIY01000004.1_cds_WP_155863298.1_1256 target sequence
EVYSNVFNHFSSLFSGPTYQSLYSQGLNYYSTNISPLQTLVFSVLMLMWVYVWFFGPSYFAGEYKQATRTLKLGMISGYLIASVI

SEQ ID NO: 27033 - protein, 85 aa, unidentified
  REGION 1..85: note = Description of Unknown:cds_NZ_WFIY01000004.1_cds_WP_155863298.1_1256 target sequence
TILLVLGVSYTISIPFFNFVALQGWGNIPISPSEGFLAWTGILTLPHPFFAIITMALSASIFMAIPLNFALPSRVILAMAFDRLL

SEQ ID NO: 27034 - protein, 85 aa, unidentified
  REGION 1..85: note = Description of Unknown:cds_NZ_WFIY01000004.1_cds_WP_155863298.1_1256 target sequence
PEKLAYVSPRLKTPIIASAVLLPISIFFNYATIYLNLSVSLIGLVILIFIYQFLLATISAAIAGFKGIKGVSLTSNEKLKLMISG

SEQ ID NO: 27035 - protein, 85 aa, unidentified
  REGION 1..85: note = Description of Unknown:cds_NZ_WFIY01000004.1_cds_WP_155863303.1_1261 target sequence
QGKKTFVRESSGLIREIDAKDAFSMNFSYLGPAAGVAYPLTFAVALAGASWIISGVIAALLMLPVAIMYYYLSKIIPRSAGDYIY

SEQ ID NO: 27036 - protein, 85 aa, unidentified
  REGION 1..85: note = Description of Unknown:cds_NZ_WFIY01000004.1_cds_WP_155863303.1_1261 target sequence
ISRTLGPRIGFIQAISNIFIFASGVPILAQLELPLVLEPSLQILGITFHDPSLISFASNFAFCSESSPIFFGTTLLIIGLVTLVT

SEQ ID NO: 27037 - protein, 85 aa, unidentified
  REGION 1..85: note = Description of Unknown:cds_NZ_WFIY01000004.1_cds_WP_155863303.1_1261 target sequence
IVRTKIFARIITTLTAVQIIGTLGMIVGLALVGSSYPAIFTKVSESFGGPGYSSLSPSATYTINPVQTLVLMSAIAAFLFLYNNA

SEQ ID NO: 27038 - protein, 85 aa, unidentified
  REGION 1..85: note = Description of Unknown:cds_NZ_WFIY01000004.1_cds_WP_155863303.1_1261 target sequence
PTYFGGEIKKAEKSLFSGIIISYIITAILSVILIYELQYFVGEGFYDYTSSMGWSSSSGGIPIATTSLLAYVAVPFLNNVPLIVL

SEQ ID NO: 27039 - protein, 85 aa, unidentified
  REGION 1..85: note = Description of Unknown:cds_NZ_WFIY01000004.1_cds_WP_155863303.1_1261 target sequence
IVAGAITWYLPYSIIDLAIPSRTLFAIAFDWLAPSFFTKVSEKFRTPIYSTLFIVALAVVFDVLEIYLGFSESAMTTIIVFMLYQ

SEQ ID NO: 27040 - protein, 85 aa, unidentified
  REGION 1..85: note = Description of Unknown:cds_NZ_WFIY01000004.1_cds_WP_155863303.1_1261 target sequence
YFTAAISAIVISKKKLYGVKDNKLAILGGISAFAVVFPAILMITYAVICKAFSSVVFVNLPLNIGIIVGVPIVSIALYEVVRKIR

SEQ ID NO: 27041 - protein, 84 aa, unidentified
  REGION 1..84: note = Description of Unknown:cds_NZ_WFIY01000004.1_cds_WP_155863303.1_1261 target sequence
VKDNKLAILGGISAFAVVFPAILMITYAVICKAFSSVVFVNLPLNIGIIVGVPIVSIALYEVVRKIREKQGIDLSLTFKEIPPE

SEQ ID NO: 27042 - protein, 85 aa, unidentified
  REGION 1..85: note = Description of Unknown:cds_NZ_WFIY01000004.1_cds_WP_155863303.1_1261 target sequence
SYLGPAAGVAYPLTFAVALAGASWIISGVIAALLMLPVAIMYYYLSKIIPRSAGDYIYISRTLGPRIGFIQAISNIFIFASGVPI

SEQ ID NO: 27043 - protein, 85 aa, unidentified
  REGION 1..85: note = Description of Unknown:cds_NZ_WFIY01000004.1_cds_WP_155863303.1_1261 target sequence
LAQLELPLVLEPSLQILGITFHDPSLISFASNFAFCSESSPIFFGTTLLIIGLVTLVTIVRTKIFARIITTLTAVQIIGTLGMIV

SEQ ID NO: 27044 - protein, 85 aa, unidentified
  REGION 1..85: note = Description of Unknown:cds_NZ_WFIY01000004.1_cds_WP_155863303.1_1261 target sequence
GLALVGSSYPAIFTKVSESFGGPGYSSLSPSATYTINPVQTLVLMSAIAAFLFLYNNAPTYFGGEIKKAEKSLFSGIIISYIITA

SEQ ID NO: 27045 - protein, 85 aa, unidentified
  REGION 1..85: note = Description of Unknown:cds_NZ_WFIY01000004.1_cds_WP_155863303.1_1261 target sequence
ILSVILIYELQYFVGEGFYDYTSSMGWSSSSGGIPIATTSLLAYVAVPFLNNVPLIVLIVAGAITWYLPYSIIDLAIPSRTLFAI

SEQ ID NO: 27046 - protein, 85 aa, unidentified
  REGION 1..85: note = Description of Unknown:cds_NZ_WFIY01000004.1_cds_WP_155863303.1_1261 target sequence
AFDWLAPSFFTKVSEKFRTPIYSTLFIVALAVVFDVLEIYLGFSESAMTTIIVFMLYQYFTAAISAIVISKKKLYGVKDNKLAIL

SEQ ID NO: 27047 - protein, 85 aa, unidentified
  REGION 1..85: note = Description of Unknown:cds_NZ_WFIY01000004.1_cds_WP_155862436.1_181 target sequence
LSEKFASISPAEFFKRNPELAGFSNPARALYQALREMVENSLDATDVHEILPSIKIIIDLIDQDKQIYKLTVEDNGIGIPPHVVP

SEQ ID NO: 27048 - protein, 85 aa, unidentified
  REGION 1..85: note = Description of Unknown:cds_NZ_WFIY01000004.1_cds_WP_155862436.1_181 target sequence
DAFGRVLYSSKYVIRQTRGMYGLGVKAAVLYSQMYQDRPVEIMTSPINSKRIYFFKLKIDVTKNEPIIYERSSILNDKGFHGTSV

SEQ ID NO: 27049 - protein, 85 aa, unidentified
  REGION 1..85: note = Description of Unknown:cds_NZ_WFIY01000004.1_cds_WP_155862436.1_181 target sequence
TLYLLGDWQRSKARIYEYIKRTYIVAPYAEFFFKDPEGNVVYYKRLTTKIPEPPKEVKPHPYGVDIELLKNMIAKQKNDYEVKDF

SEQ ID NO: 27050 - protein, 85 aa, unidentified
  REGION 1..85: note = Description of Unknown:cds_NZ_WFIY01000004.1_cds_WP_155862436.1_181 target sequence
LTKEFQSVGDVTALKILEMAKINPDKKIKSLKDDELARLTEAMKKFEDFRPPSPDALSVIGADLIELSLKNMFNPEFVAALTRKP

SEQ ID NO: 27051 - protein, 85 aa, unidentified
  REGION 1..85: note = Description of Unknown:cds_NZ_WFIY01000004.1_cds_WP_155862436.1_181 target sequence
KAYQGHPFIVEVGIAYGGAIQPMEEPLVLRYANKIPLIYDEKSDVIWKVVEEIDWKRYGIEEEQKPLVVMVHLCSTKVPYKSAGK

SEQ ID NO: 27052 - protein, 85 aa, unidentified
  REGION 1..85: note = Description of Unknown:cds_NZ_WFIY01000004.1_cds_WP_155862436.1_181 target sequence
ESIADVEEIEKEIKNGIMEVSRKLRLYISEKKKEEEARKKMLTYLKYIPEIARSLAVFATDDKKELIPKVQDEIQSKLFEIVKKK

SEQ ID NO: 27053 - protein, 84 aa, unidentified
  REGION 1..84: note = Description of Unknown:cds_NZ_WFIY01000004.1_cds_WP_155862436.1_181 target sequence
EVSRKLRLYISEKKKEEEARKKMLTYLKYIPEIARSLAVFATDDKKELIPKVQDEIQSKLFEIVKKKLDVKDEEEYKMYRVEAL

SEQ ID NO: 27054 - protein, 85 aa, unidentified
  REGION 1..85: note = Description of Unknown:cds_NZ_WFIY01000004.1_cds_WP_155862436.1_181 target sequence
RALYQALREMVENSLDATDVHEILPSIKIIIDLIDQDKQIYKLTVEDNGIGIPPHVVPDAFGRVLYSSKYVIRQTRGMYGLGVKA

SEQ ID NO: 27055 - protein, 85 aa, unidentified
  REGION 1..85: note = Description of Unknown:cds_NZ_WFIY01000004.1_cds_WP_155862436.1_181 target sequence
AVLYSQMYQDRPVEIMTSPINSKRIYFFKLKIDVTKNEPIIYERSSILNDKGFHGTSVTLYLLGDWQRSKARIYEYIKRTYIVAP

SEQ ID NO: 27056 - protein, 85 aa, unidentified
  REGION 1..85: note = Description of Unknown:cds_NZ_WFIY01000004.1_cds_WP_155862436.1_181 target sequence
YAEFFFKDPEGNVVYYKRLTTKIPEPPKEVKPHPYGVDIELLKNMIAKQKNDYEVKDFLTKEFQSVGDVTALKILEMAKINPDKK

SEQ ID NO: 27057 - protein, 85 aa, unidentified
  REGION 1..85: note = Description of Unknown:cds_NZ_WFIY01000004.1_cds_WP_155862436.1_181 target sequence
IKSLKDDELARLTEAMKKFEDFRPPSPDALSVIGADLIELSLKNMFNPEFVAALTRKPKAYQGHPFIVEVGIAYGGAIQPMEEPL

SEQ ID NO: 27058 - protein, 85 aa, unidentified
  REGION 1..85: note = Description of Unknown:cds_NZ_WFIY01000004.1_cds_WP_155862436.1_181 target sequence
VLRYANKIPLIYDEKSDVIWKVVEEIDWKRYGIEEEQKPLVVMVHLCSTKVPYKSAGKESIADVEEIEKEIKNGIMEVSRKLRLY

SEQ ID NO: 27059 - protein, 85 aa, unidentified
  REGION 1..85: note = Description of Unknown:cds_NZ_WFIY01000004.1_cds_WP_155863942.1_1860 target sequence
VDSEKLTRKYYSKLISLPSARILLSIDFIEGGIIAFRGLEIGILFFYSFLAYSVSLLAILGKRIRTTLTLISVFSALYLILSLFP

SEQ ID NO: 27060 - protein, 85 aa, unidentified
  REGION 1..85: note = Description of Unknown:cds_NZ_WFIY01000004.1_cds_WP_155863942.1_1860 target sequence
IPYVFIFGTFIPLVNYSLLVDYNEKISVTLASIASLIPSIILADLTILGIVYVIAVGISSYVYVALINRKGNKIVGISSLKIVRP

SEQ ID NO: 27061 - protein, 85 aa, unidentified
  REGION 1..85: note = Description of Unknown:cds_NZ_WFIY01000004.1_cds_WP_155863942.1_1860 target sequence
FLRALNYNKNAELEEFLDKISIPSMLNILTVKINETYLVLPQIHFGMYGEIGSSKFPYHVEEVIPNSFVFHGPGSHEIDLTSSKE

SEQ ID NO: 27062 - protein, 85 aa, unidentified
  REGION 1..85: note = Description of Unknown:cds_NZ_WFIY01000004.1_cds_WP_155863942.1_1860 target sequence
SRRIAQEILNTRFEKANFTGITQEMLGDFKITTLNFDKFTLSFVERPLKGIDDLPGALWRDMISTNNFLVDCHNETLVDEIGRKE

SEQ ID NO: 27063 - protein, 85 aa, unidentified
  REGION 1..85: note = Description of Unknown:cds_NZ_WFIY01000004.1_cds_WP_155863942.1_1860 target sequence
YVTLKNFVYGKERYLGNRKLKIGYAEGEVNCEGLCKNKVRVLSFYSPEENKKVSIIYLYANNACHGLREKIEQSLSDLTNPILVT

SEQ ID NO: 27064 - protein, 85 aa, unidentified
  REGION 1..85: note = Description of Unknown:cds_NZ_WFIY01000004.1_cds_WP_155863942.1_1860 target sequence
PDDHSCTAMSFGNLYQPATLCEQLIIASRELVKESLEKMEDVKNIEFGIIKVKTRVIGKIISSMVDGLEKVGGFAMKTFWIPIII

SEQ ID NO: 27065 - protein, 84 aa, unidentified
  REGION 1..84: note = Description of Unknown:cds_NZ_WFIY01000004.1_cds_WP_155863942.1_1860 target sequence
TLCEQLIIASRELVKESLEKMEDVKNIEFGIIKVKTRVIGKIISSMVDGLEKVGGFAMKTFWIPIIIPYVILVVFLFIHEIFKI

SEQ ID NO: 27066 - protein, 85 aa, unidentified
  REGION 1..85: note = Description of Unknown:cds_NZ_WFIY01000004.1_cds_WP_155863942.1_1860 target sequence
FIEGGIIAFRGLEIGILFFYSFLAYSVSLLAILGKRIRTTLTLISVFSALYLILSLFPIPYVFIFGTFIPLVNYSLLVDYNEKIS

SEQ ID NO: 27067 - protein, 85 aa, unidentified
  REGION 1..85: note = Description of Unknown:cds_NZ_WFIY01000004.1_cds_WP_155863942.1_1860 target sequence
VTLASIASLIPSIILADLTILGIVYVIAVGISSYVYVALINRKGNKIVGISSLKIVRPFLRALNYNKNAELEEFLDKISIPSMLN

SEQ ID NO: 27068 - protein, 85 aa, unidentified
  REGION 1..85: note = Description of Unknown:cds_NZ_WFIY01000004.1_cds_WP_155863942.1_1860 target sequence
ILTVKINETYLVLPQIHFGMYGEIGSSKFPYHVEEVIPNSFVFHGPGSHEIDLTSSKESRRIAQEILNTRFEKANFTGITQEMLG

SEQ ID NO: 27069 - protein, 85 aa, unidentified
  REGION 1..85: note = Description of Unknown:cds_NZ_WFIY01000004.1_cds_WP_155863942.1_1860 target sequence
DFKITTLNFDKFTLSFVERPLKGIDDLPGALWRDMISTNNFLVDCHNETLVDEIGRKEYVTLKNFVYGKERYLGNRKLKIGYAEG

SEQ ID NO: 27070 - protein, 85 aa, unidentified
  REGION 1..85: note = Description of Unknown:cds_NZ_WFIY01000004.1_cds_WP_155863942.1_1860 target sequence
EVNCEGLCKNKVRVLSFYSPEENKKVSIIYLYANNACHGLREKIEQSLSDLTNPILVTPDDHSCTAMSFGNLYQPATLCEQLIIA

SEQ ID NO: 27071 - protein, 85 aa, unidentified
  REGION 1..85: note = Description of Unknown:hvTR_P52355 target sequence
NKVLIFDRNMYPRGVKKNVLGRQRYGLKTIKRTLVHKPANKYVSRFTKQFHRRIIPIKQLDESKLDALSLRELEQLKLIIEEKQE

SEQ ID NO: 27072 - protein, 85 aa, unidentified
  REGION 1..85: note = Description of Unknown:hvTR_P52355 target sequence
EKRAQTHALTFFANLPTAPFGSSYTAEALGLRKYSGEARDPAHRIRDRFPRNHEKIYLEKEELMTTDLLLRYKNCLNSLNREQHQ

SEQ ID NO: 27073 - protein, 85 aa, unidentified
  REGION 1..85: note = Description of Unknown:hvTR_P52355 target sequence
QILGDRVFSLTNSPSLAFSLAIIEEACIYYKYHFVHNLPIDPQDLFMYTITIMKFEYFNKLNMAKLCCVFNDNGHGDIEYRIFRQ

SEQ ID NO: 27074 - protein, 85 aa, unidentified
  REGION 1..85: note = Description of Unknown:hvTR_P52355 target sequence
LCGKPVYDRDMPNTEYEVQQQTPGSFQYPAQQALSFIVTFARILRQIKERILQTKQPQFIRDFDQDRVSEQYQCGMISRLVGDQF

SEQ ID NO: 27075 - protein, 85 aa, unidentified
  REGION 1..85: note = Description of Unknown:hvTR_P52355 target sequence
NNHQCDDIGCQTRIQRMMSPWKPSLYFCTYLPKEFVEFGLHPNMPEEYNSFNVACSTTPSCSFASQQSKQTVQLNLQTKKQAKCK

SEQ ID NO: 27076 - protein, 85 aa, unidentified
  REGION 1..85: note = Description of Unknown:hvTR_P52355 target sequence
KLLTADKTNKGQKTNELRENRLKKDWSKEVDSIDFETNTTLQEDETRFVFIENDTSMKSAKIKENNGEENSDNEMELDLDYEDVE

SEQ ID NO: 27077 - protein, 84 aa, unidentified
  REGION 1..84: note = Description of Unknown:hvTR_P52355 target sequence
LRENRLKKDWSKEVDSIDFETNTTLQEDETRFVFIENDTSMKSAKIKENNGEENSDNEMELDLDYEDVETCETDINDTDSDDSD

SEQ ID NO: 27078 - protein, 85 aa, unidentified
  REGION 1..85: note = Description of Unknown:hvTR_P52355 target sequence
KTIKRTLVHKPANKYVSRFTKQFHRRIIPIKQLDESKLDALSLRELEQLKLIIEEKQEEKRAQTHALTFFANLPTAPFGSSYTAE

SEQ ID NO: 27079 - protein, 85 aa, unidentified
  REGION 1..85: note = Description of Unknown:hvTR_P52355 target sequence
ALGLRKYSGEARDPAHRIRDRFPRNHEKIYLEKEELMTTDLLLRYKNCLNSLNREQHQQILGDRVFSLTNSPSLAFSLAIIEEAC

SEQ ID NO: 27080 - protein, 85 aa, unidentified
  REGION 1..85: note = Description of Unknown:hvTR_P52355 target sequence
IYYKYHFVHNLPIDPQDLFMYTITIMKFEYFNKLNMAKLCCVFNDNGHGDIEYRIFRQLCGKPVYDRDMPNTEYEVQQQTPGSFQ

SEQ ID NO: 27081 - protein, 85 aa, unidentified
  REGION 1..85: note = Description of Unknown:hvTR_P52355 target sequence
YPAQQALSFIVTFARILRQIKERILQTKQPQFIRDFDQDRVSEQYQCGMISRLVGDQFNNHQCDDIGCQTRIQRMMSPWKPSLYF

SEQ ID NO: 27082 - protein, 85 aa, unidentified
  REGION 1..85: note = Description of Unknown:hvTR_P52355 target sequence
CTYLPKEFVEFGLHPNMPEEYNSFNVACSTTPSCSFASQQSKQTVQLNLQTKKQAKCKKLLTADKTNKGQKTNELRENRLKKDWS

SEQ ID NO: 27083 - protein, 85 aa, unidentified
  REGION 1..85: note = Description of Unknown:cds_NZ_WFIY01000004.1_cds_64 target sequence
VKFVEIKDFQVTYLGRGKPSLVIDEFEIEDGESVLIVGKSGSGKSTLVNAINGVIPNMINAQETGEISVYGKDPRKQPIYETAKL

SEQ ID NO: 27084 - protein, 85 aa, unidentified
  REGION 1..85: note = Description of Unknown:cds_NZ_WFIY01000004.1_cds_64 target sequence
VGTLLQDPETQIFNYTVIDEIAFGPENFMLPKEEIIERVYEASKLTGISHLLHRDTNTLSGGEMQRVALASILAMRPRALILDEP

SEQ ID NO: 27085 - protein, 85 aa, unidentified
  REGION 1..85: note = Description of Unknown:cds_NZ_WFIY01000004.1_cds_64 target sequence
TSNIDPKGTAEIFSLIKNFRQERRSLIIVEHKLERVLPYVDRVVLIDKGRIVLDVPKEELIESSDLLASAGVEIPDYYLYLKKVG

SEQ ID NO: 27086 - protein, 85 aa, unidentified
  REGION 1..85: note = Description of Unknown:cds_NZ_WFIY01000004.1_cds_64 target sequence
AKSLSKELLKGYKYVPPPRRKGEKEVLYAKVKVWTKQGKTLVDTEISIKQGEIVALMGNNGAGKSTLLKAIMGMLDRKLKAEVKL

SEQ ID NO: 27087 - protein, 85 aa, unidentified
  REGION 1..85: note = Description of Unknown:cds_NZ_WFIY01000004.1_cds_64 target sequence
VVEGKDLSKKGLAERGSYIGYLPQNFDIMFVKRKVEDEVAFAMKNRKTFSEEKLNNILQMFSLQRVRHDDPLLLSMGQRRRVAMA

SEQ ID NO: 27088 - protein, 85 aa, unidentified
  REGION 1..85: note = Description of Unknown:cds_NZ_WFIY01000004.1_cds_64 target sequence
SILASGAKILLMDEPTSGQDWYHREILGREVQNLREKGYTFLIVTHDSRFVDKFCDRVLVMKEGKIVFNGTPEEAFLREDLGIYP

SEQ ID NO: 27089 - protein, 84 aa, unidentified
  REGION 1..84: note = Description of Unknown:cds_NZ_WFIY01000004.1_cds_64 target sequence
GQDWYHREILGREVQNLREKGYTFLIVTHDSRFVDKFCDRVLVMKEGKIVFNGTPEEAFLREDLGIYPPTEYVVTKLGTLEFSL

SEQ ID NO: 27090 - protein, 85 aa, unidentified
  REGION 1..85: note = Description of Unknown:cds_NZ_WFIY01000004.1_cds_64 target sequence
IEDGESVLIVGKSGSGKSTLVNAINGVIPNMINAQETGEISVYGKDPRKQPIYETAKLVGTLLQDPETQIFNYTVIDEIAFGPEN

SEQ ID NO: 27091 - protein, 85 aa, unidentified
  REGION 1..85: note = Description of Unknown:cds_NZ_WFIY01000004.1_cds_64 target sequence
FMLPKEEIIERVYEASKLTGISHLLHRDTNTLSGGEMQRVALASILAMRPRALILDEPTSNIDPKGTAEIFSLIKNFRQERRSLI

SEQ ID NO: 27092 - protein, 85 aa, unidentified
  REGION 1..85: note = Description of Unknown:cds_NZ_WFIY01000004.1_cds_64 target sequence
IVEHKLERVLPYVDRVVLIDKGRIVLDVPKEELIESSDLLASAGVEIPDYYLYLKKVGAKSLSKELLKGYKYVPPPRRKGEKEVL

SEQ ID NO: 27093 - protein, 85 aa, unidentified
  REGION 1..85: note = Description of Unknown:cds_NZ_WFIY01000004.1_cds_64 target sequence
YAKVKVWTKQGKTLVDTEISIKQGEIVALMGNNGAGKSTLLKAIMGMLDRKLKAEVKLVVEGKDLSKKGLAERGSYIGYLPQNFD

SEQ ID NO: 27094 - protein, 85 aa, unidentified
  REGION 1..85: note = Description of Unknown:cds_NZ_WFIY01000004.1_cds_64 target sequence
IMFVKRKVEDEVAFAMKNRKTFSEEKLNNILQMFSLQRVRHDDPLLLSMGQRRRVAMASILASGAKILLMDEPTSGQDWYHREIL

SEQ ID NO: 27095 - protein, 85 aa, unidentified
  REGION 1..85: note = Description of Unknown:cds_NC_031988.1_cds_YP_009325517.1_4 target sequence
VHKAFLLILLLVSPPCLGKFPIYTIPDKLGPWSPIDIHHLSCPNNLIVEDEGCTSLSGFSYMELKVGYITTIKVSGFTCTGVVTE

SEQ ID NO: 27096 - protein, 85 aa, unidentified
  REGION 1..85: note = Description of Unknown:cds_NC_031988.1_cds_YP_009325517.1_4 target sequence
AETYTNFVGYVTTTFKRKHFRPTPDGCRNAYNWKTAGDPRYEESLHNPYPDYHWLRTVTTTKESLLIISPSVVDMDPYDKSLHSK

SEQ ID NO: 27097 - protein, 85 aa, unidentified
  REGION 1..85: note = Description of Unknown:cds_NC_031988.1_cds_YP_009325517.1_4 target sequence
VFPTGRCSGISVSSTSCSTNHDYTLWLPEDPKPGSSCDIFTTSKGKKASKGGKICGFVDERGLYKSLKGSCKLKLCGISGLRLMD

SEQ ID NO: 27098 - protein, 85 aa, unidentified
  REGION 1..85: note = Description of Unknown:cds_NC_031988.1_cds_YP_009325517.1_4 target sequence
GSWVSIQNPEDTKWCSSDQLVSIHDFHSDEIEHLVVEELVKKREECLDALESIVTTKSVSFRRLSHLRKLVPGFGKAYTIVNKTL

SEQ ID NO: 27099 - protein, 85 aa, unidentified
  REGION 1..85: note = Description of Unknown:cds_NC_031988.1_cds_YP_009325517.1_4 target sequence
MEADAHYKSVRAWNEIIPSKGCLKVGERCYPPFNGVFFNGIILGPDGHVLIPEMQSSLLQQHMELLESSMIPLMHPLADPSTVFR

SEQ ID NO: 27100 - protein, 85 aa, unidentified
  REGION 1..85: note = Description of Unknown:cds_NC_031988.1_cds_YP_009325517.1_4 target sequence
GDDEAEDFVEVHLPDVQKQISGVDLGLSEWERYLLIGVAALGLFAFAIILAVCCRRGRRRKRTPSDPMEMIRKVSVTSQSGKMVP

SEQ ID NO: 27101 - protein, 84 aa, unidentified
  REGION 1..84: note = Description of Unknown:cds_NC_031988.1_cds_YP_009325517.1_4 target sequence
QKQISGVDLGLSEWERYLLIGVAALGLFAFAIILAVCCRRGRRRKRTPSDPMEMIRKVSVTSQSGKMVPSWESYKNGNGSRLGV

SEQ ID NO: 27102 - protein, 85 aa, unidentified
  REGION 1..85: note = Description of Unknown:cds_NC_031988.1_cds_YP_009325517.1_4 target sequence
KLGPWSPIDIHHLSCPNNLIVEDEGCTSLSGFSYMELKVGYITTIKVSGFTCTGVVTEAETYTNFVGYVTTTFKRKHFRPTPDGC

SEQ ID NO: 27103 - protein, 85 aa, unidentified
  REGION 1..85: note = Description of Unknown:cds_NC_031988.1_cds_YP_009325517.1_4 target sequence
RNAYNWKTAGDPRYEESLHNPYPDYHWLRTVTTTKESLLIISPSVVDMDPYDKSLHSKVFPTGRCSGISVSSTSCSTNHDYTLWL

SEQ ID NO: 27104 - protein, 85 aa, unidentified
  REGION 1..85: note = Description of Unknown:cds_NC_031988.1_cds_YP_009325517.1_4 target sequence
PEDPKPGSSCDIFTTSKGKKASKGGKICGFVDERGLYKSLKGSCKLKLCGISGLRLMDGSWVSIQNPEDTKWCSSDQLVSIHDFH

SEQ ID NO: 27105 - protein, 85 aa, unidentified
  REGION 1..85: note = Description of Unknown:cds_NC_031988.1_cds_YP_009325517.1_4 target sequence
SDEIEHLVVEELVKKREECLDALESIVTTKSVSFRRLSHLRKLVPGFGKAYTIVNKTLMEADAHYKSVRAWNEIIPSKGCLKVGE

SEQ ID NO: 27106 - protein, 85 aa, unidentified
  REGION 1..85: note = Description of Unknown:cds_NC_031988.1_cds_YP_009325517.1_4 target sequence
RCYPPFNGVFFNGIILGPDGHVLIPEMQSSLLQQHMELLESSMIPLMHPLADPSTVFRGDDEAEDFVEVHLPDVQKQISGVDLGL

SEQ ID NO: 27107 - protein, 85 aa, unidentified
  REGION 1..85: note = Description of Unknown:cds_NC_020808.1_cds_YP_007641395.1_4 target sequence
PLQAIPLFSLILPVLVAGKFPIYTIPDKIGPWSPIDINHLSCPNNLVVEDEGCTTLTAFSYMELKVGYITTIKVSGFTCTGVVTE

SEQ ID NO: 27108 - protein, 85 aa, unidentified
  REGION 1..85: note = Description of Unknown:cds_NC_020808.1_cds_YP_007641395.1_4 target sequence
AETYTNFVGYVTTTFRRKHFRPTASACREAYNWKATGDPRYEESLHNPYPDSHWLRTVKTTKESLLIISPSVADMDAYDKALYSK

SEQ ID NO: 27109 - protein, 85 aa, unidentified
  REGION 1..85: note = Description of Unknown:cds_NC_020808.1_cds_YP_007641395.1_4 target sequence
IFPNGKCLGVSLSSPFCSTNHDYTLWMPENPKPGVSCDIFTTSKGKKATKDGKLCGFVDERGLYKSLKGACKLKLCGVMGLRLMD

SEQ ID NO: 27110 - protein, 85 aa, unidentified
  REGION 1..85: note = Description of Unknown:cds_NC_020808.1_cds_YP_007641395.1_4 target sequence
GSWVSLQKTEESEWCSPNQLINIHDFHSDEIEHMVVEELVKKREECLDALESIMTTKSISFRRLSHLRKLVPGFGKAYTLINKTL

SEQ ID NO: 27111 - protein, 85 aa, unidentified
  REGION 1..85: note = Description of Unknown:cds_NC_020808.1_cds_YP_007641395.1_4 target sequence
MEADAHYKSVREWTEVIPSKGCLKAGGGCYPHYNRVFFNGIILSPDGHVLIPEMQSALLQQHIELLESSVIPLRHPLADPSTVFK

SEQ ID NO: 27112 - protein, 85 aa, unidentified
  REGION 1..85: note = Description of Unknown:cds_NC_020808.1_cds_YP_007641395.1_4 target sequence
GDDEAEEFVEVHLPDTQKQISGIDLGLPEWKRYFLMGMSAIGFLALTIILAVCCRRIKRRKQSKPNPVELIRKVSVTSQSGRAIP

SEQ ID NO: 27113 - protein, 84 aa, unidentified
  REGION 1..84: note = Description of Unknown:cds_NC_020808.1_cds_YP_007641395.1_4 target sequence
QKQISGIDLGLPEWKRYFLMGMSAIGFLALTIILAVCCRRIKRRKQSKPNPVELIRKVSVTSQSGRAIPSWESYKVKTGDQPQV

SEQ ID NO: 27114 - protein, 85 aa, unidentified
  REGION 1..85: note = Description of Unknown:cds_NC_020808.1_cds_YP_007641395.1_4 target sequence
KIGPWSPIDINHLSCPNNLVVEDEGCTTLTAFSYMELKVGYITTIKVSGFTCTGVVTEAETYTNFVGYVTTTFRRKHFRPTASAC

SEQ ID NO: 27115 - protein, 85 aa, unidentified
  REGION 1..85: note = Description of Unknown:cds_NC_020808.1_cds_YP_007641395.1_4 target sequence
REAYNWKATGDPRYEESLHNPYPDSHWLRTVKTTKESLLIISPSVADMDAYDKALYSKIFPNGKCLGVSLSSPFCSTNHDYTLWM

SEQ ID NO: 27116 - protein, 85 aa, unidentified
  REGION 1..85: note = Description of Unknown:cds_NC_020808.1_cds_YP_007641395.1_4 target sequence
PENPKPGVSCDIFTTSKGKKATKDGKLCGFVDERGLYKSLKGACKLKLCGVMGLRLMDGSWVSLQKTEESEWCSPNQLINIHDFH

SEQ ID NO: 27117 - protein, 85 aa, unidentified
  REGION 1..85: note = Description of Unknown:cds_NC_020808.1_cds_YP_007641395.1_4 target sequence
SDEIEHMVVEELVKKREECLDALESIMTTKSISFRRLSHLRKLVPGFGKAYTLINKTLMEADAHYKSVREWTEVIPSKGCLKAGG

SEQ ID NO: 27118 - protein, 85 aa, unidentified
  REGION 1..85: note = Description of Unknown:cds_NC_020808.1_cds_YP_007641395.1_4 target sequence
GCYPHYNRVFFNGIILSPDGHVLIPEMQSALLQQHIELLESSVIPLRHPLADPSTVFKGDDEAEEFVEVHLPDTQKQISGIDLGL

SEQ ID NO: 27119 - protein, 85 aa, unidentified
  REGION 1..85: note = Description of Unknown:cds_NC_025385.1_cds_YP_009094330.1_4 target sequence
PSQAVFLVLTTVFSQCVGKFPIYTIPDKLGPWSPIDIHHLSCPNNLVVEDDGCTTLSGFTYMELKVGYITTIKVDGFTCTGIVTE

SEQ ID NO: 27120 - protein, 85 aa, unidentified
  REGION 1..85: note = Description of Unknown:cds_NC_025385.1_cds_YP_009094330.1_4 target sequence
AETYTNFVGYVTTTFKRKHFRPGPSACRDAYNWKAAGDPRYEESLHNPYPDSHWLRTVTTTKESLLIISPSVVDMDAYDKSLLSK

SEQ ID NO: 27121 - protein, 85 aa, unidentified
  REGION 1..85: note = Description of Unknown:cds_NC_025385.1_cds_YP_009094330.1_4 target sequence
IFPNGKCPGVSIASPFCSTNHDYTIWMPENTKTGMSCDIFTTSKGKRATKDGKLCGFVDERGLYKSLKGSCKLKLCGVSGLRLMD

SEQ ID NO: 27122 - protein, 85 aa, unidentified
  REGION 1..85: note = Description of Unknown:cds_NC_025385.1_cds_YP_009094330.1_4 target sequence
GSWVSIQNHEEAKWCPPDQLVNVHDFHSDEIEHLIVEELVKKREECLDALESIMTTKSISFRRLSHLRKLVPGFGKAYTIINKTL

SEQ ID NO: 27123 - protein, 85 aa, unidentified
  REGION 1..85: note = Description of Unknown:cds_NC_025385.1_cds_YP_009094330.1_4 target sequence
MEADAHYKSIREWSEIIPSKGCLVAGGRCYHHHNGVFFNGIILSPDGHVLIPEMQSALLQQHIELLESSVIPLMHPLADPSTVFK

SEQ ID NO: 27124 - protein, 85 aa, unidentified
  REGION 1..85: note = Description of Unknown:cds_NC_025385.1_cds_YP_009094330.1_4 target sequence
GDDGAEDFVEVHLPDVQKQISGIDLGLPEWKRYFLIGVAALTLFALTIFVVVCCRRVRRRERAKPNPVELIRKVSVTSQSGKVIP

SEQ ID NO: 27125 - protein, 84 aa, unidentified
  REGION 1..84: note = Description of Unknown:cds_NC_025385.1_cds_YP_009094330.1_4 target sequence
QKQISGIDLGLPEWKRYFLIGVAALTLFALTIFVVVCCRRVRRRERAKPNPVELIRKVSVTSQSGKVIPSWESYKVEAEGQSQA

SEQ ID NO: 27126 - protein, 85 aa, unidentified
  REGION 1..85: note = Description of Unknown:cds_NC_025385.1_cds_YP_009094330.1_4 target sequence
KLGPWSPIDIHHLSCPNNLVVEDDGCTTLSGFTYMELKVGYITTIKVDGFTCTGIVTEAETYTNFVGYVTTTFKRKHFRPGPSAC

SEQ ID NO: 27127 - protein, 85 aa, unidentified
  REGION 1..85: note = Description of Unknown:cds_NC_025385.1_cds_YP_009094330.1_4 target sequence
RDAYNWKAAGDPRYEESLHNPYPDSHWLRTVTTTKESLLIISPSVVDMDAYDKSLLSKIFPNGKCPGVSIASPFCSTNHDYTIWM

SEQ ID NO: 27128 - protein, 85 aa, unidentified
  REGION 1..85: note = Description of Unknown:cds_NC_025385.1_cds_YP_009094330.1_4 target sequence
PENTKTGMSCDIFTTSKGKRATKDGKLCGFVDERGLYKSLKGSCKLKLCGVSGLRLMDGSWVSIQNHEEAKWCPPDQLVNVHDFH

SEQ ID NO: 27129 - protein, 85 aa, unidentified
  REGION 1..85: note = Description of Unknown:cds_NC_025385.1_cds_YP_009094330.1_4 target sequence
SDEIEHLIVEELVKKREECLDALESIMTTKSISFRRLSHLRKLVPGFGKAYTIINKTLMEADAHYKSIREWSEIIPSKGCLVAGG

SEQ ID NO: 27130 - protein, 85 aa, unidentified
  REGION 1..85: note = Description of Unknown:cds_NC_025385.1_cds_YP_009094330.1_4 target sequence
RCYHHHNGVFFNGIILSPDGHVLIPEMQSALLQQHIELLESSVIPLMHPLADPSTVFKGDDGAEDFVEVHLPDVQKQISGIDLGL

SEQ ID NO: 27131 - protein, 85 aa, unidentified
  REGION 1..85: note = Description of Unknown:cds_NC_031955.1_cds_YP_009325415.1_4 target sequence
AYQVTLILNSLSFITGQDIFPLYTIPDSIGPWTPIDLSHLKCPDNAFIVDENCTDHGEINYSELKPSFHSQSKVPGFTCTGIVTQ

SEQ ID NO: 27132 - protein, 85 aa, unidentified
  REGION 1..85: note = Description of Unknown:cds_NC_031955.1_cds_YP_009325415.1_4 target sequence
AVTYTNFLGYVSTTFQRSHFVPNPRECRAAQEWKSKGDPRYEDSLQNPYPDSKWLRTVTTTRESLLIIEPAIAEMDIYNKTMFSS

SEQ ID NO: 27133 - protein, 85 aa, unidentified
  REGION 1..85: note = Description of Unknown:cds_NC_031955.1_cds_YP_009325415.1_4 target sequence
VFRGGLCDFSRGNPDYCETSHSYSIWMPYEESRGITCDIFQSSTGRLFKKDDQVCGIQDERGMFKSTRGACKMTICGKSGVRLYD

SEQ ID NO: 27134 - protein, 85 aa, unidentified
  REGION 1..85: note = Description of Unknown:cds_NC_031955.1_cds_YP_009325415.1_4 target sequence
GTWISYNTIDNLKVCPRSAMVNMHTTKLDALEEAVVRDLVKKREECLNAFEEIIITNSISFRKMSLFRKMVPGSGLVYTMINKTL

SEQ ID NO: 27135 - protein, 85 aa, unidentified
  REGION 1..85: note = Description of Unknown:cds_NC_031955.1_cds_YP_009325415.1_4 target sequence
MEAHGHYKSVSNWSEILPTPICLLVKGKCYQDHDGVLFNGIVKDHRGKVLIPEMQSHLLQDHFELLRSNTIPWRHPLVHYPDDTD

SEQ ID NO: 27136 - protein, 85 aa, unidentified
  REGION 1..85: note = Description of Unknown:cds_NC_031955.1_cds_YP_009325415.1_4 target sequence
PSSETAEFIQLHMRDPAKVTSDIDFGLSSWKRYLIFVACLILGLLILWVVIKYSFKVYRVMTKKRSSRRKMQDILPDPVIRSVGG

SEQ ID NO: 27137 - protein, 84 aa, unidentified
  REGION 1..84: note = Description of Unknown:cds_NC_031955.1_cds_YP_009325415.1_4 target sequence
PAKVTSDIDFGLSSWKRYLIFVACLILGLLILWVVIKYSFKVYRVMTKKRSSRRKMQDILPDPVIRSVGGNQLSWESYKNSTNL

SEQ ID NO: 27138 - protein, 85 aa, unidentified
  REGION 1..85: note = Description of Unknown:cds_NC_031955.1_cds_YP_009325415.1_4 target sequence
SIGPWTPIDLSHLKCPDNAFIVDENCTDHGEINYSELKPSFHSQSKVPGFTCTGIVTQAVTYTNFLGYVSTTFQRSHFVPNPREC

SEQ ID NO: 27139 - protein, 85 aa, unidentified
  REGION 1..85: note = Description of Unknown:cds_NC_031955.1_cds_YP_009325415.1_4 target sequence
RAAQEWKSKGDPRYEDSLQNPYPDSKWLRTVTTTRESLLIIEPAIAEMDIYNKTMFSSVFRGGLCDFSRGNPDYCETSHSYSIWM

SEQ ID NO: 27140 - protein, 85 aa, unidentified
  REGION 1..85: note = Description of Unknown:cds_NC_031955.1_cds_YP_009325415.1_4 target sequence
PYEESRGITCDIFQSSTGRLFKKDDQVCGIQDERGMFKSTRGACKMTICGKSGVRLYDGTWISYNTIDNLKVCPRSAMVNMHTTK

SEQ ID NO: 27141 - protein, 85 aa, unidentified
  REGION 1..85: note = Description of Unknown:cds_NC_031955.1_cds_YP_009325415.1_4 target sequence
LDALEEAVVRDLVKKREECLNAFEEIIITNSISFRKMSLFRKMVPGSGLVYTMINKTLMEAHGHYKSVSNWSEILPTPICLLVKG

SEQ ID NO: 27142 - protein, 85 aa, unidentified
  REGION 1..85: note = Description of Unknown:cds_NC_031955.1_cds_YP_009325415.1_4 target sequence
KCYQDHDGVLFNGIVKDHRGKVLIPEMQSHLLQDHFELLRSNTIPWRHPLVHYPDDTDPSSETAEFIQLHMRDPAKVTSDIDFGL

SEQ ID NO: 27143 - protein, 85 aa, unidentified
  REGION 1..85: note = Description of Unknown:cds_NZ_WFIY01000004.1_cds_WP_155864171.1_2128 target sequence
DTAEFILRVISRYTDKVFIVSGTDYPAFIKAELKLKSPEFVVVPHEITAASAALGYSLSGKLGVLMVHTVPGTLNSLGIIADAYT

SEQ ID NO: 27144 - protein, 85 aa, unidentified
  REGION 1..85: note = Description of Unknown:cds_NZ_WFIY01000004.1_cds_WP_155864171.1_2128 target sequence
SRIPLLVIAGKSPYTDKGSTASRSLRIHWTQDANQEELVKYVKWKFEIRDPSQVPAAISRAIQIALSEPQGPVYLAIPREISVAR

SEQ ID NO: 27145 - protein, 85 aa, unidentified
  REGION 1..85: note = Description of Unknown:cds_NZ_WFIY01000004.1_cds_WP_155864171.1_2128 target sequence
VEEKEVKMEPFYPGVPDSVLEKAKEMILKASRPVMITWRAGRKESWFNSLKEFAETANIPVLNYVGERVNYPSNGKMALDHLDLR

SEQ ID NO: 27146 - protein, 85 aa, unidentified
  REGION 1..85: note = Description of Unknown:cds_NZ_WFIY01000004.1_cds_WP_155864171.1_2128 target sequence
EADLIIEVETEVPWIPRFTDVDAKVIKVDVDPSYSYIPYYEFPCDLCVQSSVDEFFNKLRVERKLEKDVEEMIEKQREEKKERIR

SEQ ID NO: 27147 - protein, 85 aa, unidentified
  REGION 1..85: note = Description of Unknown:cds_NZ_WFIY01000004.1_cds_WP_155864171.1_2128 target sequence
KLADEKKIHPDYLSYEIGKLKWTVFNEYDLNPRYAEFNSFNSYFGDPAFGHLGWALGAGVGYKMATGKDVVITVGDGSFIFGVPT

SEQ ID NO: 27148 - protein, 85 aa, unidentified
  REGION 1..85: note = Description of Unknown:cds_NZ_WFIY01000004.1_cds_WP_155864171.1_2128 target sequence
AFYYVVKKFPVLVVIFDNKSWKAVERAVKEVYPGEKFESFPGAEIDIDDLPKTIESVGGYYEYVERPSEVEEALMRGKEKVKNGI

SEQ ID NO: 27149 - protein, 84 aa, unidentified
  REGION 1..84: note = Description of Unknown:cds_NZ_WFIY01000004.1_cds_WP_155864171.1_2128 target sequence
FDNKSWKAVERAVKEVYPGEKFESFPGAEIDIDDLPKTIESVGGYYEYVERPSEVEEALMRGKEKVKNGIPTIVHARVTDKRGE

SEQ ID NO: 27150 - protein, 85 aa, unidentified
  REGION 1..85: note = Description of Unknown:cds_NZ_WFIY01000004.1_cds_WP_155864171.1_2128 target sequence
FIKAELKLKSPEFVVVPHEITAASAALGYSLSGKLGVLMVHTVPGTLNSLGIIADAYTSRIPLLVIAGKSPYTDKGSTASRSLRI

SEQ ID NO: 27151 - protein, 85 aa, unidentified
  REGION 1..85: note = Description of Unknown:cds_NZ_WFIY01000004.1_cds_WP_155864171.1_2128 target sequence
HWTQDANQEELVKYVKWKFEIRDPSQVPAAISRAIQIALSEPQGPVYLAIPREISVARVEEKEVKMEPFYPGVPDSVLEKAKEMI

SEQ ID NO: 27152 - protein, 85 aa, unidentified
  REGION 1..85: note = Description of Unknown:cds_NZ_WFIY01000004.1_cds_WP_155864171.1_2128 target sequence
LKASRPVMITWRAGRKESWFNSLKEFAETANIPVLNYVGERVNYPSNGKMALDHLDLREADLIIEVETEVPWIPRFTDVDAKVIK

SEQ ID NO: 27153 - protein, 85 aa, unidentified
  REGION 1..85: note = Description of Unknown:cds_NZ_WFIY01000004.1_cds_WP_155864171.1_2128 target sequence
VDVDPSYSYIPYYEFPCDLCVQSSVDEFFNKLRVERKLEKDVEEMIEKQREEKKERIRKLADEKKIHPDYLSYEIGKLKWTVFNE

SEQ ID NO: 27154 - protein, 85 aa, unidentified
  REGION 1..85: note = Description of Unknown:cds_NZ_WFIY01000004.1_cds_WP_155864171.1_2128 target sequence
YDLNPRYAEFNSFNSYFGDPAFGHLGWALGAGVGYKMATGKDVVITVGDGSFIFGVPTAFYYVVKKFPVLVVIFDNKSWKAVERA

SEQ ID NO: 27155 - protein, 85 aa, unidentified
  REGION 1..85: note = Description of Unknown:cds_NC_035460.1_cds_YP_009408100.1_149 target sequence
YTINNLEYFLENKLFCDITLLIENKKISAHKIILAACSDYFKAMFTSNFKENTLSTITINCLDYNAIKKIIKFCYTNELNFDSVN

SEQ ID NO: 27156 - protein, 85 aa, unidentified
  REGION 1..85: note = Description of Unknown:cds_NC_035460.1_cds_YP_009408100.1_149 target sequence
ECLNCMIASDYLIIPIISNICEEYLLNNITLDTFYSIHTICELYNLNINKTLFNFLIHNIVKLSENNNFVKLSYNTIYNLLNSDD

SEQ ID NO: 27157 - protein, 85 aa, unidentified
  REGION 1..85: note = Description of Unknown:cds_NC_035460.1_cds_YP_009408100.1_149 target sequence
LNIPNEDFALFILTKWLDYNNITQKTILELYNTIRVKYLSNYQQIQYLDKIVSKKYLRPRYSTTGTLYSVNCYGEEYATIERFSL

SEQ ID NO: 27158 - protein, 85 aa, unidentified
  REGION 1..85: note = Description of Unknown:cds_NC_035460.1_cds_YP_009408100.1_149 target sequence
KHETWEKYIKIPDERTRFNVVSINEFIFIIGGYKFSFPINSVIVYNTITNEWRKSPSLLQCRSDCCSVVINNIIYTFGGRSNNTS

SEQ ID NO: 27159 - protein, 85 aa, unidentified
  REGION 1..85: note = Description of Unknown:cds_NC_035460.1_cds_YP_009408100.1_149 target sequence
SILNTVESLDITMKELKWRSELNMPIEKSNMGIVALHNKIYIIGGIISFIPYNKYTNSVESYDIIKKKWVNETPITIKANYVSAT

SEQ ID NO: 27160 - protein, 85 aa, unidentified
  REGION 1..85: note = Description of Unknown:cds_NC_035460.1_cds_YP_009408100.1_149 target sequence
CHNNKIYAICNVIQDIYISEFYSYDVDNKIWTQLPLICVPKQLCALISYADDLYSVGGFHGSISNYKYVEKYNLEKQKWITVKET

SEQ ID NO: 27161 - protein, 84 aa, unidentified
  REGION 1..84: note = Description of Unknown:cds_NC_035460.1_cds_YP_009408100.1_149 target sequence
IYISEFYSYDVDNKIWTQLPLICVPKQLCALISYADDLYSVGGFHGSISNYKYVEKYNLEKQKWITVKETKINKLGNGCFIIKI

SEQ ID NO: 27162 - protein, 85 aa, unidentified
  REGION 1..85: note = Description of Unknown:cds_NC_035460.1_cds_YP_009408100.1_149 target sequence
SAHKIILAACSDYFKAMFTSNFKENTLSTITINCLDYNAIKKIIKFCYTNELNFDSVNECLNCMIASDYLIIPIISNICEEYLLN

SEQ ID NO: 27163 - protein, 85 aa, unidentified
  REGION 1..85: note = Description of Unknown:cds_NC_035460.1_cds_YP_009408100.1_149 target sequence
NITLDTFYSIHTICELYNLNINKTLFNFLIHNIVKLSENNNFVKLSYNTIYNLLNSDDLNIPNEDFALFILTKWLDYNNITQKTI

SEQ ID NO: 27164 - protein, 85 aa, unidentified
  REGION 1..85: note = Description of Unknown:cds_NC_035460.1_cds_YP_009408100.1_149 target sequence
LELYNTIRVKYLSNYQQIQYLDKIVSKKYLRPRYSTTGTLYSVNCYGEEYATIERFSLKHETWEKYIKIPDERTRFNVVSINEFI

SEQ ID NO: 27165 - protein, 85 aa, unidentified
  REGION 1..85: note = Description of Unknown:cds_NC_035460.1_cds_YP_009408100.1_149 target sequence
FIIGGYKFSFPINSVIVYNTITNEWRKSPSLLQCRSDCCSVVINNIIYTFGGRSNNTSSILNTVESLDITMKELKWRSELNMPIE

SEQ ID NO: 27166 - protein, 85 aa, unidentified
  REGION 1..85: note = Description of Unknown:cds_NC_035460.1_cds_YP_009408100.1_149 target sequence
KSNMGIVALHNKIYIIGGIISFIPYNKYTNSVESYDIIKKKWVNETPITIKANYVSATCHNNKIYAICNVIQDIYISEFYSYDVD

SEQ ID NO: 27167 - protein, 85 aa, unidentified
  REGION 1..85: note = Description of Unknown:cds_NC_029316.1_cds_YP_009230261.1_8 target sequence
VWLEELLKKIDAKVSNLGVVITDDLARIFEVNIQLLQADLAQFHNLAVTQPAVFDIQRYPPAPTTFQYLGYDENGKASVQSIDAN

SEQ ID NO: 27168 - protein, 85 aa, unidentified
  REGION 1..85: note = Description of Unknown:cds_NC_029316.1_cds_YP_009230261.1_8 target sequence
NLYEAIKQLATSRPVIVRYIINSKQAELLENVIIALHTDTELYAQKPRFPILIISNSYYWKFSDIPTIEPVPSEEDYNTLLQMAK

SEQ ID NO: 27169 - protein, 85 aa, unidentified
  REGION 1..85: note = Description of Unknown:cds_NC_029316.1_cds_YP_009230261.1_8 target sequence
QNYEKAYGLPVKLPSVDLIKGLTLWEAQGVINLSKRVTPKDIEFDEQVIMNEKKEFFRKLGVELITPSITMEDVGGMRFLKQYIS

SEQ ID NO: 27170 - protein, 85 aa, unidentified
  REGION 1..85: note = Description of Unknown:cds_NC_029316.1_cds_YP_009230261.1_8 target sequence
NYWISIWQNREIAKDYGVRPPKGILLFGAPGTGKTWFATALAGTLGRPMIKVDLGDFLSKWVGESEQRTKTLLKYAEVANAVIFF

SEQ ID NO: 27171 - protein, 85 aa, unidentified
  REGION 1..85: note = Description of Unknown:cds_NC_029316.1_cds_YP_009230261.1_8 target sequence
DEFDAIASRRSEGEHEVYRSVKNILLSWMTSQESAIVVGTTNRASDIDEAFLRPGRFDDLFPVLTPTSIDDIAEIVKIHVERVKP

SEQ ID NO: 27172 - protein, 85 aa, unidentified
  REGION 1..85: note = Description of Unknown:cds_NC_029316.1_cds_YP_009230261.1_8 target sequence
IKHREEIDYKYVAKVMIGLRPNEIEKIVNDAKLRAFLERRKLKADDIIAIAKEVKSKVDVKKRLEEEKKLVEQMKSLPNVKVEVI

SEQ ID NO: 27173 - protein, 84 aa, unidentified
  REGION 1..84: note = Description of Unknown:cds_NC_029316.1_cds_YP_009230261.1_8 target sequence
IGLRPNEIEKIVNDAKLRAFLERRKLKADDIIAIAKEVKSKVDVKKRLEEEKKLVEQMKSLPNVKVEVIEEIQKEQQSLDSRWV

SEQ ID NO: 27174 - protein, 85 aa, unidentified
  REGION 1..85: note = Description of Unknown:cds_NC_029316.1_cds_YP_009230261.1_8 target sequence
IFEVNIQLLQADLAQFHNLAVTQPAVFDIQRYPPAPTTFQYLGYDENGKASVQSIDANNLYEAIKQLATSRPVIVRYIINSKQAE

SEQ ID NO: 27175 - protein, 85 aa, unidentified
  REGION 1..85: note = Description of Unknown:cds_NC_029316.1_cds_YP_009230261.1_8 target sequence
LLENVIIALHTDTELYAQKPRFPILIISNSYYWKFSDIPTIEPVPSEEDYNTLLQMAKQNYEKAYGLPVKLPSVDLIKGLTLWEA

SEQ ID NO: 27176 - protein, 85 aa, unidentified
  REGION 1..85: note = Description of Unknown:cds_NC_029316.1_cds_YP_009230261.1_8 target sequence
QGVINLSKRVTPKDIEFDEQVIMNEKKEFFRKLGVELITPSITMEDVGGMRFLKQYISNYWISIWQNREIAKDYGVRPPKGILLF

SEQ ID NO: 27177 - protein, 85 aa, unidentified
  REGION 1..85: note = Description of Unknown:cds_NC_029316.1_cds_YP_009230261.1_8 target sequence
GAPGTGKTWFATALAGTLGRPMIKVDLGDFLSKWVGESEQRTKTLLKYAEVANAVIFFDEFDAIASRRSEGEHEVYRSVKNILLS

SEQ ID NO: 27178 - protein, 85 aa, unidentified
  REGION 1..85: note = Description of Unknown:cds_NC_029316.1_cds_YP_009230261.1_8 target sequence
WMTSQESAIVVGTTNRASDIDEAFLRPGRFDDLFPVLTPTSIDDIAEIVKIHVERVKPIKHREEIDYKYVAKVMIGLRPNEIEKI

SEQ ID NO: 27179 - protein, 85 aa, unidentified
  REGION 1..85: note = Description of Unknown:cds_NC_025377.1_cds_YP_009094271.1_4 target sequence
ASYFALVLNGISMVFSQGLFPLYTIPDHLGPWTPIDLSHLHCPNNLYTDASYCTTEQSITYTELKVGSSVSQKIPGFTCTGVRTE

SEQ ID NO: 27180 - protein, 85 aa, unidentified
  REGION 1..85: note = Description of Unknown:cds_NC_025377.1_cds_YP_009094271.1_4 target sequence
SVTYTNFVGYVTTTFKKKHFPPKSRDCREAYERKKAGDPRYEESLAHPYPDNSWLRTVTTTKDSWVIIEPSVVELDIYTSALYSP

SEQ ID NO: 27181 - protein, 85 aa, unidentified
  REGION 1..85: note = Description of Unknown:cds_NC_025377.1_cds_YP_009094271.1_4 target sequence
LFKDGTCSKSRTYSPYCPTNHDFTIWMPESENIRSACNLFSTSRGKLVRNRTSTCGIIDERGLFRSVKGACKISICGRQGIRLVD

SEQ ID NO: 27182 - protein, 85 aa, unidentified
  REGION 1..85: note = Description of Unknown:cds_NC_025377.1_cds_YP_009094271.1_4 target sequence
GTWMSFRYSEYLPVCSPSQLINTHDIKVDELENAIVLDLIRRREECLDTLETILMSGSVSHRRLSHFRKLVPGSGKAYSYINGTL

SEQ ID NO: 27183 - protein, 85 aa, unidentified
  REGION 1..85: note = Description of Unknown:cds_NC_025377.1_cds_YP_009094271.1_4 target sequence
MESDAHYIKVENWSEVIPHKGCLMVGGKCYEPVNDVYFNGIIRDSNNQILIPEMQSSLLREHVDLLKANIVPFRHPMLLRSFTSD

SEQ ID NO: 27184 - protein, 85 aa, unidentified
  REGION 1..85: note = Description of Unknown:cds_NC_025377.1_cds_YP_009094271.1_4 target sequence
TEEDIVEFVNPHLQDTQKLVSDMDLGLSDWKRYLLIGSLAVGGVVAILFIGTCCLRCRAGRNRRTIRSNHRSLSHDVVFHKDKDK

SEQ ID NO: 27185 - protein, 84 aa, unidentified
  REGION 1..84: note = Description of Unknown:cds_NC_025377.1_cds_YP_009094271.1_4 target sequence
TQKLVSDMDLGLSDWKRYLLIGSLAVGGVVAILFIGTCCLRCRAGRNRRTIRSNHRSLSHDVVFHKDKDKVITSWESYKGQTAQ

SEQ ID NO: 27186 - protein, 85 aa, unidentified
  REGION 1..85: note = Description of Unknown:cds_NC_025377.1_cds_YP_009094271.1_4 target sequence
HLGPWTPIDLSHLHCPNNLYTDASYCTTEQSITYTELKVGSSVSQKIPGFTCTGVRTESVTYTNFVGYVTTTFKKKHFPPKSRDC

SEQ ID NO: 27187 - protein, 85 aa, unidentified
  REGION 1..85: note = Description of Unknown:cds_NC_025377.1_cds_YP_009094271.1_4 target sequence
REAYERKKAGDPRYEESLAHPYPDNSWLRTVTTTKDSWVIIEPSVVELDIYTSALYSPLFKDGTCSKSRTYSPYCPTNHDFTIWM

SEQ ID NO: 27188 - protein, 85 aa, unidentified
  REGION 1..85: note = Description of Unknown:cds_NC_025377.1_cds_YP_009094271.1_4 target sequence
PESENIRSACNLFSTSRGKLVRNRTSTCGIIDERGLFRSVKGACKISICGRQGIRLVDGTWMSFRYSEYLPVCSPSQLINTHDIK

SEQ ID NO: 27189 - protein, 85 aa, unidentified
  REGION 1..85: note = Description of Unknown:cds_NC_025377.1_cds_YP_009094271.1_4 target sequence
VDELENAIVLDLIRRREECLDTLETILMSGSVSHRRLSHFRKLVPGSGKAYSYINGTLMESDAHYIKVENWSEVIPHKGCLMVGG

SEQ ID NO: 27190 - protein, 85 aa, unidentified
  REGION 1..85: note = Description of Unknown:cds_NC_025377.1_cds_YP_009094271.1_4 target sequence
KCYEPVNDVYFNGIIRDSNNQILIPEMQSSLLREHVDLLKANIVPFRHPMLLRSFTSDTEEDIVEFVNPHLQDTQKLVSDMDLGL

SEQ ID NO: 27191 - protein, 85 aa, unidentified
  REGION 1..85: note = Description of Unknown:cds_NC_003243.1_cds_NP_478342.1_4 target sequence
LLQVILLVSLTAILPCTGQFPLYAIPDKLGPWSPIDIHHLSCPNNLIVEDEGCTSLSGFSYMELKVGFITTIKVSGFTCTGVVTE

SEQ ID NO: 27192 - protein, 85 aa, unidentified
  REGION 1..85: note = Description of Unknown:cds_NC_003243.1_cds_NP_478342.1_4 target sequence
SETYTNFFGYVTTTFKRKHFRPTPESCRKAYNWKIAGDPRYEESLHNPYPDYHWLRTVTTTKESLLIISPSVVDMDPYDKSLHSR

SEQ ID NO: 27193 - protein, 85 aa, unidentified
  REGION 1..85: note = Description of Unknown:cds_NC_003243.1_cds_NP_478342.1_4 target sequence
MFPKGSCSGASIPSVFCSTNHDYTLWMPEDSNSGMSCDIFTMSKGKKASKGGKVCGFVDERGLYKSLKGACKLKLCGISGLRLLD

SEQ ID NO: 27194 - protein, 85 aa, unidentified
  REGION 1..85: note = Description of Unknown:cds_NC_003243.1_cds_NP_478342.1_4 target sequence
GSWVSIQNHEEVKWCSPNQLVNIHDFNADEIEHLIVEELIKEREECLDALESIITTKSVSFRRLSHLRKLVPGFGKAYTIINKTL

SEQ ID NO: 27195 - protein, 85 aa, unidentified
  REGION 1..85: note = Description of Unknown:cds_NC_003243.1_cds_NP_478342.1_4 target sequence
MEADAHYKSVRTWDEIIPSKGCLKVREKCHPPYNGVFFNGIILGPDGQVLIPEMQSSLLHQHTELLESSVIPLIHPLADPSTIFR

SEQ ID NO: 27196 - protein, 85 aa, unidentified
  REGION 1..85: note = Description of Unknown:cds_NC_003243.1_cds_NP_478342.1_4 target sequence
GDDEAEGFIEVHLPDIQKQVSGIDLGLSEWERYLIIGISAIILFILAIIFTICCRRCKRRKKIRTDHIELDRKVSVTSQSGKSIP

SEQ ID NO: 27197 - protein, 84 aa, unidentified
  REGION 1..84: note = Description of Unknown:cds_NC_003243.1_cds_NP_478342.1_4 target sequence
IQKQVSGIDLGLSEWERYLIIGISAIILFILAIIFTICCRRCKRRKKIRTDHIELDRKVSVTSQSGKSIPSWESYKSRQGHSRS

SEQ ID NO: 27198 - protein, 85 aa, unidentified
  REGION 1..85: note = Description of Unknown:cds_NC_003243.1_cds_NP_478342.1_4 target sequence
KLGPWSPIDIHHLSCPNNLIVEDEGCTSLSGFSYMELKVGFITTIKVSGFTCTGVVTESETYTNFFGYVTTTFKRKHFRPTPESC

SEQ ID NO: 27199 - protein, 85 aa, unidentified
  REGION 1..85: note = Description of Unknown:cds_NC_003243.1_cds_NP_478342.1_4 target sequence
RKAYNWKIAGDPRYEESLHNPYPDYHWLRTVTTTKESLLIISPSVVDMDPYDKSLHSRMFPKGSCSGASIPSVFCSTNHDYTLWM

SEQ ID NO: 27200 - protein, 85 aa, unidentified
  REGION 1..85: note = Description of Unknown:cds_NC_003243.1_cds_NP_478342.1_4 target sequence
PEDSNSGMSCDIFTMSKGKKASKGGKVCGFVDERGLYKSLKGACKLKLCGISGLRLLDGSWVSIQNHEEVKWCSPNQLVNIHDFN

SEQ ID NO: 27201 - protein, 85 aa, unidentified
  REGION 1..85: note = Description of Unknown:cds_NC_003243.1_cds_NP_478342.1_4 target sequence
ADEIEHLIVEELIKEREECLDALESIITTKSVSFRRLSHLRKLVPGFGKAYTIINKTLMEADAHYKSVRTWDEIIPSKGCLKVRE

SEQ ID NO: 27202 - protein, 85 aa, unidentified
  REGION 1..85: note = Description of Unknown:cds_NC_003243.1_cds_NP_478342.1_4 target sequence
KCHPPYNGVFFNGIILGPDGQVLIPEMQSSLLHQHTELLESSVIPLIHPLADPSTIFRGDDEAEGFIEVHLPDIQKQVSGIDLGL

SEQ ID NO: 27203 - protein, 85 aa, unidentified
  REGION 1..85: note = Description of Unknown:cds_NC_025251.1_cds_YP_009091812.1_4 target sequence
PTQAVLSAFLATITICVGKFPIYTIPDKLGPWSPIDINHLSCPNNLVVEDEGCTNLSGFTYMELKVGYITTIKVSGFTCTGVVTE

SEQ ID NO: 27204 - protein, 85 aa, unidentified
  REGION 1..85: note = Description of Unknown:cds_NC_025251.1_cds_YP_009091812.1_4 target sequence
AETYTNFVGYVTTTFKRKHFRPRPDACREAYDWKTAGDPRYEESLHNPYPDSHWLRTVTTTKESLLIIGPSVADMDAYDKSLYSK

SEQ ID NO: 27205 - protein, 85 aa, unidentified
  REGION 1..85: note = Description of Unknown:cds_NC_025251.1_cds_YP_009091812.1_4 target sequence
IFPDGKCSGISAVSPFCPTNHEYTIWMSENQKPGMSCDIFTTSKGKKATKNGKMCGFVDERGLYKSLKGACKLKLCGVSGLRLMD

SEQ ID NO: 27206 - protein, 85 aa, unidentified
  REGION 1..85: note = Description of Unknown:cds_NC_025251.1_cds_YP_009091812.1_4 target sequence
GSWVSVQNPEDAKWCSPDQLVNIHDFHSDEVEHLIVEELVKKREECLDALESIMTTKSVSFRRLSHLRKLVPGFGKAYTIINKTL

SEQ ID NO: 27207 - protein, 85 aa, unidentified
  REGION 1..85: note = Description of Unknown:cds_NC_025251.1_cds_YP_009091812.1_4 target sequence
MEADAHYKSIRQWTEIIPSKGCLMAGGRCYPHHNGVFFNGIILSPDGHVLIPEMQSALLQQHIELLESSVIPLMHPLADPSTALK

SEQ ID NO: 27208 - protein, 85 aa, unidentified
  REGION 1..85: note = Description of Unknown:cds_NC_025251.1_cds_YP_009091812.1_4 target sequence
GGDGAEDFVEIHLPDVQKQISGIDLGLPEWKRYFLMGVSALALLALTIILATCCKRIRRKKKMKSSPVELIRKVSVTSQSGKVVP

SEQ ID NO: 27209 - protein, 84 aa, unidentified
  REGION 1..84: note = Description of Unknown:cds_NC_025251.1_cds_YP_009091812.1_4 target sequence
DVQKQISGIDLGLPEWKRYFLMGVSALALLALTIILATCCKRIRRKKKMKSSPVELIRKVSVTSQSGKVVPSWESYKVDAGGQA

SEQ ID NO: 27210 - protein, 85 aa, unidentified
  REGION 1..85: note = Description of Unknown:cds_NC_025251.1_cds_YP_009091812.1_4 target sequence
KLGPWSPIDINHLSCPNNLVVEDEGCTNLSGFTYMELKVGYITTIKVSGFTCTGVVTEAETYTNFVGYVTTTFKRKHFRPRPDAC

SEQ ID NO: 27211 - protein, 85 aa, unidentified
  REGION 1..85: note = Description of Unknown:cds_NC_025251.1_cds_YP_009091812.1_4 target sequence
REAYDWKTAGDPRYEESLHNPYPDSHWLRTVTTTKESLLIIGPSVADMDAYDKSLYSKIFPDGKCSGISAVSPFCPTNHEYTIWM

SEQ ID NO: 27212 - protein, 85 aa, unidentified
  REGION 1..85: note = Description of Unknown:cds_NC_025251.1_cds_YP_009091812.1_4 target sequence
SENQKPGMSCDIFTTSKGKKATKNGKMCGFVDERGLYKSLKGACKLKLCGVSGLRLMDGSWVSVQNPEDAKWCSPDQLVNIHDFH

SEQ ID NO: 27213 - protein, 85 aa, unidentified
  REGION 1..85: note = Description of Unknown:cds_NC_025251.1_cds_YP_009091812.1_4 target sequence
SDEVEHLIVEELVKKREECLDALESIMTTKSVSFRRLSHLRKLVPGFGKAYTIINKTLMEADAHYKSIRQWTEIIPSKGCLMAGG

SEQ ID NO: 27214 - protein, 85 aa, unidentified
  REGION 1..85: note = Description of Unknown:cds_NC_025251.1_cds_YP_009091812.1_4 target sequence
RCYPHHNGVFFNGIILSPDGHVLIPEMQSALLQQHIELLESSVIPLMHPLADPSTALKGGDGAEDFVEIHLPDVQKQISGIDLGL

SEQ ID NO: 27215 - protein, 85 aa, unidentified
  REGION 1..85: note = Description of Unknown:cds_NC_001542.1_cds_NP_056796.1_4 target sequence
VPQALLFVPLLVFPLCFGKFPIYTIPDKLGPWSPIDIHHLSCPNNLVVEDEGCTNLSGFSYMELKVGYISAIKMNGFTCTGVVTE

SEQ ID NO: 27216 - protein, 85 aa, unidentified
  REGION 1..85: note = Description of Unknown:cds_NC_001542.1_cds_NP_056796.1_4 target sequence
AETYTNFVGYVTTTFKRKHFRPTPDACRAAYNWKMAGDPRYEESLHNPYPDYHWLRTVKTTKESLVIISPSVADLDPYDRSLHSR

SEQ ID NO: 27217 - protein, 85 aa, unidentified
  REGION 1..85: note = Description of Unknown:cds_NC_001542.1_cds_NP_056796.1_4 target sequence
VFPGGNCSGVAVSSTYCSTNHDYTIWMPENPRLGMSCDIFTNSRGKRASKGSETCGFVDERGLYKSLKGACKLKLCGVLGLRLMD

SEQ ID NO: 27218 - protein, 85 aa, unidentified
  REGION 1..85: note = Description of Unknown:cds_NC_001542.1_cds_NP_056796.1_4 target sequence
GTWVAMQTSNETKWCPPGQLVNLHDFRSDEIEHLVVEELVKKREECLDALESIMTTKSVSFRRLSHLRKLVPGFGKAYTIFNKTL

SEQ ID NO: 27219 - protein, 85 aa, unidentified
  REGION 1..85: note = Description of Unknown:cds_NC_001542.1_cds_NP_056796.1_4 target sequence
MEADAHYKSVRTWNEIIPSKGCLRVGGRCHPHVNGVFFNGIILGPDGNVLIPEMQSSLLQQHMELLVSSVIPLMHPLADPSTVFK

SEQ ID NO: 27220 - protein, 85 aa, unidentified
  REGION 1..85: note = Description of Unknown:cds_NC_001542.1_cds_NP_056796.1_4 target sequence
NGDEAEDFVEVHLPDVHERISGVDLGLPNWGKYVLLSAGALTALMLIIFLMTCWRRVNRSEPTQHNLRGTGREVSVTPQSGKIIS

SEQ ID NO: 27221 - protein, 84 aa, unidentified
  REGION 1..84: note = Description of Unknown:cds_NC_001542.1_cds_NP_056796.1_4 target sequence
DVHERISGVDLGLPNWGKYVLLSAGALTALMLIIFLMTCWRRVNRSEPTQHNLRGTGREVSVTPQSGKIISSWESYKSGGETGL

SEQ ID NO: 27222 - protein, 85 aa, unidentified
  REGION 1..85: note = Description of Unknown:cds_NC_001542.1_cds_NP_056796.1_4 target sequence
KLGPWSPIDIHHLSCPNNLVVEDEGCTNLSGFSYMELKVGYISAIKMNGFTCTGVVTEAETYTNFVGYVTTTFKRKHFRPTPDAC

SEQ ID NO: 27223 - protein, 85 aa, unidentified
  REGION 1..85: note = Description of Unknown:cds_NC_001542.1_cds_NP_056796.1_4 target sequence
RAAYNWKMAGDPRYEESLHNPYPDYHWLRTVKTTKESLVIISPSVADLDPYDRSLHSRVFPGGNCSGVAVSSTYCSTNHDYTIWM

SEQ ID NO: 27224 - protein, 85 aa, unidentified
  REGION 1..85: note = Description of Unknown:cds_NC_001542.1_cds_NP_056796.1_4 target sequence
PENPRLGMSCDIFTNSRGKRASKGSETCGFVDERGLYKSLKGACKLKLCGVLGLRLMDGTWVAMQTSNETKWCPPGQLVNLHDFR

SEQ ID NO: 27225 - protein, 85 aa, unidentified
  REGION 1..85: note = Description of Unknown:cds_NC_001542.1_cds_NP_056796.1_4 target sequence
SDEIEHLVVEELVKKREECLDALESIMTTKSVSFRRLSHLRKLVPGFGKAYTIFNKTLMEADAHYKSVRTWNEIIPSKGCLRVGG

SEQ ID NO: 27226 - protein, 85 aa, unidentified
  REGION 1..85: note = Description of Unknown:cds_NC_001542.1_cds_NP_056796.1_4 target sequence
RCHPHVNGVFFNGIILGPDGNVLIPEMQSSLLQQHMELLVSSVIPLMHPLADPSTVFKNGDEAEDFVEVHLPDVHERISGVDLGL

SEQ ID NO: 27227 - protein, 85 aa, unidentified
  REGION 1..85: note = Description of Unknown:cds_NZ_WFIY01000004.1_cds_WP_155863855.1_1753 target sequence
TYQIILSSDRGSFTDYGGSSVLGYVACMPSRLVPRFFMDKFFTPKVPLKGDNAAYAPYALRKVEAILSNSGFNVTVIPPEKIEKY

SEQ ID NO: 27228 - protein, 85 aa, unidentified
  REGION 1..85: note = Description of Unknown:cds_NZ_WFIY01000004.1_cds_WP_155863855.1_1753 target sequence
VKDAKILGITVHDPFGLNPVSAKLSFIFGGGPTWTAQFFSEFGEKVSKLKEKYNFKVIAGGPGSWELSLRKPDWVDVVFLGEAEV

SEQ ID NO: 27229 - protein, 85 aa, unidentified
  REGION 1..85: note = Description of Unknown:cds_NZ_WFIY01000004.1_cds_WP_155863855.1_1753 target sequence
DLPIIAKKIIDGEDVPPIVKGRNAKIEEIPTIKNPARLGEVQITRGCPRGCKFCSVTPETFRSIPLDQIKKEVEVNLKGGWRRVE

SEQ ID NO: 27230 - protein, 85 aa, unidentified
  REGION 1..85: note = Description of Unknown:cds_NZ_WFIY01000004.1_cds_WP_155863855.1_1753 target sequence
FITDDVMLYGSSKLRTNHDAIVKLFTEVMNMGVDGIWFPHISAPAVRESPKTVKAIAEIARYDVDRAAAPVVGLETGSLKILEKY

SEQ ID NO: 27231 - protein, 85 aa, unidentified
  REGION 1..85: note = Description of Unknown:cds_NZ_WFIY01000004.1_cds_WP_155863855.1_1753 target sequence
MTAKAFPWTPREWKDVILDATAIMNDNYIYPCYTMTIGYPEEDEKDVEDSINLVQSIIDHKFTAWIFPLPVIPISTTYISKNPYP

SEQ ID NO: 27232 - protein, 85 aa, unidentified
  REGION 1..85: note = Description of Unknown:cds_NZ_WFIY01000004.1_cds_WP_155863855.1_1753 target sequence
KPETLPQNYWDLLYISWHYDLKVTRDLIPILTGGIKNKLVRKFVQIMIDKIFSNIDYIFLQLKNTKGEFSKTFSQINLNNTLGVI

SEQ ID NO: 27233 - protein, 84 aa, unidentified
  REGION 1..84: note = Description of Unknown:cds_NZ_WFIY01000004.1_cds_WP_155863855.1_1753 target sequence
ISWHYDLKVTRDLIPILTGGIKNKLVRKFVQIMIDKIFSNIDYIFLQLKNTKGEFSKTFSQINLNNTLGVIKSIYWLIRIAAKP

SEQ ID NO: 27234 - protein, 85 aa, unidentified
  REGION 1..85: note = Description of Unknown:cds_NZ_WFIY01000004.1_cds_WP_155863855.1_1753 target sequence
MPSRLVPRFFMDKFFTPKVPLKGDNAAYAPYALRKVEAILSNSGFNVTVIPPEKIEKYVKDAKILGITVHDPFGLNPVSAKLSFI

SEQ ID NO: 27235 - protein, 85 aa, unidentified
  REGION 1..85: note = Description of Unknown:cds_NZ_WFIY01000004.1_cds_WP_155863855.1_1753 target sequence
FGGGPTWTAQFFSEFGEKVSKLKEKYNFKVIAGGPGSWELSLRKPDWVDVVFLGEAEVDLPIIAKKIIDGEDVPPIVKGRNAKIE

SEQ ID NO: 27236 - protein, 85 aa, unidentified
  REGION 1..85: note = Description of Unknown:cds_NZ_WFIY01000004.1_cds_WP_155863855.1_1753 target sequence
EIPTIKNPARLGEVQITRGCPRGCKFCSVTPETFRSIPLDQIKKEVEVNLKGGWRRVEFITDDVMLYGSSKLRTNHDAIVKLFTE

SEQ ID NO: 27237 - protein, 85 aa, unidentified
  REGION 1..85: note = Description of Unknown:cds_NZ_WFIY01000004.1_cds_WP_155863855.1_1753 target sequence
VMNMGVDGIWFPHISAPAVRESPKTVKAIAEIARYDVDRAAAPVVGLETGSLKILEKYMTAKAFPWTPREWKDVILDATAIMNDN

SEQ ID NO: 27238 - protein, 85 aa, unidentified
  REGION 1..85: note = Description of Unknown:cds_NZ_WFIY01000004.1_cds_WP_155863855.1_1753 target sequence
YIYPCYTMTIGYPEEDEKDVEDSINLVQSIIDHKFTAWIFPLPVIPISTTYISKNPYPKPETLPQNYWDLLYISWHYDLKVTRDL

SEQ ID NO: 27239 - protein, 85 aa, unidentified
  REGION 1..85: note = Description of Unknown:cds_NC_020809.1_cds_YP_007641400.1_4 target sequence
SLLTAVIAFLFISTFCSGKFPIYTIPDKIGPWSPIDINHLSCPNNLEVEDEGCTTLTAFNYMELKVGYITSIKVDGFTCTGVVTE

SEQ ID NO: 27240 - protein, 85 aa, unidentified
  REGION 1..85: note = Description of Unknown:cds_NC_020809.1_cds_YP_007641400.1_4 target sequence
AETYTNFVGYVTTTFKRKHFRPNVSACRAAFSWKTAGDPRYEESLHNPYPDSHWLRTVTTTKESLLIISPSVVDMDAYDKTLYSK

SEQ ID NO: 27241 - protein, 85 aa, unidentified
  REGION 1..85: note = Description of Unknown:cds_NC_020809.1_cds_YP_007641400.1_4 target sequence
MFPNGKCFPPISDSPFCSTNHDYTLWLPEKEKLSMSCNIFVSSKGKKATKDGRLCGFVDERGLYKSLKGACKLKLCGMAGMRLMD

SEQ ID NO: 27242 - protein, 85 aa, unidentified
  REGION 1..85: note = Description of Unknown:cds_NC_020809.1_cds_YP_007641400.1_4 target sequence
GSWVSLQRADAPEWCPPGALVNVHDFHSDEIAHFVVEELIKKREECLDTLETILTTKSISFRRLSHFRKLVPGLGKAYTLINNTL

SEQ ID NO: 27243 - protein, 85 aa, unidentified
  REGION 1..85: note = Description of Unknown:cds_NC_020809.1_cds_YP_007641400.1_4 target sequence
MEAEAHYKSIREWKEIIPSKGCLKAGGRCHPHYDGIFFNGIILGPNGDVLIPEMQSSLLQQHIELLESSMIPLRHPLADSSAIFR

SEQ ID NO: 27244 - protein, 85 aa, unidentified
  REGION 1..85: note = Description of Unknown:cds_NC_020809.1_cds_YP_007641400.1_4 target sequence
SDNEAEDFVDVHLPDTQKQVSDIDLGFPEWKRYFLIGVSAIALFSLAIIIAVCCRKFKRRKRPKPGPIELVRKVSVTSQSGKVVP

SEQ ID NO: 27245 - protein, 84 aa, unidentified
  REGION 1..84: note = Description of Unknown:cds_NC_020809.1_cds_YP_007641400.1_4 target sequence
DTQKQVSDIDLGFPEWKRYFLIGVSAIALFSLAIIIAVCCRKFKRRKRPKPGPIELVRKVSVTSQSGKVVPSWESYKEGATSQP

SEQ ID NO: 27246 - protein, 85 aa, unidentified
  REGION 1..85: note = Description of Unknown:cds_NC_020809.1_cds_YP_007641400.1_4 target sequence
KIGPWSPIDINHLSCPNNLEVEDEGCTTLTAFNYMELKVGYITSIKVDGFTCTGVVTEAETYTNFVGYVTTTFKRKHFRPNVSAC

SEQ ID NO: 27247 - protein, 85 aa, unidentified
  REGION 1..85: note = Description of Unknown:cds_NC_020809.1_cds_YP_007641400.1_4 target sequence
RAAFSWKTAGDPRYEESLHNPYPDSHWLRTVTTTKESLLIISPSVVDMDAYDKTLYSKMFPNGKCFPPISDSPFCSTNHDYTLWL

SEQ ID NO: 27248 - protein, 85 aa, unidentified
  REGION 1..85: note = Description of Unknown:cds_NC_020809.1_cds_YP_007641400.1_4 target sequence
PEKEKLSMSCNIFVSSKGKKATKDGRLCGFVDERGLYKSLKGACKLKLCGMAGMRLMDGSWVSLQRADAPEWCPPGALVNVHDFH

SEQ ID NO: 27249 - protein, 85 aa, unidentified
  REGION 1..85: note = Description of Unknown:cds_NC_020809.1_cds_YP_007641400.1_4 target sequence
SDEIAHFVVEELIKKREECLDTLETILTTKSISFRRLSHFRKLVPGLGKAYTLINNTLMEAEAHYKSIREWKEIIPSKGCLKAGG

SEQ ID NO: 27250 - protein, 85 aa, unidentified
  REGION 1..85: note = Description of Unknown:cds_NC_020809.1_cds_YP_007641400.1_4 target sequence
RCHPHYDGIFFNGIILGPNGDVLIPEMQSSLLQQHIELLESSMIPLRHPLADSSAIFRSDNEAEDFVDVHLPDTQKQVSDIDLGF

SEQ ID NO: 27251 - protein, 85 aa, unidentified
  REGION 1..85: note = Description of Unknown:cds_NZ_WFIY01000004.1_cds_WP_155863889.1_1795 target sequence
KLPRENDIGKIEYKLILSDVSEERLQELATQMKYRIEEGGGEAIYVIGVSDDGDVIGLNKEDLERTIDVLEKIAKMINSKIVHKR

SEQ ID NO: 27252 - protein, 85 aa, unidentified
  REGION 1..85: note = Description of Unknown:cds_NZ_WFIY01000004.1_cds_WP_155863889.1_1795 target sequence
IVEIRKDKYVAELLIRLHKSDLPIQVNVAVMGHVNAGKSTITGTLILGKLDDGNGALRAMIARYLHEVISGRTSSITLRILGFDD

SEQ ID NO: 27253 - protein, 85 aa, unidentified
  REGION 1..85: note = Description of Unknown:cds_NZ_WFIY01000004.1_cds_WP_155863889.1_1795 target sequence
EGSIVNHSCRDPLDEAEVTIKSSKIVRLIDLGGHERYLRTTLKGLMGYETDYVMLVVGSDDGLSIMGKEHLAVASVLKYPVFIVI

SEQ ID NO: 27254 - protein, 85 aa, unidentified
  REGION 1..85: note = Description of Unknown:cds_NZ_WFIY01000004.1_cds_WP_155863889.1_1795 target sequence
TKIDKFPKERVNQIINDIRNVLRIPGINRFVMEVNDEDDLLNAIIGVKTGRVVPIFKVSNVSGEGIGLLTRFLYLLPPRKIITQS

SEQ ID NO: 27255 - protein, 85 aa, unidentified
  REGION 1..85: note = Description of Unknown:cds_NZ_WFIY01000004.1_cds_WP_155863889.1_1795 target sequence
NDTLVYIDEIYNVSGVGPVVLGSVVRGKVHPNDTVYIGPVDGGEFLQAKVKSIQINRVFVDEASQGSIATFAIQGVNREILRKGM

SEQ ID NO: 27256 - protein, 85 aa, unidentified
  REGION 1..85: note = Description of Unknown:cds_NZ_WFIY01000004.1_cds_WP_155863889.1_1795 target sequence
ILAENNKPKATQSFTAKVIVLHHPTTIKEGYVATLHLYTIRQAVKFEKIARGLLRTGESSEVELKFLYRPEYIEKGQIFIFREGR

SEQ ID NO: 27257 - protein, 84 aa, unidentified
  REGION 1..84: note = Description of Unknown:cds_NZ_WFIY01000004.1_cds_WP_155863889.1_1795 target sequence
FTAKVIVLHHPTTIKEGYVATLHLYTIRQAVKFEKIARGLLRTGESSEVELKFLYRPEYIEKGQIFIFREGRTRGLGIVTGINS

SEQ ID NO: 27258 - protein, 85 aa, unidentified
  REGION 1..85: note = Description of Unknown:cds_NZ_WFIY01000004.1_cds_WP_155863889.1_1795 target sequence
LATQMKYRIEEGGGEAIYVIGVSDDGDVIGLNKEDLERTIDVLEKIAKMINSKIVHKRIVEIRKDKYVAELLIRLHKSDLPIQVN

SEQ ID NO: 27259 - protein, 85 aa, unidentified
  REGION 1..85: note = Description of Unknown:cds_NZ_WFIY01000004.1_cds_WP_155863889.1_1795 target sequence
VAVMGHVNAGKSTITGTLILGKLDDGNGALRAMIARYLHEVISGRTSSITLRILGFDDEGSIVNHSCRDPLDEAEVTIKSSKIVR

SEQ ID NO: 27260 - protein, 85 aa, unidentified
  REGION 1..85: note = Description of Unknown:cds_NZ_WFIY01000004.1_cds_WP_155863889.1_1795 target sequence
LIDLGGHERYLRTTLKGLMGYETDYVMLVVGSDDGLSIMGKEHLAVASVLKYPVFIVITKIDKFPKERVNQIINDIRNVLRIPGI

SEQ ID NO: 27261 - protein, 85 aa, unidentified
  REGION 1..85: note = Description of Unknown:cds_NZ_WFIY01000004.1_cds_WP_155863889.1_1795 target sequence
NRFVMEVNDEDDLLNAIIGVKTGRVVPIFKVSNVSGEGIGLLTRFLYLLPPRKIITQSNDTLVYIDEIYNVSGVGPVVLGSVVRG

SEQ ID NO: 27262 - protein, 85 aa, unidentified
  REGION 1..85: note = Description of Unknown:cds_NZ_WFIY01000004.1_cds_WP_155863889.1_1795 target sequence
KVHPNDTVYIGPVDGGEFLQAKVKSIQINRVFVDEASQGSIATFAIQGVNREILRKGMILAENNKPKATQSFTAKVIVLHHPTTI

SEQ ID NO: 27263 - protein, 85 aa, unidentified
  REGION 1..85: note = Description of Unknown:cds_NC_025348.1_cds_YP_009094061.1_1 target sequence
SSVFQAFEQFTLEQDQQVGGGNLEVPPETLQTTIKVFILNTQNPQIRYQMLCFCLRIIASNSARTAQKHGALLTILSLPTAMMQN

SEQ ID NO: 27264 - protein, 85 aa, unidentified
  REGION 1..85: note = Description of Unknown:cds_NC_025348.1_cds_YP_009094061.1_1 target sequence
HIRIADRSPDSVIERIEIEGFEPGTYRLRANARTPMTAGEVIALENMAEDLPDTLANQTPFLNPNTEDEICDEMEKFLDAVYSVL

SEQ ID NO: 27265 - protein, 85 aa, unidentified
  REGION 1..85: note = Description of Unknown:cds_NC_025348.1_cds_YP_009094061.1_1 target sequence
IQVWVMVCKAMTAFDQPTGSDTRRLAKYQQQGRMDQKYLLQNEVRRLIQLGIRESLTIRQFLVFEMQTARRQGPITSKYYAMIGD

SEQ ID NO: 27266 - protein, 85 aa, unidentified
  REGION 1..85: note = Description of Unknown:cds_NC_025348.1_cds_YP_009094061.1_1 target sequence
  MOD_RES 65: note = Any amino acid
IARYIENAGMGPFFMTIKFALGTRWPPLALAAFSGELVKIKGLMQLYRRLGDRAKYMALLEMSEXMDFAPANYQLLFSYAMGIGR

SEQ ID NO: 27267 - protein, 85 aa, unidentified
  REGION 1..85: note = Description of Unknown:cds_NC_025348.1_cds_YP_009094061.1_1 target sequence
VQDPQLQGYNFARPFLNAAFFQLGMETANRQQGSVDREMAEELGLTDADKREMAAQLTRLTTGRGGDDQQGIVNVFGRRAQRQQV

SEQ ID NO: 27268 - protein, 85 aa, unidentified
  REGION 1..85: note = Description of Unknown:cds_NC_025348.1_cds_YP_009094061.1_1 target sequence
IQNQDQFRVVEEEESEEEEEEIEEQPVRGAAPAPIRRPNDEEAAWQARLNELEGMQRRPHPPRHVQLHPLQPVPVGLAAAQIHRE

SEQ ID NO: 27269 - protein, 84 aa, unidentified
  REGION 1..84: note = Description of Unknown:cds_NC_025348.1_cds_YP_009094061.1_1 target sequence
ESEEEEEEIEEQPVRGAAPAPIRRPNDEEAAWQARLNELEGMQRRPHPPRHVQLHPLQPVPVGLAAAQIHREPPAQELVADLVE

SEQ ID NO: 27270 - protein, 85 aa, unidentified
  REGION 1..85: note = Description of Unknown:cds_NC_025348.1_cds_YP_009094061.1_1 target sequence
ETLQTTIKVFILNTQNPQIRYQMLCFCLRIIASNSARTAQKHGALLTILSLPTAMMQNHIRIADRSPDSVIERIEIEGFEPGTYR

SEQ ID NO: 27271 - protein, 85 aa, unidentified
  REGION 1..85: note = Description of Unknown:cds_NC_025348.1_cds_YP_009094061.1_1 target sequence
LRANARTPMTAGEVIALENMAEDLPDTLANQTPFLNPNTEDEICDEMEKFLDAVYSVLIQVWVMVCKAMTAFDQPTGSDTRRLAK

SEQ ID NO: 27272 - protein, 85 aa, unidentified
  REGION 1..85: note = Description of Unknown:cds_NC_025348.1_cds_YP_009094061.1_1 target sequence
YQQQGRMDQKYLLQNEVRRLIQLGIRESLTIRQFLVFEMQTARRQGPITSKYYAMIGDIARYIENAGMGPFFMTIKFALGTRWPP

SEQ ID NO: 27273 - protein, 85 aa, unidentified
  REGION 1..85: note = Description of Unknown:cds_NC_025348.1_cds_YP_009094061.1_1 target sequence
  MOD_RES 38: note = Any amino acid
LALAAFSGELVKIKGLMQLYRRLGDRAKYMALLEMSEXMDFAPANYQLLFSYAMGIGRVQDPQLQGYNFARPFLNAAFFQLGMET

SEQ ID NO: 27274 - protein, 85 aa, unidentified
  REGION 1..85: note = Description of Unknown:cds_NC_025348.1_cds_YP_009094061.1_1 target sequence
ANRQQGSVDREMAEELGLTDADKREMAAQLTRLTTGRGGDDQQGIVNVFGRRAQRQQVIQNQDQFRVVEEEESEEEEEEIEEQPV

SEQ ID NO: 27275 - protein, 85 aa, unidentified
  REGION 1..85: note = Description of Unknown:cds_NZ_WFIY01000004.1_cds_WP_155863969.1_1893 target sequence
SKEEKTMDKLIQELKNMKEKAYQGGGEDKIKAQHSKGKLTARERLALLFDEGTFNEIMSFATTRATEFGLDKMKMYGDGVVTGWG

SEQ ID NO: 27276 - protein, 85 aa, unidentified
  REGION 1..85: note = Description of Unknown:cds_NZ_WFIY01000004.1_cds_WP_155863969.1_1893 target sequence
KVDGRTVFAYSQDFTELGGTLGEMHANKIARIYELALKVGAPVVGINDSGGARIQEGAVALEGYGQVFKMNVMASGVIPQITIMA

SEQ ID NO: 27277 - protein, 85 aa, unidentified
  REGION 1..85: note = Description of Unknown:cds_NZ_WFIY01000004.1_cds_WP_155863969.1_1893 target sequence
GPAAGGAVYSPALTDFIIMIKGDAYYMFVTGPEITKVVLGEEVSFQDLGGAVIHATKSGVVHFLAENEQDAINIAKRLLSYLPSN

SEQ ID NO: 27278 - protein, 85 aa, unidentified
  REGION 1..85: note = Description of Unknown:cds_NZ_WFIY01000004.1_cds_WP_155863969.1_1893 target sequence
NMEEPPFMDTGDPADRDVKDVEQIVPTDSAKPFDMKEIIYRIVDNGEFLEVHKHWAQNIVVGFARIAGNVVGIVANNSQYLGAAI

SEQ ID NO: 27279 - protein, 85 aa, unidentified
  REGION 1..85: note = Description of Unknown:cds_NZ_WFIY01000004.1_cds_WP_155863969.1_1893 target sequence
DIDAADKAARFIRFCDAFNIPLISLVDTPGYIPGTDQEYKGIIRHGAKMLYAFAEATVPKITVIIRKSYGGAHIAMSIKSLGADL

SEQ ID NO: 27280 - protein, 85 aa, unidentified
  REGION 1..85: note = Description of Unknown:cds_NZ_WFIY01000004.1_cds_WP_155863969.1_1893 target sequence
VYAWPTAEIAVTGPEGAVRILYRKEIQASSNPDEFIKQKIAEYRKLFANPYWAAEKGLIDDVIEPKDTRRIIASALEMLRNKREY

SEQ ID NO: 27281 - protein, 84 aa, unidentified
  REGION 1..84: note = Description of Unknown:cds_NZ_WFIY01000004.1_cds_WP_155863969.1_1893 target sequence
GPEGAVRILYRKEIQASSNPDEFIKQKIAEYRKLFANPYWAAEKGLIDDVIEPKDTRRIIASALEMLRNKREYRYPKKHGNIPL

SEQ ID NO: 27282 - protein, 85 aa, unidentified
  REGION 1..85: note = Description of Unknown:cds_NZ_WFIY01000004.1_cds_WP_155863969.1_1893 target sequence
DKIKAQHSKGKLTARERLALLFDEGTFNEIMSFATTRATEFGLDKMKMYGDGVVTGWGKVDGRTVFAYSQDFTELGGTLGEMHAN

SEQ ID NO: 27283 - protein, 85 aa, unidentified
  REGION 1..85: note = Description of Unknown:cds_NZ_WFIY01000004.1_cds_WP_155863969.1_1893 target sequence
KIARIYELALKVGAPVVGINDSGGARIQEGAVALEGYGQVFKMNVMASGVIPQITIMAGPAAGGAVYSPALTDFIIMIKGDAYYM

SEQ ID NO: 27284 - protein, 85 aa, unidentified
  REGION 1..85: note = Description of Unknown:cds_NZ_WFIY01000004.1_cds_WP_155863969.1_1893 target sequence
FVTGPEITKVVLGEEVSFQDLGGAVIHATKSGVVHFLAENEQDAINIAKRLLSYLPSNNMEEPPFMDTGDPADRDVKDVEQIVPT

SEQ ID NO: 27285 - protein, 85 aa, unidentified
  REGION 1..85: note = Description of Unknown:cds_NZ_WFIY01000004.1_cds_WP_155863969.1_1893 target sequence
DSAKPFDMKEIIYRIVDNGEFLEVHKHWAQNIVVGFARIAGNVVGIVANNSQYLGAAIDIDAADKAARFIRFCDAFNIPLISLVD

SEQ ID NO: 27286 - protein, 85 aa, unidentified
  REGION 1..85: note = Description of Unknown:cds_NZ_WFIY01000004.1_cds_WP_155863969.1_1893 target sequence
TPGYIPGTDQEYKGIIRHGAKMLYAFAEATVPKITVIIRKSYGGAHIAMSIKSLGADLVYAWPTAEIAVTGPEGAVRILYRKEIQ

SEQ ID NO: 27287 - protein, 85 aa, unidentified
  REGION 1..85: note = Description of Unknown:cds_NZ_WFIY01000004.1_cds_WP_155864177.1_2135 target sequence
NLKNQFVYILGVLILASIAAQIYIACKHDNEEMKVIVINNGTGYIGDPPASLGNGEDYLINPVFPAHTIASQYAYVTYGNGRVFI

SEQ ID NO: 27288 - protein, 85 aa, unidentified
  REGION 1..85: note = Description of Unknown:cds_NZ_WFIY01000004.1_cds_WP_155864177.1_2135 target sequence
GGFYLSGNGYLAGAKGAAVVSSMLAYQPLTSYDYYLYITAPSCINVGGAVKTDSATVMFLASMLGQESSLNKSMYFLGDVGLEGY

SEQ ID NO: 27289 - protein, 85 aa, unidentified
  REGION 1..85: note = Description of Unknown:cds_NZ_WFIY01000004.1_cds_WP_155864177.1_2135 target sequence
MYSTGVVYQRIVQLYNGGIYYLVVPKMMALAEGKNYQMAQEFALQHHEVLLTVCSIPQMYQMETSEPLPQPVGYLDLQYNASAGY

SEQ ID NO: 27290 - protein, 85 aa, unidentified
  REGION 1..85: note = Description of Unknown:cds_NZ_WFIY01000004.1_cds_WP_155864177.1_2135 target sequence
QYLCSLYKELNSSVSNQTVKEEALSCWLKAEGLAEEGDYYAFYFYPNPAVNAIALLYSQNPSFNLDEEVCKAVDCAGNNLWRIET

SEQ ID NO: 27291 - protein, 85 aa, unidentified
  REGION 1..85: note = Description of Unknown:cds_NZ_WFIY01000004.1_cds_WP_155864177.1_2135 target sequence
AAEAAYLAQGNLTDKILADAWAALSLSITSGPTITPLGLYEGVYNAYVIDIYAAEYYDAVTGSKAGNLTLLTDVFDNHNLIYDYG

SEQ ID NO: 27292 - protein, 85 aa, unidentified
  REGION 1..85: note = Description of Unknown:cds_NZ_WFIY01000004.1_cds_WP_155864177.1_2135 target sequence
FFANYYAMLAINFRNYFLHQLNSTALQEVENSICNYMVHEDQILENAAAYYDGPSVVGYIMMIYGMENHNLCYLYYAMPFIRMTM

SEQ ID NO: 27293 - protein, 84 aa, unidentified
  REGION 1..84: note = Description of Unknown:cds_NZ_WFIY01000004.1_cds_WP_155864177.1_2135 target sequence
FRNYFLHQLNSTALQEVENSICNYMVHEDQILENAAAYYDGPSVVGYIMMIYGMENHNLCYLYYAMPFIRMTMNMEQLTWYNVD

SEQ ID NO: 27294 - protein, 85 aa, unidentified
  REGION 1..85: note = Description of Unknown:cds_NZ_WFIY01000004.1_cds_WP_155864177.1_2135 target sequence
HDNEEMKVIVINNGTGYIGDPPASLGNGEDYLINPVFPAHTIASQYAYVTYGNGRVFIGGFYLSGNGYLAGAKGAAVVSSMLAYQ

SEQ ID NO: 27295 - protein, 85 aa, unidentified
  REGION 1..85: note = Description of Unknown:cds_NZ_WFIY01000004.1_cds_WP_155864177.1_2135 target sequence
PLTSYDYYLYITAPSCINVGGAVKTDSATVMFLASMLGQESSLNKSMYFLGDVGLEGYMYSTGVVYQRIVQLYNGGIYYLVVPKM

SEQ ID NO: 27296 - protein, 85 aa, unidentified
  REGION 1..85: note = Description of Unknown:cds_NZ_WFIY01000004.1_cds_WP_155864177.1_2135 target sequence
MALAEGKNYQMAQEFALQHHEVLLTVCSIPQMYQMETSEPLPQPVGYLDLQYNASAGYQYLCSLYKELNSSVSNQTVKEEALSCW

SEQ ID NO: 27297 - protein, 85 aa, unidentified
  REGION 1..85: note = Description of Unknown:cds_NZ_WFIY01000004.1_cds_WP_155864177.1_2135 target sequence
LKAEGLAEEGDYYAFYFYPNPAVNAIALLYSQNPSFNLDEEVCKAVDCAGNNLWRIETAAEAAYLAQGNLTDKILADAWAALSLS

SEQ ID NO: 27298 - protein, 85 aa, unidentified
  REGION 1..85: note = Description of Unknown:cds_NZ_WFIY01000004.1_cds_WP_155864177.1_2135 target sequence
ITSGPTITPLGLYEGVYNAYVIDIYAAEYYDAVTGSKAGNLTLLTDVFDNHNLIYDYGFFANYYAMLAINFRNYFLHQLNSTALQ

SEQ ID NO: 27299 - protein, 85 aa, unidentified
  REGION 1..85: note = Description of Unknown:cds_NC_020807.1_cds_YP_007641390.1_4 target sequence
SQLFSTFIFCLFIGSSIGDFPLYTIPERLNPWTPIDLIHLSCPNNLLSDAEGCSETSSFTYVELKTGFLAHQKVPGFTCTGVINE

SEQ ID NO: 27300 - protein, 85 aa, unidentified
  REGION 1..85: note = Description of Unknown:cds_NC_020807.1_cds_YP_007641390.1_4 target sequence
AVTYTNFVGYVTTTFKRKHFKPTVSACRDAFNWKVSGDPRYEESLHTPYPDNSWLRTVTTTKESLLIISPSIVEMDVYGRTLHSP

SEQ ID NO: 27301 - protein, 85 aa, unidentified
  REGION 1..85: note = Description of Unknown:cds_NC_020807.1_cds_YP_007641390.1_4 target sequence
MFPTGICSKFYPSIPSCATNHDYTLWLPEDPNLSLICDIFVTSTGRKAMNGSRMCGFTDERGFYRTLKGACKLTLCGKPGLRLYD

SEQ ID NO: 27302 - protein, 85 aa, unidentified
  REGION 1..85: note = Description of Unknown:cds_NC_020807.1_cds_YP_007641390.1_4 target sequence
GTWVSFTRPEIHVWCSPDQLVNVHNNRIDEIEHLIVDDLIRKREECLDTLETVLMSKSLSFRRLSHFRKLVPGYGKAYTILNGSL

SEQ ID NO: 27303 - protein, 85 aa, unidentified
  REGION 1..85: note = Description of Unknown:cds_NC_020807.1_cds_YP_007641390.1_4 target sequence
METNVHYKRVDNWVDILPSKGCLKVNNKCMESDTGVFFNGIIKGPDGRILIPEMQSGLLKQHMDLLKAAVFPLRHPLIDKASVFK

SEQ ID NO: 27304 - protein, 85 aa, unidentified
  REGION 1..85: note = Description of Unknown:cds_NC_020807.1_cds_YP_007641390.1_4 target sequence
KDGDADDFVDVHMPDIQKLVSDVDLGLPNWSFFALIGASVIALLILVCLLRMCCKRMRRRSSVRDQVAPPFSLSSTPSSKSKVVS

SEQ ID NO: 27305 - protein, 84 aa, unidentified
  REGION 1..84: note = Description of Unknown:cds_NC_020807.1_cds_YP_007641390.1_4 target sequence
MPDIQKLVSDVDLGLPNWSFFALIGASVIALLILVCLLRMCCKRMRRRSSVRDQVAPPFSLSSTPSSKSKVVSSWESYKGTSSV

SEQ ID NO: 27306 - protein, 85 aa, unidentified
  REGION 1..85: note = Description of Unknown:cds_NC_020807.1_cds_YP_007641390.1_4 target sequence
RLNPWTPIDLIHLSCPNNLLSDAEGCSETSSFTYVELKTGFLAHQKVPGFTCTGVINEAVTYTNFVGYVTTTFKRKHFKPTVSAC

SEQ ID NO: 27307 - protein, 85 aa, unidentified
  REGION 1..85: note = Description of Unknown:cds_NC_020807.1_cds_YP_007641390.1_4 target sequence
RDAFNWKVSGDPRYEESLHTPYPDNSWLRTVTTTKESLLIISPSIVEMDVYGRTLHSPMFPTGICSKFYPSIPSCATNHDYTLWL

SEQ ID NO: 27308 - protein, 85 aa, unidentified
  REGION 1..85: note = Description of Unknown:cds_NC_020807.1_cds_YP_007641390.1_4 target sequence
PEDPNLSLICDIFVTSTGRKAMNGSRMCGFTDERGFYRTLKGACKLTLCGKPGLRLYDGTWVSFTRPEIHVWCSPDQLVNVHNNR

SEQ ID NO: 27309 - protein, 85 aa, unidentified
  REGION 1..85: note = Description of Unknown:cds_NC_020807.1_cds_YP_007641390.1_4 target sequence
IDEIEHLIVDDLIRKREECLDTLETVLMSKSLSFRRLSHFRKLVPGYGKAYTILNGSLMETNVHYKRVDNWVDILPSKGCLKVNN

SEQ ID NO: 27310 - protein, 85 aa, unidentified
  REGION 1..85: note = Description of Unknown:cds_NC_020807.1_cds_YP_007641390.1_4 target sequence
KCMESDTGVFFNGIIKGPDGRILIPEMQSGLLKQHMDLLKAAVFPLRHPLIDKASVFKKDGDADDFVDVHMPDIQKLVSDVDLGL

SEQ ID NO: 27311 - protein, 85 aa, unidentified
  REGION 1..85: note = Description of Unknown:cds_NC_025365.1_cds_YP_009094182.1_4 target sequence
SNLCTIFILCASIMVSLGDFPLYTIPEKIGPWTPIDLTHLSCPNNLLSEDDGCSSSSTFSYIELRTGYLTHQKVSGFTCTGVINE

SEQ ID NO: 27312 - protein, 85 aa, unidentified
  REGION 1..85: note = Description of Unknown:cds_NC_025365.1_cds_YP_009094182.1_4 target sequence
AVTYTNFVGYVTTTFKRKHFKPTASACRDAYHWKISGDPRYEESLHTPYPDNSWLRTVTTTKESLLIISPSIVEMDIYSRSLHSP

SEQ ID NO: 27313 - protein, 85 aa, unidentified
  REGION 1..85: note = Description of Unknown:cds_NC_025365.1_cds_YP_009094182.1_4 target sequence
MFPTGRCYDFYKSTPSCLTNHDYTIWLPDDANVRLTCDIFVTSTGKKSMNGSKMCGFTDERGLYRTLKGACKLTLCGKPGLRLFD

SEQ ID NO: 27314 - protein, 85 aa, unidentified
  REGION 1..85: note = Description of Unknown:cds_NC_025365.1_cds_YP_009094182.1_4 target sequence
GTWISITRPEIVMWCSPNQLVNVHNNRVDEIEHLIVGDLIRRREECLDTLETVLMSKSVSFRRLSHFRKLVPGFGKAYTIANGSL

SEQ ID NO: 27315 - protein, 85 aa, unidentified
  REGION 1..85: note = Description of Unknown:cds_NC_025365.1_cds_YP_009094182.1_4 target sequence
METNVHYKRVDRWEEILPSKGCLKLNDKCLNPENGVFFNGIIKGPDGQVLIPEMQSSLLKQHMDLLKASVFPLRHPLIDQTSIFK

SEQ ID NO: 27316 - protein, 85 aa, unidentified
  REGION 1..85: note = Description of Unknown:cds_NC_025365.1_cds_YP_009094182.1_4 target sequence
KDGEADDFVDVHMPDPHKSISNIDLGLPDWGLYAMIGGTVVAFLILVCLLCTCCKRRRRRNSRKPSSEQTPKISSTPPSGTKVIS

SEQ ID NO: 27317 - protein, 84 aa, unidentified
  REGION 1..84: note = Description of Unknown:cds_NC_025365.1_cds_YP_009094182.1_4 target sequence
MPDPHKSISNIDLGLPDWGLYAMIGGTVVAFLILVCLLCTCCKRRRRRNSRKPSSEQTPKISSTPPSGTKVISSWESYKGTSSV

SEQ ID NO: 27318 - protein, 85 aa, unidentified
  REGION 1..85: note = Description of Unknown:cds_NC_025365.1_cds_YP_009094182.1_4 target sequence
KIGPWTPIDLTHLSCPNNLLSEDDGCSSSSTFSYIELRTGYLTHQKVSGFTCTGVINEAVTYTNFVGYVTTTFKRKHFKPTASAC

SEQ ID NO: 27319 - protein, 85 aa, unidentified
  REGION 1..85: note = Description of Unknown:cds_NC_025365.1_cds_YP_009094182.1_4 target sequence
RDAYHWKISGDPRYEESLHTPYPDNSWLRTVTTTKESLLIISPSIVEMDIYSRSLHSPMFPTGRCYDFYKSTPSCLTNHDYTIWL

SEQ ID NO: 27320 - protein, 85 aa, unidentified
  REGION 1..85: note = Description of Unknown:cds_NC_025365.1_cds_YP_009094182.1_4 target sequence
PDDANVRLTCDIFVTSTGKKSMNGSKMCGFTDERGLYRTLKGACKLTLCGKPGLRLFDGTWISITRPEIVMWCSPNQLVNVHNNR

SEQ ID NO: 27321 - protein, 85 aa, unidentified
  REGION 1..85: note = Description of Unknown:cds_NC_025365.1_cds_YP_009094182.1_4 target sequence
VDEIEHLIVGDLIRRREECLDTLETVLMSKSVSFRRLSHFRKLVPGFGKAYTIANGSLMETNVHYKRVDRWEEILPSKGCLKLND

SEQ ID NO: 27322 - protein, 85 aa, unidentified
  REGION 1..85: note = Description of Unknown:cds_NC_025365.1_cds_YP_009094182.1_4 target sequence
KCLNPENGVFFNGIIKGPDGQVLIPEMQSSLLKQHMDLLKASVFPLRHPLIDQTSIFKKDGEADDFVDVHMPDPHKSISNIDLGL

SEQ ID NO: 27323 - protein, 85 aa, unidentified
  REGION 1..85: note = Description of Unknown:cds_NZ_WFIY01000004.1_cds_WP_155864365.1_390 target sequence
LKRGFLVALNSPTGSGKTLFSLIVGVELKGKVAYIVRTHNEYYPVYRESKRLGKSFSFLVSKALACPFSTADVNPEDIKCSSCDI

SEQ ID NO: 27324 - protein, 85 aa, unidentified
  REGION 1..85: note = Description of Unknown:cds_NZ_WFIY01000004.1_cds_WP_155864365.1_390 target sequence
FSSIPIKVDDYPFSFLSKLKKEGEDEGFCPYYSLLDSLSNSDVIVLTYPYFFIPRLREALGLDFSQYVVVVDEAHNLDRLNELEE

SEQ ID NO: 27325 - protein, 85 aa, unidentified
  REGION 1..85: note = Description of Unknown:cds_NZ_WFIY01000004.1_cds_WP_155864365.1_390 target sequence
RKLNLTIIDRAISQVSNTTVIEILRRLKEEVKKKALPEEKYILVQDYPKLTDDELEIIKEEYEALREKMIKEKRIKQIYLNNIIK

SEQ ID NO: 27326 - protein, 85 aa, unidentified
  REGION 1..85: note = Description of Unknown:cds_NZ_WFIY01000004.1_cds_WP_155864365.1_390 target sequence
FYETEGKVFSYKGSLIKKPITPEKYISILNDPSLSVILMSGTLQSKEFLRNVLGITRQIEYIDTEKEMKKKLSGTIDCILALDVT

SEQ ID NO: 27327 - protein, 85 aa, unidentified
  REGION 1..85: note = Description of Unknown:cds_NZ_WFIY01000004.1_cds_WP_155864365.1_390 target sequence
SAYSLRTKEMWKKYASYILKIFYQAKGYVLAVFPSYSLMNEVMKLVNLPKLVEDEKTSLEDVYKLKEKSIIAAVARGKLSEGIEL

SEQ ID NO: 27328 - protein, 85 aa, unidentified
  REGION 1..85: note = Description of Unknown:cds_NZ_WFIY01000004.1_cds_WP_155864365.1_390 target sequence
TKDGKSLISDVVLVGIPYPAVDDYLKLQAEEISKITGQDVKDLLINTTALIAVKQAIGRAIRSVNDKANVWLLDKRYDSIMWKTK

SEQ ID NO: 27329 - protein, 84 aa, unidentified
  REGION 1..84: note = Description of Unknown:cds_NZ_WFIY01000004.1_cds_WP_155864365.1_390 target sequence
LVGIPYPAVDDYLKLQAEEISKITGQDVKDLLINTTALIAVKQAIGRAIRSVNDKANVWLLDKRYDSIMWKTKINCLNPKKIKL

SEQ ID NO: 27330 - protein, 85 aa, unidentified
  REGION 1..85: note = Description of Unknown:cds_NZ_WFIY01000004.1_cds_WP_155864365.1_390 target sequence
LKGKVAYIVRTHNEYYPVYRESKRLGKSFSFLVSKALACPFSTADVNPEDIKCSSCDIFSSIPIKVDDYPFSFLSKLKKEGEDEG

SEQ ID NO: 27331 - protein, 85 aa, unidentified
  REGION 1..85: note = Description of Unknown:cds_NZ_WFIY01000004.1_cds_WP_155864365.1_390 target sequence
FCPYYSLLDSLSNSDVIVLTYPYFFIPRLREALGLDFSQYVVVVDEAHNLDRLNELEERKLNLTIIDRAISQVSNTTVIEILRRL

SEQ ID NO: 27332 - protein, 85 aa, unidentified
  REGION 1..85: note = Description of Unknown:cds_NZ_WFIY01000004.1_cds_WP_155864365.1_390 target sequence
KEEVKKKALPEEKYILVQDYPKLTDDELEIIKEEYEALREKMIKEKRIKQIYLNNIIKFYETEGKVFSYKGSLIKKPITPEKYIS

SEQ ID NO: 27333 - protein, 85 aa, unidentified
  REGION 1..85: note = Description of Unknown:cds_NZ_WFIY01000004.1_cds_WP_155864365.1_390 target sequence
ILNDPSLSVILMSGTLQSKEFLRNVLGITRQIEYIDTEKEMKKKLSGTIDCILALDVTSAYSLRTKEMWKKYASYILKIFYQAKG

SEQ ID NO: 27334 - protein, 85 aa, unidentified
  REGION 1..85: note = Description of Unknown:cds_NZ_WFIY01000004.1_cds_WP_155864365.1_390 target sequence
YVLAVFPSYSLMNEVMKLVNLPKLVEDEKTSLEDVYKLKEKSIIAAVARGKLSEGIELTKDGKSLISDVVLVGIPYPAVDDYLKL

SEQ ID NO: 27335 - protein, 85 aa, unidentified
  REGION 1..85: note = Description of Unknown:cds_NZ_WFIY01000004.1_cds_WP_155864025.1_1956 target sequence
RLIPIGIIALLIVPIFFMSVVNSSASSNNTYYTLEYSKYSSCLYISKGILSIEIYKVSNSTYYGNLSCNDKDIYVNRYTTIYTLV

SEQ ID NO: 27336 - protein, 85 aa, unidentified
  REGION 1..85: note = Description of Unknown:cds_NZ_WFIY01000004.1_cds_WP_155864025.1_1956 target sequence
TGSAETINGKICVNSSASGNLYVRTTIPQLARIIVISAGMEEIVWAGFNETYVHTYSYINGSGEVVLQFINGTSISNISIGIKQN

SEQ ID NO: 27337 - protein, 85 aa, unidentified
  REGION 1..85: note = Description of Unknown:cds_NZ_WFIY01000004.1_cds_WP_155864025.1_1956 target sequence
SSVIQYINLTLTKVAISSESEYSSSFILHVQMPRKYSPLIECFLVNGSSFSSGAEGYTVTTAYFCGKLMPAIEWKGLGIGNLNLG

SEQ ID NO: 27338 - protein, 85 aa, unidentified
  REGION 1..85: note = Description of Unknown:cds_NZ_WFIY01000004.1_cds_WP_155864025.1_1956 target sequence
LHAPMSGRVNFTTLEFYGINGTTVGYVHSAYINAEYHGIFDSSFIAGELLIVHITNAPALVKPSLISVIYHQGVPVILGVCENNT

SEQ ID NO: 27339 - protein, 85 aa, unidentified
  REGION 1..85: note = Description of Unknown:cds_NZ_WFIY01000004.1_cds_WP_155864025.1_1956 target sequence
VETTANVIIQHEVYINHAKGLLLMLSLNSSVFYVGVVHSIIVNVTIVKPTAVVVSNVTIQGKSYLAQIVNISASGYVTFNVSKVS

SEQ ID NO: 27340 - protein, 85 aa, unidentified
  REGION 1..85: note = Description of Unknown:cds_NZ_WFIY01000004.1_cds_WP_155864025.1_1956 target sequence
NENFVIFEQESNGSLVELNSCNYFVVNNTIVVFTDPASTYLIVYGYTSTISTSSTSSSSSTITSPSFSNTEILGIAIVVVIILII

SEQ ID NO: 27341 - protein, 84 aa, unidentified
  REGION 1..84: note = Description of Unknown:cds_NZ_WFIY01000004.1_cds_WP_155864025.1_1956 target sequence
NGSLVELNSCNYFVVNNTIVVFTDPASTYLIVYGYTSTISTSSTSSSSSTITSPSFSNTEILGIAIVVVIILIIAVIMVIARKK

SEQ ID NO: 27342 - protein, 85 aa, unidentified
  REGION 1..85: note = Description of Unknown:cds_NZ_WFIY01000004.1_cds_WP_155864025.1_1956 target sequence
NNTYYTLEYSKYSSCLYISKGILSIEIYKVSNSTYYGNLSCNDKDIYVNRYTTIYTLVTGSAETINGKICVNSSASGNLYVRTTI

SEQ ID NO: 27343 - protein, 85 aa, unidentified
  REGION 1..85: note = Description of Unknown:cds_NZ_WFIY01000004.1_cds_WP_155864025.1_1956 target sequence
PQLARIIVISAGMEEIVWAGFNETYVHTYSYINGSGEVVLQFINGTSISNISIGIKQNSSVIQYINLTLTKVAISSESEYSSSFI

SEQ ID NO: 27344 - protein, 85 aa, unidentified
  REGION 1..85: note = Description of Unknown:cds_NZ_WFIY01000004.1_cds_WP_155864025.1_1956 target sequence
LHVQMPRKYSPLIECFLVNGSSFSSGAEGYTVTTAYFCGKLMPAIEWKGLGIGNLNLGLHAPMSGRVNFTTLEFYGINGTTVGYV

SEQ ID NO: 27345 - protein, 85 aa, unidentified
  REGION 1..85: note = Description of Unknown:cds_NZ_WFIY01000004.1_cds_WP_155864025.1_1956 target sequence
HSAYINAEYHGIFDSSFIAGELLIVHITNAPALVKPSLISVIYHQGVPVILGVCENNTVETTANVIIQHEVYINHAKGLLLMLSL

SEQ ID NO: 27346 - protein, 85 aa, unidentified
  REGION 1..85: note = Description of Unknown:cds_NZ_WFIY01000004.1_cds_WP_155864025.1_1956 target sequence
NSSVFYVGVVHSIIVNVTIVKPTAVVVSNVTIQGKSYLAQIVNISASGYVTFNVSKVSNENFVIFEQESNGSLVELNSCNYFVVN

SEQ ID NO: 27347 - protein, 85 aa, unidentified
  REGION 1..85: note = Description of Unknown:cds_NZ_WFIY01000004.1_cds_WP_155864208.1_2174 target sequence
TGTPDKGKHLRKEIGFLELFIIGLAGAVATAVFFSQVEMTALAGPGSLIAWLVGIFFYFTIGLTYIELSQTYPEAGGPSRYSIYS

SEQ ID NO: 27348 - protein, 85 aa, unidentified
  REGION 1..85: note = Description of Unknown:cds_NZ_WFIY01000004.1_cds_WP_155864208.1_2174 target sequence
HGVVTNLINATADLIWYLFIPPIEAFATIEGLYFIFPQLLNKQGYPTLLGAIVGVVILIAYIPFNYYGIKLFAKITAGFGSVKII

SEQ ID NO: 27349 - protein, 85 aa, unidentified
  REGION 1..85: note = Description of Unknown:cds_NZ_WFIY01000004.1_cds_WP_155864208.1_2174 target sequence
FYVLPVLALLLLFSNPQNFTAYHGVLPFGIAGIFAAMPYAMFAFGSARVVPDFAEETKDKRHIVYALLLTILGQAAIYILYDLTL

SEQ ID NO: 27350 - protein, 85 aa, unidentified
  REGION 1..85: note = Description of Unknown:cds_NZ_WFIY01000004.1_cds_WP_155864208.1_2174 target sequence
ILTVNWKAFGITPGDWSGLSKVTGNPFVILTSSYDLKIFLIIILISAIAGPFLTGYIYMGSGSRVLLAMGRSRFVSSAMRQLHEK

SEQ ID NO: 27351 - protein, 85 aa, unidentified
  REGION 1..85: note = Description of Unknown:cds_NZ_WFIY01000004.1_cds_WP_155864208.1_2174 target sequence
YAIPYWGLMVFAVVGALITFLFAPIPSIYGLISDSVVAGYLGFATNPIALVVLRRQGVTKYKIPLGNVISAIAFVGSSLIVFWSG

SEQ ID NO: 27352 - protein, 85 aa, unidentified
  REGION 1..85: note = Description of Unknown:cds_NZ_WFIY01000004.1_cds_WP_155864208.1_2174 target sequence
WPAVPYSVLLLTIASAVFAAIGKATKDFKESIWYMTYIAFLTIMTYIGSDGALNIIPFIDATIITALVSLAVFYPWGIISGLKKE

SEQ ID NO: 27353 - protein, 84 aa, unidentified
  REGION 1..84: note = Description of Unknown:cds_NZ_WFIY01000004.1_cds_WP_155864208.1_2174 target sequence
TIASAVFAAIGKATKDFKESIWYMTYIAFLTIMTYIGSDGALNIIPFIDATIITALVSLAVFYPWGIISGLKKENYLEHEKEIE

SEQ ID NO: 27354 - protein, 85 aa, unidentified
  REGION 1..85: note = Description of Unknown:cds_NZ_WFIY01000004.1_cds_WP_155864208.1_2174 target sequence
VATAVFFSQVEMTALAGPGSLIAWLVGIFFYFTIGLTYIELSQTYPEAGGPSRYSIYSHGVVTNLINATADLIWYLFIPPIEAFA

SEQ ID NO: 27355 - protein, 85 aa, unidentified
  REGION 1..85: note = Description of Unknown:cds_NZ_WFIY01000004.1_cds_WP_155864208.1_2174 target sequence
TIEGLYFIFPQLLNKQGYPTLLGAIVGVVILIAYIPFNYYGIKLFAKITAGFGSVKIIFYVLPVLALLLLFSNPQNFTAYHGVLP

SEQ ID NO: 27356 - protein, 85 aa, unidentified
  REGION 1..85: note = Description of Unknown:cds_NZ_WFIY01000004.1_cds_WP_155864208.1_2174 target sequence
FGIAGIFAAMPYAMFAFGSARVVPDFAEETKDKRHIVYALLLTILGQAAIYILYDLTLILTVNWKAFGITPGDWSGLSKVTGNPF

SEQ ID NO: 27357 - protein, 85 aa, unidentified
  REGION 1..85: note = Description of Unknown:cds_NZ_WFIY01000004.1_cds_WP_155864208.1_2174 target sequence
VILTSSYDLKIFLIIILISAIAGPFLTGYIYMGSGSRVLLAMGRSRFVSSAMRQLHEKYAIPYWGLMVFAVVGALITFLFAPIPS

SEQ ID NO: 27358 - protein, 85 aa, unidentified
  REGION 1..85: note = Description of Unknown:cds_NZ_WFIY01000004.1_cds_WP_155864208.1_2174 target sequence
IYGLISDSVVAGYLGFATNPIALVVLRRQGVTKYKIPLGNVISAIAFVGSSLIVFWSGWPAVPYSVLLLTIASAVFAAIGKATKD

SEQ ID NO: 27359 - protein, 85 aa, unidentified
  REGION 1..85: note = Description of Unknown:cds_NZ_WFIY01000004.1_cds_WP_155862813.1_642 target sequence
SKTVFVRESSGLLKQVSLIDAIMLNLGNMSAGVALFESISPYLNSSSNPTIGGPGGILWLASIIGFIFAIPQLIVYTIMTRKISR

SEQ ID NO: 27360 - protein, 85 aa, unidentified
  REGION 1..85: note = Description of Unknown:cds_NZ_WFIY01000004.1_cds_WP_155862813.1_642 target sequence
TGGDYVWISRSLNGPLGAVMAISLMIESVAYFALVAFFSGSSINAVLCIIGHADNNPGLINLANTIFVNPYGSLTLLQKVIFYVI

SEQ ID NO: 27361 - protein, 85 aa, unidentified
  REGION 1..85: note = Description of Unknown:cds_NZ_WFIY01000004.1_cds_WP_155862813.1_642 target sequence
SASFFITVILINILRAKWGYSIVTILGIFSMLSLVLAMIVIALNSSHFTSIIPLFSNLGVSVPPVKYSALPSSINLDYTLLLLPI

SEQ ID NO: 27362 - protein, 85 aa, unidentified
  REGION 1..85: note = Description of Unknown:cds_NZ_WFIY01000004.1_cds_WP_155862813.1_642 target sequence
FALYTYPWMQAGPAVSAEFKQTEKIAKLNLVLALGITGLLVTLAFLEMDLVAGYCFNYYAYGSFIYNFWTVAIALAGNPILQWII

SEQ ID NO: 27363 - protein, 85 aa, unidentified
  REGION 1..85: note = Description of Unknown:cds_NZ_WFIY01000004.1_cds_WP_155862813.1_642 target sequence
GLGTVLWNFYVLAYGVIVFSRYIFALSFDRVLPEKFSQVNSKGSPVYAHLLDLSIMLILLLIPVFSTSAATSLYGATILGALYFL

SEQ ID NO: 27364 - protein, 85 aa, unidentified
  REGION 1..85: note = Description of Unknown:cds_NZ_WFIY01000004.1_cds_WP_155862813.1_642 target sequence
IASIAGAIYGIKNRIKSLEIAGIISAIYFAFLTYEAGVNPVFGFTSTVDGFPLTEFFVGLTITIGVITYVASWYKHKKDGIDISM

SEQ ID NO: 27365 - protein, 84 aa, unidentified
  REGION 1..84: note = Description of Unknown:cds_NZ_WFIY01000004.1_cds_WP_155862813.1_642 target sequence
GIKNRIKSLEIAGIISAIYFAFLTYEAGVNPVFGFTSTVDGFPLTEFFVGLTITIGVITYVASWYKHKKDGIDISMSFKEIPPE

SEQ ID NO: 27366 - protein, 85 aa, unidentified
  REGION 1..85: note = Description of Unknown:cds_NZ_WFIY01000004.1_cds_WP_155862813.1_642 target sequence
NMSAGVALFESISPYLNSSSNPTIGGPGGILWLASIIGFIFAIPQLIVYTIMTRKISRTGGDYVWISRSLNGPLGAVMAISLMIE

SEQ ID NO: 27367 - protein, 85 aa, unidentified
  REGION 1..85: note = Description of Unknown:cds_NZ_WFIY01000004.1_cds_WP_155862813.1_642 target sequence
SVAYFALVAFFSGSSINAVLCIIGHADNNPGLINLANTIFVNPYGSLTLLQKVIFYVISASFFITVILINILRAKWGYSIVTILG

SEQ ID NO: 27368 - protein, 85 aa, unidentified
  REGION 1..85: note = Description of Unknown:cds_NZ_WFIY01000004.1_cds_WP_155862813.1_642 target sequence
IFSMLSLVLAMIVIALNSSHFTSIIPLFSNLGVSVPPVKYSALPSSINLDYTLLLLPIFALYTYPWMQAGPAVSAEFKQTEKIAK

SEQ ID NO: 27369 - protein, 85 aa, unidentified
  REGION 1..85: note = Description of Unknown:cds_NZ_WFIY01000004.1_cds_WP_155862813.1_642 target sequence
LNLVLALGITGLLVTLAFLEMDLVAGYCFNYYAYGSFIYNFWTVAIALAGNPILQWIIGLGTVLWNFYVLAYGVIVFSRYIFALS

SEQ ID NO: 27370 - protein, 85 aa, unidentified
  REGION 1..85: note = Description of Unknown:cds_NZ_WFIY01000004.1_cds_WP_155862813.1_642 target sequence
FDRVLPEKFSQVNSKGSPVYAHLLDLSIMLILLLIPVFSTSAATSLYGATILGALYFLIASIAGAIYGIKNRIKSLEIAGIISAI

SEQ ID NO: 27371 - protein, 85 aa, unidentified
  REGION 1..85: note = Description of Unknown:cds_NZ_WFIY01000004.1_cds_WP_155863196.1_1130 target sequence
LIKKLVEVLDTTLRDGAQTTSVSFTLNDKIRIALALDDLGVHYIEGGWPGSNPKDEEFFKEISKYSLKAKVAAFGSTKKKGVRAD

SEQ ID NO: 27372 - protein, 85 aa, unidentified
  REGION 1..85: note = Description of Unknown:cds_NZ_WFIY01000004.1_cds_WP_155863196.1_1130 target sequence
EDKNLNAIIDSGVKVAVLFGKSWTLHVTHVLKVSKEENLELVYDSIRYLRDHGLEVIFDAEHFYQGYKEDEEYALEVIKTAEEAG

SEQ ID NO: 27373 - protein, 85 aa, unidentified
  REGION 1..85: note = Description of Unknown:cds_NZ_WFIY01000004.1_cds_WP_155863196.1_1130 target sequence
ASVIALADTNGGTLPHEIYEITSRVVKELKIKVGLHMHNDSGCAVANTLMGVLAGARHVQGTINGLGERTGNADLVQVIPNLQLK

SEQ ID NO: 27374 - protein, 85 aa, unidentified
  REGION 1..85: note = Description of Unknown:cds_NZ_WFIY01000004.1_cds_WP_155863196.1_1130 target sequence
MGFKVIPDLTKLKEVSRLVYELSGLHPNPYQPFVGDNAFSHKAGVHADAVMKVPRAYEHIDPTLVGNQRRIVISELAGSSNLLNY

SEQ ID NO: 27375 - protein, 85 aa, unidentified
  REGION 1..85: note = Description of Unknown:cds_NZ_WFIY01000004.1_cds_WP_155863196.1_1130 target sequence
LEKIGIKVDKKDERLRKALQKIKEMENKGYSFDLAPASAVLQILKELGIYTKFIDLQYWKVINESGNLSLAVVKVNSQLQASEGV

SEQ ID NO: 27376 - protein, 85 aa, unidentified
  REGION 1..85: note = Description of Unknown:cds_NZ_WFIY01000004.1_cds_WP_155863196.1_1130 target sequence
GPVHALDMAVRNALQKVYPELSRVKLIDYRVVLPGEIKNTESLVRVTIEFTDGKDNWRTEGVSTSVIEASVIALIDGLDYYLQVS

SEQ ID NO: 27377 - protein, 84 aa, unidentified
  REGION 1..84: note = Description of Unknown:cds_NZ_WFIY01000004.1_cds_WP_155863196.1_1130 target sequence
RNALQKVYPELSRVKLIDYRVVLPGEIKNTESLVRVTIEFTDGKDNWRTEGVSTSVIEASVIALIDGLDYYLQVSKKLKTEILN

SEQ ID NO: 27378 - protein, 85 aa, unidentified
  REGION 1..85: note = Description of Unknown:cds_NZ_WFIY01000004.1_cds_WP_155863196.1_1130 target sequence
DKIRIALALDDLGVHYIEGGWPGSNPKDEEFFKEISKYSLKAKVAAFGSTKKKGVRADEDKNLNAIIDSGVKVAVLFGKSWTLHV

SEQ ID NO: 27379 - protein, 85 aa, unidentified
  REGION 1..85: note = Description of Unknown:cds_NZ_WFIY01000004.1_cds_WP_155863196.1_1130 target sequence
THVLKVSKEENLELVYDSIRYLRDHGLEVIFDAEHFYQGYKEDEEYALEVIKTAEEAGASVIALADTNGGTLPHEIYEITSRVVK

SEQ ID NO: 27380 - protein, 85 aa, unidentified
  REGION 1..85: note = Description of Unknown:cds_NZ_WFIY01000004.1_cds_WP_155863196.1_1130 target sequence
ELKIKVGLHMHNDSGCAVANTLMGVLAGARHVQGTINGLGERTGNADLVQVIPNLQLKMGFKVIPDLTKLKEVSRLVYELSGLHP

SEQ ID NO: 27381 - protein, 85 aa, unidentified
  REGION 1..85: note = Description of Unknown:cds_NZ_WFIY01000004.1_cds_WP_155863196.1_1130 target sequence
NPYQPFVGDNAFSHKAGVHADAVMKVPRAYEHIDPTLVGNQRRIVISELAGSSNLLNYLEKIGIKVDKKDERLRKALQKIKEMEN

SEQ ID NO: 27382 - protein, 85 aa, unidentified
  REGION 1..85: note = Description of Unknown:cds_NZ_WFIY01000004.1_cds_WP_155863196.1_1130 target sequence
KGYSFDLAPASAVLQILKELGIYTKFIDLQYWKVINESGNLSLAVVKVNSQLQASEGVGPVHALDMAVRNALQKVYPELSRVKLI

SEQ ID NO: 27383 - protein, 85 aa, unidentified
  REGION 1..85: note = Description of Unknown:cds_NC_039198.1_cds_YP_009512972.1_1 target sequence
SSVFRAFELFTLEQEQHELGNDIELPPETLRANIKVCILNSQDPQTRHDMMCFCLRLIASNSARAAHKAGAILTLLSLPTAMMQN

SEQ ID NO: 27384 - protein, 85 aa, unidentified
  REGION 1..85: note = Description of Unknown:cds_NC_039198.1_cds_YP_009512972.1_1 target sequence
HIRIADRSPDADIERIEVDGFEPGTYRLRPNARTPLTNGEITALDLMANDLPDTYTNDTPFVNHRTEGENCDETEQFLNAIYSVL

SEQ ID NO: 27385 - protein, 85 aa, unidentified
  REGION 1..85: note = Description of Unknown:cds_NC_039198.1_cds_YP_009512972.1_1 target sequence
VQLWVMVCKCMTAHDQPTGSDERRLAKYQQQGRMDQKYALQPELRRQIQTCIRRSLTIRQFLTYELQTARKQGAITGRYYAMVGD

SEQ ID NO: 27386 - protein, 85 aa, unidentified
  REGION 1..85: note = Description of Unknown:cds_NC_039198.1_cds_YP_009512972.1_1 target sequence
IGKYIDNAGMSAFFMTMRFALGTRWPPLALSAFSGELLKLKSLMQLYRNLGEKARYMALLEMPEMMEFAPANYPLCYSYAMGIGS

SEQ ID NO: 27387 - protein, 85 aa, unidentified
  REGION 1..85: note = Description of Unknown:cds_NC_039198.1_cds_YP_009512972.1_1 target sequence
VQDPMMRNYTFARPFLNPAYFQLGVETANRQQGSVDKNMAEELGLTEEERRDMSATVTRLTTGRGAGQAQDMINIMGARQAAGGR

SEQ ID NO: 27388 - protein, 85 aa, unidentified
  REGION 1..85: note = Description of Unknown:cds_NC_039198.1_cds_YP_009512972.1_1 target sequence
AAQGRALRVIEEDETTEEESDDEIQDEVQGRPLPPLPAQVREVDWEARLAEIEEQEQRMRDRGQGMGGGAPATGPAQPRQALHEE

SEQ ID NO: 27389 - protein, 84 aa, unidentified
  REGION 1..84: note = Description of Unknown:cds_NC_039198.1_cds_YP_009512972.1_1 target sequence
IEEDETTEEESDDEIQDEVQGRPLPPLPAQVREVDWEARLAEIEEQEQRMRDRGQGMGGGAPATGPAQPRQALHEEQVLLDLDM

SEQ ID NO: 27390 - protein, 85 aa, unidentified
  REGION 1..85: note = Description of Unknown:cds_NC_039198.1_cds_YP_009512972.1_1 target sequence
ETLRANIKVCILNSQDPQTRHDMMCFCLRLIASNSARAAHKAGAILTLLSLPTAMMQNHIRIADRSPDADIERIEVDGFEPGTYR

SEQ ID NO: 27391 - protein, 85 aa, unidentified
  REGION 1..85: note = Description of Unknown:cds_NC_039198.1_cds_YP_009512972.1_1 target sequence
LRPNARTPLTNGEITALDLMANDLPDTYTNDTPFVNHRTEGENCDETEQFLNAIYSVLVQLWVMVCKCMTAHDQPTGSDERRLAK

SEQ ID NO: 27392 - protein, 85 aa, unidentified
  REGION 1..85: note = Description of Unknown:cds_NC_039198.1_cds_YP_009512972.1_1 target sequence
YQQQGRMDQKYALQPELRRQIQTCIRRSLTIRQFLTYELQTARKQGAITGRYYAMVGDIGKYIDNAGMSAFFMTMRFALGTRWPP

SEQ ID NO: 27393 - protein, 85 aa, unidentified
  REGION 1..85: note = Description of Unknown:cds_NC_039198.1_cds_YP_009512972.1_1 target sequence
LALSAFSGELLKLKSLMQLYRNLGEKARYMALLEMPEMMEFAPANYPLCYSYAMGIGSVQDPMMRNYTFARPFLNPAYFQLGVET

SEQ ID NO: 27394 - protein, 85 aa, unidentified
  REGION 1..85: note = Description of Unknown:cds_NC_039198.1_cds_YP_009512972.1_1 target sequence
ANRQQGSVDKNMAEELGLTEEERRDMSATVTRLTTGRGAGQAQDMINIMGARQAAGGRAAQGRALRVIEEDETTEEESDDEIQDE

SEQ ID NO: 27395 - protein, 85 aa, unidentified
  REGION 1..85: note = Description of Unknown:cds_NC_004074.1_cds_NP_665864.1_1 target sequence
SSVFRAFELFTLEQEQQELGNDIEIPPETLRSNIKVCILNSQDPQTRHDMMCFCLRLIASNSARAAHKTGAILTLLNLPTAMMQN

SEQ ID NO: 27396 - protein, 85 aa, unidentified
  REGION 1..85: note = Description of Unknown:cds_NC_004074.1_cds_NP_665864.1_1 target sequence
HIRIADRSPDADIERIEVDGFEPGTYRLRPNARTPLTNGEITALSLMANDLPDTYTNDTPFTNHRAEGENCDETEQFLNAIYSVL

SEQ ID NO: 27397 - protein, 85 aa, unidentified
  REGION 1..85: note = Description of Unknown:cds_NC_004074.1_cds_NP_665864.1_1 target sequence
VQLWVTVCKCMTAHDQPTGSDERRLAKYQQQGRLDQKYALQPELRRQIQACIRGSLTIRQFLTYELQTARKQGAITGRYYAMVGD

SEQ ID NO: 27398 - protein, 85 aa, unidentified; identical to SEQ ID NO: 27386
  REGION 1..85: note = Description of Unknown:cds_NC_004074.1_cds_NP_665864.1_1 target sequence

SEQ ID NO: 27399 - protein, 85 aa, unidentified
  REGION 1..85: note = Description of Unknown:cds_NC_004074.1_cds_NP_665864.1_1 target sequence
VQDPMMRNYTFARPFLNPAYFQLGVETANRQQGSVDKSMAEELGLTEEERRDMSATVTRLTTGRGAGQAQDMINIMGARQAAGGR

SEQ ID NO: 27400 - protein, 85 aa, unidentified
  REGION 1..85: note = Description of Unknown:cds_NC_004074.1_cds_NP_665864.1_1 target sequence
GAQGRALRIVEEDETTDDESVDDQADDIQGRPLPPVPAPIREIDWEARIAEIEEQGQRMRDQGVGRLVDNQAPNVQNTRQNTQDN

SEQ ID NO: 27401 - protein, 84 aa, unidentified
  REGION 1..84: note = Description of Unknown:cds_NC_004074.1_cds_NP_665864.1_1 target sequence
VEEDETTDDESVDDQADDIQGRPLPPVPAPIREIDWEARIAEIEEQGQRMRDQGVGRLVDNQAPNVQNTRQNTQDNQALLDLDI

SEQ ID NO: 27402 - protein, 85 aa, unidentified
  REGION 1..85: note = Description of Unknown:cds_NC_004074.1_cds_NP_665864.1_1 target sequence
ETLRSNIKVCILNSQDPQTRHDMMCFCLRLIASNSARAAHKTGAILTLLNLPTAMMQNHIRIADRSPDADIERIEVDGFEPGTYR

SEQ ID NO: 27403 - protein, 85 aa, unidentified
  REGION 1..85: note = Description of Unknown:cds_NC_004074.1_cds_NP_665864.1_1 target sequence
LRPNARTPLTNGEITALSLMANDLPDTYTNDTPFTNHRAEGENCDETEQFLNAIYSVLVQLWVTVCKCMTAHDQPTGSDERRLAK

SEQ ID NO: 27404 - protein, 85 aa, unidentified
  REGION 1..85: note = Description of Unknown:cds_NC_004074.1_cds_NP_665864.1_1 target sequence
YQQQGRLDQKYALQPELRRQIQACIRGSLTIRQFLTYELQTARKQGAITGRYYAMVGDIGKYIDNAGMSAFFMTMRFALGTRWPP

SEQ ID NO: 27405 - protein, 85 aa, unidentified; identical to SEQ ID NO: 27393
  REGION 1..85: note = Description of Unknown:cds_NC_004074.1_cds_NP_665864.1_1 target sequence

SEQ ID NO: 27406 - protein, 85 aa, unidentified
  REGION 1..85: note = Description of Unknown:cds_NC_004074.1_cds_NP_665864.1_1 target sequence
ANRQQGSVDKSMAEELGLTEEERRDMSATVTRLTTGRGAGQAQDMINIMGARQAAGGRGAQGRALRIVEEDETTDDESVDDQADD

SEQ ID NO: 27407 - protein, 85 aa, unidentified
  REGION 1..85: note = Description of Unknown:cds_NC_025410.1_cds_YP_009094492.1_1 target sequence
SSVFKAYELFNLEQEQQERGNDLVLPPETLRSNIRVFVLNTQDPEIRFRMMCFCIRLVASNSARSAHRTGALLTLLSLPTAAMQN

SEQ ID NO: 27408 - protein, 85 aa, unidentified
  REGION 1..85: note = Description of Unknown:cds_NC_025410.1_cds_YP_009094492.1_1 target sequence
HIRIADRSPDAEIERIEIEGFEQGSYKLIPNARTPMSPAEITALDAMATDLPDSIMYDTPFMNMYTEAEGCDEIEEFLEAVYSVL

SEQ ID NO: 27409 - protein, 85 aa, unidentified
  REGION 1..85: note = Description of Unknown:cds_NC_025410.1_cds_YP_009094492.1_1 target sequence
IQVWITVCKCMTAYDQPTGSDEKRMAKYQQQGRLDPKYTLQQEVRRLIQKCIRGSLPVRQFLAFELQTARKQGTITSKYYSMVGD

SEQ ID NO: 27410 - protein, 85 aa, unidentified
  REGION 1..85: note = Description of Unknown:cds_NC_025410.1_cds_YP_009094492.1_1 target sequence
ISKYIENAGMSAFFMTARYALGTRWAPLALAAFTGDLLKMKSLMLLYRKLGEKARFMALLEMPDMMEFAPANYNLLYSYAMGIGS

SEQ ID NO: 27411 - protein, 85 aa, unidentified
  REGION 1..85: note = Description of Unknown:cds_NC_025410.1_cds_YP_009094492.1_1 target sequence
VMDAQMRNYNFARPFLNTAYFQLGVETANKQQGAVDKNMAAELGLSEDDKRVMAQTVSRLTGNKAGSDNQDLMDMLSRRSRSGQT

SEQ ID NO: 27412 - protein, 85 aa, unidentified
  REGION 1..85: note = Description of Unknown:cds_NC_025410.1_cds_YP_009094492.1_1 target sequence
RALRMSAQGNQAVDGDEEDDEEEEEEEEARDLTEEEQKESEAWLKKWKEIEAQRHAAIEAMKKHKAARTQPSQMPSEVQVHNENQ

SEQ ID NO: 27413 - protein, 84 aa, unidentified
  REGION 1..84: note = Description of Unknown:cds_NC_025410.1_cds_YP_009094492.1_1 target sequence
NQAVDGDEEDDEEEEEEEEARDLTEEEQKESEAWLKKWKEIEAQRHAAIEAMKKHKAARTQPSQMPSEVQVHNENQDVRGDLDS

SEQ ID NO: 27414 - protein, 85 aa, unidentified
  REGION 1..85: note = Description of Unknown:cds_NC_025410.1_cds_YP_009094492.1_1 target sequence
ETLRSNIRVFVLNTQDPEIRFRMMCFCIRLVASNSARSAHRTGALLTLLSLPTAAMQNHIRIADRSPDAEIERIEIEGFEQGSYK

SEQ ID NO: 27415 - protein, 85 aa, unidentified
  REGION 1..85: note = Description of Unknown:cds_NC_025410.1_cds_YP_009094492.1_1 target sequence
LIPNARTPMSPAEITALDAMATDLPDSIMYDTPFMNMYTEAEGCDEIEEFLEAVYSVLIQVWITVCKCMTAYDQPTGSDEKRMAK

SEQ ID NO: 27416 - protein, 85 aa, unidentified
  REGION 1..85: note = Description of Unknown:cds_NC_025410.1_cds_YP_009094492.1_1 target sequence
YQQQGRLDPKYTLQQEVRRLIQKCIRGSLPVRQFLAFELQTARKQGTITSKYYSMVGDISKYIENAGMSAFFMTARYALGTRWAP

SEQ ID NO: 27417 - protein, 85 aa, unidentified
  REGION 1..85: note = Description of Unknown:cds_NC_025410.1_cds_YP_009094492.1_1 target sequence
LALAAFTGDLLKMKSLMLLYRKLGEKARFMALLEMPDMMEFAPANYNLLYSYAMGIGSVMDAQMRNYNFARPFLNTAYFQLGVET

SEQ ID NO: 27418 - protein, 85 aa, unidentified
  REGION 1..85: note = Description of Unknown:cds_NC_025410.1_cds_YP_009094492.1_1 target sequence
ANKQQGAVDKNMAAELGLSEDDKRVMAQTVSRLTGNKAGSDNQDLMDMLSRRSRSGQTRALRMSAQGNQAVDGDEEDDEEEEEEE

SEQ ID NO: 27419 - protein, 85 aa, unidentified
  REGION 1..85: note = Description of Unknown:cds_NZ_WFIY01000004.1_cds_WP_155862339.1_66 target sequence
KRTLIITFFLTIFFLLPTFHASTTLTPIKHVIIIIEENHSFDNMFGTYPFGWPPIVNNITLSVMWPCGLYKNYTQLESSKNGELC

SEQ ID NO: 27420 - protein, 85 aa, unidentified
  REGION 1..85: note = Description of Unknown:cds_NZ_WFIY01000004.1_cds_WP_155862339.1_66 target sequence
WISVPNVPWLPFLGSSHPYYANAWDTVDPGEGWCLYHGDYWFGTYDGFVYYSGPQSMAYFSYQQVGILWDYAEEYVLADNYYSPV

SEQ ID NO: 27421 - protein, 85 aa, unidentified
  REGION 1..85: note = Description of Unknown:cds_NZ_WFIY01000004.1_cds_WP_155862339.1_66 target sequence
LGLTEPNRVAYMTGFPPSFYSDDACNVIPFNETIMYQLCENNISWGYFVYDYSGCIPWPMGAFIGIQNYMNHFHGLNAFQEYLQN

SEQ ID NO: 27422 - protein, 85 aa, unidentified
  REGION 1..85: note = Description of Unknown:cds_NZ_WFIY01000004.1_cds_WP_155862339.1_66 target sequence
NSLPAVSWVMLINGYDDEYDMHPPYNVTAGAVKISQIINEVMRSPEWNSTVIFITFDEGGGYFDQVVPPAINYYGLGQRIPLLII

SEQ ID NO: 27423 - protein, 85 aa, unidentified
  REGION 1..85: note = Description of Unknown:cds_NZ_WFIY01000004.1_cds_WP_155862339.1_66 target sequence
SPYAKEAWIDNYTLSGYTLLGFIDYNWHLPWLTKCVENSDVQGLLCAFNFSRARPPIILCPNNWTYPIPLQYPVHYGYIAVVHPL

SEQ ID NO: 27424 - protein, 85 aa, unidentified
  REGION 1..85: note = Description of Unknown:cds_NZ_WFIY01000004.1_cds_WP_155862339.1_66 target sequence
PSYASVYPEPAIQILLPLDLIGFTLLFASFKKRNLTLYALLSLLVGLGISGYVYSTNSMYSFVTDYFVYSSLIGFLISSVLALKR

SEQ ID NO: 27425 - protein, 84 aa, unidentified
  REGION 1..84: note = Description of Unknown:cds_NZ_WFIY01000004.1_cds_WP_155862339.1_66 target sequence
EPAIQILLPLDLIGFTLLFASFKKRNLTLYALLSLLVGLGISGYVYSTNSMYSFVTDYFVYSSLIGFLISSVLALKRYKNALRR

SEQ ID NO: 27426 - protein, 85 aa, unidentified
  REGION 1..85: note = Description of Unknown:cds_NZ_WFIY01000004.1_cds_WP_155862339.1_66 target sequence
IKHVIIIIEENHSFDNMFGTYPFGWPPIVNNITLSVMWPCGLYKNYTQLESSKNGELCWISVPNVPWLPFLGSSHPYYANAWDTV

SEQ ID NO: 27427 - protein, 85 aa, unidentified
  REGION 1..85: note = Description of Unknown:cds_NZ_WFIY01000004.1_cds_WP_155862339.1_66 target sequence
DPGEGWCLYHGDYWFGTYDGFVYYSGPQSMAYFSYQQVGILWDYAEEYVLADNYYSPVLGLTEPNRVAYMTGFPPSFYSDDACNV

SEQ ID NO: 27428 - protein, 85 aa, unidentified
  REGION 1..85: note = Description of Unknown:cds_NZ_WFIY01000004.1_cds_WP_155862339.1_66 target sequence
IPFNETIMYQLCENNISWGYFVYDYSGCIPWPMGAFIGIQNYMNHFHGLNAFQEYLQNNSLPAVSWVMLINGYDDEYDMHPPYNV

SEQ ID NO: 27429 - protein, 85 aa, unidentified
  REGION 1..85: note = Description of Unknown:cds_NZ_WFIY01000004.1_cds_WP_155862339.1_66 target sequence
TAGAVKISQIINEVMRSPEWNSTVIFITFDEGGGYFDQVVPPAINYYGLGQRIPLLIISPYAKEAWIDNYTLSGYTLLGFIDYNW

SEQ ID NO: 27430 - protein, 85 aa, unidentified
  REGION 1..85: note = Description of Unknown:cds_NZ_WFIY01000004.1_cds_WP_155862339.1_66 target sequence
HLPWLTKCVENSDVQGLLCAFNFSRARPPIILCPNNWTYPIPLQYPVHYGYIAVVHPLPSYASVYPEPAIQILLPLDLIGFTLLF

SEQ ID NO: 27431 - protein, 85 aa, unidentified
  REGION 1..85: note = Description of Unknown:cds_NZ_WFIY01000004.1_cds_WP_155862749.1_561 target sequence
SANVPRLKKGVVGTLEAIAQEIAAMAPACDTVAFITSAAAFAFVLTPLAFLLAMITMFIEVNTLYHLSKRHASAGGYYGYVATAF

SEQ ID NO: 27432 - protein, 85 aa, unidentified
  REGION 1..85: note = Description of Unknown:cds_NZ_WFIY01000004.1_cds_WP_155862749.1_561 target sequence
GSFPAIITGLMYPVYQIASTAAIPVYVAGIVLPGVLHYFWGITLPGWVWIAFITFFILFPIFLAMIGIRPQMKYIRYAALTEVAF

SEQ ID NO: 27433 - protein, 85 aa, unidentified
  REGION 1..85: note = Description of Unknown:cds_NZ_WFIY01000004.1_cds_WP_155862749.1_561 target sequence
LAITSLIIILKAPDNTINVFNPFAWNSVYGSHWNTMGGPLTGLGLGMIFGLTSFIGYGGSAPLGEEAKSSRAITKALMLGVFVVG

SEQ ID NO: 27434 - protein, 85 aa, unidentified
  REGION 1..85: note = Description of Unknown:cds_NZ_WFIY01000004.1_cds_WP_155862749.1_561 target sequence
VVLTEVAYALTVGWGINNMVSFACCGIPGIVVYTEYLGIAGGLLLALFAFNSAFSDSVAMQSNAGRVYFAMGRDGILPKFFSYVH

SEQ ID NO: 27435 - protein, 85 aa, unidentified
  REGION 1..85: note = Description of Unknown:cds_NZ_WFIY01000004.1_cds_WP_155862749.1_561 target sequence
PKWVTPTKSLLFVGISASILALASGFIVGYFAGTSPSQLIYCPATSKPVFCALSETFDYLTTIALVGFMVAHFINNTAVMVLFAR

SEQ ID NO: 27436 - protein, 85 aa, unidentified
  REGION 1..85: note = Description of Unknown:cds_NZ_WFIY01000004.1_cds_WP_155862749.1_561 target sequence
LKERHYGINRIIHPFLHYILPAIATIIFAFVLYKSIWPPEFPVTQAVITGASVLIFSIIYTAWIRVKRPETYRIAGKTVNIVEEE

SEQ ID NO: 27437 - protein, 84 aa, unidentified
  REGION 1..84: note = Description of Unknown:cds_NZ_WFIY01000004.1_cds_WP_155862749.1_561 target sequence
NRIIHPFLHYILPAIATIIFAFVLYKSIWPPEFPVTQAVITGASVLIFSIIYTAWIRVKRPETYRIAGKTVNIVEEERREQAKV

SEQ ID NO: 27438 - protein, 85 aa, unidentified
  REGION 1..85: note = Description of Unknown:cds_NZ_WFIY01000004.1_cds_WP_155862749.1_561 target sequence
ACDTVAFITSAAAFAFVLTPLAFLLAMITMFIEVNTLYHLSKRHASAGGYYGYVATAFGSFPAIITGLMYPVYQIASTAAIPVYV

SEQ ID NO: 27439 - protein, 85 aa, unidentified
  REGION 1..85: note = Description of Unknown:cds_NZ_WFIY01000004.1_cds_WP_155862749.1_561 target sequence
AGIVLPGVLHYFWGITLPGWVWIAFITFFILFPIFLAMIGIRPQMKYIRYAALTEVAFLAITSLIIILKAPDNTINVFNPFAWNS

SEQ ID NO: 27440 - protein, 85 aa, unidentified
  REGION 1..85: note = Description of Unknown:cds_NZ_WFIY01000004.1_cds_WP_155862749.1_561 target sequence
VYGSHWNTMGGPLTGLGLGMIFGLTSFIGYGGSAPLGEEAKSSRAITKALMLGVFVVGVVLTEVAYALTVGWGINNMVSFACCGI

SEQ ID NO: 27441 - protein, 85 aa, unidentified
  REGION 1..85: note = Description of Unknown:cds_NZ_WFIY01000004.1_cds_WP_155862749.1_561 target sequence
PGIVVYTEYLGIAGGLLLALFAFNSAFSDSVAMQSNAGRVYFAMGRDGILPKFFSYVHPKWVTPTKSLLFVGISASILALASGFI

SEQ ID NO: 27442 - protein, 85 aa, unidentified
  REGION 1..85: note = Description of Unknown:cds_NZ_WFIY01000004.1_cds_WP_155862749.1_561 target sequence
VGYFAGTSPSQLIYCPATSKPVFCALSETFDYLTTIALVGFMVAHFINNTAVMVLFARLKERHYGINRIIHPFLHYILPAIATII

SEQ ID NO: 27443 - protein, 85 aa, unidentified
  REGION 1..85: note = Description of Unknown:cds_NZ_WFIY01000004.1_cds_WP_155864197.1_2160 target sequence
GEREKVKLAKSIVPYWRGKSVPPPIIRILKNAVNSRKDALASARDIAKEVGFNSLRMEGWIVKCPYCGHRFEVVDNKVIRCPRCN

SEQ ID NO: 27444 - protein, 85 aa, unidentified
  REGION 1..85: note = Description of Unknown:cds_NZ_WFIY01000004.1_cds_WP_155864197.1_2160 target sequence
NVIKKVNFEVWNSLLEKYVNYEVTEAELNDSPVIPTDDQFELMKEPDIAFFSKTNFKVSKYGFDKIFKFFSPTQIRIITTLISKI

SEQ ID NO: 27445 - protein, 85 aa, unidentified
  REGION 1..85: note = Description of Unknown:cds_NZ_WFIY01000004.1_cds_WP_155864197.1_2160 target sequence
RETKGDVRVLLSLALLDYLSYNSMFTDVGKKIRSMFHYLQPKVSWKWVILPPSYFIDSLNAVLRAEDGVYVPSLNLALQEEIYNF

SEQ ID NO: 27446 - protein, 85 aa, unidentified
  REGION 1..85: note = Description of Unknown:cds_NZ_WFIY01000004.1_cds_WP_155864197.1_2160 target sequence
YLQFLKSSLSDFSEGVLTPNLYPEYFFECLDEKCNAFVEIGRHKISLEDLTGGKTSFMLKTISEDDINTLLNSEYRVLSIKYERD

SEQ ID NO: 27447 - protein, 85 aa, unidentified
  REGION 1..85: note = Description of Unknown:cds_NZ_WFIY01000004.1_cds_WP_155864197.1_2160 target sequence
AFRIQVDKNRSEKIALLLDIHARLRDNKIEGKDVEALANALEAVLREFTSYKKIVGMKGVTDVFNEVANVLCNSINCNVSDKMAK

SEQ ID NO: 27448 - protein, 85 aa, unidentified
  REGION 1..85: note = Description of Unknown:cds_NZ_WFIY01000004.1_cds_WP_155864197.1_2160 target sequence
YYIIGKYYGKSKRFFRMLYMISNGTKVKFNENSNNVLGLLAKVRRDPTILMKIPPAKVHELIQIIRILSNTDSTYKELLSKVKEE

SEQ ID NO: 27449 - protein, 84 aa, unidentified
  REGION 1..84: note = Description of Unknown:cds_NZ_WFIY01000004.1_cds_WP_155864197.1_2160 target sequence
GKSKRFFRMLYMISNGTKVKFNENSNNVLGLLAKVRRDPTILMKIPPAKVHELIQIIRILSNTDSTYKELLSKVKEEIEINSKI

SEQ ID NO: 27450 - protein, 85 aa, unidentified
  REGION 1..85: note = Description of Unknown:cds_NZ_WFIY01000004.1_cds_WP_155864197.1_2160 target sequence
ILKNAVNSRKDALASARDIAKEVGFNSLRMEGWIVKCPYCGHRFEVVDNKVIRCPRCNNVIKKVNFEVWNSLLEKYVNYEVTEAE

SEQ ID NO: 27451 - protein, 85 aa, unidentified
  REGION 1..85: note = Description of Unknown:cds_NZ_WFIY01000004.1_cds_WP_155864197.1_2160 target sequence
LNDSPVIPTDDQFELMKEPDIAFFSKTNFKVSKYGFDKIFKFFSPTQIRIITTLISKIRETKGDVRVLLSLALLDYLSYNSMFTD

SEQ ID NO: 27452 - protein, 85 aa, unidentified
  REGION 1..85: note = Description of Unknown:cds_NZ_WFIY01000004.1_cds_WP_155864197.1_2160 target sequence
VGKKIRSMFHYLQPKVSWKWVILPPSYFIDSLNAVLRAEDGVYVPSLNLALQEEIYNFYLQFLKSSLSDFSEGVLTPNLYPEYFF

SEQ ID NO: 27453 - protein, 85 aa, unidentified
  REGION 1..85: note = Description of Unknown:cds_NZ_WFIY01000004.1_cds_WP_155864197.1_2160 target sequence
ECLDEKCNAFVEIGRHKISLEDLTGGKTSFMLKTISEDDINTLLNSEYRVLSIKYERDAFRIQVDKNRSEKIALLLDIHARLRDN

SEQ ID NO: 27454 - protein, 85 aa, unidentified
  REGION 1..85: note = Description of Unknown:cds_NZ_WFIY01000004.1_cds_WP_155864197.1_2160 target sequence
KIEGKDVEALANALEAVLREFTSYKKIVGMKGVTDVFNEVANVLCNSINCNVSDKMAKYYIIGKYYGKSKRFFRMLYMISNGTKV

SEQ ID NO: 27455 - protein, 85 aa, unidentified
  REGION 1..85: note = Description of Unknown:cds_NC_029316.1_cds_YP_009230309.1_56 target sequence
TEVCQKIYTTRKIKQGEEVNTVDSTILYAIPDPCIYNEYITKVVKIIKPLTYDVTELHDNVIIKLSNGDFYIFPKEIYNVFKELV

SEQ ID NO: 27456 - protein, 85 aa, unidentified
  REGION 1..85: note = Description of Unknown:cds_NC_029316.1_cds_YP_009230309.1_56 target sequence
NKKKGNSNILLYGAPGTGKTSFAELLAKVKGWKLRYVGTEILSKYVGETENELRNIFLKAIRSQPIILFFDDAEWIITKRDLTSE

SEQ ID NO: 27457 - protein, 85 aa, unidentified
  REGION 1..85: note = Description of Unknown:cds_NC_029316.1_cds_YP_009230309.1_56 target sequence
DKNHTLYTNLMNLMLKYLNLYNVKNYDIIVILATNVKVDTIDPALISRVKEKVYYTLPDLEAVSAYLKIKGISNISINGIEYKSA

SEQ ID NO: 27458 - protein, 85 aa, unidentified
  REGION 1..85: note = Description of Unknown:cds_NC_029316.1_cds_YP_009230309.1_56 target sequence
DDIARYFVNNGMSFRDISLFVRSPETFTIVNKDVARRVVSMRNQDINSLLEMKDSLSEIVTCEMPIKILITTRYPLTVKAIISSI

SEQ ID NO: 27459 - protein, 85 aa, unidentified
  REGION 1..85: note = Description of Unknown:cds_NC_029316.1_cds_YP_009230309.1_56 target sequence
LVDVCNYIIFQPTIDSSIKEFLFNIEMYRKSIVLVEQPLLVDNSKLSGLAEIISDYHKNVIMFTQQNSNFDKIAQSYMYTVDDQK

SEQ ID NO: 27460 - protein, 85 aa, unidentified
  REGION 1..85: note = Description of Unknown:cds_NC_029316.1_cds_YP_009230309.1_56 target sequence
IVSSIRKYMSSSLLDERIKRAKNLIRAVLNFYGIDVKEIILRGEASSKQTFEDIAGIEVRIADSYDDTSISKFLYGFENFLKKPS

SEQ ID NO: 27461 - protein, 84 aa, unidentified
  REGION 1..84: note = Description of Unknown:cds_NC_029316.1_cds_YP_009230309.1_56 target sequence
MSSSLLDERIKRAKNLIRAVLNFYGIDVKEIILRGEASSKQTFEDIAGIEVRIADSYDDTSISKFLYGFENFLKKPSFKNPNKY

SEQ ID NO: 27462 - protein, 85 aa, unidentified
  REGION 1..85: note = Description of Unknown:cds_NC_029316.1_cds_YP_009230309.1_56 target sequence
YAIPDPCIYNEYITKVVKIIKPLTYDVTELHDNVIIKLSNGDFYIFPKEIYNVFKELVNKKKGNSNILLYGAPGTGKTSFAELLA

SEQ ID NO: 27463 - protein, 85 aa, unidentified
  REGION 1..85: note = Description of Unknown:cds_NC_029316.1_cds_YP_009230309.1_56 target sequence
KVKGWKLRYVGTEILSKYVGETENELRNIFLKAIRSQPIILFFDDAEWIITKRDLTSEDKNHTLYTNLMNLMLKYLNLYNVKNYD

SEQ ID NO: 27464 - protein, 85 aa, unidentified
  REGION 1..85: note = Description of Unknown:cds_NC_029316.1_cds_YP_009230309.1_56 target sequence
IIVILATNVKVDTIDPALISRVKEKVYYTLPDLEAVSAYLKIKGISNISINGIEYKSADDIARYFVNNGMSFRDISLFVRSPETF

SEQ ID NO: 27465 - protein, 85 aa, unidentified
  REGION 1..85: note = Description of Unknown:cds_NC_029316.1_cds_YP_009230309.1_56 target sequence
TIVNKDVARRVVSMRNQDINSLLEMKDSLSEIVTCEMPIKILITTRYPLTVKAIISSILVDVCNYIIFQPTIDSSIKEFLFNIEM

SEQ ID NO: 27466 - protein, 85 aa, unidentified
  REGION 1..85: note = Description of Unknown:cds_NC_029316.1_cds_YP_009230309.1_56 target sequence
YRKSIVLVEQPLLVDNSKLSGLAEIISDYHKNVIMFTQQNSNFDKIAQSYMYTVDDQKIVSSIRKYMSSSLLDERIKRAKNLIRA

SEQ ID NO: 27467 - protein, 85 aa, unidentified
  REGION 1..85: note = Description of Unknown:hvTR_P04497 target sequence
ASRGGNQSSDRQREHTPERGMGSASHPPPRPDRSPSQSPPPLPPKRNTYRRVGSNSSIESQVVLVSETSRSSLSPERSNSPPPIP

SEQ ID NO: 27468 - protein, 85 aa, unidentified
  REGION 1..85: note = Description of Unknown:hvTR_P04497 target sequence
PKKKPRKTKHVPLQDISQDSEEEREQVQLVRVGFSYPPVRIIEKDGKRSVEKIDNNDPISKGATSIAVRNPLSLPLVSAWEKGME

SEQ ID NO: 27469 - protein, 85 aa, unidentified
  REGION 1..85: note = Description of Unknown:hvTR_P04497 target sequence
VMAVLMERYRLDNDLRTSFKLMPEQHEQYKRICHQYVNEEHRGIPLTFSSMKTLTAMMGRFMQGLVHSYSEIAHNNWECTGCALW

SEQ ID NO: 27470 - protein, 85 aa, unidentified
  REGION 1..85: note = Description of Unknown:hvTR_P04497 target sequence
AHGCTDYEGKVKCLHGTIMIQKDHIIEMDVASENGQRAMKENPDRAKITQNRWGRNVVQLANNDARCCVNDANCATNQFSSKSCG

SEQ ID NO: 27471 - protein, 85 aa, unidentified
  REGION 1..85: note = Description of Unknown:hvTR_P04497 target sequence
MFYTEGIKAQEAFKQYEAFMKAVYPGITPDQARMMLIPIHCDCNHKPGCAPVMGRQTCKMTPFGMANAEDLDVATISDPTVLASV

SEQ ID NO: 27472 - protein, 85 aa, unidentified
  REGION 1..85: note = Description of Unknown:hvTR_P04497 target sequence
RHPALMVFQCCNPVYRNSRVQNAGPNCDFKISAPDLLGALQLTRKLWQDTFPEIPVPKLVIPEFKWQNRLQFRNVSLPAGHYDSR

SEQ ID NO: 27473 - protein, 84 aa, unidentified
  REGION 1..84: note = Description of Unknown:hvTR_P04497 target sequence
FQCCNPVYRNSRVQNAGPNCDFKISAPDLLGALQLTRKLWQDTFPEIPVPKLVIPEFKWQNRLQFRNVSLPAGHYDSRQNPFDF

SEQ ID NO: 27474 - protein, 85 aa, unidentified
  REGION 1..85: note = Description of Unknown:hvTR_P04497 target sequence
PPRPDRSPSQSPPPLPPKRNTYRRVGSNSSIESQVVLVSETSRSSLSPERSNSPPPIPPKKKPRKTKHVPLQDISQDSEEEREQV

SEQ ID NO: 27475 - protein, 85 aa, unidentified
  REGION 1..85: note = Description of Unknown:hvTR_P04497 target sequence
QLVRVGFSYPPVRIIEKDGKRSVEKIDNNDPISKGATSIAVRNPLSLPLVSAWEKGMEVMAVLMERYRLDNDLRTSFKLMPEQHE

SEQ ID NO: 27476 - protein, 85 aa, unidentified
  REGION 1..85: note = Description of Unknown:hvTR_P04497 target sequence
QYKRICHQYVNEEHRGIPLTFSSMKTLTAMMGRFMQGLVHSYSEIAHNNWECTGCALWAHGCTDYEGKVKCLHGTIMIQKDHIIE

SEQ ID NO: 27477 - protein, 85 aa, unidentified
  REGION 1..85: note = Description of Unknown:hvTR_P04497 target sequence
MDVASENGQRAMKENPDRAKITQNRWGRNVVQLANNDARCCVNDANCATNQFSSKSCGMFYTEGIKAQEAFKQYEAFMKAVYPGI

SEQ ID NO: 27478 - protein, 85 aa, unidentified
  REGION 1..85: note = Description of Unknown:hvTR_P04497 target sequence
TPDQARMMLIPIHCDCNHKPGCAPVMGRQTCKMTPFGMANAEDLDVATISDPTVLASVRHPALMVFQCCNPVYRNSRVQNAGPNC

SEQ ID NO: 27479 - protein, 85 aa, unidentified
  REGION 1..85: note = Description of Unknown:cds_NZ_WFIY01000004.1_cds_WP_155864214.1_2182 target sequence
IIPQTNVDIITLAVFLILFAFFVFLGFYGASWRKGDLSKLYEWGLAGRRLGVFLVWFLMGADLYTAYTFIAVPAALFGVGSLYFF

SEQ ID NO: 27480 - protein, 85 aa, unidentified
  REGION 1..85: note = Description of Unknown:cds_NZ_WFIY01000004.1_cds_WP_155864214.1_2182 target sequence
AVPYVAWTFAIAMLTMPRLWTVSRNKGYITAADFVKDRFNSRYLALAVALIGIVAELPYIALQIVGMKAVLTMLIVGLGINGSIT

SEQ ID NO: 27481 - protein, 85 aa, unidentified
  REGION 1..85: note = Description of Unknown:cds_NZ_WFIY01000004.1_cds_WP_155864214.1_2182 target sequence
LINEISLIIAFVILAAFTYTSGLRGATLTGVFKDALIWFTVIVSIIAIPIAIGGFHVAFSSIPSTKAAIYETLPPKLIMGYFSLA

SEQ ID NO: 27482 - protein, 85 aa, unidentified
  REGION 1..85: note = Description of Unknown:cds_NZ_WFIY01000004.1_cds_WP_155864214.1_2182 target sequence
LGSAIALYLYPHAINGSLSSVSKKQLKLSTSLLPIYGIGLVFLALFGILIYGIPSALSAIKDLSPIIGKSAAADLVVPAVIAYTM

SEQ ID NO: 27483 - protein, 85 aa, unidentified
  REGION 1..85: note = Description of Unknown:cds_NZ_WFIY01000004.1_cds_WP_155864214.1_2182 target sequence
PNWFIGIALVGVFIGGLVPAAIMAIAISNLFVRNIIGEFKPLSMKGESTLAKWMSAVFKFAALGFVFAVPGYAITLQLLGGIIVT

SEQ ID NO: 27484 - protein, 85 aa, unidentified
  REGION 1..85: note = Description of Unknown:cds_NZ_WFIY01000004.1_cds_WP_155864214.1_2182 target sequence
QAMPPIFLGLYTHKLEKWSLLAGMIVGVSSGVGLYYHYGSVFMPTPIGSIYIALVALALNLIITGLGTAIAYVSGWKPTSRVKDE

SEQ ID NO: 27485 - protein, 84 aa, unidentified
  REGION 1..84: note = Description of Unknown:cds_NZ_WFIY01000004.1_cds_WP_155864214.1_2182 target sequence
LGLYTHKLEKWSLLAGMIVGVSSGVGLYYHYGSVFMPTPIGSIYIALVALALNLIITGLGTAIAYVSGWKPTSRVKDEEILKSM

SEQ ID NO: 27486 - protein, 85 aa, unidentified
  REGION 1..85: note = Description of Unknown:cds_NZ_WFIY01000004.1_cds_WP_155864214.1_2182 target sequence
YGASWRKGDLSKLYEWGLAGRRLGVFLVWFLMGADLYTAYTFIAVPAALFGVGSLYFFAVPYVAWTFAIAMLTMPRLWTVSRNKG

SEQ ID NO: 27487 - protein, 85 aa, unidentified
  REGION 1..85: note = Description of Unknown:cds_NZ_WFIY01000004.1_cds_WP_155864214.1_2182 target sequence
YITAADFVKDRFNSRYLALAVALIGIVAELPYIALQIVGMKAVLTMLIVGLGINGSITLINEISLIIAFVILAAFTYTSGLRGAT

SEQ ID NO: 27488 - protein, 85 aa, unidentified
  REGION 1..85: note = Description of Unknown:cds_NZ_WFIY01000004.1_cds_WP_155864214.1_2182 target sequence
LTGVFKDALIWFTVIVSIIAIPIAIGGFHVAFSSIPSTKAAIYETLPPKLIMGYFSLALGSAIALYLYPHAINGSLSSVSKKQLK

SEQ ID NO: 27489 - protein, 85 aa, unidentified
  REGION 1..85: note = Description of Unknown:cds_NZ_WFIY01000004.1_cds_WP_155864214.1_2182 target sequence
LSTSLLPIYGIGLVFLALFGILIYGIPSALSAIKDLSPIIGKSAAADLVVPAVIAYTMPNWFIGIALVGVFIGGLVPAAIMAIAI

SEQ ID NO: 27490 - protein, 85 aa, unidentified
  REGION 1..85: note = Description of Unknown:cds_NZ_WFIY01000004.1_cds_WP_155864214.1_2182 target sequence
SNLFVRNIIGEFKPLSMKGESTLAKWMSAVFKFAALGFVFAVPGYAITLQLLGGIIVTQAMPPIFLGLYTHKLEKWSLLAGMIVG

SEQ ID NO: 27491 - protein, 85 aa, unidentified
  REGION 1..85: note = Description of Unknown:cds_NC_010495.1_cds_YP_001742085.1_48 target sequence
ITAQDIFNEARELKVSPARVAFHHGMIPSSNMWLDIKEGKERDVTYSETELTSERRTDLLSRYAIAAARAVQFPINTSFMHLLGC

SEQ ID NO: 27492 - protein, 85 aa, unidentified
  REGION 1..85: note = Description of Unknown:cds_NC_010495.1_cds_YP_001742085.1_48 target sequence
VASAMTRNFSVEYYHSELPVSLYVVTSQPPSAGKTAINSMHMNPVKIEYDNLSKKMEKQIIKINLRIEELMKAYKEASNQNAKAL

SEQ ID NO: 27493 - protein, 85 aa, unidentified
  REGION 1..85: note = Description of Unknown:cds_NC_010495.1_cds_YP_001742085.1_48 target sequence
IGDDIAREKEKLDELYTITYPLTDATPEAVQHQAIHEGGFFNLISDEVSVLNTCLGLSYGKEGGKANAEVILKGWDGGFIGSARV

SEQ ID NO: 27494 - protein, 85 aa, unidentified
  REGION 1..85: note = Description of Unknown:cds_NC_010495.1_cds_YP_001742085.1_48 target sequence
GRGVSSGYVLGNISVIAQDESIDAILAAGDRGNGLSERFLMLREQSMLGHREHWDMVNDCPVSKPMPDSLRSEYARFIHNVVSAE

SEQ ID NO: 27495 - protein, 85 aa, unidentified
  REGION 1..85: note = Description of Unknown:cds_NC_010495.1_cds_YP_001742085.1_48 target sequence
KTRLTLHNDSARMIGLLRNQWEKNFLPGGKWDHVLLRGAMGKADKQIIRLAAIFHAAENWCDGGKRSKVIGENEISRAISVYDAL

SEQ ID NO: 27496 - protein, 85 aa, unidentified
  REGION 1..85: note = Description of Unknown:cds_NC_010495.1_cds_YP_001742085.1_48 target sequence
TKTFTDAVESNGYAGERSEFDVVAEKLRSAAQKGKTNVTVKWLYDSLKNVRPFKGIPKIYDRLRSSVLPSLEEDGYCVFIGNTVH

SEQ ID NO: 27497 - protein, 84 aa, unidentified
  REGION 1..84: note = Description of Unknown:cds_NC_010495.1_cds_YP_001742085.1_48 target sequence
VESNGYAGERSEFDVVAEKLRSAAQKGKTNVTVKWLYDSLKNVRPFKGIPKIYDRLRSSVLPSLEEDGYCVFIGNTVHINPRLK

SEQ ID NO: 27498 - protein, 85 aa, unidentified
  REGION 1..85: note = Description of Unknown:cds_NC_010495.1_cds_YP_001742085.1_48 target sequence
PSSNMWLDIKEGKERDVTYSETELTSERRTDLLSRYAIAAARAVQFPINTSFMHLLGCVASAMTRNFSVEYYHSELPVSLYVVTS

SEQ ID NO: 27499 - protein, 85 aa, unidentified
  REGION 1..85: note = Description of Unknown:cds_NC_010495.1_cds_YP_001742085.1_48 target sequence
QPPSAGKTAINSMHMNPVKIEYDNLSKKMEKQIIKINLRIEELMKAYKEASNQNAKALIGDDIAREKEKLDELYTITYPLTDATP

SEQ ID NO: 27500 - protein, 85 aa, unidentified
  REGION 1..85: note = Description of Unknown:cds_NC_010495.1_cds_YP_001742085.1_48 target sequence
EAVQHQAIHEGGFFNLISDEVSVLNTCLGLSYGKEGGKANAEVILKGWDGGFIGSARVGRGVSSGYVLGNISVIAQDESIDAILA

SEQ ID NO: 27501 - protein, 85 aa, unidentified
  REGION 1..85: note = Description of Unknown:cds_NC_010495.1_cds_YP_001742085.1_48 target sequence
AGDRGNGLSERFLMLREQSMLGHREHWDMVNDCPVSKPMPDSLRSEYARFIHNVVSAEKTRLTLHNDSARMIGLLRNQWEKNFLP

SEQ ID NO: 27502 - protein, 85 aa, unidentified
  REGION 1..85: note = Description of Unknown:cds_NC_010495.1_cds_YP_001742085.1_48 target sequence
GGKWDHVLLRGAMGKADKQIIRLAAIFHAAENWCDGGKRSKVIGENEISRAISVYDALTKTFTDAVESNGYAGERSEFDVVAEKL

SEQ ID NO: 27503 - protein, 85 aa, unidentified
  REGION 1..85: note = Description of Unknown:hvTR_P52539 target sequence
YPRGVKRSQHDRHKQTAFRTIKRSITHRPTSKFISHFAKNFRGKLAPLKQLDESRLDALSLTELEQLKTIIEEKQQEKRAQNNAI

SEQ ID NO: 27504 - protein, 85 aa, unidentified
  REGION 1..85: note = Description of Unknown:hvTR_P52539 target sequence
TFLPNLPTVPFADTNFSIKSLGLRPYNGDARDPKQRIRDRFPQTHERICLLTNDILETDLLLRYRQCLDSLTREENQQLMGDRIF

SEQ ID NO: 27505 - protein, 85 aa, unidentified
  REGION 1..85: note = Description of Unknown:hvTR_P52539 target sequence
SLTNSPCLAFTVATVEEACSYFKFHDLHNLPVNPQDLFMYTITVMKFEFFNKLNMAKLTCVFNDNGHGDIEYRKLRQLCGKPVLD

SEQ ID NO: 27506 - protein, 85 aa, unidentified
  REGION 1..85: note = Description of Unknown:hvTR_P52539 target sequence
REMPNSEFEVQQQTPDSFRHPIQQAMSIVVTFARILRQIKEHIIRTKKPQFIRDFDTERVAERYECGLISRLIGKQFSNHKCDDV

SEQ ID NO: 27507 - protein, 85 aa, unidentified
  REGION 1..85: note = Description of Unknown:hvTR_P52539 target sequence
SCQNRIERIMAPWKPSLFFCTYFAKDAPKFKLFPNLPHEYRNLSFTCPKVDMEPSCSYSTSRDLPQTSHRSHKNQGTPKVKSKVC

SEQ ID NO: 27508 - protein, 85 aa, unidentified
  REGION 1..85: note = Description of Unknown:hvTR_P52539 target sequence
VEKPDTSNLTTTKTTTEILIEESMETDNKIPDPRELNFNQAKQDEIVIININENVNSKHESESSVEMDLDLDYEADTCETNLNTY

SEQ ID NO: 27509 - protein, 84 aa, unidentified
  REGION 1..84: note = Description of Unknown:hvTR_P52539 target sequence
SNLTTTKTTTEILIEESMETDNKIPDPRELNFNQAKQDEIVIININENVNSKHESESSVEMDLDLDYEADTCETNLNTYSSDSE

SEQ ID NO: 27510 - protein, 85 aa, unidentified
  REGION 1..85: note = Description of Unknown:hvTR_P52539 target sequence
RPTSKFISHFAKNFRGKLAPLKQLDESRLDALSLTELEQLKTIIEEKQQEKRAQNNAITFLPNLPTVPFADTNFSIKSLGLRPYN

SEQ ID NO: 27511 - protein, 85 aa, unidentified
  REGION 1..85: note = Description of Unknown:hvTR_P52539 target sequence
GDARDPKQRIRDRFPQTHERICLLTNDILETDLLLRYRQCLDSLTREENQQLMGDRIFSLTNSPCLAFTVATVEEACSYFKFHDL

SEQ ID NO: 27512 - protein, 85 aa, unidentified
  REGION 1..85: note = Description of Unknown:hvTR_P52539 target sequence
HNLPVNPQDLFMYTITVMKFEFFNKLNMAKLTCVFNDNGHGDIEYRKLRQLCGKPVLDREMPNSEFEVQQQTPDSFRHPIQQAMS

SEQ ID NO: 27513 - protein, 85 aa, unidentified
  REGION 1..85: note = Description of Unknown:hvTR_P52539 target sequence
IVVTFARILRQIKEHIIRTKKPQFIRDFDTERVAERYECGLISRLIGKQFSNHKCDDVSCQNRIERIMAPWKPSLFFCTYFAKDA

SEQ ID NO: 27514 - protein, 85 aa, unidentified
  REGION 1..85: note = Description of Unknown:hvTR_P52539 target sequence
PKFKLFPNLPHEYRNLSFTCPKVDMEPSCSYSTSRDLPQTSHRSHKNQGTPKVKSKVCVEKPDTSNLTTTKTTTEILIEESMETD

SEQ ID NO: 27515 - protein, 85 aa, unidentified
  REGION 1..85: note = Description of Unknown:cds_NZ_WFIY01000004.1_cds_WP_155863896.1_1802 target sequence
YDVIIVGGGHNGLVTANYLAREGLKVAVFERREIVGGASVTEELWPGIKVSTGAYVLSLLRPKIIEDLQLKKFGLKVYTKDPGLF

SEQ ID NO: 27516 - protein, 85 aa, unidentified
  REGION 1..85: note = Description of Unknown:cds_NZ_WFIY01000004.1_cds_WP_155863896.1_1802 target sequence
VPFENGKKLYIWSDIKKTQKEIEKFSKNDAKNYEKWVKFWDPLYDLADLLMLSPPVNLSNIDELLSLLKSVKIDEDTALSIARTF

SEQ ID NO: 27517 - protein, 85 aa, unidentified
  REGION 1..85: note = Description of Unknown:cds_NZ_WFIY01000004.1_cds_WP_155863896.1_1802 target sequence
VTDGKSLLSEFFESDEVISALIEDAVVGTYASPSMPGTAYVLAHHVIGEVNGIKGAWGYVEGGMGGVTQALKKSAESVGVDIFES

SEQ ID NO: 27518 - protein, 85 aa, unidentified
  REGION 1..85: note = Description of Unknown:cds_NZ_WFIY01000004.1_cds_WP_155863896.1_1802 target sequence
SPVDEILVEKGEVKGVKLSSGKVIESKIVVSNADPKTTFLKLLKNAEVDDELIRRIRSLKTTGVSFKIVGYSEELPDFGNGKSLS

SEQ ID NO: 27519 - protein, 85 aa, unidentified
  REGION 1..85: note = Description of Unknown:cds_NZ_WFIY01000004.1_cds_WP_155863896.1_1802 target sequence
PEHIASELIMPSTEYIEKSYLDAKVLGYSREPWLSINIQSSVDPTVAPPGKFSISIFGQYLPYNKKLDEIKDKIAEITFDKIREF

SEQ ID NO: 27520 - protein, 85 aa, unidentified
  REGION 1..85: note = Description of Unknown:cds_NZ_WFIY01000004.1_cds_WP_155863896.1_1802 target sequence
APNFKLVKYEVLTPLDIERRFGIWEGNIFHLDMTPDQLYVFRPTIGLSNYSTPINGLYLCGSGTHPGGGVTGAPGYNAAMKILSD

SEQ ID NO: 27521 - protein, 84 aa, unidentified
  REGION 1..84: note = Description of Unknown:cds_NZ_WFIY01000004.1_cds_WP_155863896.1_1802 target sequence
VKYEVLTPLDIERRFGIWEGNIFHLDMTPDQLYVFRPTIGLSNYSTPINGLYLCGSGTHPGGGVTGAPGYNAAMKILSDLKKRK

SEQ ID NO: 27522 - protein, 85 aa, unidentified
  REGION 1..85: note = Description of Unknown:cds_NZ_WFIY01000004.1_cds_WP_155863896.1_1802 target sequence
VFERREIVGGASVTEELWPGIKVSTGAYVLSLLRPKIIEDLQLKKFGLKVYTKDPGLFVPFENGKKLYIWSDIKKTQKEIEKFSK

SEQ ID NO: 27523 - protein, 85 aa, unidentified
  REGION 1..85: note = Description of Unknown:cds_NZ_WFIY01000004.1_cds_WP_155863896.1_1802 target sequence
NDAKNYEKWVKFWDPLYDLADLLMLSPPVNLSNIDELLSLLKSVKIDEDTALSIARTFVTDGKSLLSEFFESDEVISALIEDAVV

SEQ ID NO: 27524 - protein, 85 aa, unidentified
  REGION 1..85: note = Description of Unknown:cds_NZ_WFIY01000004.1_cds_WP_155863896.1_1802 target sequence
GTYASPSMPGTAYVLAHHVIGEVNGIKGAWGYVEGGMGGVTQALKKSAESVGVDIFESSPVDEILVEKGEVKGVKLSSGKVIESK

SEQ ID NO: 27525 - protein, 85 aa, unidentified
  REGION 1..85: note = Description of Unknown:cds_NZ_WFIY01000004.1_cds_WP_155863896.1_1802 target sequence
IVVSNADPKTTFLKLLKNAEVDDELIRRIRSLKTTGVSFKIVGYSEELPDFGNGKSLSPEHIASELIMPSTEYIEKSYLDAKVLG

SEQ ID NO: 27526 - protein, 85 aa, unidentified
  REGION 1..85: note = Description of Unknown:cds_NZ_WFIY01000004.1_cds_WP_155863896.1_1802 target sequence
YSREPWLSINIQSSVDPTVAPPGKFSISIFGQYLPYNKKLDEIKDKIAEITFDKIREFAPNFKLVKYEVLTPLDIERRFGIWEGN

SEQ ID NO: 27527 - protein, 85 aa, unidentified
  REGION 1..85: note = Description of Unknown:hvTR_P52354 target sequence
YPRGVKRSHHDYHRQTAFRTIKRSTHRQTSKFISHFAKNFRGKLAPLKQLDESRLDALSLTELEQLKTIIEEKQQEKRAQNNAIT

SEQ ID NO: 27528 - protein, 85 aa, unidentified
  REGION 1..85: note = Description of Unknown:hvTR_P52354 target sequence
FLPNLPTVPFADTNFSLKSLGLRPYNGDARDPKQRIRDRFPQTHERICLLTNDILETDLLLRYRQCLDSLTREENQQLMGDRIFS

SEQ ID NO: 27529 - protein, 85 aa, unidentified
  REGION 1..85: note = Description of Unknown:hvTR_P52354 target sequence
LTNSPCLAFTVATVEEACSYFKFHDLHNLPVNPQDLFMYTITVMKFEFFNKLNMAKLTCVFNDNGHGDIEYRKLRQLCGKPVLDR

SEQ ID NO: 27530 - protein, 85 aa, unidentified
  REGION 1..85: note = Description of Unknown:hvTR_P52354 target sequence
EMPNSELEVQQQTPDSFRHPIQQAMSIVVTFARILRQIKEQIIQTKKPQFIRDFDTGRVAERYECGLMSRLIGKQFSNHKCDDVS

SEQ ID NO: 27531 - protein, 85 aa, unidentified
  REGION 1..85: note = Description of Unknown:hvTR_P52354 target sequence
CQNRIERIMAPWKPSLFFCTYFAKDAPKFKLFPNFPEEYRNLSFTCPKVDTEPSCSYSTNHDLPQTSHRSHKNHGTPKVKSKVCV

SEQ ID NO: 27532 - protein, 85 aa, unidentified
  REGION 1..85: note = Description of Unknown:hvTR_P52354 target sequence
EKPDTSILTTTKTTTEILIEESMETDNKIPNPRELNFNQAKQEEIVIININENVNSKHESESSVEMDLDLDYEADTCETNLNACS

SEQ ID NO: 27533 - protein, 84 aa, unidentified
  REGION 1..84: note = Description of Unknown:hvTR_P52354 target sequence
SILTTTKTTTEILIEESMETDNKIPNPRELNFNQAKQEEIVIININENVNSKHESESSVEMDLDLDYEADTCETNLNACSSDSE

SEQ ID NO: 27534 - protein, 85 aa, unidentified
  REGION 1..85: note = Description of Unknown:hvTR_P52354 target sequence
QTSKFISHFAKNFRGKLAPLKQLDESRLDALSLTELEQLKTIIEEKQQEKRAQNNAITFLPNLPTVPFADTNFSLKSLGLRPYNG

SEQ ID NO: 27535 - protein, 85 aa, unidentified
  REGION 1..85: note = Description of Unknown:hvTR_P52354 target sequence
DARDPKQRIRDRFPQTHERICLLTNDILETDLLLRYRQCLDSLTREENQQLMGDRIFSLTNSPCLAFTVATVEEACSYFKFHDLH

SEQ ID NO: 27536 - protein, 85 aa, unidentified
  REGION 1..85: note = Description of Unknown:hvTR_P52354 target sequence
NLPVNPQDLFMYTITVMKFEFFNKLNMAKLTCVFNDNGHGDIEYRKLRQLCGKPVLDREMPNSELEVQQQTPDSFRHPIQQAMSI

SEQ ID NO: 27537 - protein, 85 aa, unidentified
  REGION 1..85: note = Description of Unknown:hvTR_P52354 target sequence
VVTFARILRQIKEQIIQTKKPQFIRDFDTGRVAERYECGLMSRLIGKQFSNHKCDDVSCQNRIERIMAPWKPSLFFCTYFAKDAP

SEQ ID NO: 27538 - protein, 85 aa, unidentified
  REGION 1..85: note = Description of Unknown:hvTR_P52354 target sequence
KFKLFPNFPEEYRNLSFTCPKVDTEPSCSYSTNHDLPQTSHRSHKNHGTPKVKSKVCVEKPDTSILTTTKTTTEILIEESMETDN

SEQ ID NO: 27539 - protein, 85 aa, unidentified
  REGION 1..85: note = Description of Unknown:cds_NZ_WFIY01000004.1_cds_WP_155863230.1_1177 target sequence
KDRKNSKLALSKITAAVIVVIIIIAAVAVFYLLIKPPSSVTPTTTSPKPSISGPLNITNATDLMKLVGLNSTPSSPVTITVWNSY

SEQ ID NO: 27540 - protein, 85 aa, unidentified
  REGION 1..85: note = Description of Unknown:cds_NZ_WFIY01000004.1_cds_WP_155863230.1_1177 target sequence
STSENQAFNKTLTQFEKEFPWIHVAVTYGVGVGCSQFEEAAKGHDAPIVYRDTSNSGGALFCAGLLLNLSEYLPPQVFSLYLNCS

SEQ ID NO: 27541 - protein, 85 aa, unidentified
  REGION 1..85: note = Description of Unknown:cds_NZ_WFIY01000004.1_cds_WP_155863230.1_1177 target sequence
ISDWSIGKAVYGLPDDINYIVMFYNKQYVPYAPNTTCEMVKIAEEVNTTDHIWGIAYGASDEYGYRFAAWFAGFGGQIFTTQNGQ

SEQ ID NO: 27542 - protein, 85 aa, unidentified
  REGION 1..85: note = Description of Unknown:cds_NZ_WFIY01000004.1_cds_WP_155863230.1_1177 target sequence
VVPALNSTAMVDALNFWYNLTYDLHINYLAPSTGAGGAEGELFEAGKAAIIFDGPWDLSAYLQALGSNLGAAPLPVVSQTGIRAE

SEQ ID NO: 27543 - protein, 85 aa, unidentified
  REGION 1..85: note = Description of Unknown:cds_NZ_WFIY01000004.1_cds_WP_155863230.1_1177 target sequence
PFLGATGWMISNPSVSGATSLQIKAALIFILFVTNCQSDYRLWCIAHDIPANKIAYNEAMAELKAGKLTPSYLDQIMEGILEQAQ

SEQ ID NO: 27544 - protein, 85 aa, unidentified
  REGION 1..85: note = Description of Unknown:cds_NZ_WFIY01000004.1_cds_WP_155863230.1_1177 target sequence
YTQKFPNIPQMAYYWNSFHTGASEFFAQQINAQTAAQTMESNFINCLKKNGLLSSSFEILPLPPALIDAILLLLSVFMIPEIKYK

SEQ ID NO: 27545 - protein, 84 aa, unidentified
  REGION 1..84: note = Description of Unknown:cds_NZ_WFIY01000004.1_cds_WP_155863230.1_1177 target sequence
PNIPQMAYYWNSFHTGASEFFAQQINAQTAAQTMESNFINCLKKNGLLSSSFEILPLPPALIDAILLLLSVFMIPEIKYKVKAL

SEQ ID NO: 27546 - protein, 85 aa, unidentified
  REGION 1..85: note = Description of Unknown:cds_NZ_WFIY01000004.1_cds_WP_155863230.1_1177 target sequence
AVFYLLIKPPSSVTPTTTSPKPSISGPLNITNATDLMKLVGLNSTPSSPVTITVWNSYSTSENQAFNKTLTQFEKEFPWIHVAVT

SEQ ID NO: 27547 - protein, 85 aa, unidentified
  REGION 1..85: note = Description of Unknown:cds_NZ_WFIY01000004.1_cds_WP_155863230.1_1177 target sequence
YGVGVGCSQFEEAAKGHDAPIVYRDTSNSGGALFCAGLLLNLSEYLPPQVFSLYLNCSISDWSIGKAVYGLPDDINYIVMFYNKQ

SEQ ID NO: 27548 - protein, 85 aa, unidentified
  REGION 1..85: note = Description of Unknown:cds_NZ_WFIY01000004.1_cds_WP_155863230.1_1177 target sequence
YVPYAPNTTCEMVKIAEEVNTTDHIWGIAYGASDEYGYRFAAWFAGFGGQIFTTQNGQVVPALNSTAMVDALNFWYNLTYDLHIN

SEQ ID NO: 27549 - protein, 85 aa, unidentified
  REGION 1..85: note = Description of Unknown:cds_NZ_WFIY01000004.1_cds_WP_155863230.1_1177 target sequence
YLAPSTGAGGAEGELFEAGKAAIIFDGPWDLSAYLQALGSNLGAAPLPVVSQTGIRAEPFLGATGWMISNPSVSGATSLQIKAAL

SEQ ID NO: 27550 - protein, 85 aa, unidentified
  REGION 1..85: note = Description of Unknown:cds_NZ_WFIY01000004.1_cds_WP_155863230.1_1177 target sequence
IFILFVTNCQSDYRLWCIAHDIPANKIAYNEAMAELKAGKLTPSYLDQIMEGILEQAQYTQKFPNIPQMAYYWNSFHTGASEFFA

SEQ ID NO: 27551 - protein, 85 aa, unidentified
  REGION 1..85: note = Description of Unknown:cds_NZ_WFIY01000004.1_cds_WP_155864131.1_2083 target sequence
PLRKELGFLELTILGISGAVGTGVLFSSAGMSALAGPGVILAWVLGSIFYTFVGLTYVELSRIYPEAGGPSRYAIYSHGKVTNLI

SEQ ID NO: 27552 - protein, 85 aa, unidentified
  REGION 1..85: note = Description of Unknown:cds_NZ_WFIY01000004.1_cds_WP_155864131.1_2083 target sequence
NAMADLIWYLFIPPIEALAVVEGLDYFYPSLINSSGVPTTEGVLIGVVILFLFIPFNYFGVKFFGKSTLVGGGVKLILYLAVALG

SEQ ID NO: 27553 - protein, 85 aa, unidentified
  REGION 1..85: note = Description of Unknown:cds_NZ_WFIY01000004.1_cds_WP_155864131.1_2083 target sequence
VIALSFIPRNFTAYGGFLPFGFAGVFSAIPLAMFAFGGIRVIPDYAEEAKTKKLGSAILITILGQSLIYVLFSIAFVASLNWSKL

SEQ ID NO: 27554 - protein, 85 aa, unidentified
  REGION 1..85: note = Description of Unknown:cds_NZ_WFIY01000004.1_cds_WP_155864131.1_2083 target sequence
GIKQGCWSSLSSLPGNPFIDIASSLHSSPLLLLTIIIGIIGPFITGYIYLGAGTRVLFAMGRSGYVPSSMRELHERYSIPYWSLI

SEQ ID NO: 27555 - protein, 85 aa, unidentified
  REGION 1..85: note = Description of Unknown:cds_NZ_WFIY01000004.1_cds_WP_155864131.1_2083 target sequence
VFAIIGSVVTYISSPLPTIYGLITDSVIAGYIGFLVNPVVMGSLWRKGVIKNRFTLVVSPLAFIFSSLIVFWSGWPLVPYAVILL

SEQ ID NO: 27556 - protein, 85 aa, unidentified
  REGION 1..85: note = Description of Unknown:cds_NZ_WFIY01000004.1_cds_WP_155864131.1_2083 target sequence
TAGSLIFGAIYKVKEDFVKSLWYIGDIAFLTIMTYIGSDGALKLINFYEASAIVSVVSLIFYFLGVWSSNISTTSSRSNSDKASN

SEQ ID NO: 27557 - protein, 84 aa, unidentified
  REGION 1..84: note = Description of Unknown:cds_NZ_WFIY01000004.1_cds_WP_155864131.1_2083 target sequence
IFGAIYKVKEDFVKSLWYIGDIAFLTIMTYIGSDGALKLINFYEASAIVSVVSLIFYFLGVWSSNISTTSSRSNSDKASNKEVS

SEQ ID NO: 27558 - protein, 85 aa, unidentified
  REGION 1..85: note = Description of Unknown:cds_NZ_WFIY01000004.1_cds_WP_155864131.1_2083 target sequence
SAGMSALAGPGVILAWVLGSIFYTFVGLTYVELSRIYPEAGGPSRYAIYSHGKVTNLINAMADLIWYLFIPPIEALAVVEGLDYF

SEQ ID NO: 27559 - protein, 85 aa, unidentified
  REGION 1..85: note = Description of Unknown:cds_NZ_WFIY01000004.1_cds_WP_155864131.1_2083 target sequence
YPSLINSSGVPTTEGVLIGVVILFLFIPFNYFGVKFFGKSTLVGGGVKLILYLAVALGVIALSFIPRNFTAYGGFLPFGFAGVFS

SEQ ID NO: 27560 - protein, 85 aa, unidentified
  REGION 1..85: note = Description of Unknown:cds_NZ_WFIY01000004.1_cds_WP_155864131.1_2083 target sequence
AIPLAMFAFGGIRVIPDYAEEAKTKKLGSAILITILGQSLIYVLFSIAFVASLNWSKLGIKQGCWSSLSSLPGNPFIDIASSLHS

SEQ ID NO: 27561 - protein, 85 aa, unidentified
  REGION 1..85: note = Description of Unknown:cds_NZ_WFIY01000004.1_cds_WP_155864131.1_2083 target sequence
SPLLLLTIIIGIIGPFITGYIYLGAGTRVLFAMGRSGYVPSSMRELHERYSIPYWSLIVFAIIGSVVTYISSPLPTIYGLITDSV

SEQ ID NO: 27562 - protein, 85 aa, unidentified
  REGION 1..85: note = Description of Unknown:cds_NZ_WFIY01000004.1_cds_WP_155864131.1_2083 target sequence
IAGYIGFLVNPVVMGSLWRKGVIKNRFTLVVSPLAFIFSSLIVFWSGWPLVPYAVILLTAGSLIFGAIYKVKEDFVKSLWYIGDI

SEQ ID NO: 27563 - protein, 85 aa, unidentified
  REGION 1..85: note = Description of Unknown:hvTR_P06921 target sequence
ENLSERFNALQDQLMNIYEAAEQTLQAQIKHWQTLRKEPVLLYYAREKGVTRLGYQPVPVKAVSETKAKEAIAMVLQLESLQTSD

SEQ ID NO: 27564 - protein, 85 aa, unidentified
  REGION 1..85: note = Description of Unknown:hvTR_P06921 target sequence
FAHEPWTLVDTSIETFRSAPEGHFKKGPLPVEVIYDNDPDNANLYTMWTYVYYMDADDKWHKARSGVNHIGIYYLQGTFKNYYVL

SEQ ID NO: 27565 - protein, 85 aa, unidentified
  REGION 1..85: note = Description of Unknown:hvTR_P06921 target sequence
FADDAKRYGTTGEWEVKVNKETVFAPVTSSTPPGSPGGQADTNTTPATPTTSTTAVDSTSRQLTTSKQPQQTETRGRRYGRRPSS

SEQ ID NO: 27566 - protein, 85 aa, unidentified
  REGION 1..85: note = Description of Unknown:hvTR_P06921 target sequence
KSRRSQTQQRRSRSRHRSRSRSRSRSKSQTHTTRSTTRSRSTSLTKTRALTSRSRSRGRSPTTCRRGGGRSPRRRSRSPSTSSSC

SEQ ID NO: 27567 - protein, 85 aa, unidentified
  REGION 1..85: note = Description of Unknown:hvTR_P06921 target sequence
TTQRSQRARAESSTTRGARGSRGSRGGSRGGRGRRRGRSSSSSSPAHKRSRGGSAKLRGVSPGEVGGSLRSVSSKHTGRLGRLLE

SEQ ID NO: 27568 - protein, 85 aa, unidentified
  REGION 1..85: note = Description of Unknown:hvTR_P06921 target sequence
EARDPPVIIVKGAANTLKNVRNRAKIKYMGLFRSFSTTWSWVAGDGTERLGRPRMLISFSSYTQRRDFDEAVRYPKGVDKAYGNL

SEQ ID NO: 27569 - protein, 84 aa, unidentified
  REGION 1..84: note = Description of Unknown:hvTR_P06921 target sequence
PPVIIVKGAANTLKNVRNRAKIKYMGLFRSFSTTWSWVAGDGTERLGRPRMLISFSSYTQRRDFDEAVRYPKGVDKAYGNLDSL

SEQ ID NO: 27570 - protein, 85 aa, unidentified
  REGION 1..85: note = Description of Unknown:hvTR_P06921 target sequence
QIKHWQTLRKEPVLLYYAREKGVTRLGYQPVPVKAVSETKAKEAIAMVLQLESLQTSDFAHEPWTLVDTSIETFRSAPEGHFKKG

SEQ ID NO: 27571 - protein, 85 aa, unidentified
  REGION 1..85: note = Description of Unknown:hvTR_P06921 target sequence
PLPVEVIYDNDPDNANLYTMWTYVYYMDADDKWHKARSGVNHIGIYYLQGTFKNYYVLFADDAKRYGTTGEWEVKVNKETVFAPV

SEQ ID NO: 27572 - protein, 85 aa, unidentified
  REGION 1..85: note = Description of Unknown:hvTR_P06921 target sequence
TSSTPPGSPGGQADTNTTPATPTTSTTAVDSTSRQLTTSKQPQQTETRGRRYGRRPSSKSRRSQTQQRRSRSRHRSRSRSRSRSK

SEQ ID NO: 27573 - protein, 85 aa, unidentified
  REGION 1..85: note = Description of Unknown:hvTR_P06921 target sequence
SQTHTTRSTTRSRSTSLTKTRALTSRSRSRGRSPTTCRRGGGRSPRRRSRSPSTSSSCTTQRSQRARAESSTTRGARGSRGSRGG

SEQ ID NO: 27574 - protein, 85 aa, unidentified
  REGION 1..85: note = Description of Unknown:hvTR_P06921 target sequence
SRGGRGRRRGRSSSSSSPAHKRSRGGSAKLRGVSPGEVGGSLRSVSSKHTGRLGRLLEEARDPPVIIVKGAANTLKNVRNRAKIK

SEQ ID NO: 27575 - protein, 85 aa, unidentified
  REGION 1..85: note = Description of Unknown:cds_NZ_WFIY01000004.1_cds_WP_155863258.1_1211 target sequence
NPVINKVIKIIRINLSEFKERATKVAYPKDTLGVVWLYLLGGLAWLIILGTAAMNMRTYLVYNQNSPQVGVIYYTLLTIHGWSAM

SEQ ID NO: 27576 - protein, 85 aa, unidentified
  REGION 1..85: note = Description of Unknown:cds_NZ_WFIY01000004.1_cds_WP_155863258.1_1211 target sequence
LGLVPDAALGIIAYSMYKSGLSIVHTKEITAMFWASNLGLAFALFGGPDMGWYMYPPLAIEDNSLFQAFRLYHGALMGAGYLALA

SEQ ID NO: 27577 - protein, 85 aa, unidentified
  REGION 1..85: note = Description of Unknown:cds_NZ_WFIY01000004.1_cds_WP_155863258.1_1211 target sequence
VNSAAASIASIILVVDAVQTKPKDKKINIFAAYGVAFALIIALTLPALTASELWYVLAIWGSVKVDPLLWVILFWFYGHPVVYYV

SEQ ID NO: 27578 - protein, 85 aa, unidentified
  REGION 1..85: note = Description of Unknown:cds_NZ_WFIY01000004.1_cds_WP_155863258.1_1211 target sequence
PFPLFGALYYYIPIYAGRPLYSEKWARWNIFLLAIGSMLIWVHHLQTFPLPVCLRAWITVSTLVLASGSGLTVLNLGLTILFSKG

SEQ ID NO: 27579 - protein, 85 aa, unidentified
  REGION 1..85: note = Description of Unknown:cds_NZ_WFIY01000004.1_cds_WP_155863258.1_1211 target sequence
YNWRDPIGMAFLVALIGFIIGGVQALPLPINIINGVVHNTYYVVGHFHLVIWTLILVGFTGVFLDLLKSTNPSLNFSLKARKLMV

SEQ ID NO: 27580 - protein, 85 aa, unidentified
  REGION 1..85: note = Description of Unknown:cds_NZ_WFIY01000004.1_cds_WP_155863258.1_1211 target sequence
AGLIWWTVPFVAIGYLMSIEGYLGLIRRVIAYPAMFVPYMELISFLAEVGIPGLVLTISTALGEFVKSEVSTSTSISAQVFPPGV

SEQ ID NO: 27581 - protein, 84 aa, unidentified
  REGION 1..84: note = Description of Unknown:cds_NZ_WFIY01000004.1_cds_WP_155863258.1_1211 target sequence
WWTVPFVAIGYLMSIEGYLGLIRRVIAYPAMFVPYMELISFLAEVGIPGLVLTISTALGEFVKSEVSTSTSISAQVFPPGVMRR

SEQ ID NO: 27582 - protein, 85 aa, unidentified
  REGION 1..85: note = Description of Unknown:cds_NZ_WFIY01000004.1_cds_WP_155863258.1_1211 target sequence
PKDTLGVVWLYLLGGLAWLIILGTAAMNMRTYLVYNQNSPQVGVIYYTLLTIHGWSAMLGLVPDAALGIIAYSMYKSGLSIVHTK

SEQ ID NO: 27583 - protein, 85 aa, unidentified
  REGION 1..85: note = Description of Unknown:cds_NZ_WFIY01000004.1_cds_WP_155863258.1_1211 target sequence
EITAMFWASNLGLAFALFGGPDMGWYMYPPLAIEDNSLFQAFRLYHGALMGAGYLALAVNSAAASIASIILVVDAVQTKPKDKKI

SEQ ID NO: 27584 - protein, 85 aa, unidentified
  REGION 1..85: note = Description of Unknown:cds_NZ_WFIY01000004.1_cds_WP_155863258.1_1211 target sequence
NIFAAYGVAFALIIALTLPALTASELWYVLAIWGSVKVDPLLWVILFWFYGHPVVYYVPFPLFGALYYYIPIYAGRPLYSEKWAR

SEQ ID NO: 27585 - protein, 85 aa, unidentified
  REGION 1..85: note = Description of Unknown:cds_NZ_WFIY01000004.1_cds_WP_155863258.1_1211 target sequence
WNIFLLAIGSMLIWVHHLQTFPLPVCLRAWITVSTLVLASGSGLTVLNLGLTILFSKGYNWRDPIGMAFLVALIGFIIGGVQALP

SEQ ID NO: 27586 - protein, 85 aa, unidentified
  REGION 1..85: note = Description of Unknown:cds_NZ_WFIY01000004.1_cds_WP_155863258.1_1211 target sequence
LPINIINGVVHNTYYVVGHFHLVIWTLILVGFTGVFLDLLKSTNPSLNFSLKARKLMVAGLIWWTVPFVAIGYLMSIEGYLGLIR

SEQ ID NO: 27587 - protein, 85 aa, unidentified
  REGION 1..85: note = Description of Unknown:cds_NZ_WFIY01000004.1_cds_WP_155864003.1_1930 target sequence
GIRTGQEYLDSIKVRNKVEIYVMGKEVKDVTTNPFLKPSVLAFKATFDSAWDEDTKDLARVWSPFINEEVNRFNHIHRSPEDLAA

SEQ ID NO: 27588 - protein, 85 aa, unidentified
  REGION 1..85: note = Description of Unknown:cds_NZ_WFIY01000004.1_cds_WP_155864003.1_1930 target sequence
KVKLLRKISHKVGACFQRCVGYDALNTLYIITELMAQHGKTEPKEKFIEYLKTVQKKDLALAGAMTDAKGVRTLKPHEQPNKNAY

SEQ ID NO: 27589 - protein, 85 aa, unidentified
  REGION 1..85: note = Description of Unknown:cds_NZ_WFIY01000004.1_cds_WP_155864003.1_1930 target sequence
VRITEVTKDGIYVSGAKANITGVAASEEIVVLPTRAMGPEDQDYAVAFSIPTDTEGIKIIVGRQLNDARRLEGGEIDALPYFYNH

SEQ ID NO: 27590 - protein, 85 aa, unidentified
  REGION 1..85: note = Description of Unknown:cds_NZ_WFIY01000004.1_cds_WP_155864003.1_1930 target sequence
EGLVIFDNVFVPMERVFLMKDWQYTSQLVEIFSAYHRQGYGGCKAGLGDVIIGATYNLAKQIGVEKAPHVQDKINEEIFLTETMY

SEQ ID NO: 27591 - protein, 85 aa, unidentified
  REGION 1..85: note = Description of Unknown:cds_NZ_WFIY01000004.1_cds_WP_155864003.1_1930 target sequence
AAGIAASLNGIEVCPGCWWVNPMQANVTKHLVTRFPSQIAQLAIDIAGGILGTAPSEWDLKNPKIKELLAKYLQGVDGYTAEDRI

SEQ ID NO: 27592 - protein, 85 aa, unidentified
  REGION 1..85: note = Description of Unknown:cds_NZ_WFIY01000004.1_cds_WP_155864003.1_1930 target sequence
RMVRLLENVALGVAFQIESVHGAGSPAAQRIMFSRLYNLSYAEEVAKRLAGMKSNVKFTKKVEPWKESETEKLAKEAEKNTVTAS

SEQ ID NO: 27593 - protein, 84 aa, unidentified
  REGION 1..84: note = Description of Unknown:cds_NZ_WFIY01000004.1_cds_WP_155864003.1_1930 target sequence
LLENVALGVAFQIESVHGAGSPAAQRIMFSRLYNLSYAEEVAKRLAGMKSNVKFTKKVEPWKESETEKLAKEAEKNTVTASGGK

SEQ ID NO: 27594 - protein, 85 aa, unidentified
  REGION 1..85: note = Description of Unknown:cds_NZ_WFIY01000004.1_cds_WP_155864003.1_1930 target sequence
KDVTTNPFLKPSVLAFKATFDSAWDEDTKDLARVWSPFINEEVNRFNHIHRSPEDLAAKVKLLRKISHKVGACFQRCVGYDALNT

SEQ ID NO: 27595 - protein, 85 aa, unidentified
  REGION 1..85: note = Description of Unknown:cds_NZ_WFIY01000004.1_cds_WP_155864003.1_1930 target sequence
LYIITELMAQHGKTEPKEKFIEYLKTVQKKDLALAGAMTDAKGVRTLKPHEQPNKNAYVRITEVTKDGIYVSGAKANITGVAASE

SEQ ID NO: 27596 - protein, 85 aa, unidentified
  REGION 1..85: note = Description of Unknown:cds_NZ_WFIY01000004.1_cds_WP_155864003.1_1930 target sequence
EIVVLPTRAMGPEDQDYAVAFSIPTDTEGIKIIVGRQLNDARRLEGGEIDALPYFYNHEGLVIFDNVFVPMERVFLMKDWQYTSQ

SEQ ID NO: 27597 - protein, 85 aa, unidentified
  REGION 1..85: note = Description of Unknown:cds_NZ_WFIY01000004.1_cds_WP_155864003.1_1930 target sequence
LVEIFSAYHRQGYGGCKAGLGDVIIGATYNLAKQIGVEKAPHVQDKINEEIFLTETMYAAGIAASLNGIEVCPGCWWVNPMQANV

SEQ ID NO: 27598 - protein, 85 aa, unidentified
  REGION 1..85: note = Description of Unknown:cds_NZ_WFIY01000004.1_cds_WP_155864003.1_1930 target sequence
TKHLVTRFPSQIAQLAIDIAGGILGTAPSEWDLKNPKIKELLAKYLQGVDGYTAEDRIRMVRLLENVALGVAFQIESVHGAGSPA

SEQ ID NO: 27599 - protein, 85 aa, unidentified
  REGION 1..85: note = Description of Unknown:cds_NZ_WFIY01000004.1_cds_WP_155863263.1_1217 target sequence
GIKIGIDIGSTHTDAVALEGRSLIAADKVMTTQDLTEGLINALRSIISKLGERKNEITSLMIGTTHGLNALHQARNLNRVAIIRI

SEQ ID NO: 27600 - protein, 85 aa, unidentified
  REGION 1..85: note = Description of Unknown:cds_NZ_WFIY01000004.1_cds_WP_155863263.1_1217 target sequence
GLPAGEGIPPTFDWPEALERYVTFKFMVRGGHEYTGEEITELDTNKIREIAEEIKDKVDAVAIVSIFSIVNRDHEIRAMEILREK

SEQ ID NO: 27601 - protein, 85 aa, unidentified
  REGION 1..85: note = Description of Unknown:cds_NZ_WFIY01000004.1_cds_WP_155863263.1_1217 target sequence
GITTPIILSHEIGGLGLLERENATILNALILNIFNNLISKLKSVLSSMGLESVKIYFAQNDGTVASEDFIRNYPIFTVAGPVSNS

SEQ ID NO: 27602 - protein, 85 aa, unidentified
  REGION 1..85: note = Description of Unknown:cds_NZ_WFIY01000004.1_cds_WP_155863263.1_1217 target sequence
IRGAYLLTGIKNAVVMDVGGTTTNVGVLNNGYPRESSVAVEIVGIRTNFRMPDIYTIALGGGTIINCNKIGPESVGYALFDKGIS

SEQ ID NO: 27603 - protein, 85 aa, unidentified
  REGION 1..85: note = Description of Unknown:cds_NZ_WFIY01000004.1_cds_WP_155863263.1_1217 target sequence
WGGNILTATDVAMVIKNFSLPNANPKLVLEKYSAEYLSKVYENMKRMWEDAIDLMKTEKGDVEVIAVGGGSIMIPEKMIGASKIV

SEQ ID NO: 27604 - protein, 85 aa, unidentified
  REGION 1..85: note = Description of Unknown:cds_NZ_WFIY01000004.1_cds_WP_155863263.1_1217 target sequence
VPQNAQYANAIGATLTKVGATVERTFSYETINREIAIKSLIDEAKQLAIRAGAIENTVEVREIEELQMPYLPGNAVKVKVKVVGE

SEQ ID NO: 27605 - protein, 84 aa, unidentified
  REGION 1..84: note = Description of Unknown:cds_NZ_WFIY01000004.1_cds_WP_155863263.1_1217 target sequence
NAQYANAIGATLTKVGATVERTFSYETINREIAIKSLIDEAKQLAIRAGAIENTVEVREIEELQMPYLPGNAVKVKVKVVGEFS

SEQ ID NO: 27606 - protein, 85 aa, unidentified
  REGION 1..85: note = Description of Unknown:cds_NZ_WFIY01000004.1_cds_WP_155863263.1_1217 target sequence
KVMTTQDLTEGLINALRSIISKLGERKNEITSLMIGTTHGLNALHQARNLNRVAIIRIGLPAGEGIPPTFDWPEALERYVTFKFM

SEQ ID NO: 27607 - protein, 85 aa, unidentified
  REGION 1..85: note = Description of Unknown:cds_NZ_WFIY01000004.1_cds_WP_155863263.1_1217 target sequence
VRGGHEYTGEEITELDTNKIREIAEEIKDKVDAVAIVSIFSIVNRDHEIRAMEILREKGITTPIILSHEIGGLGLLERENATILN

SEQ ID NO: 27608 - protein, 85 aa, unidentified
  REGION 1..85: note = Description of Unknown:cds_NZ_WFIY01000004.1_cds_WP_155863263.1_1217 target sequence
ALILNIFNNLISKLKSVLSSMGLESVKIYFAQNDGTVASEDFIRNYPIFTVAGPVSNSIRGAYLLTGIKNAVVMDVGGTTTNVGV

SEQ ID NO: 27609 - protein, 85 aa, unidentified
  REGION 1..85: note = Description of Unknown:cds_NZ_WFIY01000004.1_cds_WP_155863263.1_1217 target sequence
LNNGYPRESSVAVEIVGIRTNFRMPDIYTIALGGGTIINCNKIGPESVGYALFDKGISWGGNILTATDVAMVIKNFSLPNANPKL

SEQ ID NO: 27610 - protein, 85 aa, unidentified
  REGION 1..85: note = Description of Unknown:cds_NZ_WFIY01000004.1_cds_WP_155863263.1_1217 target sequence
VLEKYSAEYLSKVYENMKRMWEDAIDLMKTEKGDVEVIAVGGGSIMIPEKMIGASKIVVPQNAQYANAIGATLTKVGATVERTFS

SEQ ID NO: 27611 - protein, 85 aa, unidentified
  REGION 1..85: note = Description of Unknown:cds_NC_025350.1_cds_YP_009094074.1_1 target sequence
ASLFRALEQFTLEQDQGGRGNVGDQPPETLQATIKVFVINTPDPRLRYRMMCFCLRLIVSNSARTGQRHGALMTLLSLPTAVMQN

SEQ ID NO: 27612 - protein, 85 aa, unidentified
  REGION 1..85: note = Description of Unknown:cds_NC_025350.1_cds_YP_009094074.1_1 target sequence
HFRTAERSPDCQIERIEVDGFEPGTYRIRTNARTPLTHGEVVALEEMADDIPEALANHTPFVDAQTELEECDEMEKFLEAIYSTL

SEQ ID NO: 27613 - protein, 85 aa, unidentified
  REGION 1..85: note = Description of Unknown:cds_NC_025350.1_cds_YP_009094074.1_1 target sequence
IQVWIMVTKSMTAFDQPTGSDERRVAKYQQQGRLNPHYLLQGEVRRRIQLCIRQSLPIRQFLVNELQTASNQGPITGKYYAMVAD

SEQ ID NO: 27614 - protein, 85 aa, unidentified
  REGION 1..85: note = Description of Unknown:cds_NC_025350.1_cds_YP_009094074.1_1 target sequence
IGKYIMNAGMGGFFMTIRFALGQKWPPLALAAFSGEIVKMKSLMLQYRRLGDRAKFMALLEMSEMMDFAPSNFPLLYSYAMGIGS

SEQ ID NO: 27615 - protein, 85 aa, unidentified
  REGION 1..85: note = Description of Unknown:cds_NC_025350.1_cds_YP_009094074.1_1 target sequence
VQDPQMRGYTFGRPYLNAAFYQLGVETANQQQGSVDKDMAAELGLTEADKRAMAATVTRLTTGRGGLQGNMGINAMARRGQQLPQ

SEQ ID NO: 27616 - protein, 85 aa, unidentified
  REGION 1..85: note = Description of Unknown:cds_NC_025350.1_cds_YP_009094074.1_1 target sequence
PQDNVVEEDEEEDEEEEEPQNQEREVDPELERRVALRIAQDQERWARRLAEIEAERVARQAASHPPQHDATRDQIPDQQEYDSNL

SEQ ID NO: 27617 - protein, 84 aa, unidentified
  REGION 1..84: note = Description of Unknown:cds_NC_025350.1_cds_YP_009094074.1_1 target sequence
NVVEEDEEEDEEEEEPQNQEREVDPELERRVALRIAQDQERWARRLAEIEAERVARQAASHPPQHDATRDQIPDQQEYDSNLIE

SEQ ID NO: 27618 - protein, 85 aa, unidentified
  REGION 1..85: note = Description of Unknown:cds_NC_025350.1_cds_YP_009094074.1_1 target sequence
ETLQATIKVFVINTPDPRLRYRMMCFCLRLIVSNSARTGQRHGALMTLLSLPTAVMQNHFRTAERSPDCQIERIEVDGFEPGTYR

SEQ ID NO: 27619 - protein, 85 aa, unidentified
  REGION 1..85: note = Description of Unknown:cds_NC_025350.1_cds_YP_009094074.1_1 target sequence
IRTNARTPLTHGEVVALEEMADDIPEALANHTPFVDAQTELEECDEMEKFLEAIYSTLIQVWIMVTKSMTAFDQPTGSDERRVAK

SEQ ID NO: 27620 - protein, 85 aa, unidentified
  REGION 1..85: note = Description of Unknown:cds_NC_025350.1_cds_YP_009094074.1_1 target sequence
YQQQGRLNPHYLLQGEVRRRIQLCIRQSLPIRQFLVNELQTASNQGPITGKYYAMVADIGKYIMNAGMGGFFMTIRFALGQKWPP

SEQ ID NO: 27621 - protein, 85 aa, unidentified
  REGION 1..85: note = Description of Unknown:cds_NC_025350.1_cds_YP_009094074.1_1 target sequence
LALAAFSGEIVKMKSLMLQYRRLGDRAKFMALLEMSEMMDFAPSNFPLLYSYAMGIGSVQDPQMRGYTFGRPYLNAAFYQLGVET

SEQ ID NO: 27622 - protein, 85 aa, unidentified
  REGION 1..85: note = Description of Unknown:cds_NC_025350.1_cds_YP_009094074.1_1 target sequence
ANQQQGSVDKDMAAELGLTEADKRAMAATVTRLTTGRGGLQGNMGINAMARRGQQLPQPQDNVVEEDEEEDEEEEEPQNQEREVD

SEQ ID NO: 27623 - protein, 85 aa, unidentified
  REGION 1..85: note = Description of Unknown:hvTR_P06500 target sequence
AGRGGSQLERRRERTPDRGRGSASHPPGRESPSPPPLPLKRHTYRRVVSDQEEEIVVVSENSRSPSPQEQPPPPQQPPKKKPRKT

SEQ ID NO: 27624 - protein, 85 aa, unidentified
  REGION 1..85: note = Description of Unknown:hvTR_P06500 target sequence
KHVPLQDVSQDSEDEREAEEELGAVGFSYPPVRITGKDGKRSFETLNENDPLTKAASAKMAVTNPLSLPIVSAWEKGMEIMNMLM

SEQ ID NO: 27625 - protein, 85 aa, unidentified
  REGION 1..85: note = Description of Unknown:hvTR_P06500 target sequence
ERYRVESDLKSNFQLMPEQGEVYRRICHLYINEEHRGIPLTFTSNKTLTTMMGRFLQGFVHAHSQIAHKNWESTGCALWLHGCTE

SEQ ID NO: 27626 - protein, 85 aa, unidentified
  REGION 1..85: note = Description of Unknown:hvTR_P06500 target sequence
VEGKLRCLHGTTMIQKEHMIEMDVASENGQRALKENPDRAKVTQNRWGRSVVQLANNDARCCVHDAGCATNQFSSKSCGVFFTEG

SEQ ID NO: 27627 - protein, 85 aa, unidentified
  REGION 1..85: note = Description of Unknown:hvTR_P06500 target sequence
AKAQQAFKQLEAFMKAMYPGMNADQAQVMLIPLHCDCNHKPGCVPTMGRQTCKMTPFGMANAEDLDVDGITDATVLASVKHPALM

SEQ ID NO: 27628 - protein, 85 aa, unidentified
  REGION 1..85: note = Description of Unknown:hvTR_P06500 target sequence
VFQCCNPVYRNSRAQNAGPNCDFKISAPDLLGALQLTRKLWTDSFPDTLLPKLLIPEFKWLAKYQFRNVSLPAGHAETSRQNPFD

SEQ ID NO: 27629 - protein, 84 aa, unidentified
  REGION 1..84: note = Description of Unknown:hvTR_P06500 target sequence
QCCNPVYRNSRAQNAGPNCDFKISAPDLLGALQLTRKLWTDSFPDTLLPKLLIPEFKWLAKYQFRNVSLPAGHAETSRQNPFDF

SEQ ID NO: 27630 - protein, 85 aa, unidentified
  REGION 1..85: note = Description of Unknown:hvTR_P06500 target sequence
GRESPSPPPLPLKRHTYRRVVSDQEEEIVVVSENSRSPSPQEQPPPPQQPPKKKPRKTKHVPLQDVSQDSEDEREAEEELGAVGF

SEQ ID NO: 27631 - protein, 85 aa, unidentified
  REGION 1..85: note = Description of Unknown:hvTR_P06500 target sequence
SYPPVRITGKDGKRSFETLNENDPLTKAASAKMAVTNPLSLPIVSAWEKGMEIMNMLMERYRVESDLKSNFQLMPEQGEVYRRIC

SEQ ID NO: 27632 - protein, 85 aa, unidentified
  REGION 1..85: note = Description of Unknown:hvTR_P06500 target sequence
HLYINEEHRGIPLTFTSNKTLTTMMGRFLQGFVHAHSQIAHKNWESTGCALWLHGCTEVEGKLRCLHGTTMIQKEHMIEMDVASE

SEQ ID NO: 27633 - protein, 85 aa, unidentified
  REGION 1..85: note = Description of Unknown:hvTR_P06500 target sequence
NGQRALKENPDRAKVTQNRWGRSVVQLANNDARCCVHDAGCATNQFSSKSCGVFFTEGAKAQQAFKQLEAFMKAMYPGMNADQAQ

SEQ ID NO: 27634 - protein, 85 aa, unidentified
  REGION 1..85: note = Description of Unknown:hvTR_P06500 target sequence
VMLIPLHCDCNHKPGCVPTMGRQTCKMTPFGMANAEDLDVDGITDATVLASVKHPALMVFQCCNPVYRNSRAQNAGPNCDFKISA

SEQ ID NO: 27635 - protein, 85 aa, unidentified
  REGION 1..85: note = Description of Unknown:hvTR_P10238 target sequence
ATDIDMLIDLGLDLSDSDLDEDPPEPAESRRDDLESDSSGECSSSDEDMEDPHGEDGPEPILDAARPAVRPSRPEDPGVPSTQTP

SEQ ID NO: 27636 - protein, 85 aa, unidentified
  REGION 1..85: note = Description of Unknown:hvTR_P10238 target sequence
RPTERQGPNDPQPAPHSVWSRLGARRPSCSPEQHGGKVARLQPPPTKAQPARGGRRGRRRGRGRGGPGAADGLSDPRRRAPRTNR

SEQ ID NO: 27637 - protein, 85 aa, unidentified
  REGION 1..85: note = Description of Unknown:hvTR_P10238 target sequence
NPGGPRPGAGWTDGPGAPHGEAWRGSEQPDPPGGQRTRGVRQAPPPLMTLAIAPPPADPRAPAPERKAPAADTIDATTRLVLRSI

SEQ ID NO: 27638 - protein, 85 aa, unidentified
  REGION 1..85: note = Description of Unknown:hvTR_P10238 target sequence
SERAAVDRISESFGRSAQVMHDPFGGQPFPAANSPWAPVLAGQGGPFDAETRRVSWETLVAHGPSLYRTFAGNPRAASTAKAMRD

SEQ ID NO: 27639 - protein, 85 aa, unidentified
  REGION 1..85: note = Description of Unknown:hvTR_P10238 target sequence
CVLRQENFIEALASADETLAWCKMCIHHNLPLRPQDPIIGTTAAVLDNLATRLRPFLQCYLKARGLCGLDELCSRRRLADIKDIA

SEQ ID NO: 27640 - protein, 85 aa, unidentified
  REGION 1..85: note = Description of Unknown:hvTR_P10238 target sequence
SFVFVILARLANRVERGVAEIDYATLGVGVGEKMHFYLPGACMAGLIEILDTHRQECSSRVCELTASHIVAPPYVHGKYFYCNSL

SEQ ID NO: 27641 - protein, 84 aa, unidentified
  REGION 1..84: note = Description of Unknown:hvTR_P10238 target sequence
VFVILARLANRVERGVAEIDYATLGVGVGEKMHFYLPGACMAGLIEILDTHRQECSSRVCELTASHIVAPPYVHGKYFYCNSLF

SEQ ID NO: 27642 - protein, 85 aa, unidentified
  REGION 1..85: note = Description of Unknown:hvTR_P10238 target sequence
ESRRDDLESDSSGECSSSDEDMEDPHGEDGPEPILDAARPAVRPSRPEDPGVPSTQTPRPTERQGPNDPQPAPHSVWSRLGARRP

SEQ ID NO: 27643 - protein, 85 aa, unidentified
  REGION 1..85: note = Description of Unknown:hvTR_P10238 target sequence
SCSPEQHGGKVARLQPPPTKAQPARGGRRGRRRGRGRGGPGAADGLSDPRRRAPRTNRNPGGPRPGAGWTDGPGAPHGEAWRGSE

SEQ ID NO: 27644 - protein, 85 aa, unidentified
  REGION 1..85: note = Description of Unknown:hvTR_P10238 target sequence
QPDPPGGQRTRGVRQAPPPLMTLAIAPPPADPRAPAPERKAPAADTIDATTRLVLRSISERAAVDRISESFGRSAQVMHDPFGGQ

SEQ ID NO: 27645 - protein, 85 aa, unidentified
  REGION 1..85: note = Description of Unknown:hvTR_P10238 target sequence
PFPAANSPWAPVLAGQGGPFDAETRRVSWETLVAHGPSLYRTFAGNPRAASTAKAMRDCVLRQENFIEALASADETLAWCKMCIH

SEQ ID NO: 27646 - protein, 85 aa, unidentified
  REGION 1..85: note = Description of Unknown:hvTR_P10238 target sequence
HNLPLRPQDPIIGTTAAVLDNLATRLRPFLQCYLKARGLCGLDELCSRRRLADIKDIASFVFVILARLANRVERGVAEIDYATLG

SEQ ID NO: 27647 - protein, 85 aa, unidentified
  REGION 1..85: note = Description of Unknown:hvTR_P28276 target sequence
ATDIDMLIDLGLDLSDSELEEDALERDEEGRRDDPESDSSGECSSSDEDMEDPCGDGGAEAIDAAIPKGPPARPEDAGTPEASTP

SEQ ID NO: 27648 - protein, 85 aa, unidentified
  REGION 1..85: note = Description of Unknown:hvTR_P28276 target sequence
RPAARRGADDPPPATTGVWSRLGTRRSASPREPHGGKVARIQPPSTKAPHPRGGRRGRRRGRGRYGPGGADSTPKPRRRVSRNAH

SEQ ID NO: 27649 - protein, 85 aa, unidentified
  REGION 1..85: note = Description of Unknown:hvTR_P28276 target sequence
NQGGRHPASARTDGPGATHGEARRGGEQLDVSGGPRPRGTRQAPPPLMALSLTPPHADGRAPVPERKAPSADTIDPAVRAVLRSI

SEQ ID NO: 27650 - protein, 85 aa, unidentified
  REGION 1..85: note = Description of Unknown:hvTR_P28276 target sequence
SERAAVERISESFGRSALVMQDPFGGMPFPAANSPWAPVLATQAGGFDAETRRVSWETLVAHGPSLYRTFAANPRAASTAKAMRD

SEQ ID NO: 27651 - protein, 85 aa, unidentified
  REGION 1..85: note = Description of Unknown:hvTR_P28276 target sequence
CVLRQENLIEALASADETLAWCKMCIHHNLPLRPQDPIIGTAAAVLENLATRLRPFLQCYLKARGLCGLDDLCSRRRLSDIKDIA

SEQ ID NO: 27652 - protein, 85 aa, unidentified
  REGION 1..85: note = Description of Unknown:hvTR_P28276 target sequence
SFVLVILARLANRVERGVSEIDYTTVGVGAGETMHFYIPGACMAGLIEILDTHRQECSSRVCELTASHTIAPLYVHGKYFYCNSL

SEQ ID NO: 27653 - protein, 84 aa, unidentified
  REGION 1..84: note = Description of Unknown:hvTR_P28276 target sequence
VLVILARLANRVERGVSEIDYTTVGVGAGETMHFYIPGACMAGLIEILDTHRQECSSRVCELTASHTIAPLYVHGKYFYCNSLF

SEQ ID NO: 27654 - protein, 85 aa, unidentified
  REGION 1..85: note = Description of Unknown:hvTR_P28276 target sequence
EEGRRDDPESDSSGECSSSDEDMEDPCGDGGAEAIDAAIPKGPPARPEDAGTPEASTPRPAARRGADDPPPATTGVWSRLGTRRS

SEQ ID NO: 27655 - protein, 85 aa, unidentified
  REGION 1..85: note = Description of Unknown:hvTR_P28276 target sequence
ASPREPHGGKVARIQPPSTKAPHPRGGRRGRRRGRGRYGPGGADSTPKPRRRVSRNAHNQGGRHPASARTDGPGATHGEARRGGE

SEQ ID NO: 27656 - protein, 85 aa, unidentified
  REGION 1..85: note = Description of Unknown:hvTR_P28276 target sequence
QLDVSGGPRPRGTRQAPPPLMALSLTPPHADGRAPVPERKAPSADTIDPAVRAVLRSISERAAVERISESFGRSALVMQDPFGGM

SEQ ID NO: 27657 - protein, 85 aa, unidentified
  REGION 1..85: note = Description of Unknown:hvTR_P28276 target sequence
PFPAANSPWAPVLATQAGGFDAETRRVSWETLVAHGPSLYRTFAANPRAASTAKAMRDCVLRQENLIEALASADETLAWCKMCIH

SEQ ID NO: 27658 - protein, 85 aa, unidentified
  REGION 1..85: note = Description of Unknown:hvTR_P28276 target sequence
HNLPLRPQDPIIGTAAAVLENLATRLRPFLQCYLKARGLCGLDDLCSRRRLSDIKDIASFVLVILARLANRVERGVSEIDYTTVG

SEQ ID NO: 27659 - protein, 85 aa, unidentified
  REGION 1..85: note = Description of Unknown:cds_NZ_WFIY01000004.1_cds_WP_155863342.1_1309 target sequence
ASSSKIFVRESSGLIKDVSLTDAIMLNLGNLSAGEALFESISPYVTQGGVLWLASVLAFVLSIPQIIVYTLMTLKIRRTGGDYVW

SEQ ID NO: 27660 - protein, 85 aa, unidentified
  REGION 1..85: note = Description of Unknown:cds_NZ_WFIY01000004.1_cds_WP_155863342.1_1309 target sequence
ITRNIDGRLGSILALSYLIQSTAYFAIIAFFSASSVNAVLCVIGKLDGNPSLLYLASHIFVNPYCSPTLDQRLIFYGISALFFGI

SEQ ID NO: 27661 - protein, 85 aa, unidentified
  REGION 1..85: note = Description of Unknown:cds_NZ_WFIY01000004.1_cds_WP_155863342.1_1309 target sequence
VIALNIRKASWGYKLVTGLGLFSILSLILGIIVIGINASDFATKIAPFASAFNIPTTSSKVFFPSDFSIFATLALLPMFALYTYP

SEQ ID NO: 27662 - protein, 85 aa, unidentified
  REGION 1..85: note = Description of Unknown:cds_NZ_WFIY01000004.1_cds_WP_155863342.1_1309 target sequence
WINAGPAVSAEFRNAEKVAKLNIIIASLLTFLLVTGAFLEMDLVAGYNFNITAYPTFIYNFWTVAIALAGNPVLQWIIGLGVILW

SEQ ID NO: 27663 - protein, 85 aa, unidentified
  REGION 1..85: note = Description of Unknown:cds_NZ_WFIY01000004.1_cds_WP_155863342.1_1309 target sequence
NFYTLSYGVVMFSRYVFALSFDRVLPEKFSEVNKYGSPVYAHLLDLTITLILLAVPVMSVSAATSLYGTTILGAVYLLFGVLAGA

SEQ ID NO: 27664 - protein, 85 aa, unidentified
  REGION 1..85: note = Description of Unknown:cds_NZ_WFIY01000004.1_cds_WP_155863342.1_1309 target sequence
VYGFKNKERVLQIAGIIAAGYLSYLAYEAATNPLFGFMTSSGVNMITLTFVVSAYAFAIIVYFASWYKHKREGIDVSTAFKEIPP

SEQ ID NO: 27665 - protein, 84 aa, unidentified
  REGION 1..84: note = Description of Unknown:cds_NZ_WFIY01000004.1_cds_WP_155863342.1_1309 target sequence
GFKNKERVLQIAGIIAAGYLSYLAYEAATNPLFGFMTSSGVNMITLTFVVSAYAFAIIVYFASWYKHKREGIDVSTAFKEIPPE

SEQ ID NO: 27666 - protein, 85 aa, unidentified
  REGION 1..85: note = Description of Unknown:cds_NZ_WFIY01000004.1_cds_WP_155863342.1_1309 target sequence
LGNLSAGEALFESISPYVTQGGVLWLASVLAFVLSIPQIIVYTLMTLKIRRTGGDYVWITRNIDGRLGSILALSYLIQSTAYFAI

SEQ ID NO: 27667 - protein, 85 aa, unidentified
  REGION 1..85: note = Description of Unknown:cds_NZ_WFIY01000004.1_cds_WP_155863342.1_1309 target sequence
IAFFSASSVNAVLCVIGKLDGNPSLLYLASHIFVNPYCSPTLDQRLIFYGISALFFGIVIALNIRKASWGYKLVTGLGLFSILSL

SEQ ID NO: 27668 - protein, 85 aa, unidentified
  REGION 1..85: note = Description of Unknown:cds_NZ_WFIY01000004.1_cds_WP_155863342.1_1309 target sequence
ILGIIVIGINASDFATKIAPFASAFNIPTTSSKVFFPSDFSIFATLALLPMFALYTYPWINAGPAVSAEFRNAEKVAKLNIIIAS

SEQ ID NO: 27669 - protein, 85 aa, unidentified
  REGION 1..85: note = Description of Unknown:cds_NZ_WFIY01000004.1_cds_WP_155863342.1_1309 target sequence
LLTFLLVTGAFLEMDLVAGYNFNITAYPTFIYNFWTVAIALAGNPVLQWIIGLGVILWNFYTLSYGVVMFSRYVFALSFDRVLPE

SEQ ID NO: 27670 - protein, 85 aa, unidentified
  REGION 1..85: note = Description of Unknown:cds_NZ_WFIY01000004.1_cds_WP_155863342.1_1309 target sequence
KFSEVNKYGSPVYAHLLDLTITLILLAVPVMSVSAATSLYGTTILGAVYLLFGVLAGAVYGFKNKERVLQIAGIIAAGYLSYLAY

SEQ ID NO: 27671 - protein, 85 aa, unidentified
  REGION 1..85: note = Description of Unknown:cds_NZ_WFIY01000004.1_cds_WP_155863468.1_1429 target sequence
LNEKIISPLNRVEGDLDLKVIIENNRVIRAYPMSRLFRGIEIILRNKYPMDSLVITPRICGICGASHLYATAQALDMAYNAYVPP

SEQ ID NO: 27672 - protein, 85 aa, unidentified
  REGION 1..85: note = Description of Unknown:cds_NZ_WFIY01000004.1_cds_WP_155863468.1_1429 target sequence
NGVRLRNVMALAEMAQNDVRHTYLMFLIDTVNKKYENLPFYKDMVLRWAPYIGSSYKEAVKWSKKYTEIYAIFGGQWPHGSAMVP

SEQ ID NO: 27673 - protein, 85 aa, unidentified
  REGION 1..85: note = Description of Unknown:cds_NZ_WFIY01000004.1_cds_WP_155863468.1_1429 target sequence
GGVTTDPYYNDIMKAKGILTHITVEFLEKTVLGGPLYQFLEINSLNGLEQWCTDYPNGDLCKIWNYGKDMGWLELGRGSNYLMSF

SEQ ID NO: 27674 - protein, 85 aa, unidentified
  REGION 1..85: note = Description of Unknown:cds_NZ_WFIY01000004.1_cds_WP_155863468.1_1429 target sequence
GHVPLAEKYVPGNSKLMFDKGIINLENWEKIDLDQNNILEFVSSSYYTYDEGEKIGLHPFDGETKPLPPNASSSKYTFTKAFRYK

SEQ ID NO: 27675 - protein, 85 aa, unidentified
  REGION 1..85: note = Description of Unknown:cds_NZ_WFIY01000004.1_cds_WP_155863468.1_1429 target sequence
LGNSLIAPEVGAISMLTVGGNSLMVDLVRRFKSNVLLREIARIIRLALIHKIIMDELNDYDINKPAYKKPDEVNTTRGYGMLEAP

SEQ ID NO: 27676 - protein, 85 aa, unidentified
  REGION 1..85: note = Description of Unknown:cds_NZ_WFIY01000004.1_cds_WP_155863468.1_1429 target sequence
RGSLGHWIVIKEGKIYNYQIVTPTQINMGPEDPFGNLSHLSLSLLGTEVNDVNNPIEVAHVVRSHDACMVCNVHFFDSGLEKMVI

SEQ ID NO: 27677 - protein, 84 aa, unidentified
  REGION 1..84: note = Description of Unknown:cds_NZ_WFIY01000004.1_cds_WP_155863468.1_1429 target sequence
LGHWIVIKEGKIYNYQIVTPTQINMGPEDPFGNLSHLSLSLLGTEVNDVNNPIEVAHVVRSHDACMVCNVHFFDSGLEKMVIRL

SEQ ID NO: 27678 - protein, 85 aa, unidentified
  REGION 1..85: note = Description of Unknown:cds_NZ_WFIY01000004.1_cds_WP_155863468.1_1429 target sequence
IRAYPMSRLFRGIEIILRNKYPMDSLVITPRICGICGASHLYATAQALDMAYNAYVPPNGVRLRNVMALAEMAQNDVRHTYLMFL

SEQ ID NO: 27679 - protein, 85 aa, unidentified
  REGION 1..85: note = Description of Unknown:cds_NZ_WFIY01000004.1_cds_WP_155863468.1_1429 target sequence
IDTVNKKYENLPFYKDMVLRWAPYIGSSYKEAVKWSKKYTEIYAIFGGQWPHGSAMVPGGVTTDPYYNDIMKAKGILTHITVEFL

SEQ ID NO: 27680 - protein, 85 aa, unidentified
  REGION 1..85: note = Description of Unknown:cds_NZ_WFIY01000004.1_cds_WP_155863468.1_1429 target sequence
EKTVLGGPLYQFLEINSLNGLEQWCTDYPNGDLCKIWNYGKDMGWLELGRGSNYLMSFGHVPLAEKYVPGNSKLMFDKGIINLEN

SEQ ID NO: 27681 - protein, 85 aa, unidentified
  REGION 1..85: note = Description of Unknown:cds_NZ_WFIY01000004.1_cds_WP_155863468.1_1429 target sequence
WEKIDLDQNNILEFVSSSYYTYDEGEKIGLHPFDGETKPLPPNASSSKYTFTKAFRYKLGNSLIAPEVGAISMLTVGGNSLMVDL

SEQ ID NO: 27682 - protein, 85 aa, unidentified
  REGION 1..85: note = Description of Unknown:cds_NZ_WFIY01000004.1_cds_WP_155863468.1_1429 target sequence
VRRFKSNVLLREIARIIRLALIHKIIMDELNDYDINKPAYKKPDEVNTTRGYGMLEAPRGSLGHWIVIKEGKIYNYQIVTPTQIN

SEQ ID NO: 27683 - protein, 85 aa, unidentified
  REGION 1..85: note = Description of Unknown:hvTR_Q5Y0P7 target sequence
AADLDMLVDLGLDLSDSDFEDAEPGPASSEPGSLGGRGDAESSSGRCSSSDDEEMESSGEEEGGGAARGAAAARAETPPRPDADA

SEQ ID NO: 27684 - protein, 85 aa, unidentified
  REGION 1..85: note = Description of Unknown:hvTR_Q5Y0P7 target sequence
RRGAPRAGAPATDVWAHLGRRRRRSEVEGPDGGDARGDRRYDDGEAPSPRRRRRPRSAVALVKTFGPGAAAPPSPSSARGSRRRG

SEQ ID NO: 27685 - protein, 85 aa, unidentified
  REGION 1..85: note = Description of Unknown:hvTR_Q5Y0P7 target sequence
RRGRGRRREGGRPRPTAPPGPGHNAAETGSHRDGRAAPPSLMALAVAPPDTPAEREGPGRGGRRGAAPPENIDQRVRAVLRSISE

SEQ ID NO: 27686 - protein, 85 aa, unidentified
  REGION 1..85: note = Description of Unknown:hvTR_Q5Y0P7 target sequence
RAAAERVSETFGRSAAAMHHPFGGTQFAAPDSPWAPVLGSSVGGYNPEQRRVSWETLAAHGPGLYRTFVTNARAAVVARTLRECV

SEQ ID NO: 27687 - protein, 85 aa, unidentified
  REGION 1..85: note = Description of Unknown:hvTR_Q5Y0P7 target sequence
LRQEGFVEAVASADELLSWCKMCVHHGLPLRPQDPIIATAGAVLENLSTRLRPFLQCYFKARGVLPLDELCARRRLSDIREIASF

SEQ ID NO: 27688 - protein, 84 aa, unidentified
  REGION 1..84: note = Description of Unknown:hvTR_Q5Y0P7 target sequence
VFVTLARLANGAKHRTTEIEHAAVGVAPGEKMDFYVPGACMAGLIEILDTHRQECSSRTCELTASHIIAPLYVHGKYFYCNSLF

SEQ ID NO: 27689 - protein, 85 aa, unidentified
  REGION 1..85: note = Description of Unknown:hvTR_Q5Y0P7 target sequence
SSEPGSLGGRGDAESSSGRCSSSDDEEMESSGEEEGGGAARGAAAARAETPPRPDADARRGAPRAGAPATDVWAHLGRRRRRSEV

SEQ ID NO: 27690 - protein, 85 aa, unidentified
  REGION 1..85: note = Description of Unknown:hvTR_Q5Y0P7 target sequence
EGPDGGDARGDRRYDDGEAPSPRRRRRPRSAVALVKTFGPGAAAPPSPSSARGSRRRGRRGRGRRREGGRPRPTAPPGPGHNAAE

SEQ ID NO: 27691 - protein, 85 aa, unidentified
  REGION 1..85: note = Description of Unknown:hvTR_Q5Y0P7 target sequence
TGSHRDGRAAPPSLMALAVAPPDTPAEREGPGRGGRRGAAPPENIDQRVRAVLRSISERAAAERVSETFGRSAAAMHHPFGGTQF

SEQ ID NO: 27692 - protein, 85 aa, unidentified
  REGION 1..85: note = Description of Unknown:hvTR_Q5Y0P7 target sequence
AAPDSPWAPVLGSSVGGYNPEQRRVSWETLAAHGPGLYRTFVTNARAAVVARTLRECVLRQEGFVEAVASADELLSWCKMCVHHG

SEQ ID NO: 27693 - protein, 85 aa, unidentified
  REGION 1..85: note = Description of Unknown:hvTR_Q5Y0P7 target sequence
LPLRPQDPIIATAGAVLENLSTRLRPFLQCYFKARGVLPLDELCARRRLSDIREIASFVFVTLARLANGAKHRTTEIEHAAVGVA

SEQ ID NO: 27694 - protein, 85 aa, unidentified
  REGION 1..85: note = Description of Unknown:cds_NC_025351.1_cds_YP_009094081.1_1 target sequence
SDIFNETQSFRNYQSNLGRDGRASAATTTLTTKVRIFVPANNNPNLRWRLTLFLMDVVRSPASAESMKVGAGISLVSMYAEKPGA

SEQ ID NO: 27695 - protein, 85 aa, unidentified
  REGION 1..85: note = Description of Unknown:cds_NC_025351.1_cds_YP_009094081.1_1 target sequence
LVRALLNDPDVEAIIIDVYGFDEGIPIMERRGDKATDDMDSLRKIVKAAHDFSRGRSLFVDQRVQDIVMSDMGSFVNAITSIETQ

SEQ ID NO: 27696 - protein, 85 aa, unidentified
  REGION 1..85: note = Description of Unknown:cds_NC_025351.1_cds_YP_009094081.1_1 target sequence
IWILIAKAVTAPDTAEESEGRRWAKYVQQKRVNPLFLISPQWINDMRSLIAASLSLRKFMVELLMEAKKGRGTKGRIMEIVSDIG

SEQ ID NO: 27697 - protein, 85 aa, unidentified
  REGION 1..85: note = Description of Unknown:cds_NC_025351.1_cds_YP_009094081.1_1 target sequence
NYVEETGMAGFFATIKFGLETKFPALALNELQSDLNTMKSLMILYRSIGPKAPFMVLLEDSIQTKFAPGSYPLLWSFAMGVGTTI

SEQ ID NO: 27698 - protein, 85 aa, unidentified
  REGION 1..85: note = Description of Unknown:cds_NC_025351.1_cds_YP_009094081.1_1 target sequence
DRAMGALNINRSYLEPVYFRLGQQSAKHQAGNVDKEMAEKLGLTEDQIVHLSANVKDASQGRDDNQINIREGKFTNVVDDIQDHA

SEQ ID NO: 27699 - protein, 84 aa, unidentified
  REGION 1..84: note = Description of Unknown:cds_NC_025351.1_cds_YP_009094081.1_1 target sequence
QSSSEDYNPSKKSFSILTSITSTVDSADSRSAMNESMTTTSLLKLRQRLAEKKGDSKNSQDTPPKPPRAKDQPTDEVSFMDSNI

SEQ ID NO: 27700 - protein, 85 aa, unidentified
  REGION 1..85: note = Description of Unknown:cds_NC_025351.1_cds_YP_009094081.1_1 target sequence
TTLTTKVRIFVPANNNPNLRWRLTLFLMDVVRSPASAESMKVGAGISLVSMYAEKPGALVRALLNDPDVEAIIIDVYGFDEGIPI

SEQ ID NO: 27701 - protein, 85 aa, unidentified
  REGION 1..85: note = Description of Unknown:cds_NC_025351.1_cds_YP_009094081.1_1 target sequence
MERRGDKATDDMDSLRKIVKAAHDFSRGRSLFVDQRVQDIVMSDMGSFVNAITSIETQIWILIAKAVTAPDTAEESEGRRWAKYV

SEQ ID NO: 27702 - protein, 85 aa, unidentified
  REGION 1..85: note = Description of Unknown:cds_NC_025351.1_cds_YP_009094081.1_1 target sequence
QQKRVNPLFLISPQWINDMRSLIAASLSLRKFMVELLMEAKKGRGTKGRIMEIVSDIGNYVEETGMAGFFATIKFGLETKFPALA

SEQ ID NO: 27703 - protein, 85 aa, unidentified
  REGION 1..85: note = Description of Unknown:cds_NC_025351.1_cds_YP_009094081.1_1 target sequence
LNELQSDLNTMKSLMILYRSIGPKAPFMVLLEDSIQTKFAPGSYPLLWSFAMGVGTTIDRAMGALNINRSYLEPVYFRLGQQSAK

SEQ ID NO: 27704 - protein, 85 aa, unidentified
  REGION 1..85: note = Description of Unknown:cds_NC_025351.1_cds_YP_009094081.1_1 target sequence
HQAGNVDKEMAEKLGLTEDQIVHLSANVKDASQGRDDNQINIREGKFTNVVDDIQDHAQSSSEDYNPSKKSFSILTSITSTVDSA

SEQ ID NO: 27705 - protein, 85 aa, unidentified
  REGION 1..85: note = Description of Unknown:cds_NZ_WFIY01000004.1_cds_WP_155863421.1_1403 target sequence
DLDLDPISRIEGHLGVHVKVDNGEYVDAKVGVSMYRGFENLLKGKDLHLAPNIAGKICGVCGATHVLVSTEAIEMASGIYPSPEA

SEQ ID NO: 27706 - protein, 85 aa, unidentified
  REGION 1..85: note = Description of Unknown:cds_NZ_WFIY01000004.1_cds_WP_155863421.1_1403 target sequence
IKYRNLAYSLADLMYNNITVAFLFQAIDYSTEIVSKYTPNVYERAKNTSCEFKDVHGYPKISSILDNLYFGKEIYRSAFRLQTAF

SEQ ID NO: 27707 - protein, 85 aa, unidentified
  REGION 1..85: note = Description of Unknown:cds_NZ_WFIY01000004.1_cds_WP_155863421.1_1403 target sequence
RDLATAIWLRYPQPLSLKPGSITIRDPSIVEKVKKFMKEDKEIEKLFYIMADLREFFTEYKKIEDDYVTYGLLESDDYDADYESM

SEQ ID NO: 27708 - protein, 85 aa, unidentified
  REGION 1..85: note = Description of Unknown:cds_NZ_WFIY01000004.1_cds_WP_155863421.1_1403 target sequence
DMWGAKREFPPALIINGELVEDRLSKILLGVRVYVDNTPYDDWNKEYEKDELGNEIDKRHPWNKETRLKDKIIINNFVPTVKQYY

SEQ ID NO: 27709 - protein, 85 aa, unidentified
  REGION 1..85: note = Description of Unknown:cds_NZ_WFIY01000004.1_cds_WP_155863421.1_1403 target sequence
KGKEYMPTTGDIARLYAYRLKKGKIRALGYEWEPRGNTVMERTFARVFTVAYLKEYLQQIEVNNSDLNPRKGKKGYKFAVGAHDA

SEQ ID NO: 27710 - protein, 84 aa, unidentified
  REGION 1..84: note = Description of Unknown:cds_NZ_WFIY01000004.1_cds_WP_155863421.1_1403 target sequence
PRGANAHWLVSEGNKILRYQIITPSDRNFSPNRGPVERSIIGQKVTEIEISGLDALRIIRSFDPCSACAVHLEHKNNSIIKLIV

SEQ ID NO: 27711 - protein, 85 aa, unidentified
  REGION 1..85: note = Description of Unknown:cds_NZ_WFIY01000004.1_cds_WP_155863421.1_1403 target sequence
AKVGVSMYRGFENLLKGKDLHLAPNIAGKICGVCGATHVLVSTEAIEMASGIYPSPEAIKYRNLAYSLADLMYNNITVAFLFQAI

SEQ ID NO: 27712 - protein, 85 aa, unidentified
  REGION 1..85: note = Description of Unknown:cds_NZ_WFIY01000004.1_cds_WP_155863421.1_1403 target sequence
DYSTEIVSKYTPNVYERAKNTSCEFKDVHGYPKISSILDNLYFGKEIYRSAFRLQTAFRDLATAIWLRYPQPLSLKPGSITIRDP

SEQ ID NO: 27713 - protein, 85 aa, unidentified
  REGION 1..85: note = Description of Unknown:cds_NZ_WFIY01000004.1_cds_WP_155863421.1_1403 target sequence
SIVEKVKKFMKEDKEIEKLFYIMADLREFFTEYKKIEDDYVTYGLLESDDYDADYESMDMWGAKREFPPALIINGELVEDRLSKI

SEQ ID NO: 27714 - protein, 85 aa, unidentified
  REGION 1..85: note = Description of Unknown:cds_NZ_WFIY01000004.1_cds_WP_155863421.1_1403 target sequence
LLGVRVYVDNTPYDDWNKEYEKDELGNEIDKRHPWNKETRLKDKIIINNFVPTVKQYYKGKEYMPTTGDIARLYAYRLKKGKIRA

SEQ ID NO: 27715 - protein, 85 aa, unidentified
  REGION 1..85: note = Description of Unknown:cds_NZ_WFIY01000004.1_cds_WP_155863421.1_1403 target sequence
LGYEWEPRGNTVMERTFARVFTVAYLKEYLQQIEVNNSDLNPRKGKKGYKFAVGAHDAPRGANAHWLVSEGNKILRYQIITPSDR

SEQ ID NO: 27716 - protein, 85 aa, unidentified
  REGION 1..85: note = Description of Unknown:cds_NZ_WFIY01000004.1_cds_WP_155864466.1_1891 target sequence
PPFGKVLVANRGEIAVRVMKAIKEMGMKAVAVYSEADKYALHVKYADEAYYIGKAPALDSYLNIDHIIDAAEKAHVDAVHPGYGF

SEQ ID NO: 27717 - protein, 85 aa, unidentified
  REGION 1..85: note = Description of Unknown:cds_NZ_WFIY01000004.1_cds_WP_155864466.1_1891 target sequence
LSENADFAAAVEKAGMTFIGPSSDVMNKIKDKLDGKRVAKMAGVPIAPGSDGPVSSLDEALKIAEKIGYPIMVKAASGGGGVGIT

SEQ ID NO: 27718 - protein, 85 aa, unidentified
  REGION 1..85: note = Description of Unknown:cds_NZ_WFIY01000004.1_cds_WP_155864466.1_1891 target sequence
RVDNPDQLVEVWERNKRLAFQAFGKADLYIEKYAVNPRHIEFQLIGDKYGDYVVAWERECTIQRRNQKLIEEAPSPALKMEEREK

SEQ ID NO: 27719 - protein, 85 aa, unidentified
  REGION 1..85: note = Description of Unknown:cds_NZ_WFIY01000004.1_cds_WP_155864466.1_1891 target sequence
MFEPIIKFGQIIHYFTLGTFETAFSDVTREFYFLELNKRLQVEHPTTELIFRIDLVKLQILLAAGEHLPFTQEELNKRARGAAIE

SEQ ID NO: 27720 - protein, 85 aa, unidentified
  REGION 1..85: note = Description of Unknown:cds_NZ_WFIY01000004.1_cds_WP_155864466.1_1891 target sequence
YRINAEDPLNNFTGSSGYITYYKEPTGPGVRVDSGVEAGSWVPPFYDSLISKLIVYGENRAYAIQTGIRALNDYKIGGVKTTIEL

SEQ ID NO: 27721 - protein, 84 aa, unidentified
  REGION 1..84: note = Description of Unknown:cds_NZ_WFIY01000004.1_cds_WP_155864466.1_1891 target sequence
YKWIMMDPDFQEGRFSTSYISQKTEQFTKYLRQQEELKAALALEIQSRGLNRQGATSVTTSQRQPKSAWKTYGLVSQASSRVMW

SEQ ID NO: 27722 - protein, 85 aa, unidentified
  REGION 1..85: note = Description of Unknown:cds_NZ_WFIY01000004.1_cds_WP_155864466.1_1891 target sequence
KAVAVYSEADKYALHVKYADEAYYIGKAPALDSYLNIDHIIDAAEKAHVDAVHPGYGFLSENADFAAAVEKAGMTFIGPSSDVMN

SEQ ID NO: 27723 - protein, 85 aa, unidentified
  REGION 1..85: note = Description of Unknown:cds_NZ_WFIY01000004.1_cds_WP_155864466.1_1891 target sequence
KIKDKLDGKRVAKMAGVPIAPGSDGPVSSLDEALKIAEKIGYPIMVKAASGGGGVGITRVDNPDQLVEVWERNKRLAFQAFGKAD

SEQ ID NO: 27724 - protein, 85 aa, unidentified
  REGION 1..85: note = Description of Unknown:cds_NZ_WFIY01000004.1_cds_WP_155864466.1_1891 target sequence
LYIEKYAVNPRHIEFQLIGDKYGDYVVAWERECTIQRRNQKLIEEAPSPALKMEEREKMFEPIIKFGQIIHYFTLGTFETAFSDV

SEQ ID NO: 27725 - protein, 85 aa, unidentified
  REGION 1..85: note = Description of Unknown:cds_NZ_WFIY01000004.1_cds_WP_155864466.1_1891 target sequence
TREFYFLELNKRLQVEHPTTELIFRIDLVKLQILLAAGEHLPFTQEELNKRARGAAIEYRINAEDPLNNFTGSSGYITYYKEPTG

SEQ ID NO: 27726 - protein, 85 aa, unidentified
  REGION 1..85: note = Description of Unknown:cds_NZ_WFIY01000004.1_cds_WP_155864466.1_1891 target sequence
PGVRVDSGVEAGSWVPPFYDSLISKLIVYGENRAYAIQTGIRALNDYKIGGVKTTIELYKWIMMDPDFQEGRFSTSYISQKTEQF

SEQ ID NO: 27727 - protein, 85 aa, unidentified
  REGION 1..85: note = Description of Unknown:cds_NZ_WFIY01000004.1_cds_WP_205737138.1_1103 target sequence
SLVIISLLYLGIMLILAKLMEEAFSRLRLVPFVGPIFLGIILGQGVLNFIRVNEIISFITSLGIVFLLFLAGAEEIGLNEINTDK

SEQ ID NO: 27728 - protein, 85 aa, unidentified
  REGION 1..85: note = Description of Unknown:cds_NZ_WFIY01000004.1_cds_WP_205737138.1_1103 target sequence
SVLISSIIQLILPFTLIFLLLYFLEIPDAILLSIPLGMTSVGPLTRLLLDLGISKEKIGVVIFYEGTIVEITSVIIFAIISNFAK

SEQ ID NO: 27729 - protein, 85 aa, unidentified
  REGION 1..85: note = Description of Unknown:cds_NZ_WFIY01000004.1_cds_WP_205737138.1_1103 target sequence
NFIITILGILGIILGIFLLSPYIAKALEKIEIYINAREVEFASIISLILIISFISEAFSFNSAISALFLGFLLRDYFKDRKDLLD

SEQ ID NO: 27730 - protein, 85 aa, unidentified
  REGION 1..85: note = Description of Unknown:cds_NZ_WFIY01000004.1_cds_WP_205737138.1_1103 target sequence
KLHGFTYGFFEPLFFVSIGLYFTKLNFSILSIGIIITAVIIASKFLAGFISAILVKVPRMINALGTSTKGGIDASLLISALSLGL

SEQ ID NO: 27731 - protein, 85 aa, unidentified
  REGION 1..85: note = Description of Unknown:cds_NZ_WFIY01000004.1_cds_WP_205737138.1_1103 target sequence
INQIEYSFSALAISISALLVPLIFKAISGYKVKTRQRNKSLIENKISNILPSLKYVTASCEENLRSVIQKINELGVNSIIVCNEG

SEQ ID NO: 27732 - protein, 84 aa, unidentified
  REGION 1..84: note = Description of Unknown:cds_NZ_WFIY01000004.1_cds_WP_205737138.1_1103 target sequence
GKALGYISTEELLEIEPSKYEELRACDVELHEIITLYDEDKIKKLLDTFREKEVPVIGILNKNGELVGTVYERDLLRLLLTLKI

SEQ ID NO: 27733 - protein, 85 aa, unidentified
  REGION 1..85: note = Description of Unknown:cds_NZ_WFIY01000004.1_cds_WP_205737138.1_1103 target sequence
RLVPFVGPIFLGIILGQGVLNFIRVNEIISFITSLGIVFLLFLAGAEEIGLNEINTDKSVLISSIIQLILPFTLIFLLLYFLEIP

SEQ ID NO: 27734 - protein, 85 aa, unidentified
  REGION 1..85: note = Description of Unknown:cds_NZ_WFIY01000004.1_cds_WP_205737138.1_1103 target sequence
DAILLSIPLGMTSVGPLTRLLLDLGISKEKIGVVIFYEGTIVEITSVIIFAIISNFAKNFIITILGILGIILGIFLLSPYIAKAL

SEQ ID NO: 27735 - protein, 85 aa, unidentified
  REGION 1..85: note = Description of Unknown:cds_NZ_WFIY01000004.1_cds_WP_205737138.1_1103 target sequence
EKIEIYINAREVEFASIISLILIISFISEAFSFNSAISALFLGFLLRDYFKDRKDLLDKLHGFTYGFFEPLFFVSIGLYFTKLNF

SEQ ID NO: 27736 - protein, 85 aa, unidentified
  REGION 1..85: note = Description of Unknown:cds_NZ_WFIY01000004.1_cds_WP_205737138.1_1103 target sequence
SILSIGIIITAVIIASKFLAGFISAILVKVPRMINALGTSTKGGIDASLLISALSLGLINQIEYSFSALAISISALLVPLIFKAI

SEQ ID NO: 27737 - protein, 85 aa, unidentified
  REGION 1..85: note = Description of Unknown:cds_NZ_WFIY01000004.1_cds_WP_205737138.1_1103 target sequence
SGYKVKTRQRNKSLIENKISNILPSLKYVTASCEENLRSVIQKINELGVNSIIVCNEGKALGYISTEELLEIEPSKYEELRACDV

SEQ ID NO: 27738 - protein, 85 aa, unidentified
  REGION 1..85: note = Description of Unknown:cds_NZ_WFIY01000004.1_cds_WP_155863830.1_1723 target sequence
RKIPKTMSTQHPDNARVPEWAKSEVIEGDDEVVEAYYSYMNLGIHEVMWDAEGKDVDTHVVRKLLSLYTEYFKENIIGQDVFLTY

SEQ ID NO: 27739 - protein, 85 aa, unidentified
  REGION 1..85: note = Description of Unknown:cds_NZ_WFIY01000004.1_cds_WP_155863830.1_1723 target sequence
RLPNPRIEGAERKVFAETMESIPVAYDLAEKFYGKKVIPVFEVILPFTTNYQELVSVAKYYEKAVAGEEDIELFEGIYVRDLVGE

SEQ ID NO: 27740 - protein, 85 aa, unidentified
  REGION 1..85: note = Description of Unknown:cds_NZ_WFIY01000004.1_cds_WP_155863830.1_1723 target sequence
IYPKRVEVIPLIEDKDSLLRIREIVGGYYKVIKPSYMRVFIARSDPAMNYGMLTAVLLAKFAISALYKMKNELGIEIFPIIGVGS

SEQ ID NO: 27741 - protein, 85 aa, unidentified
  REGION 1..85: note = Description of Unknown:cds_NZ_WFIY01000004.1_cds_WP_155863830.1_1723 target sequence
LPFRGHLSPKNYENALKEYKGVYTFTIQSAFKYDYDEKEVKEAVQKINENKVEEPRVFDEHEEGLLKKIVENYVSSYQPIIEALA

SEQ ID NO: 27742 - protein, 85 aa, unidentified
  REGION 1..85: note = Description of Unknown:cds_NZ_WFIY01000004.1_cds_WP_155863830.1_1723 target sequence
PAINFIALNLPRRRARKLHISLFGYARSTGKVTLPRAISFVGAMYTLGIPPEIIGLSSLSKLSEEEWDFLKENYIMFNHDLNESG

SEQ ID NO: 27743 - protein, 84 aa, unidentified
  REGION 1..84: note = Description of Unknown:cds_NZ_WFIY01000004.1_cds_WP_155863830.1_1723 target sequence
GKYVNLDALEYLKEIWNIDNEVINKIKEDVKYAESIGIKIGGNDYESKKHVLLSSLALLACKEKKYDEMKEYIKEMALIRKSLG

SEQ ID NO: 27744 - protein, 85 aa, unidentified
  REGION 1..85: note = Description of Unknown:cds_NZ_WFIY01000004.1_cds_WP_155863830.1_1723 target sequence
GDDEVVEAYYSYMNLGIHEVMWDAEGKDVDTHVVRKLLSLYTEYFKENIIGQDVFLTYRLPNPRIEGAERKVFAETMESIPVAYD

SEQ ID NO: 27745 - protein, 85 aa, unidentified
  REGION 1..85: note = Description of Unknown:cds_NZ_WFIY01000004.1_cds_WP_155863830.1_1723 target sequence
LAEKFYGKKVIPVFEVILPFTTNYQELVSVAKYYEKAVAGEEDIELFEGIYVRDLVGEIYPKRVEVIPLIEDKDSLLRIREIVGG

SEQ ID NO: 27746 - protein, 85 aa, unidentified
  REGION 1..85: note = Description of Unknown:cds_NZ_WFIY01000004.1_cds_WP_155863830.1_1723 target sequence
YYKVIKPSYMRVFIARSDPAMNYGMLTAVLLAKFAISALYKMKNELGIEIFPIIGVGSLPFRGHLSPKNYENALKEYKGVYTFTI

SEQ ID NO: 27747 - protein, 85 aa, unidentified
  REGION 1..85: note = Description of Unknown:cds_NZ_WFIY01000004.1_cds_WP_155863830.1_1723 target sequence
QSAFKYDYDEKEVKEAVQKINENKVEEPRVFDEHEEGLLKKIVENYVSSYQPIIEALAPAINFIALNLPRRRARKLHISLFGYAR

SEQ ID NO: 27748 - protein, 85 aa, unidentified
  REGION 1..85: note = Description of Unknown:cds_NZ_WFIY01000004.1_cds_WP_155863830.1_1723 target sequence
STGKVTLPRAISFVGAMYTLGIPPEIIGLSSLSKLSEEEWDFLKENYIMFNHDLNESGKYVNLDALEYLKEIWNIDNEVINKIKE

SEQ ID NO: 27749 - protein, 85 aa, unidentified
  REGION 1..85: note = Description of Unknown:cds_NZ_WFIY01000004.1_cds_WP_152941419.1_430 target sequence
LSELLVDKSALLLGLSKYIEKGLINGNILIHRALLSELEKETRDGLISGEIALDEIEKIRKLSERYLFSVEIVGEPSSNVDNALR

SEQ ID NO: 27750 - protein, 85 aa, unidentified
  REGION 1..85: note = Description of Unknown:cds_NZ_WFIY01000004.1_cds_WP_152941419.1_430 target sequence
EYCSQRDCSIVTADEIQKQICSYLGIKVVYLQPFEGSLSIEKFFDENTMSVHLKEDTIPKAKKGKPGNWQFVNLSNTPMSADEIK

SEQ ID NO: 27751 - protein, 85 aa, unidentified
  REGION 1..85: note = Description of Unknown:cds_NZ_WFIY01000004.1_cds_WP_152941419.1_430 target sequence
SLVGELINEIKYVKNSFIEIERKGSTIVQLGNYRIVITRPPLSDGWEVTITRPVTKKSLEDYNLPEKLIERLKERAEGILIAGSP

SEQ ID NO: 27752 - protein, 85 aa, unidentified
  REGION 1..85: note = Description of Unknown:cds_NZ_WFIY01000004.1_cds_WP_152941419.1_430 target sequence
GMGKTTFAQALAEYYMKLGKVVKTIESPRDMHLPPDITQYSKNYAEIGELHDILLLSRPDYTVYDEMRNDDDFRLYIDLRLAGIG

SEQ ID NO: 27753 - protein, 85 aa, unidentified
  REGION 1..85: note = Description of Unknown:cds_NZ_WFIY01000004.1_cds_WP_152941419.1_430 target sequence
MIGVVHATTPIDAIHRFLNRVDLGTIPGILDTVIFISEGTVKKVYSLDMTVKVPLGLREADLARPVVEIKDFLTDQVEYEIYVFG

SEQ ID NO: 27754 - protein, 84 aa, unidentified
  REGION 1..84: note = Description of Unknown:cds_NZ_WFIY01000004.1_cds_WP_152941419.1_430 target sequence
GEQTMIVPVSKTKGGNSVENKIAKTVMDSIPGAEVKYENGEYVITIPKTEIGKFNRRLNSKLRKLEKKHGVRIRIRLGDSDEEV

SEQ ID NO: 27755 - protein, 85 aa, unidentified
  REGION 1..85: note = Description of Unknown:cds_NZ_WFIY01000004.1_cds_WP_152941419.1_430 target sequence
ILIHRALLSELEKETRDGLISGEIALDEIEKIRKLSERYLFSVEIVGEPSSNVDNALREYCSQRDCSIVTADEIQKQICSYLGIK

SEQ ID NO: 27756 - protein, 85 aa, unidentified
  REGION 1..85: note = Description of Unknown:cds_NZ_WFIY01000004.1_cds_WP_152941419.1_430 target sequence
VVYLQPFEGSLSIEKFFDENTMSVHLKEDTIPKAKKGKPGNWQFVNLSNTPMSADEIKSLVGELINEIKYVKNSFIEIERKGSTI

SEQ ID NO: 27757 - protein, 85 aa, unidentified
  REGION 1..85: note = Description of Unknown:cds_NZ_WFIY01000004.1_cds_WP_152941419.1_430 target sequence
VQLGNYRIVITRPPLSDGWEVTITRPVTKKSLEDYNLPEKLIERLKERAEGILIAGSPGMGKTTFAQALAEYYMKLGKVVKTIES

SEQ ID NO: 27758 - protein, 85 aa, unidentified
  REGION 1..85: note = Description of Unknown:cds_NZ_WFIY01000004.1_cds_WP_152941419.1_430 target sequence
PRDMHLPPDITQYSKNYAEIGELHDILLLSRPDYTVYDEMRNDDDFRLYIDLRLAGIGMIGVVHATTPIDAIHRFLNRVDLGTIP

SEQ ID NO: 27759 - protein, 85 aa, unidentified
  REGION 1..85: note = Description of Unknown:cds_NZ_WFIY01000004.1_cds_WP_152941419.1_430 target sequence
GILDTVIFISEGTVKKVYSLDMTVKVPLGLREADLARPVVEIKDFLTDQVEYEIYVFGEQTMIVPVSKTKGGNSVENKIAKTVMD

SEQ ID NO: 27760 - protein, 85 aa, unidentified
  REGION 1..85: note = Description of Unknown:cds_NZ_WFIY01000004.1_cds_WP_155863900.1_1806 target sequence
LYLEYIDLKVNYSWNNVKALLITGKLAYPIVEEVAKKIKNVKAEVKALNYPVASLMSVQYILENIKNENLKDFDIIILPGLVFGD

SEQ ID NO: 27761 - protein, 85 aa, unidentified
  REGION 1..85: note = Description of Unknown:cds_NZ_WFIY01000004.1_cds_WP_155863900.1_1806 target sequence
ARIIEEETGIKTVKGTENAWDLPLVFEALNQGIELSTVYPADKILGKIRAEKVLKTLEEIEEKQEVAFEQGIKIPLRPPPFRVFL

SEQ ID NO: 27762 - protein, 85 aa, unidentified
  REGION 1..85: note = Description of Unknown:cds_NZ_WFIY01000004.1_cds_WP_155863900.1_1806 target sequence
ELDPTWSIERILEEIERTREFVDVYVIGFPVGHNDLDDVRNKIRKAKDTGVIVGIDSDSPREMIEGIKEGADFVFNINEVNYEKL

SEQ ID NO: 27763 - protein, 85 aa, unidentified
  REGION 1..85: note = Description of Unknown:cds_NZ_WFIY01000004.1_cds_WP_155863900.1_1806 target sequence
EEVKNNAAFVIAPFNVENKSEIVIKLTKILSSKGFTKLILDAVLSPPLQGMVDSFIEYKRIREALPQYPILMGTLNVTELFDADS

SEQ ID NO: 27764 - protein, 85 aa, unidentified
  REGION 1..85: note = Description of Unknown:cds_NZ_WFIY01000004.1_cds_WP_155863900.1_1806 target sequence
HGMNALLTAIAGELGISCLLTMEKGKTKWSSWEIKEASKMVSISLIQKRVPKDLGIDLLILKDKVRYKEEEEELKDFITVEHNEP

SEQ ID NO: 27765 - protein, 84 aa, unidentified
  REGION 1..84: note = Description of Unknown:cds_NZ_WFIY01000004.1_cds_WP_155863900.1_1806 target sequence
PEMDSAGFAKISLVNGKIALTFYGKDKITLVGDEALSIGRELVKRVNISKQHAVYIGYELAKAEIARNLDKNYIQDIPLFKKIH

SEQ ID NO: 27766 - protein, 85 aa, unidentified
  REGION 1..85: note = Description of Unknown:cds_NZ_WFIY01000004.1_cds_WP_155863900.1_1806 target sequence
YPIVEEVAKKIKNVKAEVKALNYPVASLMSVQYILENIKNENLKDFDIIILPGLVFGDARIIEEETGIKTVKGTENAWDLPLVFE

SEQ ID NO: 27767 - protein, 85 aa, unidentified
  REGION 1..85: note = Description of Unknown:cds_NZ_WFIY01000004.1_cds_WP_155863900.1_1806 target sequence
ALNQGIELSTVYPADKILGKIRAEKVLKTLEEIEEKQEVAFEQGIKIPLRPPPFRVFLELDPTWSIERILEEIERTREFVDVYVI

SEQ ID NO: 27768 - protein, 85 aa, unidentified
  REGION 1..85: note = Description of Unknown:cds_NZ_WFIY01000004.1_cds_WP_155863900.1_1806 target sequence
GFPVGHNDLDDVRNKIRKAKDTGVIVGIDSDSPREMIEGIKEGADFVFNINEVNYEKLEEVKNNAAFVIAPFNVENKSEIVIKLT

SEQ ID NO: 27769 - protein, 85 aa, unidentified
  REGION 1..85: note = Description of Unknown:cds_NZ_WFIY01000004.1_cds_WP_155863900.1_1806 target sequence
KILSSKGFTKLILDAVLSPPLQGMVDSFIEYKRIREALPQYPILMGTLNVTELFDADSHGMNALLTAIAGELGISCLLTMEKGKT

SEQ ID NO: 27770 - protein, 85 aa, unidentified
  REGION 1..85: note = Description of Unknown:cds_NZ_WFIY01000004.1_cds_WP_155863900.1_1806 target sequence
KWSSWEIKEASKMVSISLIQKRVPKDLGIDLLILKDKVRYKEEEEELKDFITVEHNEPEMDSAGFAKISLVNGKIALTFYGKDKI

SEQ ID NO: 27771 - protein, 85 aa, unidentified
  REGION 1..85: note = Description of Unknown:hvTR_P35974 target sequence
AEEQARHVKNGLECIRALKAEPIGSLAIEEAMAAWSEISDNPGQERATCREEKAGSSGLSKPCLSAIGSTEGGAPRIRGQGPGES

SEQ ID NO: 27772 - protein, 85 aa, unidentified
  REGION 1..85: note = Description of Unknown:hvTR_P35974 target sequence
DDDAETLGIPPRNLQASSTGLQCYYVYDHSGEAVKGIQDADSIMVQSGLDGDSTLSGGDNESENSDVDIGEPDTEGYAITDRGSA

SEQ ID NO: 27773 - protein, 85 aa, unidentified
  REGION 1..85: note = Description of Unknown:hvTR_P35974 target sequence
PISMGFRASDVETAEGGEIHELLRLQSRGNNFPKLGKTLNVPPPPDPGRASTSGTPIKKGTERRLASFGTEIASLLTGGATQCAR

SEQ ID NO: 27774 - protein, 85 aa, unidentified
  REGION 1..85: note = Description of Unknown:hvTR_P35974 target sequence
KSPSEPSGPGAPAGNVPEYVSNAALIQEWTPESGTTISPRSQNNEEGGDYYDDELFSDVQDIKTALAKIHEDNQKIISKLESLLL

SEQ ID NO: 27775 - protein, 85 aa, unidentified
  REGION 1..85: note = Description of Unknown:hvTR_P35974 target sequence
LKGEVESIKKQINRQNISISTLEGHLSSIMIAIPGLGKDPNDPTADVEINPDLKPIIGRDSGRALAEVLKKPVASRQLQGMTNGR

SEQ ID NO: 27776 - protein, 84 aa, unidentified
  REGION 1..84: note = Description of Unknown:hvTR_P35974 target sequence
NGRTSSRGQLLKEFQPKPIGKKMSSAVGFVPDTGPASRSVIRSIIKSSRLEEDRKRYLMTLLDDIKGANDLAKFHQMLMKIIMK

SEQ ID NO: 27777 - protein, 85 aa, unidentified
  REGION 1..85: note = Description of Unknown:hvTR_P35974 target sequence
IEEAMAAWSEISDNPGQERATCREEKAGSSGLSKPCLSAIGSTEGGAPRIRGQGPGESDDDAETLGIPPRNLQASSTGLQCYYVY

SEQ ID NO: 27778 - protein, 85 aa, unidentified
  REGION 1..85: note = Description of Unknown:hvTR_P35974 target sequence
DHSGEAVKGIQDADSIMVQSGLDGDSTLSGGDNESENSDVDIGEPDTEGYAITDRGSAPISMGFRASDVETAEGGEIHELLRLQS

SEQ ID NO: 27779 - protein, 85 aa, unidentified
  REGION 1..85: note = Description of Unknown:hvTR_P35974 target sequence
RGNNFPKLGKTLNVPPPPDPGRASTSGTPIKKGTERRLASFGTEIASLLTGGATQCARKSPSEPSGPGAPAGNVPEYVSNAALIQ

SEQ ID NO: 27780 - protein, 85 aa, unidentified
  REGION 1..85: note = Description of Unknown:hvTR_P35974 target sequence
EWTPESGTTISPRSQNNEEGGDYYDDELFSDVQDIKTALAKIHEDNQKIISKLESLLLLKGEVESIKKQINRQNISISTLEGHLS

SEQ ID NO: 27781 - protein, 85 aa, unidentified
  REGION 1..85: note = Description of Unknown:hvTR_P35974 target sequence
SIMIAIPGLGKDPNDPTADVEINPDLKPIIGRDSGRALAEVLKKPVASRQLQGMTNGRTSSRGQLLKEFQPKPIGKKMSSAVGFV

SEQ ID NO: 27782 - protein, 85 aa, unidentified
  REGION 1..85: note = Description of Unknown:cds_NZ_WFIY01000004.1_cds_WP_155863647.1_1532 target sequence
KWEIVHKATSFIAEEMGVSLKKSALSPNIRERMDHSCAIVNEEGKIVAQAEHIPVHLGSFKIGVLNVLNYLEKEGIDLEEGDSII

SEQ ID NO: 27783 - protein, 85 aa, unidentified
  REGION 1..85: note = Description of Unknown:cds_NZ_WFIY01000004.1_cds_WP_155863647.1_1532 target sequence
FNDPYISGTHLNDVGVLSPIFYNGKLVGYAVNKAHHVDVGGPLPGSINPMAKTIYEEGVVIPPVKLTRKGSLNDEIIKIIKENFK

SEQ ID NO: 27784 - protein, 85 aa, unidentified
  REGION 1..85: note = Description of Unknown:cds_NZ_WFIY01000004.1_cds_WP_155863647.1_1532 target sequence
VPDFSLGDIKAQISANKLGEERVRQLFVKYGDIRQSWEESIDYSRRLALNVINTWKKGEYEAEDYLEWGSSLLPIKIKLRVEEKG

SEQ ID NO: 27785 - protein, 85 aa, unidentified
  REGION 1..85: note = Description of Unknown:cds_NZ_WFIY01000004.1_cds_WP_155863647.1_1532 target sequence
ITADFEGTHKQIEGPLNAVLGVTYSAVSFAIRSMVGEVPTNDGFYSLITVKAEEGSLVNPLKPAAVGGGNVETSQRIADVTFLAM

SEQ ID NO: 27786 - protein, 85 aa, unidentified
  REGION 1..85: note = Description of Unknown:cds_NZ_WFIY01000004.1_cds_WP_155863647.1_1532 target sequence
SKFLKVPAAASGTMMNIMMGGIYKGKYWSYYETVGGGSGGRPCKEGVSAVQNNMTNTLNTPIEIAERQYPILFIEYRIREGSGGN

SEQ ID NO: 27787 - protein, 84 aa, unidentified
  REGION 1..84: note = Description of Unknown:cds_NZ_WFIY01000004.1_cds_WP_155863647.1_1532 target sequence
GGNGLHKGGDGIIRGFKLLSKAKISILADRFKIGPWGLEGGERGKPGRVTINGKEYPSKFTEEVNEGDVIIVETPGGGGYGKAY

SEQ ID NO: 27788 - protein, 85 aa, unidentified
  REGION 1..85: note = Description of Unknown:cds_NZ_WFIY01000004.1_cds_WP_155863647.1_1532 target sequence
NIRERMDHSCAIVNEEGKIVAQAEHIPVHLGSFKIGVLNVLNYLEKEGIDLEEGDSIIFNDPYISGTHLNDVGVLSPIFYNGKLV

SEQ ID NO: 27789 - protein, 85 aa, unidentified
  REGION 1..85: note = Description of Unknown:cds_NZ_WFIY01000004.1_cds_WP_155863647.1_1532 target sequence
GYAVNKAHHVDVGGPLPGSINPMAKTIYEEGVVIPPVKLTRKGSLNDEIIKIIKENFKVPDFSLGDIKAQISANKLGEERVRQLF

SEQ ID NO: 27790 - protein, 85 aa, unidentified
  REGION 1..85: note = Description of Unknown:cds_NZ_WFIY01000004.1_cds_WP_155863647.1_1532 target sequence
VKYGDIRQSWEESIDYSRRLALNVINTWKKGEYEAEDYLEWGSSLLPIKIKLRVEEKGITADFEGTHKQIEGPLNAVLGVTYSAV

SEQ ID NO: 27791 - protein, 85 aa, unidentified
  REGION 1..85: note = Description of Unknown:cds_NZ_WFIY01000004.1_cds_WP_155863647.1_1532 target sequence
SFAIRSMVGEVPTNDGFYSLITVKAEEGSLVNPLKPAAVGGGNVETSQRIADVTFLAMSKFLKVPAAASGTMMNIMMGGIYKGKY

SEQ ID NO: 27792 - protein, 85 aa, unidentified
  REGION 1..85: note = Description of Unknown:cds_NZ_WFIY01000004.1_cds_WP_155863647.1_1532 target sequence
WSYYETVGGGSGGRPCKEGVSAVQNNMTNTLNTPIEIAERQYPILFIEYRIREGSGGNGLHKGGDGIIRGFKLLSKAKISILADR

SEQ ID NO: 27793 - protein, 85 aa, unidentified
  REGION 1..85: note = Description of Unknown:hvTR_Q8AZK7 target sequence
GDRSEGPGPTRPGPPGIGPEGPLGQLLRRHRSPSPTRGGQEPRRVRRRVLVQQEEEVVSGSPSGPRGDRSEGPGPTRPGPPGIGP

SEQ ID NO: 27794 - protein, 85 aa, unidentified
  REGION 1..85: note = Description of Unknown:hvTR_Q8AZK7 target sequence
EGPLGQLLRRHRSPSPTRGGQEPRRVRRRVLVQQEEEVVSGSPSGPRGDRSEGPGPTRPGPPGIGPEGPLGQLLRRHRSPSPTRG

SEQ ID NO: 27795 - protein, 85 aa, unidentified
  REGION 1..85: note = Description of Unknown:hvTR_Q8AZK7 target sequence
GQEPRRVRRRVLVQQEEEVVSGSPSGPRGDRSEGPGPTRPGPPGIGPEGPLGQLLRRHRSPSPTRGGQEPRRVRRRVLVQQEEEV

SEQ ID NO: 27796 - protein, 85 aa, unidentified
  REGION 1..85: note = Description of Unknown:hvTR_Q8AZK7 target sequence
VSGSPSGPRGDRSEGPGPTRPGPPGIGPEGPLGQLLRRHRSPSPTRGGQEPRRVRRRVLVQQEEEVVSGSPSGPRGDRSEGPGPT

SEQ ID NO: 27797 - protein, 85 aa, unidentified
  REGION 1..85: note = Description of Unknown:hvTR_Q8AZK7 target sequence
RPGPPGIGPEGPLGQLLRRHRSPSPTRGGQEPRRVRRRVLVQQEEEVVSGSPSGPRGDRSEGPGPTRPGPPGIGPEGPLGQLLRR

SEQ ID NO: 27798 - protein, 84 aa, unidentified
  REGION 1..84: note = Description of Unknown:hvTR_Q8AZK7 target sequence
LLRRHRSPSPTRGGQEPRRVRRRVLVQQEEEVVSGSPSGPLRPRPRPPARSLREWLLRIRDHFEPPTVTTQRQSVYIEEEEDED

SEQ ID NO: 27799 - protein, 85 aa, unidentified
  REGION 1..85: note = Description of Unknown:hvTR_Q8AZK7 target sequence
RRHRSPSPTRGGQEPRRVRRRVLVQQEEEVVSGSPSGPRGDRSEGPGPTRPGPPGIGPEGPLGQLLRRHRSPSPTRGGQEPRRVR

SEQ ID NO: 27800 - protein, 85 aa, unidentified
  REGION 1..85: note = Description of Unknown:hvTR_Q8AZK7 target sequence
RRVLVQQEEEVVSGSPSGPRGDRSEGPGPTRPGPPGIGPEGPLGQLLRRHRSPSPTRGGQEPRRVRRRVLVQQEEEVVSGSPSGP

SEQ ID NO: 27801 - protein, 85 aa, unidentified
  REGION 1..85: note = Description of Unknown:hvTR_Q8AZK7 target sequence
RGDRSEGPGPTRPGPPGIGPEGPLGQLLRRHRSPSPTRGGQEPRRVRRRVLVQQEEEVVSGSPSGPRGDRSEGPGPTRPGPPGIG

SEQ ID NO: 27802 - protein, 85 aa, unidentified
  REGION 1..85: note = Description of Unknown:hvTR_Q8AZK7 target sequence
PEGPLGQLLRRHRSPSPTRGGQEPRRVRRRVLVQQEEEVVSGSPSGPRGDRSEGPGPTRPGPPGIGPEGPLGQLLRRHRSPSPTR

SEQ ID NO: 27803 - protein, 85 aa, unidentified
  REGION 1..85: note = Description of Unknown:hvTR_Q8AZK7 target sequence
GGQEPRRVRRRVLVQQEEEVVSGSPSGPRGDRSEGPGPTRPGPPGIGPEGPLGQLLRRHRSPSPTRGGQEPRRVRRRVLVQQEEE

SEQ ID NO: 27804 - protein, 85 aa, unidentified
  REGION 1..85: note = Description of Unknown:cds_NZ_WFIY01000004.1_cds_WP_155864148.1_2102 target sequence
KLYPKSTVGVALMYTGGALAWLAVLGIAALWFRTILLSPHICCPSIGENVISPLYYFLVTMHGQIAMFIVVPDLTLAAATYGLYK

SEQ ID NO: 27805 - protein, 85 aa, unidentified
  REGION 1..85: note = Description of Unknown:cds_NZ_WFIY01000004.1_cds_WP_155864148.1_2102 target sequence
SKMSIQHFKLMTIAFWLINLPLIFEFAGGPTTGWYEYPPLALQTGTWNIYGSLPDANLMIGLAYFMQVLNTLGAIIGGLTLFFDG

SEQ ID NO: 27806 - protein, 85 aa, unidentified
  REGION 1..85: note = Description of Unknown:cds_NZ_WFIY01000004.1_cds_WP_155864148.1_2102 target sequence
YKTRPREGKIPIFAAYGMAFGGMFMPITIVALTAAALWYSLYFWFGVPVNPLTWVVLFWFYGHPVVYYVPFTVFGGLYTLIPQYA

SEQ ID NO: 27807 - protein, 85 aa, unidentified
  REGION 1..85: note = Description of Unknown:cds_NZ_WFIY01000004.1_cds_WP_155864148.1_2102 target sequence
GRPLYSERWARWNIALLFTFGMLAWVHHLQTWPLPVAIRAFITPTTLILAAGSGLTVLNLGLTIFTSKGYNWKDPIGMASLIALI

SEQ ID NO: 27808 - protein, 85 aa, unidentified
  REGION 1..85: note = Description of Unknown:cds_NZ_WFIY01000004.1_cds_WP_155864148.1_2102 target sequence
GFILAGLQALMLPENPLNVLVHNTYYIVGHFHMMIWTIIIVGFTAILLDMLKTKMGNADFSNLGRGLLTAGLTMWTASALALGYV

SEQ ID NO: 27809 - protein, 84 aa, unidentified
  REGION 1..84: note = Description of Unknown:cds_NZ_WFIY01000004.1_cds_WP_155864148.1_2102 target sequence
LGYVMSYAGYNGLIRRWDAYPVNFLPYMDAMTYLAVAMAASFVMFAIPILGTLLPIKTSAFWVSTESTSLPSTSLPGTMAKHDK

SEQ ID NO: 27810 - protein, 85 aa, unidentified
  REGION 1..85: note = Description of Unknown:cds_NZ_WFIY01000004.1_cds_WP_155864148.1_2102 target sequence
AALWFRTILLSPHICCPSIGENVISPLYYFLVTMHGQIAMFIVVPDLTLAAATYGLYKSKMSIQHFKLMTIAFWLINLPLIFEFA

SEQ ID NO: 27811 - protein, 85 aa, unidentified
  REGION 1..85: note = Description of Unknown:cds_NZ_WFIY01000004.1_cds_WP_155864148.1_2102 target sequence
GGPTTGWYEYPPLALQTGTWNIYGSLPDANLMIGLAYFMQVLNTLGAIIGGLTLFFDGYKTRPREGKIPIFAAYGMAFGGMFMPI

SEQ ID NO: 27812 - protein, 85 aa, unidentified
  REGION 1..85: note = Description of Unknown:cds_NZ_WFIY01000004.1_cds_WP_155864148.1_2102 target sequence
TIVALTAAALWYSLYFWFGVPVNPLTWVVLFWFYGHPVVYYVPFTVFGGLYTLIPQYAGRPLYSERWARWNIALLFTFGMLAWVH

SEQ ID NO: 27813 - protein, 85 aa, unidentified
  REGION 1..85: note = Description of Unknown:cds_NZ_WFIY01000004.1_cds_WP_155864148.1_2102 target sequence
HLQTWPLPVAIRAFITPTTLILAAGSGLTVLNLGLTIFTSKGYNWKDPIGMASLIALIGFILAGLQALMLPENPLNVLVHNTYYI

SEQ ID NO: 27814 - protein, 85 aa, unidentified
  REGION 1..85: note = Description of Unknown:cds_NZ_WFIY01000004.1_cds_WP_155864148.1_2102 target sequence
VGHFHMMIWTIIIVGFTAILLDMLKTKMGNADFSNLGRGLLTAGLTMWTASALALGYVMSYAGYNGLIRRWDAYPVNFLPYMDAM

SEQ ID NO: 27815 - protein, 85 aa, unidentified
  REGION 1..85: note = Description of Unknown:cds_NZ_WFIY01000004.1_cds_WP_155862404.1_141 target sequence
DTKYLKIISLGIFVIPFILMIITSASTTNVTQEIQSLNQSIAALANRTSDYPPASVPSWLSLGSNAWMLTAATFVGLQSVPGVAL

SEQ ID NO: 27816 - protein, 85 aa, unidentified
  REGION 1..85: note = Description of Unknown:cds_NZ_WFIY01000004.1_cds_WP_155862404.1_141 target sequence
YYAGLSKKKYAVNSALMVFYAFSIVLVVWMIAGYNFGFGKPTLVINGYGILGTPLPAWPGTYEASQTVYGPSNSMLNIPTSTYIF

SEQ ID NO: 27817 - protein, 85 aa, unidentified
  REGION 1..85: note = Description of Unknown:cds_NZ_WFIY01000004.1_cds_WP_155862404.1_141 target sequence
FQFVFAAITPVLLAGGVLERMNFKAWMVFVPFWSLLVYSPVAYWLFAGGWLNQLGAVDFSGGYVIHVDAGVGALAAALAVGPRLA

SEQ ID NO: 27818 - protein, 85 aa, unidentified
  REGION 1..85: note = Description of Unknown:cds_NZ_WFIY01000004.1_cds_WP_155862404.1_141 target sequence
SERKLEAHSLPLILAGAGLIWLGWDGFNGGDPGGATIDAAIAVLNTNIATAVSAVTWMLMDMAFFKKPTLVGATSGAITGLVAIT

SEQ ID NO: 27819 - protein, 85 aa, unidentified
  REGION 1..85: note = Description of Unknown:cds_NZ_WFIY01000004.1_cds_WP_155862404.1_141 target sequence
PAAGYVNGLYSIIIGIASGSIPWLALYKLEPKLKVDDTLGVFSTHGIAGIVGGLLTGVFADPNVTVYVDPTLRGALYGNWYQLGI

SEQ ID NO: 27820 - protein, 84 aa, unidentified
  REGION 1..84: note = Description of Unknown:cds_NZ_WFIY01000004.1_cds_WP_155862404.1_141 target sequence
YQLGIQAFAAAVVFVYDFAITFGLLKLIGLFIPLRAPPETLQIGDYAMHGEVAYSDLLATLPAEQKPAVEKVEEEPGKKKEEGK

SEQ ID NO: 27821 - protein, 85 aa, unidentified
  REGION 1..85: note = Description of Unknown:cds_NZ_WFIY01000004.1_cds_WP_155862404.1_141 target sequence
TNVTQEIQSLNQSIAALANRTSDYPPASVPSWLSLGSNAWMLTAATFVGLQSVPGVALYYAGLSKKKYAVNSALMVFYAFSIVLV

SEQ ID NO: 27822 - protein, 85 aa, unidentified
  REGION 1..85: note = Description of Unknown:cds_NZ_WFIY01000004.1_cds_WP_155862404.1_141 target sequence
VWMIAGYNFGFGKPTLVINGYGILGTPLPAWPGTYEASQTVYGPSNSMLNIPTSTYIFFQFVFAAITPVLLAGGVLERMNFKAWM

SEQ ID NO: 27823 - protein, 85 aa, unidentified
  REGION 1..85: note = Description of Unknown:cds_NZ_WFIY01000004.1_cds_WP_155862404.1_141 target sequence
VFVPFWSLLVYSPVAYWLFAGGWLNQLGAVDFSGGYVIHVDAGVGALAAALAVGPRLASERKLEAHSLPLILAGAGLIWLGWDGF

SEQ ID NO: 27824 - protein, 85 aa, unidentified
  REGION 1..85: note = Description of Unknown:cds_NZ_WFIY01000004.1_cds_WP_155862404.1_141 target sequence
NGGDPGGATIDAAIAVLNTNIATAVSAVTWMLMDMAFFKKPTLVGATSGAITGLVAITPAAGYVNGLYSIIIGIASGSIPWLALY

SEQ ID NO: 27825 - protein, 85 aa, unidentified
  REGION 1..85: note = Description of Unknown:cds_NZ_WFIY01000004.1_cds_WP_155862404.1_141 target sequence
KLEPKLKVDDTLGVFSTHGIAGIVGGLLTGVFADPNVTVYVDPTLRGALYGNWYQLGIQAFAAAVVFVYDFAITFGLLKLIGLFI

SEQ ID NO: 27826 - protein, 85 aa, unidentified
  REGION 1..85: note = Description of Unknown:cds_NZ_WFIY01000004.1_cds_WP_155863575.1_1495 target sequence
QFVRNSSGLVKNASLTDAMMLNIANMGAGLAIFIGISPYIVKGAVLWLASLITFLITLPLVFLYTFFIIEIHRTGGDYVWLSRKL

SEQ ID NO: 27827 - protein, 85 aa, unidentified
  REGION 1..85: note = Description of Unknown:cds_NZ_WFIY01000004.1_cds_WP_155863575.1_1495 target sequence
NGKIGSIMGIALAFNMPPYFALSAFFSVAAINTVLEVIGTLNHEKALLNLANTVFVNPYSPSITLTQEILIYILAAIAFAIIIGI

SEQ ID NO: 27828 - protein, 85 aa, unidentified
  REGION 1..85: note = Description of Unknown:cds_NZ_WFIY01000004.1_cds_WP_155863575.1_1495 target sequence
NILKPKWGFSLVTALGTLAILGTIVAMIELGINVQDFHSKISTFLTDFNLTPSTYTGPTFSLPATIYMIPYFASFAYIWLYAGPA

SEQ ID NO: 27829 - protein, 85 aa, unidentified
  REGION 1..85: note = Description of Unknown:cds_NZ_WFIY01000004.1_cds_WP_155863575.1_1495 target sequence
VSAEIKSERGIKYNIILGSLLTLFLITVPFYLLCIAGGYGFNFSLFPTETYNFWSVAIALAENQALQWFIGISLISWEFFVMAFG

SEQ ID NO: 27830 - protein, 85 aa, unidentified
  REGION 1..85: note = Description of Unknown:cds_NZ_WFIY01000004.1_cds_WP_155863575.1_1495 target sequence
VIVFARYVFAFSFDRLFPEIFSRLNKSSSPVYAHLLDFAVTLVFLAVPIISPEGVQALYSYTPLAIAYLFLVSLAGIKFSLEGKK

SEQ ID NO: 27831 - protein, 84 aa, unidentified
  REGION 1..84: note = Description of Unknown:cds_NZ_WFIY01000004.1_cds_WP_155863575.1_1495 target sequence
LEGKKRIGMLISSILSAAFMIFMGYEAFTNPYFGVISNGQPFWPGIAYVLSLIGLGIVIYVASKEYNLRRGINIDLNYKEIPPE

SEQ ID NO: 27832 - protein, 85 aa, unidentified
  REGION 1..85: note = Description of Unknown:cds_NZ_WFIY01000004.1_cds_WP_155863575.1_1495 target sequence
AGLAIFIGISPYIVKGAVLWLASLITFLITLPLVFLYTFFIIEIHRTGGDYVWLSRKLNGKIGSIMGIALAFNMPPYFALSAFFS

SEQ ID NO: 27833 - protein, 85 aa, unidentified
  REGION 1..85: note = Description of Unknown:cds_NZ_WFIY01000004.1_cds_WP_155863575.1_1495 target sequence
VAAINTVLEVIGTLNHEKALLNLANTVFVNPYSPSITLTQEILIYILAAIAFAIIIGINILKPKWGFSLVTALGTLAILGTIVAM

SEQ ID NO: 27834 - protein, 85 aa, unidentified
  REGION 1..85: note = Description of Unknown:cds_NZ_WFIY01000004.1_cds_WP_155863575.1_1495 target sequence
IELGINVQDFHSKISTFLTDFNLTPSTYTGPTFSLPATIYMIPYFASFAYIWLYAGPAVSAEIKSERGIKYNIILGSLLTLFLIT

SEQ ID NO: 27835 - protein, 85 aa, unidentified
  REGION 1..85: note = Description of Unknown:cds_NZ_WFIY01000004.1_cds_WP_155863575.1_1495 target sequence
VPFYLLCIAGGYGFNFSLFPTETYNFWSVAIALAENQALQWFIGISLISWEFFVMAFGVIVFARYVFAFSFDRLFPEIFSRLNKS

SEQ ID NO: 27836 - protein, 85 aa, unidentified
  REGION 1..85: note = Description of Unknown:cds_NZ_WFIY01000004.1_cds_WP_155863575.1_1495 target sequence
SSPVYAHLLDFAVTLVFLAVPIISPEGVQALYSYTPLAIAYLFLVSLAGIKFSLEGKKRIGMLISSILSAAFMIFMGYEAFTNPY

SEQ ID NO: 27837 - protein, 85 aa, unidentified
  REGION 1..85: note = Description of Unknown:hvTR_P16812.1 target sequence
SVITVHRFRPTADADGQSRGVGVAPRLHYNATSEPLRATTPSGATSVSARYDKNNVPRRRCFLRAVIVPVPLLPPRPPRRRPART

SEQ ID NO: 27838 - protein, 85 aa, unidentified
  REGION 1..85: note = Description of Unknown:hvTR_P16812.1 target sequence
DLYYYRPTAVVVMNFIITTRDFSNDDSVLRAAEMRDNVAGSISKAYKGTVRAEGKKKLLLKHLPVPPGGCSRRNSNLFVFCTERD

SEQ ID NO: 27839 - protein, 85 aa, unidentified
  REGION 1..85: note = Description of Unknown:hvTR_P16812.1 target sequence
YRKFHQGIAQLKRAPAELDPHEIQQVTASIRCRLQPSLREPPTPADELQTAVSRVCALFNQLVFTAQLRHYCEHQDKVVSYARDE

SEQ ID NO: 27840 - protein, 85 aa, unidentified
  REGION 1..85: note = Description of Unknown:hvTR_P16812.1 target sequence
LTKRCGEKSALGVEVHQLVALLPHERHRELCHVLIGLLHQTPHMWARSIRLIGHLRHYLQNSFLHLLMNSGLDIAQVFDGCYHSE

SEQ ID NO: 27841 - protein, 85 aa, unidentified
  REGION 1..85: note = Description of Unknown:hvTR_P16812.1 target sequence
AYRMLFQIGHTDSVSAALELSHGAAAGPPEADENNDEGEEDDDELRHSDPAPLHESKKPRNARRPRTRVPPHEQKPEENEEEEEE

SEQ ID NO: 27842 - protein, 84 aa, unidentified
  REGION 1..84: note = Description of Unknown:hvTR_P16812.1 target sequence
EEEEELFPSCKATAAFLRAEPSVSNDDGNGGERCDTLATALRHRADEEDGPLASQTAVRVAATPSPSVTPALTPVTSPITPLCI

SEQ ID NO: 27843 - protein, 85 aa, unidentified
  REGION 1..85: note = Description of Unknown:hvTR_P16812.1 target sequence
HYNATSEPLRATTPSGATSVSARYDKNNVPRRRCFLRAVIVPVPLLPPRPPRRRPARTDLYYYRPTAVVVMNFIITTRDFSNDDS

SEQ ID NO: 27844 - protein, 85 aa, unidentified
  REGION 1..85: note = Description of Unknown:hvTR_P16812.1 target sequence
VLRAAEMRDNVAGSISKAYKGTVRAEGKKKLLLKHLPVPPGGCSRRNSNLFVFCTERDYRKFHQGIAQLKRAPAELDPHEIQQVT

SEQ ID NO: 27845 - protein, 85 aa, unidentified
  REGION 1..85: note = Description of Unknown:hvTR_P16812.1 target sequence
ASIRCRLQPSLREPPTPADELQTAVSRVCALFNQLVFTAQLRHYCEHQDKVVSYARDELTKRCGEKSALGVEVHQLVALLPHERH

SEQ ID NO: 27846 - protein, 85 aa, unidentified
  REGION 1..85: note = Description of Unknown:hvTR_P16812.1 target sequence
RELCHVLIGLLHQTPHMWARSIRLIGHLRHYLQNSFLHLLMNSGLDIAQVFDGCYHSEAYRMLFQIGHTDSVSAALELSHGAAAG

SEQ ID NO: 27847 - protein, 85 aa, unidentified
  REGION 1..85: note = Description of Unknown:hvTR_P16812.1 target sequence
PPEADENNDEGEEDDDELRHSDPAPLHESKKPRNARRPRTRVPPHEQKPEENEEEEEELFPSCKATAAFLRAEPSVSNDDGNGGE

SEQ ID NO: 27848 - protein, 85 aa, unidentified
  REGION 1..85: note = Description of Unknown:cds_NZ_WFIY01000004.1_cds_WP_205737131.1_458 target sequence
PNYDFIITTDRCLMTNHHHKEFLGFLGTGPAIGIPEKVWKWLACPKVKVDEYGRPIEAPYGMRKIEAKLIDEGFNAAIIDPDYIG

SEQ ID NO: 27849 - protein, 85 aa, unidentified
  REGION 1..85: note = Description of Unknown:cds_NZ_WFIY01000004.1_cds_WP_205737131.1_458 target sequence
KYTPTAKALLFSHHDYFAFGPPSSTWWGITKKEPVNYKSFQELINRPEIAEGKKHGMKILVGGPSTWQWLWREDMIEKLGVDTLV

SEQ ID NO: 27850 - protein, 85 aa, unidentified
  REGION 1..85: note = Description of Unknown:cds_NZ_WFIY01000004.1_cds_WP_205737131.1_458 target sequence
DGEGEKVIVKLAQMILDGEELPKYVYVSGDDVPSIEDIPDIKGGSVNGLIEIMRGCARSCRFCSVTLRPTRYYPLDKIERELQVN

SEQ ID NO: 27851 - protein, 85 aa, unidentified
  REGION 1..85: note = Description of Unknown:cds_NZ_WFIY01000004.1_cds_WP_205737131.1_458 target sequence
VKAGIKHGVIHSDDVLFYGAVGILPKPEPLIKLHQLVKKYYKTIAWSHASLAAIRYSEEKYGLVSKLMEIVYQDGNQNYLGVEVG

SEQ ID NO: 27852 - protein, 85 aa, unidentified
  REGION 1..85: note = Description of Unknown:cds_NZ_WFIY01000004.1_cds_WP_205737131.1_458 target sequence
IETGSVRLAKEIMPAKSAPYKPESYPETVEEAFKIMHENHIIPAGTMIVGLPEETEDDVYRTIELVDNLRSYRSILVPMFFVPMG

SEQ ID NO: 27853 - protein, 84 aa, unidentified
  REGION 1..84: note = Description of Unknown:cds_NZ_WFIY01000004.1_cds_WP_205737131.1_458 target sequence
MFFVPMGYFKNKDWFTRVKLNDAHIELYKKVFWHDVYWAEDIINKFYMKGPLYYPVKLTLKLFLAIAKRKMKQVESMLESKLRK

SEQ ID NO: 27854 - protein, 85 aa, unidentified
  REGION 1..85: note = Description of Unknown:cds_NZ_WFIY01000004.1_cds_WP_205737131.1_458 target sequence
TGPAIGIPEKVWKWLACPKVKVDEYGRPIEAPYGMRKIEAKLIDEGFNAAIIDPDYIGKYTPTAKALLFSHHDYFAFGPPSSTWW

SEQ ID NO: 27855 - protein, 85 aa, unidentified
  REGION 1..85: note = Description of Unknown:cds_NZ_WFIY01000004.1_cds_WP_205737131.1_458 target sequence
GITKKEPVNYKSFQELINRPEIAEGKKHGMKILVGGPSTWQWLWREDMIEKLGVDTLVDGEGEKVIVKLAQMILDGEELPKYVYV

SEQ ID NO: 27856 - protein, 85 aa, unidentified
  REGION 1..85: note = Description of Unknown:cds_NZ_WFIY01000004.1_cds_WP_205737131.1_458 target sequence
SGDDVPSIEDIPDIKGGSVNGLIEIMRGCARSCRFCSVTLRPTRYYPLDKIERELQVNVKAGIKHGVIHSDDVLFYGAVGILPKP

SEQ ID NO: 27857 - protein, 85 aa, unidentified
  REGION 1..85: note = Description of Unknown:cds_NZ_WFIY01000004.1_cds_WP_205737131.1_458 target sequence
EPLIKLHQLVKKYYKTIAWSHASLAAIRYSEEKYGLVSKLMEIVYQDGNQNYLGVEVGIETGSVRLAKEIMPAKSAPYKPESYPE

SEQ ID NO: 27858 - protein, 85 aa, unidentified
  REGION 1..85: note = Description of Unknown:cds_NZ_WFIY01000004.1_cds_WP_205737131.1_458 target sequence
TVEEAFKIMHENHIIPAGTMIVGLPEETEDDVYRTIELVDNLRSYRSILVPMFFVPMGYFKNKDWFTRVKLNDAHIELYKKVFWH

SEQ ID NO: 27859 - protein, 85 aa, unidentified
  REGION 1..85: note = Description of Unknown:cds_NZ_WFIY01000004.1_cds_WP_155862514.1_274 target sequence
LWRQANWDEPLIYELSSNKKRKQGIIIPEENIDVKIDIPEKIKRKNDLEIPELSELEVVRHFIRLSQQNFGVDLGMMPLGSCTMK

SEQ ID NO: 27860 - protein, 85 aa, unidentified
  REGION 1..85: note = Description of Unknown:cds_NZ_WFIY01000004.1_cds_WP_155862514.1_274 target sequence
YNPKVEELTSRVVENYHPLQDEDTVQGILEMMYEMQKWLAEMTGMDECSLQIPAGAAGELAGVLMIKKYHKTKNRERDEMLVADT

SEQ ID NO: 27861 - protein, 85 aa, unidentified
  REGION 1..85: note = Description of Unknown:cds_NZ_WFIY01000004.1_cds_WP_155862514.1_274 target sequence
AHGTNPASAAMSGYKVIYIKSNQEGLVDIDILKEVVNSKTAGLMLTNPNTLGLFEENILEISKIIHSVDGVLYYDGANLNGILGI

SEQ ID NO: 27862 - protein, 85 aa, unidentified
  REGION 1..85: note = Description of Unknown:cds_NZ_WFIY01000004.1_cds_WP_155862514.1_274 target sequence
ARPGDMGFDIVHINLHKTFAVPHGGGGPGAGAICAKGELKEYLPYPIVDKEGGKYVLRTPVKTIGKIASFYGNIGNVIRAYVYIL

SEQ ID NO: 27863 - protein, 85 aa, unidentified
  REGION 1..85: note = Description of Unknown:cds_NZ_WFIY01000004.1_cds_WP_155862514.1_274 target sequence
GLGPQGVSQVGKMSTLATNYLISKLKDVKGLELLAPHRPRKHEVVFSAKPLLNDKGVTALDIAKALLDRGFYAPTIYFPGIIEEA

SEQ ID NO: 27864 - protein, 84 aa, unidentified
  REGION 1..84: note = Description of Unknown:cds_NZ_WFIY01000004.1_cds_WP_155862514.1_274 target sequence
PGIIEEALMIEPTETEPKETLDKFIETLKEILEESYKDPEKIRQTPQNTSVKRLDQVKANHPTSVTPSYRVLRLREKGVIKILK

SEQ ID NO: 27865 - protein, 85 aa, unidentified
  REGION 1..85: note = Description of Unknown:cds_NZ_WFIY01000004.1_cds_WP_155862514.1_274 target sequence
PEENIDVKIDIPEKIKRKNDLEIPELSELEVVRHFIRLSQQNFGVDLGMMPLGSCTMKYNPKVEELTSRVVENYHPLQDEDTVQG

SEQ ID NO: 27866 - protein, 85 aa, unidentified
  REGION 1..85: note = Description of Unknown:cds_NZ_WFIY01000004.1_cds_WP_155862514.1_274 target sequence
ILEMMYEMQKWLAEMTGMDECSLQIPAGAAGELAGVLMIKKYHKTKNRERDEMLVADTAHGTNPASAAMSGYKVIYIKSNQEGLV

SEQ ID NO: 27867 - protein, 85 aa, unidentified
  REGION 1..85: note = Description of Unknown:cds_NZ_WFIY01000004.1_cds_WP_155862514.1_274 target sequence
DIDILKEVVNSKTAGLMLTNPNTLGLFEENILEISKIIHSVDGVLYYDGANLNGILGIARPGDMGFDIVHINLHKTFAVPHGGGG

SEQ ID NO: 27868 - protein, 85 aa, unidentified
  REGION 1..85: note = Description of Unknown:cds_NZ_WFIY01000004.1_cds_WP_155862514.1_274 target sequence
PGAGAICAKGELKEYLPYPIVDKEGGKYVLRTPVKTIGKIASFYGNIGNVIRAYVYILGLGPQGVSQVGKMSTLATNYLISKLKD

SEQ ID NO: 27869 - protein, 85 aa, unidentified
  REGION 1..85: note = Description of Unknown:cds_NZ_WFIY01000004.1_cds_WP_155862514.1_274 target sequence
VKGLELLAPHRPRKHEVVFSAKPLLNDKGVTALDIAKALLDRGFYAPTIYFPGIIEEALMIEPTETEPKETLDKFIETLKEILEE

SEQ ID NO: 27870 - protein, 85 aa, unidentified
  REGION 1..85: note = Description of Unknown:cds_NZ_WFIY01000004.1_cds_WP_155863502.1_1455 target sequence
SKSFPSPFRSIDSLKLTFNHIKIWYTAGMGFFTDAYDLLIIGYILTTINDAYKYAGIVMPGFTSYLVGPDKDFWNGLLASIALWA

SEQ ID NO: 27871 - protein, 85 aa, unidentified
  REGION 1..85: note = Description of Unknown:cds_NZ_WFIY01000004.1_cds_WP_155863502.1_1455 target sequence
AIVGQLIFGYLGDYLGRKKIYGVEATLLTIGAILSALSPNLLWLIIFRFIMGVGIGGDYPISATIMSEYANVRDRGKLIALVFSN

SEQ ID NO: 27872 - protein, 85 aa, unidentified
  REGION 1..85: note = Description of Unknown:cds_NZ_WFIY01000004.1_cds_WP_155863502.1_1455 target sequence
QALGSLAAAAVGIISALVLPPCIAWRVMAGIGAIPAATVIYLRRKVPETPRYSLLANGNVEEAKKAASFLGGNIDAQQPVVAKRM

SEQ ID NO: 27873 - protein, 85 aa, unidentified
  REGION 1..85: note = Description of Unknown:cds_NZ_WFIY01000004.1_cds_WP_155863502.1_1455 target sequence
SANEFLSKYGTLLIGTTIPWFILDIAFYGTGIYSSPIIAPIFGSPFPKSSTVLPLSVFQGDLAYALFLGAVPYLVGFPGYFTAVA

SEQ ID NO: 27874 - protein, 85 aa, unidentified
  REGION 1..85: note = Description of Unknown:cds_NZ_WFIY01000004.1_cds_WP_155863502.1_1455 target sequence
LLDKLGRKTIQIQGFVMMAIIYLIVSAVMIVTYTSKGPKVSGFLIPAEAAFVLYALSFFFIDFGPNTTTFVIPAEVYPVRFRTTG

SEQ ID NO: 27875 - protein, 84 aa, unidentified
  REGION 1..84: note = Description of Unknown:cds_NZ_WFIY01000004.1_cds_WP_155863502.1_1455 target sequence
PVRFRTTGHGISAASGKLGAAITTYLFPTLLTEMGIKNLLVMLAVVSVIGALVTFFFVPETKNKSLEEASNEEIITTTITTDKQ

SEQ ID NO: 27876 - protein, 85 aa, unidentified
  REGION 1..85: note = Description of Unknown:cds_NZ_WFIY01000004.1_cds_WP_155863502.1_1455 target sequence
GMGFFTDAYDLLIIGYILTTINDAYKYAGIVMPGFTSYLVGPDKDFWNGLLASIALWAAIVGQLIFGYLGDYLGRKKIYGVEATL

SEQ ID NO: 27877 - protein, 85 aa, unidentified
  REGION 1..85: note = Description of Unknown:cds_NZ_WFIY01000004.1_cds_WP_155863502.1_1455 target sequence
LTIGAILSALSPNLLWLIIFRFIMGVGIGGDYPISATIMSEYANVRDRGKLIALVFSNQALGSLAAAAVGIISALVLPPCIAWRV

SEQ ID NO: 27878 - protein, 85 aa, unidentified
  REGION 1..85: note = Description of Unknown:cds_NZ_WFIY01000004.1_cds_WP_155863502.1_1455 target sequence
MAGIGAIPAATVIYLRRKVPETPRYSLLANGNVEEAKKAASFLGGNIDAQQPVVAKRMSANEFLSKYGTLLIGTTIPWFILDIAF

SEQ ID NO: 27879 - protein, 85 aa, unidentified
  REGION 1..85: note = Description of Unknown:cds_NZ_WFIY01000004.1_cds_WP_155863502.1_1455 target sequence
YGTGIYSSPIIAPIFGSPFPKSSTVLPLSVFQGDLAYALFLGAVPYLVGFPGYFTAVALLDKLGRKTIQIQGFVMMAIIYLIVSA

SEQ ID NO: 27880 - protein, 85 aa, unidentified
  REGION 1..85: note = Description of Unknown:cds_NZ_WFIY01000004.1_cds_WP_155863502.1_1455 target sequence
VMIVTYTSKGPKVSGFLIPAEAAFVLYALSFFFIDFGPNTTTFVIPAEVYPVRFRTTGHGISAASGKLGAAITTYLFPTLLTEMG

SEQ ID NO: 27881 - protein, 85 aa, unidentified
  REGION 1..85: note = Description of Unknown:cds_NZ_WFIY01000004.1_cds_WP_155862772.1_586 target sequence
VKYMNLIVLGILMFGLFVTLSLGSSTALTVYSPVPGEHIALINAKELILNISVYDPIAPVNSTVAVTISGPYDIRMTSAGVPIGQ

SEQ ID NO: 27882 - protein, 85 aa, unidentified
  REGION 1..85: note = Description of Unknown:cds_NZ_WFIY01000004.1_cds_WP_155862772.1_586 target sequence
LNASHMFTATNYAFPVTLFEANGTQLSAFIPGQYNVTISVAGSSETIPICVISPNEIEFLVYVYSNGVALPGATVSIYNVTSGQL

SEQ ID NO: 27883 - protein, 85 aa, unidentified
  REGION 1..85: note = Description of Unknown:cds_NZ_WFIY01000004.1_cds_WP_155862772.1_586 target sequence
LFTNTTNSQGLATLVVPYVYTMTNEYNVTAVKPGYQLVYEEVTVPADHITPVTVKLTTHPITFVLTPVCFQDMGIVEPAKPASLP

SEQ ID NO: 27884 - protein, 85 aa, unidentified
  REGION 1..85: note = Description of Unknown:cds_NZ_WFIY01000004.1_cds_WP_155862772.1_586 target sequence
GTPEPVYVASAFMGTDLSIIINATVSGIPVQGATISGSYLTISGKQFTSTAKYIGNGQYNLTIVLPNYTVPYTLEIYVTGKYQTN

SEQ ID NO: 27885 - protein, 85 aa, unidentified
  REGION 1..85: note = Description of Unknown:cds_NZ_WFIY01000004.1_cds_WP_155862772.1_586 target sequence
TYTFVTLVSVQPNYIAIIDNLQAEVNSLNNTVTMLYSEISLLKNNITYLNMTISMLKEEISEINSTLMTLSGELHTVNSTLTNEI

SEQ ID NO: 27886 - protein, 84 aa, unidentified
  REGION 1..84: note = Description of Unknown:cds_NZ_WFIY01000004.1_cds_WP_155862772.1_586 target sequence
VNSTLTNEIDNLTNELNSLSSKVSSLETQVSSVNSSLQNVNSEISSDNSKISGLTSLVYGGLILGIIALIIAIVAIVLVFRKVA

SEQ ID NO: 27887 - protein, 85 aa, unidentified
  REGION 1..85: note = Description of Unknown:cds_NZ_WFIY01000004.1_cds_WP_155862772.1_586 target sequence
LTVYSPVPGEHIALINAKELILNISVYDPIAPVNSTVAVTISGPYDIRMTSAGVPIGQLNASHMFTATNYAFPVTLFEANGTQLS

SEQ ID NO: 27888 - protein, 85 aa, unidentified
  REGION 1..85: note = Description of Unknown:cds_NZ_WFIY01000004.1_cds_WP_155862772.1_586 target sequence
AFIPGQYNVTISVAGSSETIPICVISPNEIEFLVYVYSNGVALPGATVSIYNVTSGQLLFTNTTNSQGLATLVVPYVYTMTNEYN

SEQ ID NO: 27889 - protein, 85 aa, unidentified
  REGION 1..85: note = Description of Unknown:cds_NZ_WFIY01000004.1_cds_WP_155862772.1_586 target sequence
VTAVKPGYQLVYEEVTVPADHITPVTVKLTTHPITFVLTPVCFQDMGIVEPAKPASLPGTPEPVYVASAFMGTDLSIIINATVSG

SEQ ID NO: 27890 - protein, 85 aa, unidentified
  REGION 1..85: note = Description of Unknown:cds_NZ_WFIY01000004.1_cds_WP_155862772.1_586 target sequence
IPVQGATISGSYLTISGKQFTSTAKYIGNGQYNLTIVLPNYTVPYTLEIYVTGKYQTNTYTFVTLVSVQPNYIAIIDNLQAEVNS

SEQ ID NO: 27891 - protein, 85 aa, unidentified
  REGION 1..85: note = Description of Unknown:cds_NZ_WFIY01000004.1_cds_WP_155862772.1_586 target sequence
LNNTVTMLYSEISLLKNNITYLNMTISMLKEEISEINSTLMTLSGELHTVNSTLTNEIDNLTNELNSLSSKVSSLETQVSSVNSS

SEQ ID NO: 27892 - protein, 85 aa, unidentified
  REGION 1..85: note = Description of Unknown:cds_NZ_WFIY01000004.1_cds_WP_155863828.1_1721 target sequence
ITTKRMKALEINSEALGVPTLLLMENAGRSVKDEIIKKLGNVKGKTVYVFVGHGGKGGDGLVAARHLAAEGAKVTVILLGENKHK

SEQ ID NO: 27893 - protein, 85 aa, unidentified
  REGION 1..85: note = Description of Unknown:cds_NZ_WFIY01000004.1_cds_WP_155863828.1_1721 target sequence
DALLNLAAVQEMDYSINIITVKDPEELKPVEGDILIDALLGTGFSGKPREPFRTAIKVFNQSKGFKVSIDVPSGVDSDTGETPGD

SEQ ID NO: 27894 - protein, 85 aa, unidentified
  REGION 1..85: note = Description of Unknown:cds_NZ_WFIY01000004.1_cds_WP_155863828.1_1721 target sequence
YVVPDLVVTFHDMKAGLSKFNFEIKVENIGIPPEAEIYVGPGDLMVNIKKREMKSRKGAGGRVLIIGGSKTFSGAPALAGLAALR

SEQ ID NO: 27895 - protein, 85 aa, unidentified
  REGION 1..85: note = Description of Unknown:cds_NZ_WFIY01000004.1_cds_WP_155863828.1_1721 target sequence
TGADLVYIASPGQTAYTIASYSPDLIAIKLNGENINPGNLEELKPWIEKSNAIVIGPGMGLAEETVEASKEIVTYLKEINKPVVI

SEQ ID NO: 27896 - protein, 85 aa, unidentified
  REGION 1..85: note = Description of Unknown:cds_NZ_WFIY01000004.1_cds_WP_155863828.1_1721 target sequence
DADALKSIKGFTLYPFAVITPHAGEFKIFFGYDVKDNPRERISQVIDSAKRANCVVLLKGYFDVISDGERFRLNKTGNPGMTVGG

SEQ ID NO: 27897 - protein, 84 aa, unidentified
  REGION 1..84: note = Description of Unknown:cds_NZ_WFIY01000004.1_cds_WP_155863828.1_1721 target sequence
TGNPGMTVGGTGDTLTGIVATLMAQGLSPFDSASIGAFINGLAGSLAYAKYGNHITPSDLVNEIPEVINNPLESFKKKPYVRVI

SEQ ID NO: 27898 - protein, 85 aa, unidentified
  REGION 1..85: note = Description of Unknown:cds_NZ_WFIY01000004.1_cds_WP_155863828.1_1721 target sequence
GRSVKDEIIKKLGNVKGKTVYVFVGHGGKGGDGLVAARHLAAEGAKVTVILLGENKHKDALLNLAAVQEMDYSINIITVKDPEEL

SEQ ID NO: 27899 - protein, 85 aa, unidentified
  REGION 1..85: note = Description of Unknown:cds_NZ_WFIY01000004.1_cds_WP_155863828.1_1721 target sequence
KPVEGDILIDALLGTGFSGKPREPFRTAIKVFNQSKGFKVSIDVPSGVDSDTGETPGDYVVPDLVVTFHDMKAGLSKFNFEIKVE

SEQ ID NO: 27900 - protein, 85 aa, unidentified
  REGION 1..85: note = Description of Unknown:cds_NZ_WFIY01000004.1_cds_WP_155863828.1_1721 target sequence
NIGIPPEAEIYVGPGDLMVNIKKREMKSRKGAGGRVLIIGGSKTFSGAPALAGLAALRTGADLVYIASPGQTAYTIASYSPDLIA

SEQ ID NO: 27901 - protein, 85 aa, unidentified
  REGION 1..85: note = Description of Unknown:cds_NZ_WFIY01000004.1_cds_WP_155863828.1_1721 target sequence
IKLNGENINPGNLEELKPWIEKSNAIVIGPGMGLAEETVEASKEIVTYLKEINKPVVIDADALKSIKGFTLYPFAVITPHAGEFK

SEQ ID NO: 27902 - protein, 85 aa, unidentified
  REGION 1..85: note = Description of Unknown:cds_NZ_WFIY01000004.1_cds_WP_155863828.1_1721 target sequence
IFFGYDVKDNPRERISQVIDSAKRANCVVLLKGYFDVISDGERFRLNKTGNPGMTVGGTGDTLTGIVATLMAQGLSPFDSASIGA

SEQ ID NO: 27903 - protein, 85 aa, unidentified
  REGION 1..85: note = Description of Unknown:cds_NZ_WFIY01000004.1_cds_WP_155862723.1_525 target sequence
LKTKKSPGFVRIGLFNLLVKTAVAPISFLFSFLVVRYLSSISIETFGVWQYIYVLITGYFTIPADLFSSITSRYSAEGKNVGGII

SEQ ID NO: 27904 - protein, 85 aa, unidentified
  REGION 1..85: note = Description of Unknown:cds_NZ_WFIY01000004.1_cds_WP_155862723.1_525 target sequence
IINAIAGSISSFAYFLLIPIFMHSAGYNQPIYFYTAILLIVLIYLNKISGSVAIGRSPRLTAISASGFQIVRLLSAIIMMFYLNL

SEQ ID NO: 27905 - protein, 85 aa, unidentified
  REGION 1..85: note = Description of Unknown:cds_NZ_WFIY01000004.1_cds_WP_155862723.1_525 target sequence
SINAVIFAYSLGYLVQIIFNLTFVNARLGIDFKVALSAVRKSIVFIMNYVQLMIEATLVWVVVFIVNSAIPVSYFESALIISNLV

SEQ ID NO: 27906 - protein, 85 aa, unidentified
  REGION 1..85: note = Description of Unknown:cds_NZ_WFIY01000004.1_cds_WP_155862723.1_525 target sequence
GWSQAATDGLILKLQESRDPKLIEIAIKFFFTTGGVFLLIIFVDGERLLYVLRPEYVSSIYALIVLSFSTFIRSAYNIFYRAIYM

SEQ ID NO: 27907 - protein, 85 aa, unidentified
  REGION 1..85: note = Description of Unknown:cds_NZ_WFIY01000004.1_cds_WP_155862723.1_525 target sequence
ADESLAVESKGEFRGYTAKLTTRNVIISVIGVSSSLFLIYLFKNGNIYKISPILAVIISLALLVNSLGMFFSSYSISKRIYGFNF

SEQ ID NO: 27908 - protein, 84 aa, unidentified
  REGION 1..84: note = Description of Unknown:cds_NZ_WFIY01000004.1_cds_WP_155862723.1_525 target sequence
YSISKRIYGFNFPVKEVIVSLVLSVISSLPFIGLSKVRAIEQLIIMLEMTSLALTLYIALSYIFNPYARGLLHSIFREIKNFKL

SEQ ID NO: 27909 - protein, 85 aa, unidentified
  REGION 1..85: note = Description of Unknown:cds_NZ_WFIY01000004.1_cds_WP_155862723.1_525 target sequence
FLFSFLVVRYLSSISIETFGVWQYIYVLITGYFTIPADLFSSITSRYSAEGKNVGGIIIINAIAGSISSFAYFLLIPIFMHSAGY

SEQ ID NO: 27910 - protein, 85 aa, unidentified
  REGION 1..85: note = Description of Unknown:cds_NZ_WFIY01000004.1_cds_WP_155862723.1_525 target sequence
NQPIYFYTAILLIVLIYLNKISGSVAIGRSPRLTAISASGFQIVRLLSAIIMMFYLNLSINAVIFAYSLGYLVQIIFNLTFVNAR

SEQ ID NO: 27911 - protein, 85 aa, unidentified
  REGION 1..85: note = Description of Unknown:cds_NZ_WFIY01000004.1_cds_WP_155862723.1_525 target sequence
LGIDFKVALSAVRKSIVFIMNYVQLMIEATLVWVVVFIVNSAIPVSYFESALIISNLVGWSQAATDGLILKLQESRDPKLIEIAI

SEQ ID NO: 27912 - protein, 85 aa, unidentified
  REGION 1..85: note = Description of Unknown:cds_NZ_WFIY01000004.1_cds_WP_155862723.1_525 target sequence
KFFFTTGGVFLLIIFVDGERLLYVLRPEYVSSIYALIVLSFSTFIRSAYNIFYRAIYMADESLAVESKGEFRGYTAKLTTRNVII

SEQ ID NO: 27913 - protein, 85 aa, unidentified
  REGION 1..85: note = Description of Unknown:cds_NZ_WFIY01000004.1_cds_WP_155862723.1_525 target sequence
SVIGVSSSLFLIYLFKNGNIYKISPILAVIISLALLVNSLGMFFSSYSISKRIYGFNFPVKEVIVSLVLSVISSLPFIGLSKVRA

SEQ ID NO: 27914 - protein, 85 aa, unidentified
  REGION 1..85: note = Description of Unknown:cds_NZ_WFIY01000004.1_cds_WP_205737152.1_2005 target sequence
VDKLRLEIILSALLFISSFFPHYCLYLLTIISFGILLRLKYFPPFVSSVLLLFSPFHALITLLAFPLLYIDRKFSISFSLATLFS

SEQ ID NO: 27915 - protein, 85 aa, unidentified
  REGION 1..85: note = Description of Unknown:cds_NZ_WFIY01000004.1_cds_WP_205737152.1_2005 target sequence
LLTQNYLILFLAGALEKRGLIISGIMFLILGALTMNEGYSNIAYFLLIAGVISAIIEGKISLRTSAVIYLSALAFYFKLSFFIPA

SEQ ID NO: 27916 - protein, 85 aa, unidentified
  REGION 1..85: note = Description of Unknown:cds_NZ_WFIY01000004.1_cds_WP_205737152.1_2005 target sequence
IVSFSPLVSLLFSPFYPYFAIISIKYVSKFRRLKFLNYVPSALSFINPFLSFSSLYDAIMKREIFLYILLPLFSSIYFIMKGEYI

SEQ ID NO: 27917 - protein, 85 aa, unidentified
  REGION 1..85: note = Description of Unknown:cds_NZ_WFIY01000004.1_cds_WP_205737152.1_2005 target sequence
QEEIISISIIFLFILNILRGYYKLIISFIDKYSQFIISLALDFIAYKFFLFNLEIFLIIVLSSIIISLPKLKTSIYPFFASIMSL

SEQ ID NO: 27918 - protein, 85 aa, unidentified
  REGION 1..85: note = Description of Unknown:cds_NZ_WFIY01000004.1_cds_WP_205737152.1_2005 target sequence
VNPFVGLSAVQKLSSLFVFIPLFFYIEMHYSVYSVIFYIIGAFLGMVFSVRDFNIGRNIVFVIFALLLTLDDVLLRNYIYIAFSL

SEQ ID NO: 27919 - protein, 84 aa, unidentified
  REGION 1..84: note = Description of Unknown:cds_NZ_WFIY01000004.1_cds_WP_205737152.1_2005 target sequence
LRNYIYIAFSLVSAVLILLFRRNLNISEILALYFASFPLSFISGFFILLKGKLNLCIILVTEAVISVLVLKIVSITSPILSQIL

SEQ ID NO: 27920 - protein, 85 aa, unidentified
  REGION 1..85: note = Description of Unknown:cds_NZ_WFIY01000004.1_cds_WP_205737152.1_2005 target sequence
LTIISFGILLRLKYFPPFVSSVLLLFSPFHALITLLAFPLLYIDRKFSISFSLATLFSLLTQNYLILFLAGALEKRGLIISGIMF

SEQ ID NO: 27921 - protein, 85 aa, unidentified
  REGION 1..85: note = Description of Unknown:cds_NZ_WFIY01000004.1_cds_WP_205737152.1_2005 target sequence
LILGALTMNEGYSNIAYFLLIAGVISAIIEGKISLRTSAVIYLSALAFYFKLSFFIPAIVSFSPLVSLLFSPFYPYFAIISIKYV

SEQ ID NO: 27922 - protein, 85 aa, unidentified
  REGION 1..85: note = Description of Unknown:cds_NZ_WFIY01000004.1_cds_WP_205737152.1_2005 target sequence
SKFRRLKFLNYVPSALSFINPFLSFSSLYDAIMKREIFLYILLPLFSSIYFIMKGEYIQEEIISISIIFLFILNILRGYYKLIIS

SEQ ID NO: 27923 - protein, 85 aa, unidentified
  REGION 1..85: note = Description of Unknown:cds_NZ_WFIY01000004.1_cds_WP_205737152.1_2005 target sequence
FIDKYSQFIISLALDFIAYKFFLFNLEIFLIIVLSSIIISLPKLKTSIYPFFASIMSLVNPFVGLSAVQKLSSLFVFIPLFFYIE

SEQ ID NO: 27924 - protein, 85 aa, unidentified
  REGION 1..85: note = Description of Unknown:cds_NZ_WFIY01000004.1_cds_WP_205737152.1_2005 target sequence
MHYSVYSVIFYIIGAFLGMVFSVRDFNIGRNIVFVIFALLLTLDDVLLRNYIYIAFSLVSAVLILLFRRNLNISEILALYFASFP

SEQ ID NO: 27925 - protein, 85 aa, unidentified
  REGION 1..85: note = Description of Unknown:cds_NZ_WFIY01000004.1_cds_WP_155863180.1_1111 target sequence
LRLLEFYTNNFRSLSDISIKDIGGLNAVVGFNGYGKTNFLSSIYLFIKNLNAGIEKRSFEDNNQEYLLLWQGYDTSKEITLGGKI

SEQ ID NO: 27926 - protein, 85 aa, unidentified
  REGION 1..85: note = Description of Unknown:cds_NZ_WFIY01000004.1_cds_WP_155863180.1_1111 target sequence
DFSEDEVSKAIGKRKRMEIEIINKLKYERKEVKWDLDTIRINDSIPTRDEIDDVRRLFELASQQVEYVPIFDQGYFDNIMKRIIE

SEQ ID NO: 27927 - protein, 85 aa, unidentified
  REGION 1..85: note = Description of Unknown:cds_NZ_WFIY01000004.1_cds_WP_155863180.1_1111 target sequence
ISRSPINLRKYWYDFVNLVSATIPEIKGLEIWEGGKLVLNVYNLPIYIDLAASGFQRVILMLFVIWLSGNKVLLLEEPEVNMHPT

SEQ ID NO: 27928 - protein, 85 aa, unidentified
  REGION 1..85: note = Description of Unknown:cds_NZ_WFIY01000004.1_cds_WP_155863180.1_1111 target sequence
LQYKVTKLLKGWTDNQMLQVFMTTHSPFIVSSDIDNYIILRRKEGGFSKAISVKPNEELKSMLSLLKVNLSDLLFSRYIILTGEN

SEQ ID NO: 27929 - protein, 85 aa, unidentified
  REGION 1..85: note = Description of Unknown:cds_NZ_WFIY01000004.1_cds_WP_155863180.1_1111 target sequence
AEPSAVYNWLKKMNIYPEYNGISIYAVKSDIELQSWLRLKEILNLDIIFFGLCDKLDQSIRDSCIPLSREIESYYTKTGILEALK

SEQ ID NO: 27930 - protein, 84 aa, unidentified
  REGION 1..84: note = Description of Unknown:cds_NZ_WFIY01000004.1_cds_WP_155863180.1_1111 target sequence
SYYTKTGILEALKLIGIYPDEKELRDLSKDDNLRWLINVMKKRGLDYYYLRSSISDIITRVDSVEIPKEVEVLGNKIKSLQTYN

SEQ ID NO: 27931 - protein, 85 aa, unidentified
  REGION 1..85: note = Description of Unknown:cds_NZ_WFIY01000004.1_cds_WP_155863180.1_1111 target sequence
VVGFNGYGKTNFLSSIYLFIKNLNAGIEKRSFEDNNQEYLLLWQGYDTSKEITLGGKIDFSEDEVSKAIGKRKRMEIEIINKLKY

SEQ ID NO: 27932 - protein, 85 aa, unidentified
  REGION 1..85: note = Description of Unknown:cds_NZ_WFIY01000004.1_cds_WP_155863180.1_1111 target sequence
ERKEVKWDLDTIRINDSIPTRDEIDDVRRLFELASQQVEYVPIFDQGYFDNIMKRIIEISRSPINLRKYWYDFVNLVSATIPEIK

SEQ ID NO: 27933 - protein, 85 aa, unidentified
  REGION 1..85: note = Description of Unknown:cds_NZ_WFIY01000004.1_cds_WP_155863180.1_1111 target sequence
GLEIWEGGKLVLNVYNLPIYIDLAASGFQRVILMLFVIWLSGNKVLLLEEPEVNMHPTLQYKVTKLLKGWTDNQMLQVFMTTHSP

SEQ ID NO: 27934 - protein, 85 aa, unidentified
  REGION 1..85: note = Description of Unknown:cds_NZ_WFIY01000004.1_cds_WP_155863180.1_1111 target sequence
FIVSSDIDNYIILRRKEGGFSKAISVKPNEELKSMLSLLKVNLSDLLFSRYIILTGENAEPSAVYNWLKKMNIYPEYNGISIYAV

SEQ ID NO: 27935 - protein, 85 aa, unidentified
  REGION 1..85: note = Description of Unknown:cds_NZ_WFIY01000004.1_cds_WP_155863180.1_1111 target sequence
KSDIELQSWLRLKEILNLDIIFFGLCDKLDQSIRDSCIPLSREIESYYTKTGILEALKLIGIYPDEKELRDLSKDDNLRWLINVM

SEQ ID NO: 27936 - protein, 85 aa, unidentified
  REGION 1..85: note = Description of Unknown:cds_NC_011500.2_cds_YP_002302219.1_5 target sequence
ATFKDACFHYRRLTALNRRLCNIGANSICMPVPDAKIKGWCLECCQIADLTHCYGCSLPHVCKWCVQNRRCFLDNEPHLLKLRTV

SEQ ID NO: 27937 - protein, 85 aa, unidentified
  REGION 1..85: note = Description of Unknown:cds_NC_011500.2_cds_YP_002302219.1_5 target sequence
KHPITKDKLQCIIDLYNIIFPINDKVIRKFERMIKQRKCRNQYKIEWYNHLLLPITLNAAAFKFDENNLYYVFGLYEKSVSDIYA

SEQ ID NO: 27938 - protein, 85 aa, unidentified
  REGION 1..85: note = Description of Unknown:cds_NC_011500.2_cds_YP_002302219.1_5 target sequence
PYRIVNFINEFDKLLLDDINFTRMSNLPIELRNHYAKKYFQLSRLPSSKLKQIYFSDFTKETVIFNTYTKTPGRSIYRNVTEFNW

SEQ ID NO: 27939 - protein, 85 aa, unidentified
  REGION 1..85: note = Description of Unknown:cds_NC_011500.2_cds_YP_002302219.1_5 target sequence
RDELELYSDLKNDKNKLIAAMMTSKYTRFYAHDNNFGRLKMTIFELGHHCQPNYVASNHPGNASDIQYCKWCNIKYFLSKIDWRI

SEQ ID NO: 27940 - protein, 85 aa, unidentified
  REGION 1..85: note = Description of Unknown:cds_NC_011500.2_cds_YP_002302219.1_5 target sequence
RDMYNLLMEFIKDCYKSNVNVGHCSSVENIYPLIKRLIWSLFTNHMDQTIEEVFNHMSPVSVEGTNVIMLILGLNISLYNEIKRT

SEQ ID NO: 27941 - protein, 84 aa, unidentified
  REGION 1..84: note = Description of Unknown:cds_NC_011500.2_cds_YP_002302219.1_5 target sequence
LGLNISLYNEIKRTLNVDSIPMVLNLNEFSSIVKSISSKWYNVDELDKLPMSIKSTEELIEMKNSGTLTEEFELLISNSEDDNE

SEQ ID NO: 27942 - protein, 85 aa, unidentified
  REGION 1..85: note = Description of Unknown:cds_NC_011500.2_cds_YP_002302219.1_5 target sequence
ICMPVPDAKIKGWCLECCQIADLTHCYGCSLPHVCKWCVQNRRCFLDNEPHLLKLRTVKHPITKDKLQCIIDLYNIIFPINDKVI

SEQ ID NO: 27943 - protein, 85 aa, unidentified
  REGION 1..85: note = Description of Unknown:cds_NC_011500.2_cds_YP_002302219.1_5 target sequence
RKFERMIKQRKCRNQYKIEWYNHLLLPITLNAAAFKFDENNLYYVFGLYEKSVSDIYAPYRIVNFINEFDKLLLDDINFTRMSNL

SEQ ID NO: 27944 - protein, 85 aa, unidentified
  REGION 1..85: note = Description of Unknown:cds_NC_011500.2_cds_YP_002302219.1_5 target sequence
PIELRNHYAKKYFQLSRLPSSKLKQIYFSDFTKETVIFNTYTKTPGRSIYRNVTEFNWRDELELYSDLKNDKNKLIAAMMTSKYT

SEQ ID NO: 27945 - protein, 85 aa, unidentified
  REGION 1..85: note = Description of Unknown:cds_NC_011500.2_cds_YP_002302219.1_5 target sequence
RFYAHDNNFGRLKMTIFELGHHCQPNYVASNHPGNASDIQYCKWCNIKYFLSKIDWRIRDMYNLLMEFIKDCYKSNVNVGHCSSV

SEQ ID NO: 27946 - protein, 85 aa, unidentified
  REGION 1..85: note = Description of Unknown:cds_NC_011500.2_cds_YP_002302219.1_5 target sequence
ENIYPLIKRLIWSLFTNHMDQTIEEVFNHMSPVSVEGTNVIMLILGLNISLYNEIKRTLNVDSIPMVLNLNEFSSIVKSISSKWY

SEQ ID NO: 27947 - protein, 85 aa, unidentified
  REGION 1..85: note = Description of Unknown:cds_NC_010495.1_cds_YP_001742052.1_15 target sequence
LHWLPPHGAISPCVIIRPQTNRGELTMIVKIGDKWVVKSKDGSQQFGEYDTEEAAKKRLAEVEAFKHMNNKLQVNVLTTINSASN

SEQ ID NO: 27948 - protein, 85 aa, unidentified
  REGION 1..85: note = Description of Unknown:cds_NC_010495.1_cds_YP_001742052.1_15 target sequence
ISEQIIDGDPHYVIKNVVPVVDDVVMNNGLYPGEEIRKSYHGLDGKPAPYNHPMIDGKYVSASMTRAANQFSVGAWIENSSHDGS

SEQ ID NO: 27949 - protein, 85 aa, unidentified
  REGION 1..85: note = Description of Unknown:cds_NC_010495.1_cds_YP_001742052.1_15 target sequence
KALVDLKVNKVIAECSEKGQELLGRIEELMNSAAGAEPIHVSTGLLLNREAAEGTSKGKKYTWIARNMEWDHLAILPPGVPGAGT

SEQ ID NO: 27950 - protein, 85 aa, unidentified
  REGION 1..85: note = Description of Unknown:cds_NC_010495.1_cds_YP_001742052.1_15 target sequence
PEDGVGIFATNGEQIERITVNLEDSTVPDKSANKINYKSWLHKAINYITNKSDLSFENISEQIRQILKAEVGEDAWPYIVAVYND

SEQ ID NO: 27951 - protein, 85 aa, unidentified
  REGION 1..85: note = Description of Unknown:cds_NC_010495.1_cds_YP_001742052.1_15 target sequence
RVGFEIKGQIFQQFYIVEDDVVKLVGERVKAVYKTELEPVKSTEGEISMTNEELQAVLAEALKPVQESLTAVNQKLTDIEAENVK

SEQ ID NO: 27952 - protein, 84 aa, unidentified
  REGION 1..84: note = Description of Unknown:cds_NC_010495.1_cds_YP_001742052.1_15 target sequence
NQKLTDIEAENVKLKEQLQANTEQEETAMRAAIIAELKLPESAVNALKGEALRETYALTSKPAALKGGFQPNHADDDFDMEAPE

SEQ ID NO: 27953 - protein, 85 aa, unidentified
  REGION 1..85: note = Description of Unknown:cds_NC_010495.1_cds_YP_001742052.1_15 target sequence
IVKIGDKWVVKSKDGSQQFGEYDTEEAAKKRLAEVEAFKHMNNKLQVNVLTTINSASNISEQIIDGDPHYVIKNVVPVVDDVVMN

SEQ ID NO: 27954 - protein, 85 aa, unidentified
  REGION 1..85: note = Description of Unknown:cds_NC_010495.1_cds_YP_001742052.1_15 target sequence
NGLYPGEEIRKSYHGLDGKPAPYNHPMIDGKYVSASMTRAANQFSVGAWIENSSHDGSKALVDLKVNKVIAECSEKGQELLGRIE

SEQ ID NO: 27955 - protein, 85 aa, unidentified
  REGION 1..85: note = Description of Unknown:cds_NC_010495.1_cds_YP_001742052.1_15 target sequence
ELMNSAAGAEPIHVSTGLLLNREAAEGTSKGKKYTWIARNMEWDHLAILPPGVPGAGTPEDGVGIFATNGEQIERITVNLEDSTV

SEQ ID NO: 27956 - protein, 85 aa, unidentified
  REGION 1..85: note = Description of Unknown:cds_NC_010495.1_cds_YP_001742052.1_15 target sequence
PDKSANKINYKSWLHKAINYITNKSDLSFENISEQIRQILKAEVGEDAWPYIVAVYNDRVGFEIKGQIFQQFYIVEDDVVKLVGE

SEQ ID NO: 27957 - protein, 85 aa, unidentified
  REGION 1..85: note = Description of Unknown:cds_NC_010495.1_cds_YP_001742052.1_15 target sequence
RVKAVYKTELEPVKSTEGEISMTNEELQAVLAEALKPVQESLTAVNQKLTDIEAENVKLKEQLQANTEQEETAMRAAIIAELKLP

SEQ ID NO: 27958 - protein, 85 aa, unidentified
  REGION 1..85: note = Description of Unknown:cds_NZ_WFIY01000004.1_cds_WP_155863322.1_1287 target sequence
FDYLKSFGIKFTGCYGLILTFNGTVGEIEKAFNTELNVYYYPYKNIYWYGLLGIANVGPFYYFSNNVTPSLPYNIGKYVLGIVGI

SEQ ID NO: 27959 - protein, 85 aa, unidentified
  REGION 1..85: note = Description of Unknown:cds_NZ_WFIY01000004.1_cds_WP_155863322.1_1287 target sequence
YSVDPKVYPIIKETWKVDLQGPSLVSSVLVTPSTIAQYFNFTELYSQGYTGKGEKVAIEGVPESFINESDIYVFWNQFYIVPRTG

SEQ ID NO: 27960 - protein, 85 aa, unidentified
  REGION 1..85: note = Description of Unknown:cds_NZ_WFIY01000004.1_cds_WP_155863322.1_1287 target sequence
GLNVVYLGNITSSGQSGENELDAEWAGVFSPASCIYVVFSNGYVGGQALVGNLLNYYYELYYMVNYIDPDVISISVALPESYLSA

SEQ ID NO: 27961 - protein, 85 aa, unidentified
  REGION 1..85: note = Description of Unknown:cds_NZ_WFIY01000004.1_cds_WP_155863322.1_1287 target sequence
YYPAMLYMIHNIMIQAVDEGISVLAAAGDWGFESDHPPPNFIIDVYNTIWYPESDPYVTAVGGIFVMANSTGGIVSISGWDYSTG

SEQ ID NO: 27962 - protein, 85 aa, unidentified
  REGION 1..85: note = Description of Unknown:cds_NZ_WFIY01000004.1_cds_WP_155863322.1_1287 target sequence
GISTAFPIQCYELASLIPFTPKIPQRTYPDIAFVSAGGYNIPEFGFGLPLIYQGQLYLWYGTSGAAPMTAAMVSLAEVRLGMLNS

SEQ ID NO: 27963 - protein, 84 aa, unidentified
  REGION 1..84: note = Description of Unknown:cds_NZ_WFIY01000004.1_cds_WP_155863322.1_1287 target sequence
AMVSLAEVRLGMLNSILYHISYCGEILTPKGCIKGLPAWIPITTGANPTPAHYGWNYVTGPGTYDAYAMVKDFLIYYDFITNES

SEQ ID NO: 27964 - protein, 85 aa, unidentified
  REGION 1..85: note = Description of Unknown:cds_NZ_WFIY01000004.1_cds_WP_155863322.1_1287 target sequence
IEKAFNTELNVYYYPYKNIYWYGLLGIANVGPFYYFSNNVTPSLPYNIGKYVLGIVGIYSVDPKVYPIIKETWKVDLQGPSLVSS

SEQ ID NO: 27965 - protein, 85 aa, unidentified
  REGION 1..85: note = Description of Unknown:cds_NZ_WFIY01000004.1_cds_WP_155863322.1_1287 target sequence
VLVTPSTIAQYFNFTELYSQGYTGKGEKVAIEGVPESFINESDIYVFWNQFYIVPRTGGLNVVYLGNITSSGQSGENELDAEWAG

SEQ ID NO: 27966 - protein, 85 aa, unidentified
  REGION 1..85: note = Description of Unknown:cds_NZ_WFIY01000004.1_cds_WP_155863322.1_1287 target sequence
VFSPASCIYVVFSNGYVGGQALVGNLLNYYYELYYMVNYIDPDVISISVALPESYLSAYYPAMLYMIHNIMIQAVDEGISVLAAA

SEQ ID NO: 27967 - protein, 85 aa, unidentified
  REGION 1..85: note = Description of Unknown:cds_NZ_WFIY01000004.1_cds_WP_155863322.1_1287 target sequence
GDWGFESDHPPPNFIIDVYNTIWYPESDPYVTAVGGIFVMANSTGGIVSISGWDYSTGGISTAFPIQCYELASLIPFTPKIPQRT

SEQ ID NO: 27968 - protein, 85 aa, unidentified
  REGION 1..85: note = Description of Unknown:cds_NZ_WFIY01000004.1_cds_WP_155863322.1_1287 target sequence
YPDIAFVSAGGYNIPEFGFGLPLIYQGQLYLWYGTSGAAPMTAAMVSLAEVRLGMLNSILYHISYCGEILTPKGCIKGLPAWIPI

SEQ ID NO: 27969 - protein, 85 aa, unidentified
  REGION 1..85: note = Description of Unknown:cds_NZ_WFIY01000004.1_cds_WP_155863343.1_1310 target sequence
EKIQELFINGEWVKPSSEEYLNKYNPSTGELYGKFAAASKEDVDRAIDAAYDAQKKWEKLTSVERSKYLYRLIDLIRQDRESLEN

SEQ ID NO: 27970 - protein, 85 aa, unidentified
  REGION 1..85: note = Description of Unknown:cds_NZ_WFIY01000004.1_cds_WP_155863343.1_1310 target sequence
LLMDEVGKPRKEAVQEVDGVLDQLQYYAEFARKITGDVVEGTKPERVIFQYKVPYGVVLAITPWNFPAAMIARKIGPALITGNTV

SEQ ID NO: 27971 - protein, 85 aa, unidentified
  REGION 1..85: note = Description of Unknown:cds_NZ_WFIY01000004.1_cds_WP_155863343.1_1310 target sequence
VLKPSSDTPFVAGWIVEKVRQAGFPPGTVNLITGKGSVIGDYMTSHKKISVITLTGESRTGVQVMKSASSIMAKLILELGGKAPF

SEQ ID NO: 27972 - protein, 85 aa, unidentified
  REGION 1..85: note = Description of Unknown:cds_NZ_WFIY01000004.1_cds_WP_155863343.1_1310 target sequence
IVWKDADLELAAKVLMWAKYWNAGQSCIAAERLYVHEDVYDKFLNLFIEKTKRLKIGEPRTSDMGPLINDQQLKKVSGFVEEAVN

SEQ ID NO: 27973 - protein, 85 aa, unidentified
  REGION 1..85: note = Description of Unknown:cds_NZ_WFIY01000004.1_cds_WP_155863343.1_1310 target sequence
QGAKILYGGGKPQLPERYSKGFFYMPTILTDVRQDMKIFREEIFGPVIGAMKVGDDFDEVIELANDSDYGLASYLFTKDVSLAMK

SEQ ID NO: 27974 - protein, 84 aa, unidentified
  REGION 1..84: note = Description of Unknown:cds_NZ_WFIY01000004.1_cds_WP_155863343.1_1310 target sequence
LASYLFTKDVSLAMKAAREIKFGELYINMPGPEATQGYHTGFRMSGQAGENSRYGVEEYVKVKNVYIDYSKDPTAGEVIPPYTD

SEQ ID NO: 27975 - protein, 85 aa, unidentified
  REGION 1..85: note = Description of Unknown:cds_NZ_WFIY01000004.1_cds_WP_155863343.1_1310 target sequence
TGELYGKFAAASKEDVDRAIDAAYDAQKKWEKLTSVERSKYLYRLIDLIRQDRESLENLLMDEVGKPRKEAVQEVDGVLDQLQYY

SEQ ID NO: 27976 - protein, 85 aa, unidentified
  REGION 1..85: note = Description of Unknown:cds_NZ_WFIY01000004.1_cds_WP_155863343.1_1310 target sequence
AEFARKITGDVVEGTKPERVIFQYKVPYGVVLAITPWNFPAAMIARKIGPALITGNTVVLKPSSDTPFVAGWIVEKVRQAGFPPG

SEQ ID NO: 27977 - protein, 85 aa, unidentified
  REGION 1..85: note = Description of Unknown:cds_NZ_WFIY01000004.1_cds_WP_155863343.1_1310 target sequence
TVNLITGKGSVIGDYMTSHKKISVITLTGESRTGVQVMKSASSIMAKLILELGGKAPFIVWKDADLELAAKVLMWAKYWNAGQSC

SEQ ID NO: 27978 - protein, 85 aa, unidentified
  REGION 1..85: note = Description of Unknown:cds_NZ_WFIY01000004.1_cds_WP_155863343.1_1310 target sequence
IAAERLYVHEDVYDKFLNLFIEKTKRLKIGEPRTSDMGPLINDQQLKKVSGFVEEAVNQGAKILYGGGKPQLPERYSKGFFYMPT

SEQ ID NO: 27979 - protein, 85 aa, unidentified
  REGION 1..85: note = Description of Unknown:cds_NZ_WFIY01000004.1_cds_WP_155863343.1_1310 target sequence
ILTDVRQDMKIFREEIFGPVIGAMKVGDDFDEVIELANDSDYGLASYLFTKDVSLAMKAAREIKFGELYINMPGPEATQGYHTGF

SEQ ID NO: 27980 - protein, 85 aa, unidentified
  REGION 1..85: note = Description of Unknown:cds_NZ_WFIY01000004.1_cds_933 target sequence
VKWDERRVKIVEELKAKGINPYPQKYEITHTILQIRQIGLNRQDKPHEPFMFDISTAGRVANIRRHGKASFVDIFDEGERLQLYL

SEQ ID NO: 27981 - protein, 85 aa, unidentified
  REGION 1..85: note = Description of Unknown:cds_NZ_WFIY01000004.1_cds_933 target sequence
RINELGDKYEEFFNYIGRGDIIGVKGDLFYTGKGELTLLVKSYELLAKALIEPPDWTKLSTEFRYAHRYVDFLYNDNARKAMEVR

SEQ ID NO: 27982 - protein, 85 aa, unidentified
  REGION 1..85: note = Description of Unknown:cds_NZ_WFIY01000004.1_cds_933 target sequence
FKTIKEIREYLNSKGFIEVETPILQPVYGGALAKPFKSKVNYLNEEWYLRISLELYLKRFIVGGFDKVFEIGKVFRNEDIDVTHN

SEQ ID NO: 27983 - protein, 85 aa, unidentified
  REGION 1..85: note = Description of Unknown:cds_NZ_WFIY01000004.1_cds_933 target sequence
PEFTELELYWAYADYNDIMKLTEDMLKTVASKVLGDTKLKYKVADKEYEIELSQFRKITMFDSLSEALGKDVEKMTDDELKELMK

SEQ ID NO: 27984 - protein, 85 aa, unidentified
  REGION 1..85: note = Description of Unknown:cds_NZ_WFIY01000004.1_cds_933 target sequence
KYGLIPRGNLYVRGLMIEKLFDKLVTPNLIQPTFITDYPIETTPLCKPHRSKPGLVERFELYIAGMELANAYTELNDPILQDKLF

SEQ ID NO: 27985 - protein, 84 aa, unidentified
  REGION 1..84: note = Description of Unknown:cds_NZ_WFIY01000004.1_cds_933 target sequence
AYTELNDPILQDKLFKEEQEMMKRGDEEAHPYDKDFVRALSYGMPPTGGLGIGIDRLVMLLTNNQSIKEVIPFPMLSAKLIEED

SEQ ID NO: 27986 - protein, 85 aa, unidentified
  REGION 1..85: note = Description of Unknown:cds_NZ_WFIY01000004.1_cds_933 target sequence
ITHTILQIRQIGLNRQDKPHEPFMFDISTAGRVANIRRHGKASFVDIFDEGERLQLYLRINELGDKYEEFFNYIGRGDIIGVKGD

SEQ ID NO: 27987 - protein, 85 aa, unidentified
  REGION 1..85: note = Description of Unknown:cds_NZ_WFIY01000004.1_cds_933 target sequence
LFYTGKGELTLLVKSYELLAKALIEPPDWTKLSTEFRYAHRYVDFLYNDNARKAMEVRFKTIKEIREYLNSKGFIEVETPILQPV

SEQ ID NO: 27988 - protein, 85 aa, unidentified
  REGION 1..85: note = Description of Unknown:cds_NZ_WFIY01000004.1_cds_933 target sequence
YGGALAKPFKSKVNYLNEEWYLRISLELYLKRFIVGGFDKVFEIGKVFRNEDIDVTHNPEFTELELYWAYADYNDIMKLTEDMLK

SEQ ID NO: 27989 - protein, 85 aa, unidentified
  REGION 1..85: note = Description of Unknown:cds_NZ_WFIY01000004.1_cds_933 target sequence
TVASKVLGDTKLKYKVADKEYEIELSQFRKITMFDSLSEALGKDVEKMTDDELKELMKKYGLIPRGNLYVRGLMIEKLFDKLVTP

SEQ ID NO: 27990 - protein, 85 aa, unidentified
  REGION 1..85: note = Description of Unknown:cds_NZ_WFIY01000004.1_cds_933 target sequence
NLIQPTFITDYPIETTPLCKPHRSKPGLVERFELYIAGMELANAYTELNDPILQDKLFKEEQEMMKRGDEEAHPYDKDFVRALSY

SEQ ID NO: 27991 - protein, 85 aa, unidentified
  REGION 1..85: note = Description of Unknown:cds_NZ_WFIY01000004.1_cds_WP_155862365.1_97 target sequence
LGDKIFEILREFTDRIYGNPGTTELSFIKKIPPGFKYYLALQDGIAVGMAEGYHLGSEKLAVVNLHAAPGLSNALGFLYTAYMDR

SEQ ID NO: 27992 - protein, 85 aa, unidentified
  REGION 1..85: note = Description of Unknown:cds_NZ_WFIY01000004.1_cds_WP_155862365.1_97 target sequence
IPMVIIGGQQTSSHLSDEPRLYGDLTTISKPVVKASFEARNADEGVKFLIRAIKTSLTPPYGPTFLSIPEDLEDKEVNITIRSFM

SEQ ID NO: 27993 - protein, 85 aa, unidentified
  REGION 1..85: note = Description of Unknown:cds_NZ_WFIY01000004.1_cds_WP_155862365.1_97 target sequence
HKVELCCREDEVKEIMNEINSFDKIAIVAGYEIDVFNAHDEMREFAEKINSPVFAEPFASRSPFETPHKLFAGDLPRRSSEINKV

SEQ ID NO: 27994 - protein, 85 aa, unidentified
  REGION 1..85: note = Description of Unknown:cds_NZ_WFIY01000004.1_cds_WP_155862365.1_97 target sequence
LEDFPAVLIIGGSVNNVLFPDDEVLKGKEVIEVTYDWIEASRRTWKTLVCNPKDFLKIAIKYAKPHVFSPVKVSPARNQKVEEIM

SEQ ID NO: 27995 - protein, 85 aa, unidentified
  REGION 1..85: note = Description of Unknown:cds_NZ_WFIY01000004.1_cds_WP_155862365.1_97 target sequence
KLLYPHLENYAVFDEAPSYREIIRSIIGYKRRLFFANRAGFIGWAIPASFGYSSTGGKALAIVGDGSFNYSFQALWSATKYGGIM

SEQ ID NO: 27996 - protein, 84 aa, unidentified
  REGION 1..84: note = Description of Unknown:cds_NZ_WFIY01000004.1_cds_WP_155862365.1_97 target sequence
NYSFQALWSATKYGGIMKVLVINNQGYNSLKSWGNTNAEILSPITSPWKLASSYGFEGKEFDDYKKGIEWLMEDNTQKLAELKV

SEQ ID NO: 27997 - protein, 85 aa, unidentified
  REGION 1..85: note = Description of Unknown:cds_NZ_WFIY01000004.1_cds_WP_155862365.1_97 target sequence
IKKIPPGFKYYLALQDGIAVGMAEGYHLGSEKLAVVNLHAAPGLSNALGFLYTAYMDRIPMVIIGGQQTSSHLSDEPRLYGDLTT

SEQ ID NO: 27998 - protein, 85 aa, unidentified
  REGION 1..85: note = Description of Unknown:cds_NZ_WFIY01000004.1_cds_WP_155862365.1_97 target sequence
ISKPVVKASFEARNADEGVKFLIRAIKTSLTPPYGPTFLSIPEDLEDKEVNITIRSFMHKVELCCREDEVKEIMNEINSFDKIAI

SEQ ID NO: 27999 - protein, 85 aa, unidentified
  REGION 1..85: note = Description of Unknown:cds_NZ_WFIY01000004.1_cds_WP_155862365.1_97 target sequence
VAGYEIDVFNAHDEMREFAEKINSPVFAEPFASRSPFETPHKLFAGDLPRRSSEINKVLEDFPAVLIIGGSVNNVLFPDDEVLKG

SEQ ID NO: 28000 - protein, 85 aa, unidentified
  REGION 1..85: note = Description of Unknown:cds_NZ_WFIY01000004.1_cds_WP_155862365.1_97 target sequence
KEVIEVTYDWIEASRRTWKTLVCNPKDFLKIAIKYAKPHVFSPVKVSPARNQKVEEIMKLLYPHLENYAVFDEAPSYREIIRSII

SEQ ID NO: 28001 - protein, 85 aa, unidentified
  REGION 1..85: note = Description of Unknown:cds_NZ_WFIY01000004.1_cds_WP_155862365.1_97 target sequence
GYKRRLFFANRAGFIGWAIPASFGYSSTGGKALAIVGDGSFNYSFQALWSATKYGGIMKVLVINNQGYNSLKSWGNTNAEILSPI

SEQ ID NO: 28002 - protein, 85 aa, unidentified
  REGION 1..85: note = Description of Unknown:cds_NZ_WFIY01000004.1_cds_WP_162309168.1_2029 target sequence
NYTKNNLTSGLLLIQGKYKVVVKSASQFNFHYYIIKLKCIQKALCPSFLFSTNESVLIPIPDLETPEALKAFVVSNVSLSFEIIQ

SEQ ID NO: 28003 - protein, 85 aa, unidentified
  REGION 1..85: note = Description of Unknown:cds_NZ_WFIY01000004.1_cds_WP_162309168.1_2029 target sequence
CNKIIKEYENTTIVFSKDSYVYFKNPKNIFIKICVYKDSLFYLSYKVIPCFINPYLKLSSLSSEGIASYGILNETKATKPYLIKT

SEQ ID NO: 28004 - protein, 85 aa, unidentified
  REGION 1..85: note = Description of Unknown:cds_NZ_WFIY01000004.1_cds_WP_162309168.1_2029 target sequence
TSILGKFNISCILAYNYSQNLVPPCSASLQLNVVLKTCRQVYWLQNVLEFLTLKHEFKLADGILNITCIDSTLSNSSITSPNGYV

SEQ ID NO: 28005 - protein, 85 aa, unidentified
  REGION 1..85: note = Description of Unknown:cds_NZ_WFIY01000004.1_cds_WP_162309168.1_2029 target sequence
TIVNQSGKIEYYYGNYYCQPELKYCLPLCGYLVTNVSLEKCGILISFAVIFVKNGSSMCYKEIVYDNVLIHGKFKFAYILVCGKH

SEQ ID NO: 28006 - protein, 85 aa, unidentified
  REGION 1..85: note = Description of Unknown:cds_NZ_WFIY01000004.1_cds_WP_162309168.1_2029 target sequence
YTPIGSYYDAELVFGGGGNGEITKFCKLNATLWLFYLKNNTYVTFPNYFTFGEDTAEKVVNIAVNFCKYYAKLTTGKENFRCYRA

SEQ ID NO: 28007 - protein, 84 aa, unidentified
  REGION 1..84: note = Description of Unknown:cds_NZ_WFIY01000004.1_cds_WP_162309168.1_2029 target sequence
YYAKLTTGKENFRCYRACSYSIDPFHYHNIPSSRNSSTKSITVITISSHVSNPNYYTYEILIPIALILSFILYYLLFRKNDSGS

SEQ ID NO: 28008 - protein, 85 aa, unidentified
  REGION 1..85: note = Description of Unknown:cds_NZ_WFIY01000004.1_cds_WP_162309168.1_2029 target sequence
FNFHYYIIKLKCIQKALCPSFLFSTNESVLIPIPDLETPEALKAFVVSNVSLSFEIIQCNKIIKEYENTTIVFSKDSYVYFKNPK

SEQ ID NO: 28009 - protein, 85 aa, unidentified
  REGION 1..85: note = Description of Unknown:cds_NZ_WFIY01000004.1_cds_WP_162309168.1_2029 target sequence
NIFIKICVYKDSLFYLSYKVIPCFINPYLKLSSLSSEGIASYGILNETKATKPYLIKTTSILGKFNISCILAYNYSQNLVPPCSA

SEQ ID NO: 28010 - protein, 85 aa, unidentified
  REGION 1..85: note = Description of Unknown:cds_NZ_WFIY01000004.1_cds_WP_162309168.1_2029 target sequence
SLQLNVVLKTCRQVYWLQNVLEFLTLKHEFKLADGILNITCIDSTLSNSSITSPNGYVTIVNQSGKIEYYYGNYYCQPELKYCLP

SEQ ID NO: 28011 - protein, 85 aa, unidentified
  REGION 1..85: note = Description of Unknown:cds_NZ_WFIY01000004.1_cds_WP_162309168.1_2029 target sequence
LCGYLVTNVSLEKCGILISFAVIFVKNGSSMCYKEIVYDNVLIHGKFKFAYILVCGKHYTPIGSYYDAELVFGGGGNGEITKFCK

SEQ ID NO: 28012 - protein, 85 aa, unidentified
  REGION 1..85: note = Description of Unknown:cds_NZ_WFIY01000004.1_cds_WP_162309168.1_2029 target sequence
LNATLWLFYLKNNTYVTFPNYFTFGEDTAEKVVNIAVNFCKYYAKLTTGKENFRCYRACSYSIDPFHYHNIPSSRNSSTKSITVI

SEQ ID NO: 28013 - protein, 85 aa, unidentified
  REGION 1..85: note = Description of Unknown:cds_NZ_WFIY01000004.1_cds_WP_155862944.1_802 target sequence
IGDFEVKEEDLAGRIGKLETSHGILETPAFFPVVNVLKKEISIKDIMAVGFNSIITNAYILKKNNIVKQDIHKELDFNSIIMTDS

SEQ ID NO: 28014 - protein, 85 aa, unidentified
  REGION 1..85: note = Description of Unknown:cds_NZ_WFIY01000004.1_cds_WP_155862944.1_802 target sequence
GAYQILEYGNIEANNREIVEYQNQIKPDIAVILDVPTGKLEDREEAKMTVDETLRRAKDVESIINTENIIWTHPIQGGRFLDLLQ

SEQ ID NO: 28015 - protein, 85 aa, unidentified
  REGION 1..85: note = Description of Unknown:cds_NZ_WFIY01000004.1_cds_WP_155862944.1_802 target sequence
YSAVEANKREKYKLLALGSPTVLMEKYDYDTLIDMIFTVRSSISRGKPLHLFGGGLPHLIPFAVALGVDSFDSASYILYARDNRY

SEQ ID NO: 28016 - protein, 85 aa, unidentified
  REGION 1..85: note = Description of Unknown:cds_NZ_WFIY01000004.1_cds_WP_155862944.1_802 target sequence
ITRSRTLKLEEIDSFPCSCPVCSRYTPQELLEMDENERTRLLAIHNLYKILEEIRETKIAIKEGRLFEYLQEKAFSHPSVYSAFK

SEQ ID NO: 28017 - protein, 85 aa, unidentified
  REGION 1..85: note = Description of Unknown:cds_NZ_WFIY01000004.1_cds_WP_155862944.1_802 target sequence
RLLKYAEYLEKYDPRVKGEIKGLFLYDENSIKRPEIIRHYRYLDLIKPMHEKAIVICGDKFAQPFILDPFILKIVNEKYMEADIY

SEQ ID NO: 28018 - protein, 84 aa, unidentified
  REGION 1..84: note = Description of Unknown:cds_NZ_WFIY01000004.1_cds_WP_155862944.1_802 target sequence
DPFILKIVNEKYMEADIYIAYPFYGLIPVLVSESYPLSQFEIPKSLSESVIRISSDKANSILKAKYKKVELIECENSKLHIMPI

SEQ ID NO: 28019 - protein, 85 aa, unidentified
  REGION 1..85: note = Description of Unknown:cds_NZ_WFIY01000004.1_cds_WP_155862944.1_802 target sequence
PAFFPVVNVLKKEISIKDIMAVGFNSIITNAYILKKNNIVKQDIHKELDFNSIIMTDSGAYQILEYGNIEANNREIVEYQNQIKP

SEQ ID NO: 28020 - protein, 85 aa, unidentified
  REGION 1..85: note = Description of Unknown:cds_NZ_WFIY01000004.1_cds_WP_155862944.1_802 target sequence
DIAVILDVPTGKLEDREEAKMTVDETLRRAKDVESIINTENIIWTHPIQGGRFLDLLQYSAVEANKREKYKLLALGSPTVLMEKY

SEQ ID NO: 28021 - protein, 85 aa, unidentified
  REGION 1..85: note = Description of Unknown:cds_NZ_WFIY01000004.1_cds_WP_155862944.1_802 target sequence
DYDTLIDMIFTVRSSISRGKPLHLFGGGLPHLIPFAVALGVDSFDSASYILYARDNRYITRSRTLKLEEIDSFPCSCPVCSRYTP

SEQ ID NO: 28022 - protein, 85 aa, unidentified
  REGION 1..85: note = Description of Unknown:cds_NZ_WFIY01000004.1_cds_WP_155862944.1_802 target sequence
QELLEMDENERTRLLAIHNLYKILEEIRETKIAIKEGRLFEYLQEKAFSHPSVYSAFKRLLKYAEYLEKYDPRVKGEIKGLFLYD

SEQ ID NO: 28023 - protein, 85 aa, unidentified
  REGION 1..85: note = Description of Unknown:cds_NZ_WFIY01000004.1_cds_WP_155862944.1_802 target sequence
ENSIKRPEIIRHYRYLDLIKPMHEKAIVICGDKFAQPFILDPFILKIVNEKYMEADIYIAYPFYGLIPVLVSESYPLSQFEIPKS

SEQ ID NO: 28024 - protein, 85 aa, unidentified
  REGION 1..85: note = Description of Unknown:cds_NZ_WFIY01000004.1_cds_WP_155863655.1_1536 target sequence
IFEVKPRNRYFEILAKGREGVVVFPTYVPGSYVIRELERNIVEIEGIRISKNRFYVKDNFRYLIYAVSKDQREAISTLDYIFINP

SEQ ID NO: 28025 - protein, 85 aa, unidentified
  REGION 1..85: note = Description of Unknown:cds_NZ_WFIY01000004.1_cds_WP_155863655.1_1536 target sequence
PAVFPFQEINEEYCVKLDLPPNWKISTSLEKKDGMYCADNYDEFADSPIEASPYLKVLKIDDKHVVSTIDDLDVEMIRRIVSEAD

SEQ ID NO: 28026 - protein, 85 aa, unidentified
  REGION 1..85: note = Description of Unknown:cds_NZ_WFIY01000004.1_cds_WP_155863655.1_1536 target sequence
KILGDEDNYIFHFRRSDKELGGIEHSNSSAIVVSWDREKLATLFAHEYFHRWNVKRLIPADLKHNYEKEVYTSLLWFAEGFTDYM

SEQ ID NO: 28027 - protein, 85 aa, unidentified
  REGION 1..85: note = Description of Unknown:cds_NZ_WFIY01000004.1_cds_WP_155863655.1_1536 target sequence
AVIISLRAGVIDRKDALKYVANSLSKLTFPGAKRTSLAESSFTTWIKYYRQDENFLNSSISYYDGGLALALYVDLEMSKKGKRID

SEQ ID NO: 28028 - protein, 85 aa, unidentified
  REGION 1..85: note = Description of Unknown:cds_NZ_WFIY01000004.1_cds_WP_155863655.1_1536 target sequence
DLFKEIYQEKRIYSFDDLNRVLKGKYEIDIEDLVYGPAVKILEQLKDDAYIEFIDRGKPYYGIMLKDKTITYVEDNSPADLAGLI

SEQ ID NO: 28029 - protein, 84 aa, unidentified
  REGION 1..84: note = Description of Unknown:cds_NZ_WFIY01000004.1_cds_WP_155863655.1_1536 target sequence
KTITYVEDNSPADLAGLIPGDQIIGFNGKSKLEVKDSTKLTIVREGRIKEVIVGTSPNPGHKIKVKIGRLEFEKEEGISDIEII

SEQ ID NO: 28030 - protein, 85 aa, unidentified
  REGION 1..85: note = Description of Unknown:cds_NZ_WFIY01000004.1_cds_WP_155863655.1_1536 target sequence
VPGSYVIRELERNIVEIEGIRISKNRFYVKDNFRYLIYAVSKDQREAISTLDYIFINPPAVFPFQEINEEYCVKLDLPPNWKIST

SEQ ID NO: 28031 - protein, 85 aa, unidentified
  REGION 1..85: note = Description of Unknown:cds_NZ_WFIY01000004.1_cds_WP_155863655.1_1536 target sequence
SLEKKDGMYCADNYDEFADSPIEASPYLKVLKIDDKHVVSTIDDLDVEMIRRIVSEADKILGDEDNYIFHFRRSDKELGGIEHSN

SEQ ID NO: 28032 - protein, 85 aa, unidentified
  REGION 1..85: note = Description of Unknown:cds_NZ_WFIY01000004.1_cds_WP_155863655.1_1536 target sequence
SSAIVVSWDREKLATLFAHEYFHRWNVKRLIPADLKHNYEKEVYTSLLWFAEGFTDYMAVIISLRAGVIDRKDALKYVANSLSKL

SEQ ID NO: 28033 - protein, 85 aa, unidentified
  REGION 1..85: note = Description of Unknown:cds_NZ_WFIY01000004.1_cds_WP_155863655.1_1536 target sequence
TFPGAKRTSLAESSFTTWIKYYRQDENFLNSSISYYDGGLALALYVDLEMSKKGKRIDDLFKEIYQEKRIYSFDDLNRVLKGKYE

SEQ ID NO: 28034 - protein, 85 aa, unidentified
  REGION 1..85: note = Description of Unknown:cds_NZ_WFIY01000004.1_cds_WP_155863655.1_1536 target sequence
IDIEDLVYGPAVKILEQLKDDAYIEFIDRGKPYYGIMLKDKTITYVEDNSPADLAGLIPGDQIIGFNGKSKLEVKDSTKLTIVRE

SEQ ID NO: 28035 - protein, 85 aa, unidentified
  REGION 1..85: note = Description of Unknown:cds_NZ_WFIY01000004.1_cds_WP_155863826.1_1719 target sequence
IIGYVIGDATPQQATMLAVKPVRLGLYVTMEYDNEKVLGLITNVTRGSPMIDGNTIDVGIVERLNRFDGKIPHYIKATVKLLYNL

SEQ ID NO: 28036 - protein, 85 aa, unidentified
  REGION 1..85: note = Description of Unknown:cds_NZ_WFIY01000004.1_cds_WP_155863826.1_1719 target sequence
NSNSQPDLPPIAGTPVSLAEEEELRKIFSEGDITLGRLIGTNVPVNIRVGALTRHLAILAATGSGKSNTVAVLSQRIADIKGSVL

SEQ ID NO: 28037 - protein, 85 aa, unidentified
  REGION 1..85: note = Description of Unknown:cds_NZ_WFIY01000004.1_cds_WP_155863826.1_1719 target sequence
IFDYHGEYYRSDIHPLHNIEPKLNPLYLNPREFATLLEIRGNAPIQYRIIRRAFTEYQKSVQEKIKSGDIDFEKLNQTFIKDLED

SEQ ID NO: 28038 - protein, 85 aa, unidentified
  REGION 1..85: note = Description of Unknown:cds_NZ_WFIY01000004.1_cds_WP_155863826.1_1719 target sequence
LIDNQEGKGAKKDSVDEVKNKLEEFADKYSGIIDLTSKDIISNLKTHSVNVVDISPLDEDAMDAIVSHYLRRILDARKEYRRKGT

SEQ ID NO: 28039 - protein, 85 aa, unidentified
  REGION 1..85: note = Description of Unknown:cds_NZ_WFIY01000004.1_cds_WP_155863826.1_1719 target sequence
GLRFPVIIVIEEAHVFLSKNDDTLTKFWASRIAREGRKFGVGLIIVSQRPKGLDENILSQMTNKIILKIVEPSDKKYVLEASDNL

SEQ ID NO: 28040 - protein, 84 aa, unidentified
  REGION 1..84: note = Description of Unknown:cds_NZ_WFIY01000004.1_cds_WP_155863826.1_1719 target sequence
KIVEPSDKKYVLEASDNLSEDLVEQLSSLGVGEALIIGNLVKIPAFVKIDLFNGTLGGTDPDMRREWEKAEEEDKLHESLADFG

SEQ ID NO: 28041 - protein, 85 aa, unidentified
  REGION 1..85: note = Description of Unknown:cds_NZ_WFIY01000004.1_cds_WP_155863826.1_1719 target sequence
VTMEYDNEKVLGLITNVTRGSPMIDGNTIDVGIVERLNRFDGKIPHYIKATVKLLYNLNSNSQPDLPPIAGTPVSLAEEEELRKI

SEQ ID NO: 28042 - protein, 85 aa, unidentified
  REGION 1..85: note = Description of Unknown:cds_NZ_WFIY01000004.1_cds_WP_155863826.1_1719 target sequence
FSEGDITLGRLIGTNVPVNIRVGALTRHLAILAATGSGKSNTVAVLSQRIADIKGSVLIFDYHGEYYRSDIHPLHNIEPKLNPLY

SEQ ID NO: 28043 - protein, 85 aa, unidentified
  REGION 1..85: note = Description of Unknown:cds_NZ_WFIY01000004.1_cds_WP_155863826.1_1719 target sequence
LNPREFATLLEIRGNAPIQYRIIRRAFTEYQKSVQEKIKSGDIDFEKLNQTFIKDLEDLIDNQEGKGAKKDSVDEVKNKLEEFAD

SEQ ID NO: 28044 - protein, 85 aa, unidentified
  REGION 1..85: note = Description of Unknown:cds_NZ_WFIY01000004.1_cds_WP_155863826.1_1719 target sequence
KYSGIIDLTSKDIISNLKTHSVNVVDISPLDEDAMDAIVSHYLRRILDARKEYRRKGTGLRFPVIIVIEEAHVFLSKNDDTLTKF

SEQ ID NO: 28045 - protein, 85 aa, unidentified
  REGION 1..85: note = Description of Unknown:cds_NZ_WFIY01000004.1_cds_WP_155863826.1_1719 target sequence
WASRIAREGRKFGVGLIIVSQRPKGLDENILSQMTNKIILKIVEPSDKKYVLEASDNLSEDLVEQLSSLGVGEALIIGNLVKIPA

SEQ ID NO: 28046 - protein, 85 aa, unidentified
  REGION 1..85: note = Description of Unknown:hvTR_P03169.1 target sequence
ESSAKRKMDPDNPDEGPSSKVPRPETPVTKATTFLQTMLRKEVNSQLSLGDPLFPELAEESLKTFERVTEDCNENPEKDVLAELV

SEQ ID NO: 28047 - protein, 85 aa, unidentified
  REGION 1..85: note = Description of Unknown:hvTR_P03169.1 target sequence
KQIKVRVDMLRHRIKEHMLKKYTQTEEKFTGAFNMMGGCLQNALDILDKVHEPFEEMKCIGLTMQSMYENYIVPEDKREMWMACI

SEQ ID NO: 28048 - protein, 85 aa, unidentified
  REGION 1..85: note = Description of Unknown:hvTR_P03169.1 target sequence
KELHDVSKGAANKLGGALQAKARAKKDELRRKMMYMCYRNIEFFTKNSAFPKTTNGCSQAMAALQNLPQCSPDEIMAYAQKIFKI

SEQ ID NO: 28049 - protein, 85 aa, unidentified
  REGION 1..85: note = Description of Unknown:hvTR_P03169.1 target sequence
LDEERDKVLTHIDHIFMDILTTCVETMCNEYKVTSDACMMTMYGGISLLSEFCRVLSCYVLEETSVMLAKRPLITKPEVISVMKR

SEQ ID NO: 28050 - protein, 85 aa, unidentified
  REGION 1..85: note = Description of Unknown:hvTR_P03169.1 target sequence
RIEEICMKVFAQYILGADPLRVCSPSVDDLRAIAEESDEEEAIVAYTLATRGASSSDSLVSPPESPVPATIPLSSVIVAENSDQE

SEQ ID NO: 28051 - protein, 84 aa, unidentified
  REGION 1..84: note = Description of Unknown:hvTR_P03169.1 target sequence
VPATIPLSSVIVAENSDQEESEQSDEEEEEGAQEEREDTVSVKSEPVSEIEEVAPEEEEDGAEEPTASGGKSTHPMVTRSKADQ

SEQ ID NO: 28052 - protein, 85 aa, unidentified
  REGION 1..85: note = Description of Unknown:hvTR_P03169.1 target sequence
VTKATTFLQTMLRKEVNSQLSLGDPLFPELAEESLKTFERVTEDCNENPEKDVLAELVKQIKVRVDMLRHRIKEHMLKKYTQTEE

SEQ ID NO: 28053 - protein, 85 aa, unidentified
  REGION 1..85: note = Description of Unknown:hvTR_P03169.1 target sequence
KFTGAFNMMGGCLQNALDILDKVHEPFEEMKCIGLTMQSMYENYIVPEDKREMWMACIKELHDVSKGAANKLGGALQAKARAKKD

SEQ ID NO: 28054 - protein, 85 aa, unidentified
  REGION 1..85: note = Description of Unknown:hvTR_P03169.1 target sequence
ELRRKMMYMCYRNIEFFTKNSAFPKTTNGCSQAMAALQNLPQCSPDEIMAYAQKIFKILDEERDKVLTHIDHIFMDILTTCVETM

SEQ ID NO: 28055 - protein, 85 aa, unidentified
  REGION 1..85: note = Description of Unknown:hvTR_P03169.1 target sequence
CNEYKVTSDACMMTMYGGISLLSEFCRVLSCYVLEETSVMLAKRPLITKPEVISVMKRRIEEICMKVFAQYILGADPLRVCSPSV

SEQ ID NO: 28056 - protein, 85 aa, unidentified
  REGION 1..85: note = Description of Unknown:hvTR_P03169.1 target sequence
DDLRAIAEESDEEEAIVAYTLATRGASSSDSLVSPPESPVPATIPLSSVIVAENSDQEESEQSDEEEEEGAQEEREDTVSVKSEP

SEQ ID NO: 28057 - protein, 85 aa, unidentified
  REGION 1..85: note = Description of Unknown:hvTR_B2VQF8 target sequence
AGGSQDVRRFMEREATPPRGHGSARYPPEQERSPSPPPPPLPTKRRKYQRVGSGSSEEDVVPVDSPPKKKQARKTKHVTKVDPDE

SEQ ID NO: 28058 - protein, 85 aa, unidentified
  REGION 1..85: note = Description of Unknown:hvTR_B2VQF8 target sequence
EMPQEDAVIVGVGFSQPPVLLKEGKDGKRIVEPATPGVLNVRNPLSLPLVSSWEKGMDTMNVLMERYRVDSGLRDAYKLMPEQTE

SEQ ID NO: 28059 - protein, 85 aa, unidentified
  REGION 1..85: note = Description of Unknown:hvTR_B2VQF8 target sequence
IFQKMCQTWMNEEARGMQLTFTTQKAFSTIMGRLLQGYIFSHSGIAHKNWECTGCVLWDHGCTEVEGQLKCLHGTVMIHKDHVVE

SEQ ID NO: 28060 - protein, 85 aa, unidentified
  REGION 1..85: note = Description of Unknown:hvTR_B2VQF8 target sequence
MDVTSENGQRALKEQPSKAKVTQNRWGRSVVQLTSHDARCCVHDAGCGNNQFSGKSCGLFFSEGAKAQQAFKQIAAFVKALYPNM

SEQ ID NO: 28061 - protein, 85 aa, unidentified
  REGION 1..85: note = Description of Unknown:hvTR_B2VQF8 target sequence
QRGAGMMLMPVHCECNHKPQSVPFLGRQLCKMTPFGLSNAEDLDKDQISDKSVLASVKYPSLMVFQCCNPVYRNSRAQSTGPNCD

SEQ ID NO: 28062 - protein, 84 aa, unidentified
  REGION 1..84: note = Description of Unknown:hvTR_B2VQF8 target sequence
QCCNPVYRNSRAQSTGPNCDFKISGPDMLGALQMSRRMWSETFPETPVPKLVIPEFKWQPKFQYRNVALPSAAHNDERENPFDF

SEQ ID NO: 28063 - protein, 85 aa, unidentified
  REGION 1..85: note = Description of Unknown:hvTR_B2VQF8 target sequence
PEQERSPSPPPPPLPTKRRKYQRVGSGSSEEDVVPVDSPPKKKQARKTKHVTKVDPDEEMPQEDAVIVGVGFSQPPVLLKEGKDG

SEQ ID NO: 28064 - protein, 85 aa, unidentified
  REGION 1..85: note = Description of Unknown:hvTR_B2VQF8 target sequence
KRIVEPATPGVLNVRNPLSLPLVSSWEKGMDTMNVLMERYRVDSGLRDAYKLMPEQTEIFQKMCQTWMNEEARGMQLTFTTQKAF

SEQ ID NO: 28065 - protein, 85 aa, unidentified
  REGION 1..85: note = Description of Unknown:hvTR_B2VQF8 target sequence
STIMGRLLQGYIFSHSGIAHKNWECTGCVLWDHGCTEVEGQLKCLHGTVMIHKDHVVEMDVTSENGQRALKEQPSKAKVTQNRWG

SEQ ID NO: 28066 - protein, 85 aa, unidentified
  REGION 1..85: note = Description of Unknown:hvTR_B2VQF8 target sequence
RSVVQLTSHDARCCVHDAGCGNNQFSGKSCGLFFSEGAKAQQAFKQIAAFVKALYPNMQRGAGMMLMPVHCECNHKPQSVPFLGR

SEQ ID NO: 28067 - protein, 85 aa, unidentified
  REGION 1..85: note = Description of Unknown:hvTR_B2VQF8 target sequence
QLCKMTPFGLSNAEDLDKDQISDKSVLASVKYPSLMVFQCCNPVYRNSRAQSTGPNCDFKISGPDMLGALQMSRRMWSETFPETP

SEQ ID NO: 28068 - protein, 85 aa, unidentified
  REGION 1..85: note = Description of Unknown:hvTR_Q805X4 target sequence
AADLDMLVDLGLDLSDSDFEDADDAPGSEEAGRSGDRGDSDSTSGQCSASSDDEDMEASGGEGGRPRPGANRAAAPPRPDVGAAS

SEQ ID NO: 28069 - protein, 85 aa, unidentified
  REGION 1..85: note = Description of Unknown:hvTR_Q805X4 target sequence
RAAAPPSGVWARLGRRRRRSETERPDETGAAARDGRRDDGDGAPSPRRQRGPRSAVSLVKATSGGDGSRRRGRRGRGRRREGGRA

SEQ ID NO: 28070 - protein, 85 aa, unidentified
  REGION 1..85: note = Description of Unknown:hvTR_Q805X4 target sequence
GRTAAAGVGRGGSEPRHRRGGPTPPSLMALAVVPPKAPGREGRRRAASPEKIGQSVRAALRSISERAAAERVSESFARSAVAMHQ

SEQ ID NO: 28071 - protein, 85 aa, unidentified
  REGION 1..85: note = Description of Unknown:hvTR_Q805X4 target sequence
PFGGTQFVAPDSPWAPVLGSSVGGYNPEQRRVSWETLALHGPSLYRTFVTNARAAAVSRTLRECVLRQEGFVEAVASADETLAWC

SEQ ID NO: 28072 - protein, 85 aa, unidentified
  REGION 1..85: note = Description of Unknown:hvTR_Q805X4 target sequence
KMCIQHNLPLRPQDPIVATSGAVLENLSTRLRPFLQCYLKTRGVLALDELCARRRLSDIREIASFVLVTLARLADGAKRQTTEIE

SEQ ID NO: 28073 - protein, 84 aa, unidentified
  REGION 1..84: note = Description of Unknown:hvTR_Q805X4 target sequence
VLVTLARLADGAKRQTTEIEYRAVGVASGEKMDFYVPGACMAGLIEILDTHRQECSSRACELTASHIIAPLYVHGKYFYCNSLF

SEQ ID NO: 28074 - protein, 85 aa, unidentified
  REGION 1..85: note = Description of Unknown:hvTR_Q805X4 target sequence
SEEAGRSGDRGDSDSTSGQCSASSDDEDMEASGGEGGRPRPGANRAAAPPRPDVGAASRAAAPPSGVWARLGRRRRRSETERPDE

SEQ ID NO: 28075 - protein, 85 aa, unidentified
  REGION 1..85: note = Description of Unknown:hvTR_Q805X4 target sequence
TGAAARDGRRDDGDGAPSPRRQRGPRSAVSLVKATSGGDGSRRRGRRGRGRRREGGRAGRTAAAGVGRGGSEPRHRRGGPTPPSL

SEQ ID NO: 28076 - protein, 85 aa, unidentified
  REGION 1..85: note = Description of Unknown:hvTR_Q805X4 target sequence
MALAVVPPKAPGREGRRRAASPEKIGQSVRAALRSISERAAAERVSESFARSAVAMHQPFGGTQFVAPDSPWAPVLGSSVGGYNP

SEQ ID NO: 28077 - protein, 85 aa, unidentified
  REGION 1..85: note = Description of Unknown:hvTR_Q805X4 target sequence
EQRRVSWETLALHGPSLYRTFVTNARAAAVSRTLRECVLRQEGFVEAVASADETLAWCKMCIQHNLPLRPQDPIVATSGAVLENL

SEQ ID NO: 28078 - protein, 85 aa, unidentified
  REGION 1..85: note = Description of Unknown:hvTR_Q805X4 target sequence
STRLRPFLQCYLKTRGVLALDELCARRRLSDIREIASFVLVTLARLADGAKRQTTEIEYRAVGVASGEKMDFYVPGACMAGLIEI

SEQ ID NO: 28079 - protein, 85 aa, unidentified
  REGION 1..85: note = Description of Unknown:hvTR_P06492 target sequence
DLLVDELFADMNADGASPPPPRPAGGPKNTPAAPPLYATGRLSQAQLMPSPPMPVPPAALFNRLLDDLGFSAGPALCTMLDTWNE

SEQ ID NO: 28080 - protein, 85 aa, unidentified
  REGION 1..85: note = Description of Unknown:hvTR_P06492 target sequence
DLFSALPTNADLYRECKFLSTLPSDVVEWGDAYVPERTQIDIRAHGDVAFPTLPATRDGLGLYYEALSRFFHAELRAREESYRTV

SEQ ID NO: 28081 - protein, 85 aa, unidentified
  REGION 1..85: note = Description of Unknown:hvTR_P06492 target sequence
LANFCSALYRYLRASVRQLHRQAHMRGRDRDLGEMLRATIADRYYRETARLARVLFLHLYLFLTREILWAAYAEQMMRPDLFDCL

SEQ ID NO: 28082 - protein, 85 aa, unidentified
  REGION 1..85: note = Description of Unknown:hvTR_P06492 target sequence
CCDLESWRQLAGLFQPFMFVNGALTVRGVPIEARRLRELNHIREHLNLPLVRSAATEEPGAPLTTPPTLHGNQARASGYFMVLIR

SEQ ID NO: 28083 - protein, 85 aa, unidentified
  REGION 1..85: note = Description of Unknown:hvTR_P06492 target sequence
AKLDSYSSFTTSPSEAVMREHAYSRARTKNNYGSTIEGLLDLPDDDAPEEAGLAAPRLSFLPAGHTRRLSTAPPTDVSLGDELHL

SEQ ID NO: 28084 - protein, 84 aa, unidentified
  REGION 1..84: note = Description of Unknown:hvTR_P06492 target sequence
TRRLSTAPPTDVSLGDELHLDGEDVAMAHADALDDFDLDMLGDGDSPGPGFTPHDSAPYGALDMADFEFEQMFTDALGIDEYGG

SEQ ID NO: 28085 - protein, 85 aa, unidentified
  REGION 1..85: note = Description of Unknown:hvTR_P06492 target sequence
KNTPAAPPLYATGRLSQAQLMPSPPMPVPPAALFNRLLDDLGFSAGPALCTMLDTWNEDLFSALPTNADLYRECKFLSTLPSDVV

SEQ ID NO: 28086 - protein, 85 aa, unidentified
  REGION 1..85: note = Description of Unknown:hvTR_P06492 target sequence
EWGDAYVPERTQIDIRAHGDVAFPTLPATRDGLGLYYEALSRFFHAELRAREESYRTVLANFCSALYRYLRASVRQLHRQAHMRG

SEQ ID NO: 28087 - protein, 85 aa, unidentified
  REGION 1..85: note = Description of Unknown:hvTR_P06492 target sequence
RDRDLGEMLRATIADRYYRETARLARVLFLHLYLFLTREILWAAYAEQMMRPDLFDCLCCDLESWRQLAGLFQPFMFVNGALTVR

SEQ ID NO: 28088 - protein, 85 aa, unidentified
  REGION 1..85: note = Description of Unknown:hvTR_P06492 target sequence
GVPIEARRLRELNHIREHLNLPLVRSAATEEPGAPLTTPPTLHGNQARASGYFMVLIRAKLDSYSSFTTSPSEAVMREHAYSRAR

SEQ ID NO: 28089 - protein, 85 aa, unidentified
  REGION 1..85: note = Description of Unknown:hvTR_P06492 target sequence
TKNNYGSTIEGLLDLPDDDAPEEAGLAAPRLSFLPAGHTRRLSTAPPTDVSLGDELHLDGEDVAMAHADALDDFDLDMLGDGDSP

SEQ ID NO: 28090 - protein, 85 aa, unidentified
  REGION 1..85: note = Description of Unknown:hvTR_Q69113 target sequence
DLLVDDLFADADGVSPPPPRPAGGPKNTPAAPPLYATGRLSQAQLMPSPPMPVPPAALFNRLLDDLGFSAGPALCTMLDTWNEDL

SEQ ID NO: 28091 - protein, 85 aa, unidentified
  REGION 1..85: note = Description of Unknown:hvTR_Q69113 target sequence
FSGFPTNADMYRECKFLSTLPSDVIDWGDAHVPERSPIDIRAHGDVAFPTLPATRDELPSYYEAMAQFFRGELRAREESYRTVLA

SEQ ID NO: 28092 - protein, 85 aa, unidentified
  REGION 1..85: note = Description of Unknown:hvTR_Q69113 target sequence
NFCSALYRYLRASVRQLHRQAHMRGRNRDLREMLRTTIADRYYRETARLARVLFLHLYLFLSREILWAAYAEQMMRPDLFDGLCC

SEQ ID NO: 28093 - protein, 85 aa, unidentified
  REGION 1..85: note = Description of Unknown:hvTR_Q69113 target sequence
DLESWRQLACLFQPLMFINGSLTVRGVPVEARRLRELNHIREHLNLPLVRSAAAEEPGAPLTTPPVLQGNQARSSGYFMLLIRAK

SEQ ID NO: 28094 - protein, 85 aa, unidentified
  REGION 1..85: note = Description of Unknown:hvTR_Q69113 target sequence
LDSYSSVATSEGESVMREHAYSRGRTRNNYGSTIEGLLDLPDDDDAPAEAGLVAPRMSFLSAGQRPRRLSTTAPITDVSLGDELR

SEQ ID NO: 28095 - protein, 84 aa, unidentified
  REGION 1..84: note = Description of Unknown:hvTR_Q69113 target sequence
PRRLSTTAPITDVSLGDELRLDGEEVDMTPADALDDFDLEMLGDVESPSPGMTHDPVSYGALDVDDFEFEQMFTDALGIDDFGG

SEQ ID NO: 28096 - protein, 85 aa, unidentified
  REGION 1..85: note = Description of Unknown:hvTR_Q69113 target sequence
TPAAPPLYATGRLSQAQLMPSPPMPVPPAALFNRLLDDLGFSAGPALCTMLDTWNEDLFSGFPTNADMYRECKFLSTLPSDVIDW

SEQ ID NO: 28097 - protein, 85 aa, unidentified
  REGION 1..85: note = Description of Unknown:hvTR_Q69113 target sequence
GDAHVPERSPIDIRAHGDVAFPTLPATRDELPSYYEAMAQFFRGELRAREESYRTVLANFCSALYRYLRASVRQLHRQAHMRGRN

SEQ ID NO: 28098 - protein, 85 aa, unidentified
  REGION 1..85: note = Description of Unknown:hvTR_Q69113 target sequence
RDLREMLRTTIADRYYRETARLARVLFLHLYLFLSREILWAAYAEQMMRPDLFDGLCCDLESWRQLACLFQPLMFINGSLTVRGV

SEQ ID NO: 28099 - protein, 85 aa, unidentified
  REGION 1..85: note = Description of Unknown:hvTR_Q69113 target sequence
PVEARRLRELNHIREHLNLPLVRSAAAEEPGAPLTTPPVLQGNQARSSGYFMLLIRAKLDSYSSVATSEGESVMREHAYSRGRTR

SEQ ID NO: 28100 - protein, 85 aa, unidentified
  REGION 1..85: note = Description of Unknown:hvTR_Q69113 target sequence
NNYGSTIEGLLDLPDDDDAPAEAGLVAPRMSFLSAGQRPRRLSTTAPITDVSLGDELRLDGEEVDMTPADALDDFDLEMLGDVES

SEQ ID NO: 28101 - protein, 85 aa, unidentified
  REGION 1..85: note = Description of Unknown:hvTR_P12978.1 target sequence
PTFYLALHGGQTYHLIVDTDSLGNPSLSVIPSNPYQEQLSDTPLIPLTIFVGENTGVPPPLPPPPPPPPPPPPPPPPPPPPPPPP

SEQ ID NO: 28102 - protein, 85 aa, unidentified
  REGION 1..85: note = Description of Unknown:hvTR_P12978.1 target sequence
PPPPPSPPPPPPPPPPPQRRDAWTQEPSPLDRDPLGYDVGHGPLASAMRMLWMANYIVRQSRGDRGLILPQGPQTAPQARLVQPH

SEQ ID NO: 28103 - protein, 85 aa, unidentified
  REGION 1..85: note = Description of Unknown:hvTR_P12978.1 target sequence
VPPLRPTAPTILSPLSQPRLTPPQPLMMPPRPTPPTPLPPATLTVPPRPTRPTTLPPTPLLTVLQRPTELQPTPSPPRMHLPVLH

SEQ ID NO: 28104 - protein, 85 aa, unidentified
  REGION 1..85: note = Description of Unknown:hvTR_P12978.1 target sequence
VPDQSMHPLTHQSTPNDPDSPEPRSPTVFYNIPPMPLPPSQLPPPAAPAQPPPGVINDQQLHHLPSGPPWWPPICDPPQPSKTQG

SEQ ID NO: 28105 - protein, 85 aa, unidentified
  REGION 1..85: note = Description of Unknown:hvTR_P12978.1 target sequence
QSRGQSRGRGRGRGRGRGKGKSRDKQRKPGGPWRPEPNTSSPSMPELSPVLGLHQGQGAGDSPTPGPSNAAPVCRNSHTATPNVS

SEQ ID NO: 28106 - protein, 84 aa, unidentified
  REGION 1..84: note = Description of Unknown:hvTR_P12978.1 target sequence
GPSNAAPVCRNSHTATPNVSPIHEPESHNSPEAPILFPDDWYPPSIDPADLDESWDYIFETTESPSSDEDYVEGPSKRPRPSIQ

SEQ ID NO: 28107 - protein, 85 aa, unidentified
  REGION 1..85: note = Description of Unknown:hvTR_P12978.1 target sequence
SVIPSNPYQEQLSDTPLIPLTIFVGENTGVPPPLPPPPPPPPPPPPPPPPPPPPPPPPPPPPPSPPPPPPPPPPPQRRDAWTQEP

SEQ ID NO: 28108 - protein, 85 aa, unidentified
  REGION 1..85: note = Description of Unknown:hvTR_P12978.1 target sequence
SPLDRDPLGYDVGHGPLASAMRMLWMANYIVRQSRGDRGLILPQGPQTAPQARLVQPHVPPLRPTAPTILSPLSQPRLTPPQPLM

SEQ ID NO: 28109 - protein, 85 aa, unidentified
  REGION 1..85: note = Description of Unknown:hvTR_P12978.1 target sequence
MPPRPTPPTPLPPATLTVPPRPTRPTTLPPTPLLTVLQRPTELQPTPSPPRMHLPVLHVPDQSMHPLTHQSTPNDPDSPEPRSPT

SEQ ID NO: 28110 - protein, 85 aa, unidentified
  REGION 1..85: note = Description of Unknown:hvTR_P12978.1 target sequence
VFYNIPPMPLPPSQLPPPAAPAQPPPGVINDQQLHHLPSGPPWWPPICDPPQPSKTQGQSRGQSRGRGRGRGRGRGKGKSRDKQR

SEQ ID NO: 28111 - protein, 85 aa, unidentified
  REGION 1..85: note = Description of Unknown:hvTR_P12978.1 target sequence
KPGGPWRPEPNTSSPSMPELSPVLGLHQGQGAGDSPTPGPSNAAPVCRNSHTATPNVSPIHEPESHNSPEAPILFPDDWYPPSID

SEQ ID NO: 28112 - protein, 85 aa, unidentified
  REGION 1..85: note = Description of Unknown:cds_NC_024711.1_cds_YP_009052551.1_74 target sequence
KTLRVIGQTRYEDRGYSNEESIAYLQLQKPEEINSFLTYNYGMDDDRFPLSFITEGQGSRGIKNVATVQWTWKTMGRMKFTDFVT

SEQ ID NO: 28113 - protein, 85 aa, unidentified
  REGION 1..85: note = Description of Unknown:cds_NC_024711.1_cds_YP_009052551.1_74 target sequence
YFNTAVTKPGQNGSEFEVHFSTHWFIEQHGLTAPDGVTQVRIQKDLGESAYGYAYLLKLTSPNPDAYVDPQWLAKGMYWAMSAPT

SEQ ID NO: 28114 - protein, 85 aa, unidentified
  REGION 1..85: note = Description of Unknown:cds_NC_024711.1_cds_YP_009052551.1_74 target sequence
VSESYSKGNRSNTMGPAGMTSQLEFYRYSKEIAGNLANVVTQYQFQNDNGGTSNLWINEEMRQFNLHMRVMNEERLWKSEYNRLP

SEQ ID NO: 28115 - protein, 85 aa, unidentified
  REGION 1..85: note = Description of Unknown:cds_NC_024711.1_cds_YP_009052551.1_74 target sequence
DGTIPLKDHDNGKPIPHTAGMLEICRESNYDTYGEVLTVNKLERTIGDVLDRDTQDGDKNVALMGGKGFIRDFEMAIRTDAKENG

SEQ ID NO: 28116 - protein, 85 aa, unidentified
  REGION 1..85: note = Description of Unknown:cds_NC_024711.1_cds_YP_009052551.1_74 target sequence
FITPLGEKMIQDNGDGLSYGRYFNKYKTPDGYTITVIHNAYFDKGTDAEAAKQNGMIHPTTGLPITSHQAALIDMSNYKGNQNVR

SEQ ID NO: 28117 - protein, 84 aa, unidentified
  REGION 1..84: note = Description of Unknown:cds_NC_024711.1_cds_YP_009052551.1_74 target sequence
TSHQAALIDMSNYKGNQNVRIVRQKGQAYKAKVIEGMTDIPACWGLPNTNHAATEIDMARYEVKGSIGLQVDNTTKMFLLKCVL

SEQ ID NO: 28118 - protein, 85 aa, unidentified
  REGION 1..85: note = Description of Unknown:cds_NC_024711.1_cds_YP_009052551.1_74 target sequence
QKPEEINSFLTYNYGMDDDRFPLSFITEGQGSRGIKNVATVQWTWKTMGRMKFTDFVTYFNTAVTKPGQNGSEFEVHFSTHWFIE

SEQ ID NO: 28119 - protein, 85 aa, unidentified
  REGION 1..85: note = Description of Unknown:cds_NC_024711.1_cds_YP_009052551.1_74 target sequence
QHGLTAPDGVTQVRIQKDLGESAYGYAYLLKLTSPNPDAYVDPQWLAKGMYWAMSAPTVSESYSKGNRSNTMGPAGMTSQLEFYR

SEQ ID NO: 28120 - protein, 85 aa, unidentified
  REGION 1..85: note = Description of Unknown:cds_NC_024711.1_cds_YP_009052551.1_74 target sequence
YSKEIAGNLANVVTQYQFQNDNGGTSNLWINEEMRQFNLHMRVMNEERLWKSEYNRLPDGTIPLKDHDNGKPIPHTAGMLEICRE

SEQ ID NO: 28121 - protein, 85 aa, unidentified
  REGION 1..85: note = Description of Unknown:cds_NC_024711.1_cds_YP_009052551.1_74 target sequence
SNYDTYGEVLTVNKLERTIGDVLDRDTQDGDKNVALMGGKGFIRDFEMAIRTDAKENGFITPLGEKMIQDNGDGLSYGRYFNKYK

SEQ ID NO: 28122 - protein, 85 aa, unidentified
  REGION 1..85: note = Description of Unknown:cds_NC_024711.1_cds_YP_009052551.1_74 target sequence
TPDGYTITVIHNAYFDKGTDAEAAKQNGMIHPTTGLPITSHQAALIDMSNYKGNQNVRIVRQKGQAYKAKVIEGMTDIPACWGLP

SEQ ID NO: 28123 - protein, 85 aa, unidentified
  REGION 1..85: note = Description of Unknown:cds_NZ_WFIY01000004.1_cds_WP_155863225.1_1172 target sequence
KFLRESTGLVKEFSAVDAFALNFSFLGPAAGVSYPLFVSAFLPNSSWILSVILGAVLMIPLVLNYYLLNALIPRSAGDYIYVSRA

SEQ ID NO: 28124 - protein, 85 aa, unidentified
  REGION 1..85: note = Description of Unknown:cds_NZ_WFIY01000004.1_cds_WP_155863225.1_1172 target sequence
FGPFAGSVLGMSLLMSFMMGFPVLAMLEVIMVIVPGLQAIGYSLGNKALIDFANSILSSSLNLFVTTTLIVLIAFLLSSSERYYA

SEQ ID NO: 28125 - protein, 85 aa, unidentified
  REGION 1..85: note = Description of Unknown:cds_NZ_WFIY01000004.1_cds_WP_155863225.1_1172 target sequence
RTFRYLTFLQIIGTVIMIYGLLTFHYAGINNNLDPKLNTQTFALSSIFVLSLFAFANAPSFFAGEIKKSRKSFLAGYLLSYATAT

SEQ ID NO: 28126 - protein, 85 aa, unidentified
  REGION 1..85: note = Description of Unknown:cds_NZ_WFIY01000004.1_cds_WP_155863225.1_1172 target sequence
IFALLLIISLEIGIGKENYVSAVISGWNLPISTSSLLSFGALPFIHYPAIVMFIFVTALSWYLLYAMINVGASSRILFSLSFDRL

SEQ ID NO: 28127 - protein, 85 aa, unidentified
  REGION 1..85: note = Description of Unknown:cds_NZ_WFIY01000004.1_cds_WP_155863225.1_1172 target sequence
LPAFLADVKRGIPFNALLFSFLVSMIFNYVEVYLGYSVSFAIDGLWFVIWNYMIVAIASIKFYKLDKRILYTSISSVITLSTVVF

SEQ ID NO: 28128 - protein, 84 aa, unidentified
  REGION 1..84: note = Description of Unknown:cds_NZ_WFIY01000004.1_cds_WP_155863225.1_1172 target sequence
LDKRILYTSISSVITLSTVVFITLYYGIVNPTFGGVIFEGNFAFDIVSIFIPPIIGAVTYIISQKVRSKQGIKLSLIYKEIPPE

SEQ ID NO: 28129 - protein, 85 aa, unidentified
  REGION 1..85: note = Description of Unknown:cds_NZ_WFIY01000004.1_cds_WP_155863225.1_1172 target sequence
PAAGVSYPLFVSAFLPNSSWILSVILGAVLMIPLVLNYYLLNALIPRSAGDYIYVSRAFGPFAGSVLGMSLLMSFMMGFPVLAML

SEQ ID NO: 28130 - protein, 85 aa, unidentified
  REGION 1..85: note = Description of Unknown:cds_NZ_WFIY01000004.1_cds_WP_155863225.1_1172 target sequence
EVIMVIVPGLQAIGYSLGNKALIDFANSILSSSLNLFVTTTLIVLIAFLLSSSERYYARTFRYLTFLQIIGTVIMIYGLLTFHYA

SEQ ID NO: 28131 - protein, 85 aa, unidentified
  REGION 1..85: note = Description of Unknown:cds_NZ_WFIY01000004.1_cds_WP_155863225.1_1172 target sequence
GINNNLDPKLNTQTFALSSIFVLSLFAFANAPSFFAGEIKKSRKSFLAGYLLSYATATIFALLLIISLEIGIGKENYVSAVISGW

SEQ ID NO: 28132 - protein, 85 aa, unidentified
  REGION 1..85: note = Description of Unknown:cds_NZ_WFIY01000004.1_cds_WP_155863225.1_1172 target sequence
NLPISTSSLLSFGALPFIHYPAIVMFIFVTALSWYLLYAMINVGASSRILFSLSFDRLLPAFLADVKRGIPFNALLFSFLVSMIF

SEQ ID NO: 28133 - protein, 85 aa, unidentified
  REGION 1..85: note = Description of Unknown:cds_NZ_WFIY01000004.1_cds_WP_155863225.1_1172 target sequence
NYVEVYLGYSVSFAIDGLWFVIWNYMIVAIASIKFYKLDKRILYTSISSVITLSTVVFITLYYGIVNPTFGGVIFEGNFAFDIVS

SEQ ID NO: 28134 - protein, 85 aa, unidentified
  REGION 1..85: note = Description of Unknown:cds_NZ_WFIY01000004.1_cds_WP_155864157.1_2111 target sequence
KAKHFFLFFVFLFLISTNVQSQISSPSVAVSLTTFDGKLFMASSSVVYEFCHGQWVKILQMNNIKQIEGGKEGIYINNGTLYYFY

SEQ ID NO: 28135 - protein, 85 aa, unidentified
  REGION 1..85: note = Description of Unknown:cds_NZ_WFIY01000004.1_cds_WP_155864157.1_2111 target sequence
KLTYLIPLNITNPFKLFYDNYTGELYVTGNSHLYIINCSRVIASYYIPLSFCYVTFNCNEAIVDSQCGYFIFFYNGSEHLTISCQ

SEQ ID NO: 28136 - protein, 85 aa, unidentified
  REGION 1..85: note = Description of Unknown:cds_NZ_WFIY01000004.1_cds_WP_155864157.1_2111 target sequence
DAFSGMLFADGKFITGSFDPRGLFIYNNLSVIYLNKIWDIYLRQLPEYNITLVCTKVTPCCLIYFKGMLYISSLQGIQVINLENY

SEQ ID NO: 28137 - protein, 85 aa, unidentified
  REGION 1..85: note = Description of Unknown:cds_NZ_WFIY01000004.1_cds_WP_155864157.1_2111 target sequence
QSVYYNPCPAYSMIIYNCSVLVATKSGIIALNISSLPIYTLTIKKVGGLYGKVLINGTEYTFYNCLKLRLEEGIYNLTFLNCSIY

SEQ ID NO: 28138 - protein, 85 aa, unidentified
  REGION 1..85: note = Description of Unknown:cds_NZ_WFIY01000004.1_cds_WP_155864157.1_2111 target sequence
KPCINNEVINLNCNKTLTIKYVGIPEELSVIIEDLNNGSRYSITINNQTYFEDSNIVKFTLPAGQYCVKIDINGVTKTFIVNLIQ

SEQ ID NO: 28139 - protein, 84 aa, unidentified
  REGION 1..84: note = Description of Unknown:cds_NZ_WFIY01000004.1_cds_WP_155864157.1_2111 target sequence
QYCVKIDINGVTKTFIVNLIQDEEIVINAGSFYLTANNSTITATTTTHISNNSNNSLSLACYIAIALVIVALIFMIMVIRRRQS

SEQ ID NO: 28140 - protein, 85 aa, unidentified
  REGION 1..85: note = Description of Unknown:cds_NZ_WFIY01000004.1_cds_WP_155864157.1_2111 target sequence
VAVSLTTFDGKLFMASSSVVYEFCHGQWVKILQMNNIKQIEGGKEGIYINNGTLYYFYKLTYLIPLNITNPFKLFYDNYTGELYV

SEQ ID NO: 28141 - protein, 85 aa, unidentified
  REGION 1..85: note = Description of Unknown:cds_NZ_WFIY01000004.1_cds_WP_155864157.1_2111 target sequence
TGNSHLYIINCSRVIASYYIPLSFCYVTFNCNEAIVDSQCGYFIFFYNGSEHLTISCQDAFSGMLFADGKFITGSFDPRGLFIYN

SEQ ID NO: 28142 - protein, 85 aa, unidentified
  REGION 1..85: note = Description of Unknown:cds_NZ_WFIY01000004.1_cds_WP_155864157.1_2111 target sequence
NLSVIYLNKIWDIYLRQLPEYNITLVCTKVTPCCLIYFKGMLYISSLQGIQVINLENYQSVYYNPCPAYSMIIYNCSVLVATKSG

SEQ ID NO: 28143 - protein, 85 aa, unidentified
  REGION 1..85: note = Description of Unknown:cds_NZ_WFIY01000004.1_cds_WP_155864157.1_2111 target sequence
IIALNISSLPIYTLTIKKVGGLYGKVLINGTEYTFYNCLKLRLEEGIYNLTFLNCSIYKPCINNEVINLNCNKTLTIKYVGIPEE

SEQ ID NO: 28144 - protein, 85 aa, unidentified
  REGION 1..85: note = Description of Unknown:cds_NZ_WFIY01000004.1_cds_WP_155864157.1_2111 target sequence
LSVIIEDLNNGSRYSITINNQTYFEDSNIVKFTLPAGQYCVKIDINGVTKTFIVNLIQDEEIVINAGSFYLTANNSTITATTTTH

SEQ ID NO: 28145 - protein, 85 aa, unidentified
  REGION 1..85: note = Description of Unknown:cds_NC_039223.1_cds_YP_009513194.1_1 target sequence
SSVFDEYEQLLAAQTRPNGTHGGGEKGSTLKVEVPVFTLNSDDPEDRWNFAVFCLRIAVSEDANKPLRQGALISLLCSHSQVMRN

SEQ ID NO: 28146 - protein, 85 aa, unidentified
  REGION 1..85: note = Description of Unknown:cds_NC_039223.1_cds_YP_009513194.1_1 target sequence
HVALAGKQNEATLAVLEIDGFANSVPQFNNRSGVSEERAQRFMVIAGSLPRACSNGTPFVTAGVEDDAPEDITDTLERILSIQVQ

SEQ ID NO: 28147 - protein, 85 aa, unidentified
  REGION 1..85: note = Description of Unknown:cds_NC_039223.1_cds_YP_009513194.1_1 target sequence
VWVTVAKAMTAYETADESETRRINKYMQQGRVQKKYILHPVCRSAIQLTIRHSLAVRIFLVSELKRGRNTAGGSSTYYNLVGDVD

SEQ ID NO: 28148 - protein, 85 aa, unidentified
  REGION 1..85: note = Description of Unknown:cds_NC_039223.1_cds_YP_009513194.1_1 target sequence
SYIRNTGLTAFFLTLKYGINTKTSALALSSLTGDIQKMKQLMRLYRMKGENAPYMTLLGDSDQMSFAPAEYAQLYSFAMGMASVL

SEQ ID NO: 28149 - protein, 85 aa, unidentified
  REGION 1..85: note = Description of Unknown:cds_NC_039223.1_cds_YP_009513194.1_1 target sequence
DKGTGKYQFARDFMSTSFWRLGVEYAQAQGSSINEDMAAELKLTPAARRGLAAAAQRVSEEIGSMDIPTQQAGVLTGLSDEGPRT

SEQ ID NO: 28150 - protein, 84 aa, unidentified
  REGION 1..84: note = Description of Unknown:cds_NC_039223.1_cds_YP_009513194.1_1 target sequence
MDIPTQQAGVLTGLSDEGPRTPQGGSNKPQGQPGAGDGETQFLDFMRAVANSMREAPNPAQSTTHPEPPPTPGASQDNDTDWGY

SEQ ID NO: 28151 - protein, 85 aa, unidentified
  REGION 1..85: note = Description of Unknown:cds_NC_039223.1_cds_YP_009513194.1_1 target sequence
STLKVEVPVFTLNSDDPEDRWNFAVFCLRIAVSEDANKPLRQGALISLLCSHSQVMRNHVALAGKQNEATLAVLEIDGFANSVPQ

SEQ ID NO: 28152 - protein, 85 aa, unidentified
  REGION 1..85: note = Description of Unknown:cds_NC_039223.1_cds_YP_009513194.1_1 target sequence
FNNRSGVSEERAQRFMVIAGSLPRACSNGTPFVTAGVEDDAPEDITDTLERILSIQVQVWVTVAKAMTAYETADESETRRINKYM

SEQ ID NO: 28153 - protein, 85 aa, unidentified
  REGION 1..85: note = Description of Unknown:cds_NC_039223.1_cds_YP_009513194.1_1 target sequence
QQGRVQKKYILHPVCRSAIQLTIRHSLAVRIFLVSELKRGRNTAGGSSTYYNLVGDVDSYIRNTGLTAFFLTLKYGINTKTSALA

SEQ ID NO: 28154 - protein, 85 aa, unidentified
  REGION 1..85: note = Description of Unknown:cds_NC_039223.1_cds_YP_009513194.1_1 target sequence
LSSLTGDIQKMKQLMRLYRMKGENAPYMTLLGDSDQMSFAPAEYAQLYSFAMGMASVLDKGTGKYQFARDFMSTSFWRLGVEYAQ

SEQ ID NO: 28155 - protein, 85 aa, unidentified
  REGION 1..85: note = Description of Unknown:cds_NC_039223.1_cds_YP_009513194.1_1 target sequence
AQGSSINEDMAAELKLTPAARRGLAAAAQRVSEEIGSMDIPTQQAGVLTGLSDEGPRTPQGGSNKPQGQPGAGDGETQFLDFMRA

SEQ ID NO: 28156 - protein, 85 aa, unidentified
  REGION 1..85: note = Description of Unknown:hvTR_Q5Y0Q4 target sequence
ESLFDELFADMDTDGASPPRRPTGGAELPDAATAPRPYATTRLSQAQIMPPPPVPIPPAALYNRLLEDLGFGDGPALCTILDSWN

SEQ ID NO: 28157 - protein, 85 aa, unidentified
  REGION 1..85: note = Description of Unknown:hvTR_Q5Y0Q4 target sequence
EDLFSGLPANPDLYRECRFLSTLPGDVVAWGDAHAPDRAPIDIRAHGSAPFPSLPARREGLPAYCAALTRFFESELRAREESYRR

SEQ ID NO: 28158 - protein, 85 aa, unidentified
  REGION 1..85: note = Description of Unknown:hvTR_Q5Y0Q4 target sequence
VLANFCSALYRYLRASTRQLHRQAALKGRPRDLQEMLRASVAERYYRETARLARVMFLHLYLFLAREVLWAVYAEQVMRQDLFEG

SEQ ID NO: 28159 - protein, 85 aa, unidentified
  REGION 1..85: note = Description of Unknown:hvTR_Q5Y0Q4 target sequence
LRCDLEQARQLSCLFQPLLFVHGAISVRGAPVSAARLRELNHVRERLNLPLIRSAATEEPGAALTAAPALQTQQARSSGYFMTLI

SEQ ID NO: 28160 - protein, 85 aa, unidentified
  REGION 1..85: note = Description of Unknown:hvTR_Q5Y0Q4 target sequence
RVKLDAYSEGSAGSEGAEVLREHAYSRRRERTNYGSSIEGLLELPDDADYDPDAPPPPPRLSFATGSPRRRRSTVPRTDVSLGDE

SEQ ID NO: 28161 - protein, 84 aa, unidentified
  REGION 1..84: note = Description of Unknown:hvTR_Q5Y0Q4 target sequence
ATGSPRRRRSTVPRTDVSLGDELCLDASPSMTPSEALDDFDLTLLGDDDHAGTLDAAAYASLDMADFEFEQMFTDALGIDEFGG

SEQ ID NO: 28162 - protein, 85 aa, unidentified
  REGION 1..85: note = Description of Unknown:hvTR_Q5Y0Q4 target sequence
LPDAATAPRPYATTRLSQAQIMPPPPVPIPPAALYNRLLEDLGFGDGPALCTILDSWNEDLFSGLPANPDLYRECRFLSTLPGDV

SEQ ID NO: 28163 - protein, 85 aa, unidentified
  REGION 1..85: note = Description of Unknown:hvTR_Q5Y0Q4 target sequence
VAWGDAHAPDRAPIDIRAHGSAPFPSLPARREGLPAYCAALTRFFESELRAREESYRRVLANFCSALYRYLRASTRQLHRQAALK

SEQ ID NO: 28164 - protein, 85 aa, unidentified
  REGION 1..85: note = Description of Unknown:hvTR_Q5Y0Q4 target sequence
GRPRDLQEMLRASVAERYYRETARLARVMFLHLYLFLAREVLWAVYAEQVMRQDLFEGLRCDLEQARQLSCLFQPLLFVHGAISV

SEQ ID NO: 28165 - protein, 85 aa, unidentified
  REGION 1..85: note = Description of Unknown:hvTR_Q5Y0Q4 target sequence
RGAPVSAARLRELNHVRERLNLPLIRSAATEEPGAALTAAPALQTQQARSSGYFMTLIRVKLDAYSEGSAGSEGAEVLREHAYSR

SEQ ID NO: 28166 - protein, 85 aa, unidentified
  REGION 1..85: note = Description of Unknown:hvTR_Q5Y0Q4 target sequence
RRERTNYGSSIEGLLELPDDADYDPDAPPPPPRLSFATGSPRRRRSTVPRTDVSLGDELCLDASPSMTPSEALDDFDLTLLGDDD

SEQ ID NO: 28167 - protein, 85 aa, unidentified
  REGION 1..85: note = Description of Unknown:hvTR_Q805Y1 target sequence
ESLFDELFADMDTDGDSPPRRPTGTAELPDAATAPRPYATGRLSQAQIMPQPPVPVPPAALYNRLLEDLGFGDGPALCTILDSWN

SEQ ID NO: 28168 - protein, 85 aa, unidentified
  REGION 1..85: note = Description of Unknown:hvTR_Q805Y1 target sequence
EDLFSGLPANPDLYRECQFLSTLPSDVVAWGDGHTPDRGPIDIRAHGSAPFPSLPARREDLPAYCEALTRFFRAELRAREESYRR

SEQ ID NO: 28169 - protein, 85 aa, unidentified
  REGION 1..85: note = Description of Unknown:hvTR_Q805Y1 target sequence
VLANFCSALYRYLRASTRQLHRQAALKGRPRDLQEMLRAAVAERYYRETARLARVLFLHLYLFLVREILWAVYAEQVMRQDLFEG

SEQ ID NO: 28170 - protein, 85 aa, unidentified
  REGION 1..85: note = Description of Unknown:hvTR_Q805Y1 target sequence
LCCDLEQARQLSCLFQPLLFVHGTVSVRGAAVAPARLREINYVRERLNLPLVRSAATEEPGAALTAAPALQTQRARSSGYFMTLI

SEQ ID NO: 28171 - protein, 85 aa, unidentified
  REGION 1..85: note = Description of Unknown:hvTR_Q805Y1 target sequence
RVKLDAYSEGSGSEGAEVLREHAYSRRRERTNYGSSIEGLLELPDDTDYDPDAPPPPPRLSFAAAPPRRRSAAPRTDVSLGDELR

SEQ ID NO: 28172 - protein, 84 aa, unidentified
  REGION 1..84: note = Description of Unknown:hvTR_Q805Y1 target sequence
AAAPPRRRSAAPRTDVSLGDELRFDGDVSMTPSEALDDFDLTLLGDDDHAGGLDDAAAYASLDMADFEFEQMFTDALGIDDIGG

SEQ ID NO: 28173 - protein, 85 aa, unidentified
  REGION 1..85: note = Description of Unknown:hvTR_Q805Y1 target sequence
LPDAATAPRPYATGRLSQAQIMPQPPVPVPPAALYNRLLEDLGFGDGPALCTILDSWNEDLFSGLPANPDLYRECQFLSTLPSDV

SEQ ID NO: 28174 - protein, 85 aa, unidentified
  REGION 1..85: note = Description of Unknown:hvTR_Q805Y1 target sequence
VAWGDGHTPDRGPIDIRAHGSAPFPSLPARREDLPAYCEALTRFFRAELRAREESYRRVLANFCSALYRYLRASTRQLHRQAALK

SEQ ID NO: 28175 - protein, 85 aa, unidentified
  REGION 1..85: note = Description of Unknown:hvTR_Q805Y1 target sequence
GRPRDLQEMLRAAVAERYYRETARLARVLFLHLYLFLVREILWAVYAEQVMRQDLFEGLCCDLEQARQLSCLFQPLLFVHGTVSV

SEQ ID NO: 28176 - protein, 85 aa, unidentified
  REGION 1..85: note = Description of Unknown:hvTR_Q805Y1 target sequence
RGAAVAPARLREINYVRERLNLPLVRSAATEEPGAALTAAPALQTQRARSSGYFMTLIRVKLDAYSEGSGSEGAEVLREHAYSRR

SEQ ID NO: 28177 - protein, 85 aa, unidentified
  REGION 1..85: note = Description of Unknown:hvTR_Q805Y1 target sequence
RERTNYGSSIEGLLELPDDTDYDPDAPPPPPRLSFAAAPPRRRSAAPRTDVSLGDELRFDGDVSMTPSEALDDFDLTLLGDDDHA

SEQ ID NO: 28178 - protein, 85 aa, unidentified; identical to SEQ ID NO: 28101
  REGION 1..85: note = Description of Unknown:hvTR_P12978.2 target sequence

SEQ ID NO: 28179 - protein, 85 aa, unidentified
  REGION 1..85: note = Description of Unknown:hvTR_P12978.2 target sequence
PPSPPPPPPPPPPPQRRDAWTQEPSPLDRDPLGYDVGHGPLASAMRMLWMANYIVRQSRGDRGLILPQGPQTAPQARLVQPHVPP

SEQ ID NO: 28180 - protein, 85 aa, unidentified
  REGION 1..85: note = Description of Unknown:hvTR_P12978.2 target sequence
LRPTAPTILSPLSQPRLTPPQPLMMPPRPTPPTPLPPATLTVPPRPTRPTTLPPTPLLTVLQRPTELQPTPSPPRMHLPVLHVPD

SEQ ID NO: 28181 - protein, 85 aa, unidentified
  REGION 1..85: note = Description of Unknown:hvTR_P12978.2 target sequence
QSMHPLTHQSTPNDPDSPEPRSPTVFYNIPPMPLPPSQLPPPAAPAQPPPGVINDQQLHHLPSGPPWWPPICDPPQPSKTQGQSR

SEQ ID NO: 28182 - protein, 85 aa, unidentified
  REGION 1..85: note = Description of Unknown:hvTR_P12978.2 target sequence
GQSRGRGRGRGRGRGKGKSRDKQRKPGGPWRPEPNTSSPSMPELSPVLGLHQGQGAGDSPTPGPSNAAPVCRNSHTATPNVSPIH

SEQ ID NO: 28183 - protein, 85 aa, unidentified
  REGION 1..85: note = Description of Unknown:hvTR_P12978.2 target sequence
SVIPSNPYQEQLSDTPLIPLTIFVGENTGVPPPLPPPPPPPPPPPPPPPPPPPPPPPPPPSPPPPPPPPPPPQRRDAWTQEPSPL

SEQ ID NO: 28184 - protein, 85 aa, unidentified
  REGION 1..85: note = Description of Unknown:hvTR_P12978.2 target sequence
DRDPLGYDVGHGPLASAMRMLWMANYIVRQSRGDRGLILPQGPQTAPQARLVQPHVPPLRPTAPTILSPLSQPRLTPPQPLMMPP

SEQ ID NO: 28185 - protein, 85 aa, unidentified
  REGION 1..85: note = Description of Unknown:hvTR_P12978.2 target sequence
RPTPPTPLPPATLTVPPRPTRPTTLPPTPLLTVLQRPTELQPTPSPPRMHLPVLHVPDQSMHPLTHQSTPNDPDSPEPRSPTVFY

SEQ ID NO: 28186 - protein, 85 aa, unidentified
  REGION 1..85: note = Description of Unknown:hvTR_P12978.2 target sequence
NIPPMPLPPSQLPPPAAPAQPPPGVINDQQLHHLPSGPPWWPPICDPPQPSKTQGQSRGQSRGRGRGRGRGRGKGKSRDKQRKPG

SEQ ID NO: 28187 - protein, 85 aa, unidentified
  REGION 1..85: note = Description of Unknown:hvTR_P12978.2 target sequence
GPWRPEPNTSSPSMPELSPVLGLHQGQGAGDSPTPGPSNAAPVCRNSHTATPNVSPIHEPESHNSPEAPILFPDDWYPPSIDPAD

SEQ ID NO: 28188 - protein, 85 aa, unidentified
  REGION 1..85: note = Description of Unknown:cds_NZ_WFIY01000004.1_cds_WP_155863325.1_1291 target sequence
AQEKLSNLKLDLSDYGQGQATISPDYYNENLIPVPKAMKNWNWINYSTIWAGMSHNVVAFELAGLLTFQYGAPLALFIIGFAYGT

SEQ ID NO: 28189 - protein, 85 aa, unidentified
  REGION 1..85: note = Description of Unknown:cds_NZ_WFIY01000004.1_cds_WP_155863325.1_1291 target sequence
LLIALYLNGHIGAKWGIPYPVAVRPMFGLKGSSLPVIMRAAVALFWFAVQTYVGGTLIDAVISVFYPSWESLTANILGMPAHLAI

SEQ ID NO: 28190 - protein, 85 aa, unidentified
  REGION 1..85: note = Description of Unknown:cds_NZ_WFIY01000004.1_cds_WP_155863325.1_1291 target sequence
SFFIFWFLNVIVLFRGMNEVKNFELIAGPLIVVTLGGLFAYGIERAHGLGPLFTVTGSATPAEIGLSIASMAGVWATLVLNIPDF

SEQ ID NO: 28191 - protein, 85 aa, unidentified
  REGION 1..85: note = Description of Unknown:cds_NZ_WFIY01000004.1_cds_WP_155863325.1_1291 target sequence
TRFSKSQKDQLIGQAIGLPIVVTLFSFIAVGITSTMSYIYHIPSSEALKYVNPVNIMYLFTGNQFLVLITGLSLVIATVSVNVAA

SEQ ID NO: 28192 - protein, 85 aa, unidentified
  REGION 1..85: note = Description of Unknown:cds_NZ_WFIY01000004.1_cds_WP_155863325.1_1291 target sequence
NIVSPVYDLIALFPRKLKTWSVSAIVAAIVALFYVPQLWYNNASTIFNLLNIIGAGLGAIAGIMIADYWIMRKTNLSLVDLFMPR

SEQ ID NO: 28193 - protein, 84 aa, unidentified
  REGION 1..84: note = Description of Unknown:cds_NZ_WFIY01000004.1_cds_WP_155863325.1_1291 target sequence
IMIADYWIMRKTNLSLVDLFMPRGQYWYSEGINWKAILVLAVAFGIPIIGFAIPSLSPLYDYGWYLSVAVSLLLYLALNKVKKY

SEQ ID NO: 28194 - protein, 85 aa, unidentified
  REGION 1..85: note = Description of Unknown:cds_NZ_WFIY01000004.1_cds_WP_155863325.1_1291 target sequence
NENLIPVPKAMKNWNWINYSTIWAGMSHNVVAFELAGLLTFQYGAPLALFIIGFAYGTLLIALYLNGHIGAKWGIPYPVAVRPMF

SEQ ID NO: 28195 - protein, 85 aa, unidentified
  REGION 1..85: note = Description of Unknown:cds_NZ_WFIY01000004.1_cds_WP_155863325.1_1291 target sequence
GLKGSSLPVIMRAAVALFWFAVQTYVGGTLIDAVISVFYPSWESLTANILGMPAHLAISFFIFWFLNVIVLFRGMNEVKNFELIA

SEQ ID NO: 28196 - protein, 85 aa, unidentified
  REGION 1..85: note = Description of Unknown:cds_NZ_WFIY01000004.1_cds_WP_155863325.1_1291 target sequence
GPLIVVTLGGLFAYGIERAHGLGPLFTVTGSATPAEIGLSIASMAGVWATLVLNIPDFTRFSKSQKDQLIGQAIGLPIVVTLFSF

SEQ ID NO: 28197 - protein, 85 aa, unidentified
  REGION 1..85: note = Description of Unknown:cds_NZ_WFIY01000004.1_cds_WP_155863325.1_1291 target sequence
IAVGITSTMSYIYHIPSSEALKYVNPVNIMYLFTGNQFLVLITGLSLVIATVSVNVAANIVSPVYDLIALFPRKLKTWSVSAIVA

SEQ ID NO: 28198 - protein, 85 aa, unidentified
  REGION 1..85: note = Description of Unknown:cds_NZ_WFIY01000004.1_cds_WP_155863325.1_1291 target sequence
AIVALFYVPQLWYNNASTIFNLLNIIGAGLGAIAGIMIADYWIMRKTNLSLVDLFMPRGQYWYSEGINWKAILVLAVAFGIPIIG

SEQ ID NO: 28199 - protein, 85 aa, unidentified
  REGION 1..85: note = Description of Unknown:cds_NC_010495.1_cds_YP_001742076.1_39 target sequence
LVVVSMRKKTIEEFIADARKVHGDRYDYSKVEYVNAKTKVCVICPEHGEFWQIPNDHLNKHGCFLCGGSSKGSANLFIEKARLLH

SEQ ID NO: 28200 - protein, 85 aa, unidentified
  REGION 1..85: note = Description of Unknown:cds_NC_010495.1_cds_YP_001742076.1_39 target sequence
GKHYDYSKVFYVNAKTKVKIICKHHGEFMQSPNDHLNGRGCAMCKSDKMSREQLLTSNDFILSARIRHGDRYDYGKVNYIGSKEK

SEQ ID NO: 28201 - protein, 85 aa, unidentified
  REGION 1..85: note = Description of Unknown:cds_NC_010495.1_cds_YP_001742076.1_39 target sequence
VCITCHAHGDFMMRPNDHLNGQRCPKCSSVFSKGENEVFELIKRYYPDAQQRVRDVIPPLELDIYIPSLKLAVEYNGEFWHSVDK

SEQ ID NO: 28202 - protein, 85 aa, unidentified
  REGION 1..85: note = Description of Unknown:cds_NC_010495.1_cds_YP_001742076.1_39 target sequence
KGKNYHLNKRHACEEVGVRLISVCETDWKTKRERVERIILNAIGKYSCENVYARKCAIREVICKDYRAFMNENHIQGYAIATHRY

SEQ ID NO: 28203 - protein, 85 aa, unidentified
  REGION 1..85: note = Description of Unknown:cds_NC_010495.1_cds_YP_001742076.1_39 target sequence
GLYYGDDLVACMGFKQLKDGVWDCVRYATSCRVPGGHSKLFKFMSKELDMERAQSFVDMDFFTGDSYREEDGWVDSGYETVGFRV

SEQ ID NO: 28204 - protein, 84 aa, unidentified
  REGION 1..84: note = Description of Unknown:cds_NC_010495.1_cds_YP_001742076.1_39 target sequence
GDSYREEDGWVDSGYETVGFRVWHQKVGFMPRQKWWKDFIPKTLEQLGADPAIYDRNKKQRQMMEEAGCLVIENSGNKKFVWHK

SEQ ID NO: 28205 - protein, 85 aa, unidentified
  REGION 1..85: note = Description of Unknown:cds_NC_010495.1_cds_YP_001742076.1_39 target sequence
YSKVEYVNAKTKVCVICPEHGEFWQIPNDHLNKHGCFLCGGSSKGSANLFIEKARLLHGKHYDYSKVFYVNAKTKVKIICKHHGE

SEQ ID NO: 28206 - protein, 85 aa, unidentified
  REGION 1..85: note = Description of Unknown:cds_NC_010495.1_cds_YP_001742076.1_39 target sequence
FMQSPNDHLNGRGCAMCKSDKMSREQLLTSNDFILSARIRHGDRYDYGKVNYIGSKEKVCITCHAHGDFMMRPNDHLNGQRCPKC

SEQ ID NO: 28207 - protein, 85 aa, unidentified
  REGION 1..85: note = Description of Unknown:cds_NC_010495.1_cds_YP_001742076.1_39 target sequence
SSVFSKGENEVFELIKRYYPDAQQRVRDVIPPLELDIYIPSLKLAVEYNGEFWHSVDKKGKNYHLNKRHACEEVGVRLISVCETD

SEQ ID NO: 28208 - protein, 85 aa, unidentified
  REGION 1..85: note = Description of Unknown:cds_NC_010495.1_cds_YP_001742076.1_39 target sequence
WKTKRERVERIILNAIGKYSCENVYARKCAIREVICKDYRAFMNENHIQGYAIATHRYGLYYGDDLVACMGFKQLKDGVWDCVRY

SEQ ID NO: 28209 - protein, 85 aa, unidentified
  REGION 1..85: note = Description of Unknown:cds_NC_010495.1_cds_YP_001742076.1_39 target sequence
ATSCRVPGGHSKLFKFMSKELDMERAQSFVDMDFFTGDSYREEDGWVDSGYETVGFRVWHQKVGFMPRQKWWKDFIPKTLEQLGA

SEQ ID NO: 28210 - protein, 85 aa, unidentified
  REGION 1..85: note = Description of Unknown:cds_NC_024711.1_cds_YP_009052495.1_14 target sequence
IGNLNIANSNRKDTNIKFTKDQEIAVHELIEFLAQPWDNKKFINALCGAGGTGKTFVIKYVINNCKWSGGVIGCAAPTHKACRVL

SEQ ID NO: 28211 - protein, 85 aa, unidentified
  REGION 1..85: note = Description of Unknown:cds_NC_024711.1_cds_YP_009052495.1_14 target sequence
SNSIGGKEVNTIQSLFGFRLDVNIENFDPENPAFNPVGKDKLDGLKVLIIDEASMLNAKLVKYISNKCKKLQIKVIMLGDSSQLP

SEQ ID NO: 28212 - protein, 85 aa, unidentified
  REGION 1..85: note = Description of Unknown:cds_NC_024711.1_cds_YP_009052495.1_14 target sequence
PVNEKTSQAFLIASNTYYLKEVVRQGDNNPISKLLKLLREDIDNKNGWKFLDYISKNRQDYNEETKGFYVCGQTEFSDLIDTCFN

SEQ ID NO: 28213 - protein, 85 aa, unidentified
  REGION 1..85: note = Description of Unknown:cds_NC_024711.1_cds_YP_009052495.1_14 target sequence
DEEYTKNIDLYRIIAYTNSRVAQWNNHVRHMIIQDADKSLITRNDLIMSYTTVVNVFNDIIINNSEEYIVKDIVDTIDNDYEFKG

SEQ ID NO: 28214 - protein, 85 aa, unidentified
  REGION 1..85: note = Description of Unknown:cds_NC_024711.1_cds_YP_009052495.1_14 target sequence
FLIKFQAIHGGAITQPLFVIDHYDNYTFQMYYKKLTSLIDDAKKASSSERGSKWKQYFDFKRKYLIASNITNSNGKILFSRDLDY

SEQ ID NO: 28215 - protein, 84 aa, unidentified
  REGION 1..84: note = Description of Unknown:cds_NC_024711.1_cds_YP_009052495.1_14 target sequence
RKYLIASNITNSNGKILFSRDLDYGFAITSHRAQGSTYKNVFVDINDMIYDKYGHPYTNRDEMLRRLYVACSRASNQLVLSYGK

SEQ ID NO: 28216 - protein, 85 aa, unidentified
  REGION 1..85: note = Description of Unknown:cds_NC_024711.1_cds_YP_009052495.1_14 target sequence
ELIEFLAQPWDNKKFINALCGAGGTGKTFVIKYVINNCKWSGGVIGCAAPTHKACRVLSNSIGGKEVNTIQSLFGFRLDVNIENF

SEQ ID NO: 28217 - protein, 85 aa, unidentified
  REGION 1..85: note = Description of Unknown:cds_NC_024711.1_cds_YP_009052495.1_14 target sequence
DPENPAFNPVGKDKLDGLKVLIIDEASMLNAKLVKYISNKCKKLQIKVIMLGDSSQLPPVNEKTSQAFLIASNTYYLKEVVRQGD

SEQ ID NO: 28218 - protein, 85 aa, unidentified
  REGION 1..85: note = Description of Unknown:cds_NC_024711.1_cds_YP_009052495.1_14 target sequence
NNPISKLLKLLREDIDNKNGWKFLDYISKNRQDYNEETKGFYVCGQTEFSDLIDTCFNDEEYTKNIDLYRIIAYTNSRVAQWNNH

SEQ ID NO: 28219 - protein, 85 aa, unidentified
  REGION 1..85: note = Description of Unknown:cds_NC_024711.1_cds_YP_009052495.1_14 target sequence
VRHMIIQDADKSLITRNDLIMSYTTVVNVFNDIIINNSEEYIVKDIVDTIDNDYEFKGFLIKFQAIHGGAITQPLFVIDHYDNYT

SEQ ID NO: 28220 - protein, 85 aa, unidentified
  REGION 1..85: note = Description of Unknown:cds_NC_024711.1_cds_YP_009052495.1_14 target sequence
FQMYYKKLTSLIDDAKKASSSERGSKWKQYFDFKRKYLIASNITNSNGKILFSRDLDYGFAITSHRAQGSTYKNVFVDINDMIYD

SEQ ID NO: 28221 - protein, 85 aa, unidentified
  REGION 1..85: note = Description of Unknown:cds_NC_024711.1_cds_YP_009052532.2_54 target sequence
NFNLVEMYNGLLRFNKHILNELAEGLKHLPNLDGVSKGDSLIINEQGNPAWGSAAFIPTFENAAYGIEWTKDNNDIIRIGNAKFH

SEQ ID NO: 28222 - protein, 85 aa, unidentified
  REGION 1..85: note = Description of Unknown:cds_NC_024711.1_cds_YP_009052532.2_54 target sequence
RELPIQNRLKGCVYNEKKISYFLNPTGWAKPLENGLIPPLDGSDGDVGVRVPEFYMCVKDTGTKYQLWISDFNIDGTFTRVHPFI

SEQ ID NO: 28223 - protein, 85 aa, unidentified
  REGION 1..85: note = Description of Unknown:cds_NC_024711.1_cds_YP_009052532.2_54 target sequence
ISHTKTMTRTREDGKEEVFSACIKPDDTRYLGGNKSSSVVATKLQGRPRTGISYDKANEFCANRGDWITMIDYLEYCALQALCYI

SEQ ID NO: 28224 - protein, 85 aa, unidentified
  REGION 1..85: note = Description of Unknown:cds_NC_024711.1_cds_YP_009052532.2_54 target sequence
EYANFDNQATLNVNLTSDGFKQGGLSAGVTNLDWDRWTAFNGNNPIVQTYWTAEHNIGNGSTNGDFYTLGNYNADGSNFDTYPAV

SEQ ID NO: 28225 - protein, 85 aa, unidentified
  REGION 1..85: note = Description of Unknown:cds_NC_024711.1_cds_YP_009052532.2_54 target sequence
YRGILNFFGDILTFVRDVAIINRNANYNSVYLLKKGVNHSDVTIDNIQDKCYFIGDQANTDGFITEFDFRFGPYFVPNKVGTNKK

SEQ ID NO: 28226 - protein, 84 aa, unidentified
  REGION 1..84: note = Description of Unknown:cds_NC_024711.1_cds_YP_009052532.2_54 target sequence
GFITEFDFRFGPYFVPNKVGTNKKADYNSKRGSDGQDTDKAVRVLLLGGGAHYDSSADSGFFYSNWVRSGSLANVGFFTTVKLD

SEQ ID NO: 28227 - protein, 85 aa, unidentified
  REGION 1..85: note = Description of Unknown:cds_NC_024711.1_cds_YP_009052532.2_54 target sequence
HLPNLDGVSKGDSLIINEQGNPAWGSAAFIPTFENAAYGIEWTKDNNDIIRIGNAKFHRELPIQNRLKGCVYNEKKISYFLNPTG

SEQ ID NO: 28228 - protein, 85 aa, unidentified
  REGION 1..85: note = Description of Unknown:cds_NC_024711.1_cds_YP_009052532.2_54 target sequence
WAKPLENGLIPPLDGSDGDVGVRVPEFYMCVKDTGTKYQLWISDFNIDGTFTRVHPFIISHTKTMTRTREDGKEEVFSACIKPDD

SEQ ID NO: 28229 - protein, 85 aa, unidentified
  REGION 1..85: note = Description of Unknown:cds_NC_024711.1_cds_YP_009052532.2_54 target sequence
TRYLGGNKSSSVVATKLQGRPRTGISYDKANEFCANRGDWITMIDYLEYCALQALCYIEYANFDNQATLNVNLTSDGFKQGGLSA

SEQ ID NO: 28230 - protein, 85 aa, unidentified
  REGION 1..85: note = Description of Unknown:cds_NC_024711.1_cds_YP_009052532.2_54 target sequence
GVTNLDWDRWTAFNGNNPIVQTYWTAEHNIGNGSTNGDFYTLGNYNADGSNFDTYPAVYRGILNFFGDILTFVRDVAIINRNANY

SEQ ID NO: 28231 - protein, 85 aa, unidentified
  REGION 1..85: note = Description of Unknown:cds_NC_024711.1_cds_YP_009052532.2_54 target sequence
NSVYLLKKGVNHSDVTIDNIQDKCYFIGDQANTDGFITEFDFRFGPYFVPNKVGTNKKADYNSKRGSDGQDTDKAVRVLLLGGGA

SEQ ID NO: 28232 - protein, 85 aa, unidentified
  REGION 1..85: note = Description of Unknown:cds_NZ_WFIY01000004.1_cds_WP_155863219.1_1165 target sequence
APQSALQQILDQIDTRKLNKFYWIITILAAIGGFLFGYDTSVIAIASVFVPYHFTGLVYGYEIASASLGAAIGAIIAYFYTDRFG

SEQ ID NO: 28233 - protein, 85 aa, unidentified
  REGION 1..85: note = Description of Unknown:cds_NZ_WFIY01000004.1_cds_WP_155863219.1_1165 target sequence
RKSLLIVDAAIYTAAAILSALTINGIMLLIMRTVIGVAIGADSAVATAYITEYAPKDKRGSLAIIQQWMITIGILGSYFVGSTVL

SEQ ID NO: 28234 - protein, 85 aa, unidentified
  REGION 1..85: note = Description of Unknown:cds_NZ_WFIY01000004.1_cds_WP_155863219.1_1165 target sequence
FLAPSLAYTVDWRLILGLAAIPAIIGLIFRFMMPESPRWLLLSGQVDKLKDALRRFRVNVSDDLINKAISEVRYEESQKFDTATK

SEQ ID NO: 28235 - protein, 85 aa, unidentified
  REGION 1..85: note = Description of Unknown:cds_NZ_WFIY01000004.1_cds_WP_155863219.1_1165 target sequence
RAFLVVALWIIFQQITGINVPFYYGPAIILQLHLFGSTSNPVYSEIYSVLAATILAVINTTATYIAFKYIDRIGRRKLAISAYIG

SEQ ID NO: 28236 - protein, 85 aa, unidentified
  REGION 1..85: note = Description of Unknown:cds_NZ_WFIY01000004.1_cds_WP_155863219.1_1165 target sequence
MFASDLIGGILVMNGILVGALFAFAGFIIFFAYGVGGTGWLIQAEYFKTAVRGRMAAIIALLDWLANFVIIEVFPVMLSSVGLAG

SEQ ID NO: 28237 - protein, 84 aa, unidentified
  REGION 1..84: note = Description of Unknown:cds_NZ_WFIY01000004.1_cds_WP_155863219.1_1165 target sequence
LDWLANFVIIEVFPVMLSSVGLAGSMFIFSALDAIALAIVYFLLPETKGLSLEQVVKMFGETPVSQLRKGRELVLQKEKKEIAR

SEQ ID NO: 28238 - protein, 85 aa, unidentified
  REGION 1..85: note = Description of Unknown:cds_NZ_WFIY01000004.1_cds_WP_155863219.1_1165 target sequence
LAAIGGFLFGYDTSVIAIASVFVPYHFTGLVYGYEIASASLGAAIGAIIAYFYTDRFGRKSLLIVDAAIYTAAAILSALTINGIM

SEQ ID NO: 28239 - protein, 85 aa, unidentified
  REGION 1..85: note = Description of Unknown:cds_NZ_WFIY01000004.1_cds_WP_155863219.1_1165 target sequence
LLIMRTVIGVAIGADSAVATAYITEYAPKDKRGSLAIIQQWMITIGILGSYFVGSTVLFLAPSLAYTVDWRLILGLAAIPAIIGL

SEQ ID NO: 28240 - protein, 85 aa, unidentified
  REGION 1..85: note = Description of Unknown:cds_NZ_WFIY01000004.1_cds_WP_155863219.1_1165 target sequence
IFRFMMPESPRWLLLSGQVDKLKDALRRFRVNVSDDLINKAISEVRYEESQKFDTATKRAFLVVALWIIFQQITGINVPFYYGPA

SEQ ID NO: 28241 - protein, 85 aa, unidentified
  REGION 1..85: note = Description of Unknown:cds_NZ_WFIY01000004.1_cds_WP_155863219.1_1165 target sequence
IILQLHLFGSTSNPVYSEIYSVLAATILAVINTTATYIAFKYIDRIGRRKLAISAYIGMFASDLIGGILVMNGILVGALFAFAGF

SEQ ID NO: 28242 - protein, 85 aa, unidentified
  REGION 1..85: note = Description of Unknown:cds_NZ_WFIY01000004.1_cds_WP_155863219.1_1165 target sequence
IIFFAYGVGGTGWLIQAEYFKTAVRGRMAAIIALLDWLANFVIIEVFPVMLSSVGLAGSMFIFSALDAIALAIVYFLLPETKGLS

SEQ ID NO: 28243 - protein, 85 aa, unidentified
  REGION 1..85: note = Description of Unknown:cds_NZ_WFIY01000004.1_cds_WP_155863998.1_1924 target sequence
FRTLYVGFKLFPRVLMLRHYRRLTLENKKVNEKDIEKEAEKMLNTLVSLGPAFIKLGQILSVHSDLLPEAYLKVLSRLQDNVPPA

SEQ ID NO: 28244 - protein, 85 aa, unidentified
  REGION 1..85: note = Description of Unknown:cds_NZ_WFIY01000004.1_cds_WP_155863998.1_1924 target sequence
PWEEVYEEIKEDLGDEFLKRLNINPNPIASASIAQVYLADLDGKKVVLKVNRPNIRKEVEEDIKAMKTLVPFLKYIFDESFYESA

SEQ ID NO: 28245 - protein, 85 aa, unidentified
  REGION 1..85: note = Description of Unknown:cds_NZ_WFIY01000004.1_cds_WP_155863998.1_1924 target sequence
KAIIDDFSSRIFDEMDFTKEEFYMRKIKEELNFPDVKIPQPIYATKRVLIMEYVKSYKVTSEEAKKIIPPETLSYKVFRTFMVML

SEQ ID NO: 28246 - protein, 85 aa, unidentified
  REGION 1..85: note = Description of Unknown:cds_NZ_WFIY01000004.1_cds_WP_155863998.1_1924 target sequence
LEKEYFHADPHPGNIGVDDEGNLVLYDFGMVGKMDKDTRNKLIRAYVALTRLDGIELVKVLDELGAIQPEANRELLAKGIELFLK

SEQ ID NO: 28247 - protein, 85 aa, unidentified
  REGION 1..85: note = Description of Unknown:cds_NZ_WFIY01000004.1_cds_WP_155863998.1_1924 target sequence
TFQGVTPETLKVEDFISAANEVFYRFPLRLPQKLVLYIRTTSTLGGTCITIYPEFNFFSNLVKLIEDEDLVIPALIDQVKDTLSS

SEQ ID NO: 28248 - protein, 84 aa, unidentified
  REGION 1..84: note = Description of Unknown:cds_NZ_WFIY01000004.1_cds_WP_155863998.1_1924 target sequence
VKLIEDEDLVIPALIDQVKDTLSSLARKFRTSLLERPVIERKNNTGGEYYLSLGIAILSILSYIFTKNITLALLLIIFALIIKR

SEQ ID NO: 28249 - protein, 85 aa, unidentified
  REGION 1..85: note = Description of Unknown:cds_NZ_WFIY01000004.1_cds_WP_155863998.1_1924 target sequence
KKVNEKDIEKEAEKMLNTLVSLGPAFIKLGQILSVHSDLLPEAYLKVLSRLQDNVPPAPWEEVYEEIKEDLGDEFLKRLNINPNP

SEQ ID NO: 28250 - protein, 85 aa, unidentified
  REGION 1..85: note = Description of Unknown:cds_NZ_WFIY01000004.1_cds_WP_155863998.1_1924 target sequence
IASASIAQVYLADLDGKKVVLKVNRPNIRKEVEEDIKAMKTLVPFLKYIFDESFYESAKAIIDDFSSRIFDEMDFTKEEFYMRKI

SEQ ID NO: 28251 - protein, 85 aa, unidentified
  REGION 1..85: note = Description of Unknown:cds_NZ_WFIY01000004.1_cds_WP_155863998.1_1924 target sequence
KEELNFPDVKIPQPIYATKRVLIMEYVKSYKVTSEEAKKIIPPETLSYKVFRTFMVMLLEKEYFHADPHPGNIGVDDEGNLVLYD

SEQ ID NO: 28252 - protein, 85 aa, unidentified
  REGION 1..85: note = Description of Unknown:cds_NZ_WFIY01000004.1_cds_WP_155863998.1_1924 target sequence
FGMVGKMDKDTRNKLIRAYVALTRLDGIELVKVLDELGAIQPEANRELLAKGIELFLKTFQGVTPETLKVEDFISAANEVFYRFP

SEQ ID NO: 28253 - protein, 85 aa, unidentified
  REGION 1..85: note = Description of Unknown:cds_NZ_WFIY01000004.1_cds_WP_155863998.1_1924 target sequence
LRLPQKLVLYIRTTSTLGGTCITIYPEFNFFSNLVKLIEDEDLVIPALIDQVKDTLSSLARKFRTSLLERPVIERKNNTGGEYYL

SEQ ID NO: 28254 - protein, 85 aa, unidentified
  REGION 1..85: note = Description of Unknown:hvTR_P04498 target sequence
ASNQHSQRERTPDRSAQPPPPKMGRYFLDSESEEELEAVPLPPKKKVKKSMAAIPLSPESAEEEEAEPPRAVLGVMGFSMPPVRI

SEQ ID NO: 28255 - protein, 85 aa, unidentified
  REGION 1..85: note = Description of Unknown:hvTR_P04498 target sequence
MHHADGSQSFQKMETRQVHVLKASAQNSDENEKNVVVVRNPASQPLVSAWEKGMEAMAMLMEKYHVDHDERATFRFLPDQGSVYK

SEQ ID NO: 28256 - protein, 85 aa, unidentified
  REGION 1..85: note = Description of Unknown:hvTR_P04498 target sequence
KICTTWLNEEKRGLQLTFSSQKTFQELMGRFLQGYMQAYAGVQQNSWEPTGCCVWEHKCTEREGELRCLHGMEMVRKEHLVEMDV

SEQ ID NO: 28257 - protein, 85 aa, unidentified
  REGION 1..85: note = Description of Unknown:hvTR_P04498 target sequence
TSESGQRALKENPSKAKVAQNRWGRNVVQIKNDDARCCFHDVGCGNNSFSGKSCGLFYSEGMKAQIAFRQIEAFMLADYPHMRHG

SEQ ID NO: 28258 - protein, 85 aa, unidentified
  REGION 1..85: note = Description of Unknown:hvTR_P04498 target sequence
QKRLLMPVRCECLNKQDGLPRMGRQLCKITPFNLSNVDNIDINEVTDPGALASIKYPCLLVFQCANPVYRNARGNAGPNCDFKIS

SEQ ID NO: 28259 - protein, 84 aa, unidentified
  REGION 1..84: note = Description of Unknown:hvTR_P04498 target sequence
LVFQCANPVYRNARGNAGPNCDFKISAPDVMGALQLVRQLWGENFDGSPPRLVIPEFKWHQRLQYRNISLPTNHGDCREEPFDF

SEQ ID NO: 28260 - protein, 85 aa, unidentified
  REGION 1..85: note = Description of Unknown:hvTR_P04498 target sequence
LDSESEEELEAVPLPPKKKVKKSMAAIPLSPESAEEEEAEPPRAVLGVMGFSMPPVRIMHHADGSQSFQKMETRQVHVLKASAQN

SEQ ID NO: 28261 - protein, 85 aa, unidentified
  REGION 1..85: note = Description of Unknown:hvTR_P04498 target sequence
SDENEKNVVVVRNPASQPLVSAWEKGMEAMAMLMEKYHVDHDERATFRFLPDQGSVYKKICTTWLNEEKRGLQLTFSSQKTFQEL

SEQ ID NO: 28262 - protein, 85 aa, unidentified
  REGION 1..85: note = Description of Unknown:hvTR_P04498 target sequence
MGRFLQGYMQAYAGVQQNSWEPTGCCVWEHKCTEREGELRCLHGMEMVRKEHLVEMDVTSESGQRALKENPSKAKVAQNRWGRNV

SEQ ID NO: 28263 - protein, 85 aa, unidentified
  REGION 1..85: note = Description of Unknown:hvTR_P04498 target sequence
VQIKNDDARCCFHDVGCGNNSFSGKSCGLFYSEGMKAQIAFRQIEAFMLADYPHMRHGQKRLLMPVRCECLNKQDGLPRMGRQLC

SEQ ID NO: 28264 - protein, 85 aa, unidentified
  REGION 1..85: note = Description of Unknown:hvTR_P04498 target sequence
KITPFNLSNVDNIDINEVTDPGALASIKYPCLLVFQCANPVYRNARGNAGPNCDFKISAPDVMGALQLVRQLWGENFDGSPPRLV

SEQ ID NO: 28265 - protein, 85 aa, unidentified
  REGION 1..85: note = Description of Unknown:cds_NZ_WFIY01000004.1_cds_WP_155863177.1_1108 target sequence
DYDLNYAKKALYIMAPLAIMVMYTEGMLIPSLPSIEREFNVTTSQASWIISIYLLSGIIMNPIAGKLGDIYGKKKILSIVIWIYA

SEQ ID NO: 28266 - protein, 85 aa, unidentified
  REGION 1..85: note = Description of Unknown:cds_NZ_WFIY01000004.1_cds_WP_155863177.1_1108 target sequence
IGVTLTGFSPNFIALIIFRAIQGLGLAMFPLAFSLIREEFPPNLVPKAQGTISAMFGIGSAISLPIGAYISQTLGWQYTYHTVIP

SEQ ID NO: 28267 - protein, 85 aa, unidentified
  REGION 1..85: note = Description of Unknown:cds_NZ_WFIY01000004.1_cds_WP_155863177.1_1108 target sequence
LVIILAVLIIKEIRESRVRLQDYKIDYIGAGILGTSLAGIIVGTTEAPSWGWTSFSTISLLSLSIVIFGIFIFFESKVKYPLISV

SEQ ID NO: 28268 - protein, 85 aa, unidentified
  REGION 1..85: note = Description of Unknown:cds_NZ_WFIY01000004.1_cds_WP_155863177.1_1108 target sequence
NLLRRRNVLISNLAAVVAGFAIFMAYQSLTYLFEEPTPIGYNLDIFTTGLSLLPLALIQIIGAMSAGRSISLKGPKPILILGSGI

SEQ ID NO: 28269 - protein, 85 aa, unidentified
  REGION 1..85: note = Description of Unknown:cds_NZ_WFIY01000004.1_cds_WP_155863177.1_1108 target sequence
LIPTYFITSLLVYNGSSTPIMLIILISSISMLGAAFLNVALINLLTFSVEREVMGISTSINTVFRLIGGSLGPAIAGSIMDTFTT

SEQ ID NO: 28270 - protein, 84 aa, unidentified
  REGION 1..84: note = Description of Unknown:cds_NZ_WFIY01000004.1_cds_WP_155863177.1_1108 target sequence
INTVFRLIGGSLGPAIAGSIMDTFTTAIEFPVIYNNHLTYIVTTIPSDYSFSVIYIISGIVAVIMTILASLSVNITYKKLSTSK

SEQ ID NO: 28271 - protein, 85 aa, unidentified
  REGION 1..85: note = Description of Unknown:cds_NZ_WFIY01000004.1_cds_WP_155863177.1_1108 target sequence
LIPSLPSIEREFNVTTSQASWIISIYLLSGIIMNPIAGKLGDIYGKKKILSIVIWIYAIGVTLTGFSPNFIALIIFRAIQGLGLA

SEQ ID NO: 28272 - protein, 85 aa, unidentified
  REGION 1..85: note = Description of Unknown:cds_NZ_WFIY01000004.1_cds_WP_155863177.1_1108 target sequence
MFPLAFSLIREEFPPNLVPKAQGTISAMFGIGSAISLPIGAYISQTLGWQYTYHTVIPLVIILAVLIIKEIRESRVRLQDYKIDY

SEQ ID NO: 28273 - protein, 85 aa, unidentified
  REGION 1..85: note = Description of Unknown:cds_NZ_WFIY01000004.1_cds_WP_155863177.1_1108 target sequence
IGAGILGTSLAGIIVGTTEAPSWGWTSFSTISLLSLSIVIFGIFIFFESKVKYPLISVNLLRRRNVLISNLAAVVAGFAIFMAYQ

SEQ ID NO: 28274 - protein, 85 aa, unidentified
  REGION 1..85: note = Description of Unknown:cds_NZ_WFIY01000004.1_cds_WP_155863177.1_1108 target sequence
SLTYLFEEPTPIGYNLDIFTTGLSLLPLALIQIIGAMSAGRSISLKGPKPILILGSGILIPTYFITSLLVYNGSSTPIMLIILIS

SEQ ID NO: 28275 - protein, 85 aa, unidentified
  REGION 1..85: note = Description of Unknown:cds_NZ_WFIY01000004.1_cds_WP_155863177.1_1108 target sequence
SISMLGAAFLNVALINLLTFSVEREVMGISTSINTVFRLIGGSLGPAIAGSIMDTFTTAIEFPVIYNNHLTYIVTTIPSDYSFSV

SEQ ID NO: 28276 - protein, 85 aa, unidentified
  REGION 1..85: note = Description of Unknown:cds_NZ_WFIY01000004.1_cds_WP_155863445.1_1416 target sequence
EKIEWLKRDILHILDLIPLSTSSVAPTFSIAAAYGSMVALMGPSAIMAVVVSFPFFLFASIIFRQLNRKAPHAGASYHWGMALVN

SEQ ID NO: 28277 - protein, 85 aa, unidentified
  REGION 1..85: note = Description of Unknown:cds_NZ_WFIY01000004.1_cds_WP_155863445.1_1416 target sequence
KKYGSFQFWIVSLAYFLSLPPIIIPAGEYTLDLLYRLHMISRAMELSVFWDSIVGMIWAAIAAIPLLLGAKPTARFTEAFLVIEL

SEQ ID NO: 28278 - protein, 85 aa, unidentified
  REGION 1..85: note = Description of Unknown:cds_NZ_WFIY01000004.1_cds_WP_155863445.1_1416 target sequence
IILSSFIGIGLVELPTHVINKFSFSWFFSPSWLMNPSMFLSLTATMVIVATILDGWEIDSYASEESKKPTRWPGNSGIIGLISVF

SEQ ID NO: 28279 - protein, 85 aa, unidentified
  REGION 1..85: note = Description of Unknown:cds_NZ_WFIY01000004.1_cds_WP_155863445.1_1416 target sequence
IIYMITMPIMTIETPISALSSSIDPLARWASYVIPNYVWLMDIAVIASTASSLWLTAYILSRAWYAGGREGLLPRIFSKVHSKYG

SEQ ID NO: 28280 - protein, 85 aa, unidentified
  REGION 1..85: note = Description of Unknown:cds_NZ_WFIY01000004.1_cds_WP_155863445.1_1416 target sequence
SPWFNIMIITVLEIFVQGLELVSPSMQSFFGIVLTGAGAFLLMEFAIDSTTATITWWRNKSSGAIDVLLRVISPLTAFVMFSVII

SEQ ID NO: 28281 - protein, 84 aa, unidentified
  REGION 1..84: note = Description of Unknown:cds_NZ_WFIY01000004.1_cds_WP_155863445.1_1416 target sequence
KSSGAIDVLLRVISPLTAFVMFSVIIMGIIEAGPAFGIPSTNYAIAIITMILPGIYFTFRSYKAKIIVPEWISREIKEERNKLR

SEQ ID NO: 28282 - protein, 85 aa, unidentified
  REGION 1..85: note = Description of Unknown:cds_NZ_WFIY01000004.1_cds_WP_155863445.1_1416 target sequence
FSIAAAYGSMVALMGPSAIMAVVVSFPFFLFASIIFRQLNRKAPHAGASYHWGMALVNKKYGSFQFWIVSLAYFLSLPPIIIPAG

SEQ ID NO: 28283 - protein, 85 aa, unidentified
  REGION 1..85: note = Description of Unknown:cds_NZ_WFIY01000004.1_cds_WP_155863445.1_1416 target sequence
EYTLDLLYRLHMISRAMELSVFWDSIVGMIWAAIAAIPLLLGAKPTARFTEAFLVIELIILSSFIGIGLVELPTHVINKFSFSWF

SEQ ID NO: 28284 - protein, 85 aa, unidentified
  REGION 1..85: note = Description of Unknown:cds_NZ_WFIY01000004.1_cds_WP_155863445.1_1416 target sequence
FSPSWLMNPSMFLSLTATMVIVATILDGWEIDSYASEESKKPTRWPGNSGIIGLISVFIIYMITMPIMTIETPISALSSSIDPLA

SEQ ID NO: 28285 - protein, 85 aa, unidentified
  REGION 1..85: note = Description of Unknown:cds_NZ_WFIY01000004.1_cds_WP_155863445.1_1416 target sequence
RWASYVIPNYVWLMDIAVIASTASSLWLTAYILSRAWYAGGREGLLPRIFSKVHSKYGSPWFNIMIITVLEIFVQGLELVSPSMQ

SEQ ID NO: 28286 - protein, 85 aa, unidentified
  REGION 1..85: note = Description of Unknown:cds_NZ_WFIY01000004.1_cds_WP_155863445.1_1416 target sequence
SFFGIVLTGAGAFLLMEFAIDSTTATITWWRNKSSGAIDVLLRVISPLTAFVMFSVIIMGIIEAGPAFGIPSTNYAIAIITMILP

SEQ ID NO: 28287 - protein, 85 aa, unidentified
  REGION 1..85: note = Description of Unknown:cds_NZ_WFIY01000004.1_cds_WP_155862362.1_93 target sequence
DIKSRTLLILSLMLLIVNYVETMVVPALPTIERDFSISATLAGWVTSAYMIVAAATSPLMGKLADTYGKKKMYVTAIGFYIIAVA

SEQ ID NO: 28288 - protein, 85 aa, unidentified
  REGION 1..85: note = Description of Unknown:cds_NZ_WFIY01000004.1_cds_WP_155862362.1_93 target sequence
MAGFSPNIWVLLGARAIQGVGFSMFPIAIAYITDLYPKEKVAFAQAILSAMIGIGPALGLLIGSYVVEDLGWPYAFHTAAILSLI

SEQ ID NO: 28289 - protein, 85 aa, unidentified
  REGION 1..85: note = Description of Unknown:cds_NZ_WFIY01000004.1_cds_WP_155862362.1_93 target sequence
LFIISIKYLPHTGIRYKEKVDYLGSTLIGLATVLVLVYITEGPTLGWTSVCNLSLLISGLLTYGIFIAAERKIKEPLLRLDLFKI

SEQ ID NO: 28290 - protein, 85 aa, unidentified
  REGION 1..85: note = Description of Unknown:cds_NZ_WFIY01000004.1_cds_WP_155862362.1_93 target sequence
RNFAVANLVGIISGVGMFTVFIFLVYYSQLPSPYGLGLSIIQSGLLMSPVAFGMVIFGPMFGRALPKIGPKPILILGSLLSSLAY

SEQ ID NO: 28291 - protein, 85 aa, unidentified
  REGION 1..85: note = Description of Unknown:cds_NZ_WFIY01000004.1_cds_WP_155862362.1_93 target sequence
IMLIYYRSNPTEVLIDGFVSSIGLVAVIIPLVNMVALSLPDQYRTTGMGMNALLRTIGGAAGPVVATSFMQTYQAPVIMVYDNQP

SEQ ID NO: 28292 - protein, 84 aa, unidentified
  REGION 1..84: note = Description of Unknown:cds_NZ_WFIY01000004.1_cds_WP_155862362.1_93 target sequence
GAAGPVVATSFMQTYQAPVIMVYDNQPLVLGFMPSSTAFNYIALFGLAMMILTLIVSLWTKNYTFREVAVKGSNNAHLKNEYTR

SEQ ID NO: 28293 - protein, 85 aa, unidentified
  REGION 1..85: note = Description of Unknown:cds_NZ_WFIY01000004.1_cds_WP_155862362.1_93 target sequence
LPTIERDFSISATLAGWVTSAYMIVAAATSPLMGKLADTYGKKKMYVTAIGFYIIAVAMAGFSPNIWVLLGARAIQGVGFSMFPI

SEQ ID NO: 28294 - protein, 85 aa, unidentified
  REGION 1..85: note = Description of Unknown:cds_NZ_WFIY01000004.1_cds_WP_155862362.1_93 target sequence
AIAYITDLYPKEKVAFAQAILSAMIGIGPALGLLIGSYVVEDLGWPYAFHTAAILSLILFIISIKYLPHTGIRYKEKVDYLGSTL

SEQ ID NO: 28295 - protein, 85 aa, unidentified
  REGION 1..85: note = Description of Unknown:cds_NZ_WFIY01000004.1_cds_WP_155862362.1_93 target sequence
IGLATVLVLVYITEGPTLGWTSVCNLSLLISGLLTYGIFIAAERKIKEPLLRLDLFKIRNFAVANLVGIISGVGMFTVFIFLVYY

SEQ ID NO: 28296 - protein, 85 aa, unidentified
  REGION 1..85: note = Description of Unknown:cds_NZ_WFIY01000004.1_cds_WP_155862362.1_93 target sequence
SQLPSPYGLGLSIIQSGLLMSPVAFGMVIFGPMFGRALPKIGPKPILILGSLLSSLAYIMLIYYRSNPTEVLIDGFVSSIGLVAV

SEQ ID NO: 28297 - protein, 85 aa, unidentified
  REGION 1..85: note = Description of Unknown:cds_NZ_WFIY01000004.1_cds_WP_155862362.1_93 target sequence
IIPLVNMVALSLPDQYRTTGMGMNALLRTIGGAAGPVVATSFMQTYQAPVIMVYDNQPLVLGFMPSSTAFNYIALFGLAMMILTL

SEQ ID NO: 28298 - protein, 85 aa, unidentified
  REGION 1..85: note = Description of Unknown:cds_NZ_WFIY01000004.1_cds_WP_155863712.1_1573 target sequence
IRYFYYFLNTHFFVLKKPVRTISGVAPVSIMTHPHRCPHGKCIFCPGGVEYNTPQSYYGREPTLMRAIENNFDPYCQVRSRLAQY

SEQ ID NO: 28299 - protein, 85 aa, unidentified
  REGION 1..85: note = Description of Unknown:cds_NZ_WFIY01000004.1_cds_WP_155863712.1_1573 target sequence
FENGHFPNKVELIIMGGTFLSLPLDYQDWFVTNALEAMNNFPKKKEKGKFVYLEDAQLRNETAQIRCVGMTIETKPDWGKEWHAN

SEQ ID NO: 28300 - protein, 85 aa, unidentified
  REGION 1..85: note = Description of Unknown:cds_NZ_WFIY01000004.1_cds_WP_155863712.1_1573 target sequence
QMLRLGATKVELGVQTIYDDILKRVNRGHTVKDSIESTRILKDSGFKIVYHIMLGLPGADPDKDLETIKEIFANPDFMPDMLKIY

SEQ ID NO: 28301 - protein, 85 aa, unidentified
  REGION 1..85: note = Description of Unknown:cds_NZ_WFIY01000004.1_cds_WP_155863712.1_1573 target sequence
PTLVVETAPLAELWKRGLYTPYDTDTLVEIISEAYRYIPKWVRIMRIQRDIPANIILAGNKKGNLRELVEKRAEEKGIEIKEIRY

SEQ ID NO: 28302 - protein, 85 aa, unidentified
  REGION 1..85: note = Description of Unknown:cds_NZ_WFIY01000004.1_cds_WP_155863712.1_1573 target sequence
REVGVAWLHRKIKPDRISLHKEIYEASGGTEVFLSFESDNGLIIGYLRLRKPGNSHRKEIDEKTTIVRELHVYGEEVPIGEKKDE

SEQ ID NO: 28303 - protein, 84 aa, unidentified
  REGION 1..84: note = Description of Unknown:cds_NZ_WFIY01000004.1_cds_WP_155863712.1_1573 target sequence
EIDEKTTIVRELHVYGEEVPIGEKKDEAYQHKGYGSALLKEAERISLEEFDAKKILVLSGIGVREYYRQKGYIRYGPYMAKQLA

SEQ ID NO: 28304 - protein, 85 aa, unidentified
  REGION 1..85: note = Description of Unknown:cds_NZ_WFIY01000004.1_cds_WP_155863712.1_1573 target sequence
VSIMTHPHRCPHGKCIFCPGGVEYNTPQSYYGREPTLMRAIENNFDPYCQVRSRLAQYFENGHFPNKVELIIMGGTFLSLPLDYQ

SEQ ID NO: 28305 - protein, 85 aa, unidentified
  REGION 1..85: note = Description of Unknown:cds_NZ_WFIY01000004.1_cds_WP_155863712.1_1573 target sequence
DWFVTNALEAMNNFPKKKEKGKFVYLEDAQLRNETAQIRCVGMTIETKPDWGKEWHANQMLRLGATKVELGVQTIYDDILKRVNR

SEQ ID NO: 28306 - protein, 85 aa, unidentified
  REGION 1..85: note = Description of Unknown:cds_NZ_WFIY01000004.1_cds_WP_155863712.1_1573 target sequence
GHTVKDSIESTRILKDSGFKIVYHIMLGLPGADPDKDLETIKEIFANPDFMPDMLKIYPTLVVETAPLAELWKRGLYTPYDTDTL

SEQ ID NO: 28307 - protein, 85 aa, unidentified
  REGION 1..85: note = Description of Unknown:cds_NZ_WFIY01000004.1_cds_WP_155863712.1_1573 target sequence
VEIISEAYRYIPKWVRIMRIQRDIPANIILAGNKKGNLRELVEKRAEEKGIEIKEIRYREVGVAWLHRKIKPDRISLHKEIYEAS

SEQ ID NO: 28308 - protein, 85 aa, unidentified
  REGION 1..85: note = Description of Unknown:cds_NZ_WFIY01000004.1_cds_WP_155863712.1_1573 target sequence
GGTEVFLSFESDNGLIIGYLRLRKPGNSHRKEIDEKTTIVRELHVYGEEVPIGEKKDEAYQHKGYGSALLKEAERISLEEFDAKK

SEQ ID NO: 28309 - protein, 85 aa, unidentified
  REGION 1..85: note = Description of Unknown:cds_NZ_WFIY01000004.1_cds_WP_155862793.1_613 target sequence
LEDILEEYKKAWALGHALALMSWDLETYMPQEGSKYRGEATAQLITLRRNEIMKLAEKVDKIDDSKLDDKERGIIRVLRREIKYY

SEQ ID NO: 28310 - protein, 85 aa, unidentified
  REGION 1..85: note = Description of Unknown:cds_NZ_WFIY01000004.1_cds_WP_155862793.1_613 target sequence
RAVPKEVDEELARLTSEAFIAWSKAKNESNFSIFKPYLEKIVDLKRKIAESLGYEKHPYNALLDLYEEGFTVDDADKVFSSLLPE

SEQ ID NO: 28311 - protein, 85 aa, unidentified
  REGION 1..85: note = Description of Unknown:cds_NZ_WFIY01000004.1_cds_WP_155862793.1_613 target sequence
LKNILDKILSSGYYPAHHPLEDMTYDVEVMKKVNDEIINILEMPRSKFRIDISPHPFTQRISADDVRITTRYEGKDFRATMFSVI

SEQ ID NO: 28312 - protein, 85 aa, unidentified
  REGION 1..85: note = Description of Unknown:cds_NZ_WFIY01000004.1_cds_WP_155862793.1_613 target sequence
HESGHAIYELQIDPSLEITPVGQGVSMGVHESQSRFWENIIGRSREFVGIIYPLLKRFLDLKYDEEEIYKYFNVVRPSLIRVDAD

SEQ ID NO: 28313 - protein, 85 aa, unidentified
  REGION 1..85: note = Description of Unknown:cds_NZ_WFIY01000004.1_cds_WP_155862793.1_613 target sequence
EVTYNLHIAIRYEIEKRLIAGELKVDEIPSLWNDLSEKYLGIRPKNDAEGALQDVHWSGGSFGYFPTYTLGNIIAGMIYAKYNVL

SEQ ID NO: 28314 - protein, 84 aa, unidentified
  REGION 1..84: note = Description of Unknown:cds_NZ_WFIY01000004.1_cds_WP_155862793.1_613 target sequence
SGGSFGYFPTYTLGNIIAGMIYAKYNVLEKVRERKFNEIKEYLREKIHKYGAIYPPKVLLTRSFGDAYNPEYFIKYLREKYLNK

SEQ ID NO: 28315 - protein, 85 aa, unidentified
  REGION 1..85: note = Description of Unknown:cds_NZ_WFIY01000004.1_cds_WP_155862793.1_613 target sequence
YMPQEGSKYRGEATAQLITLRRNEIMKLAEKVDKIDDSKLDDKERGIIRVLRREIKYYRAVPKEVDEELARLTSEAFIAWSKAKN

SEQ ID NO: 28316 - protein, 85 aa, unidentified
  REGION 1..85: note = Description of Unknown:cds_NZ_WFIY01000004.1_cds_WP_155862793.1_613 target sequence
ESNFSIFKPYLEKIVDLKRKIAESLGYEKHPYNALLDLYEEGFTVDDADKVFSSLLPELKNILDKILSSGYYPAHHPLEDMTYDV

SEQ ID NO: 28317 - protein, 85 aa, unidentified
  REGION 1..85: note = Description of Unknown:cds_NZ_WFIY01000004.1_cds_WP_155862793.1_613 target sequence
EVMKKVNDEIINILEMPRSKFRIDISPHPFTQRISADDVRITTRYEGKDFRATMFSVIHESGHAIYELQIDPSLEITPVGQGVSM

SEQ ID NO: 28318 - protein, 85 aa, unidentified
  REGION 1..85: note = Description of Unknown:cds_NZ_WFIY01000004.1_cds_WP_155862793.1_613 target sequence
GVHESQSRFWENIIGRSREFVGIIYPLLKRFLDLKYDEEEIYKYFNVVRPSLIRVDADEVTYNLHIAIRYEIEKRLIAGELKVDE

SEQ ID NO: 28319 - protein, 85 aa, unidentified
  REGION 1..85: note = Description of Unknown:cds_NZ_WFIY01000004.1_cds_WP_155862793.1_613 target sequence
IPSLWNDLSEKYLGIRPKNDAEGALQDVHWSGGSFGYFPTYTLGNIIAGMIYAKYNVLEKVRERKFNEIKEYLREKIHKYGAIYP

SEQ ID NO: 28320 - protein, 85 aa, unidentified
  REGION 1..85: note = Description of Unknown:cds_NZ_WFIY01000004.1_cds_1755 target sequence
VLPSELARYKIQGNKVIPLFATEEDEPLARNIIEMFKEGRKLGDILDEIKILEKAYDTPCKVKLIRGFYKEMLRLCTLSEDSPID

SEQ ID NO: 28321 - protein, 85 aa, unidentified
  REGION 1..85: note = Description of Unknown:cds_NZ_WFIY01000004.1_cds_1755 target sequence
PRIIRREVFSYGPITSRQEREKILKEVGEKLKVDAEKYMFSDMEEEKTVSSVNRVSPISLIKMYNLSLLQTLLFKSYKMAVQIEG

SEQ ID NO: 28322 - protein, 85 aa, unidentified
  REGION 1..85: note = Description of Unknown:cds_NZ_WFIY01000004.1_cds_1755 target sequence
NWKEIIKRIKWLGLMYYAYPNPIRIDIIGPATLVKMTEKYGRNMAVILPYIVSSKYWKINAELVLGKKIKRTFLLTVEKFDLIDS

SEQ ID NO: 28323 - protein, 85 aa, unidentified
  REGION 1..85: note = Description of Unknown:cds_NZ_WFIY01000004.1_cds_1755 target sequence
KVREEDEKRFDSSVEERFFNDFQKVIKDWKIYREPEALVINGRLFIPDFLVEKNSFKIYVEIVGFWTKEYIREKLEKLRNFKEGE

SEQ ID NO: 28324 - protein, 85 aa, unidentified
  REGION 1..85: note = Description of Unknown:cds_NZ_WFIY01000004.1_cds_1755 target sequence
ILVLLNQELSKEDFSDFNVIKYKNRVDIGLVYKWLKEYERKNAESINISYNLEGDVISVKDLSRKLNVSEEIIKKNIHDDKYILT

SEQ ID NO: 28325 - protein, 84 aa, unidentified
  REGION 1..84: note = Description of Unknown:cds_NZ_WFIY01000004.1_cds_1755 target sequence
VKDLSRKLNVSEEIIKKNIHDDKYILTGNYFVRKDFLEKLKEENFENKKLSELIKIYGDYITEVLEYLGYKFKWLGITDAVVKK

SEQ ID NO: 28326 - protein, 85 aa, unidentified
  REGION 1..85: note = Description of Unknown:cds_NZ_WFIY01000004.1_cds_1755 target sequence
LARNIIEMFKEGRKLGDILDEIKILEKAYDTPCKVKLIRGFYKEMLRLCTLSEDSPIDPRIIRREVFSYGPITSRQEREKILKEV

SEQ ID NO: 28327 - protein, 85 aa, unidentified
  REGION 1..85: note = Description of Unknown:cds_NZ_WFIY01000004.1_cds_1755 target sequence
GEKLKVDAEKYMFSDMEEEKTVSSVNRVSPISLIKMYNLSLLQTLLFKSYKMAVQIEGNWKEIIKRIKWLGLMYYAYPNPIRIDI

SEQ ID NO: 28328 - protein, 85 aa, unidentified
  REGION 1..85: note = Description of Unknown:cds_NZ_WFIY01000004.1_cds_1755 target sequence
IGPATLVKMTEKYGRNMAVILPYIVSSKYWKINAELVLGKKIKRTFLLTVEKFDLIDSKVREEDEKRFDSSVEERFFNDFQKVIK

SEQ ID NO: 28329 - protein, 85 aa, unidentified
  REGION 1..85: note = Description of Unknown:cds_NZ_WFIY01000004.1_cds_1755 target sequence
DWKIYREPEALVINGRLFIPDFLVEKNSFKIYVEIVGFWTKEYIREKLEKLRNFKEGEILVLLNQELSKEDFSDFNVIKYKNRVD

SEQ ID NO: 28330 - protein, 85 aa, unidentified
  REGION 1..85: note = Description of Unknown:cds_NZ_WFIY01000004.1_cds_1755 target sequence
IGLVYKWLKEYERKNAESINISYNLEGDVISVKDLSRKLNVSEEIIKKNIHDDKYILTGNYFVRKDFLEKLKEENFENKKLSELI

SEQ ID NO: 28331 - protein, 85 aa, unidentified
  REGION 1..85: note = Description of Unknown:cds_NZ_WFIY01000004.1_cds_WP_155862375.1_109 target sequence
SEGQDPLETLLKPENLEKLSKLADSLPTIEKLTDKLNEMNKKGQLDFLLNLTDQTLSLLDAVQKADLINTLISFGMEQLPKIQAI

SEQ ID NO: 28332 - protein, 85 aa, unidentified
  REGION 1..85: note = Description of Unknown:cds_NZ_WFIY01000004.1_cds_WP_155862375.1_109 target sequence
WPIIEKLTSDKTLSLLQQINLDATLNAIEALTPMMQKLTSDKAISLLKQIDIDATLTAIEKLTPIMKALTSDKALKVLESINYDA

SEQ ID NO: 28333 - protein, 85 aa, unidentified
  REGION 1..85: note = Description of Unknown:cds_NZ_WFIY01000004.1_cds_WP_155862375.1_109 target sequence
LLDSTGKLTPILQKLTSDKALKVLESLDVDTLLEATVELTPTLNKIAKTMAEMQKKGQIDELINMMEQGVALLDAVQKADLINTL

SEQ ID NO: 28334 - protein, 85 aa, unidentified
  REGION 1..85: note = Description of Unknown:cds_NZ_WFIY01000004.1_cds_WP_155862375.1_109 target sequence
ISFGMEQLPKIQAIWPIIEKLTSDRALALLQKIDVDATLSAIEALTPMMQKLTSPRAISLIQKFDVDSTLAALEALTPMMQKLTS

SEQ ID NO: 28335 - protein, 85 aa, unidentified
  REGION 1..85: note = Description of Unknown:cds_NZ_WFIY01000004.1_cds_WP_155862375.1_109 target sequence
ERAIKLVQQLDVESLLTAIEASLPILKKLTDERTVKTLTQIDIDSMVNMMGKLAELQKNGVLDKMVKLIDVFSDPKLVDNLVLIM

SEQ ID NO: 28336 - protein, 84 aa, unidentified
  REGION 1..84: note = Description of Unknown:cds_NZ_WFIY01000004.1_cds_WP_155862375.1_109 target sequence
QKNGVLDKMVKLIDVFSDPKLVDNLVLIMEKMSKALNIWVSELPNVKPVGTMGLLRMASDKDASYALGMMKALLEATGKAFRES

SEQ ID NO: 28337 - protein, 85 aa, unidentified
  REGION 1..85: note = Description of Unknown:cds_NZ_WFIY01000004.1_cds_WP_155862375.1_109 target sequence
TIEKLTDKLNEMNKKGQLDFLLNLTDQTLSLLDAVQKADLINTLISFGMEQLPKIQAIWPIIEKLTSDKTLSLLQQINLDATLNA

SEQ ID NO: 28338 - protein, 85 aa, unidentified
  REGION 1..85: note = Description of Unknown:cds_NZ_WFIY01000004.1_cds_WP_155862375.1_109 target sequence
IEALTPMMQKLTSDKAISLLKQIDIDATLTAIEKLTPIMKALTSDKALKVLESINYDALLDSTGKLTPILQKLTSDKALKVLESL

SEQ ID NO: 28339 - protein, 85 aa, unidentified
  REGION 1..85: note = Description of Unknown:cds_NZ_WFIY01000004.1_cds_WP_155862375.1_109 target sequence
DVDTLLEATVELTPTLNKIAKTMAEMQKKGQIDELINMMEQGVALLDAVQKADLINTLISFGMEQLPKIQAIWPIIEKLTSDRAL

SEQ ID NO: 28340 - protein, 85 aa, unidentified
  REGION 1..85: note = Description of Unknown:cds_NZ_WFIY01000004.1_cds_WP_155862375.1_109 target sequence
ALLQKIDVDATLSAIEALTPMMQKLTSPRAISLIQKFDVDSTLAALEALTPMMQKLTSERAIKLVQQLDVESLLTAIEASLPILK

SEQ ID NO: 28341 - protein, 85 aa, unidentified
  REGION 1..85: note = Description of Unknown:cds_NZ_WFIY01000004.1_cds_WP_155862375.1_109 target sequence
KLTDERTVKTLTQIDIDSMVNMMGKLAELQKNGVLDKMVKLIDVFSDPKLVDNLVLIMEKMSKALNIWVSELPNVKPVGTMGLLR

SEQ ID NO: 28342 - protein, 85 aa, unidentified
  REGION 1..85: note = Description of Unknown:cds_NZ_WFIY01000004.1_cds_WP_155862484.1_240 target sequence
AFEDLRDYINFMLKRGKIVQIDDEVDVNLEIAELSRRATYLHLPPLLFTNIKNYREWKVITNVFYSIDAVKEILGVDNLENIGKN

SEQ ID NO: 28343 - protein, 85 aa, unidentified
  REGION 1..85: note = Description of Unknown:cds_NZ_WFIY01000004.1_cds_WP_155862484.1_240 target sequence
FLTEFQGMPLSLIDKIKSLPNFLKLGKIMPKSGKPKFKEREIGLEGFPALKTWPKDAGRFFTFSLVVTKDPETDVHNVSVYRIQI

SEQ ID NO: 28344 - protein, 85 aa, unidentified
  REGION 1..85: note = Description of Unknown:cds_NZ_WFIY01000004.1_cds_WP_155862484.1_240 target sequence
LNDKEALMHWQAFKRGSLTAAKYKEMGITKIPVAIVNGVDPVIAFTAASPVPPGIDKYLFAGILRGEGVELYKLDNGILVPSSAE

SEQ ID NO: 28345 - protein, 85 aa, unidentified
  REGION 1..85: note = Description of Unknown:cds_NZ_WFIY01000004.1_cds_WP_155862484.1_240 target sequence
SVIEGYVDLEDLRPEGPFGDHLGYYTPVDYYPTFKVDRIYIRDNPIFHATSVGKPPLEDAWIGKAVERIFLPFIRLVIPEIVDMN

SEQ ID NO: 28346 - protein, 85 aa, unidentified
  REGION 1..85: note = Description of Unknown:cds_NZ_WFIY01000004.1_cds_WP_155862484.1_240 target sequence
LPEYGLFTGIGIFSIRKTFPGQAKRVMMSIWGNGQLSFLKFIIVVDADVNVHDINQVMYAIATTVDPARDVLIIPNAMNDSLDHT

SEQ ID NO: 28347 - protein, 84 aa, unidentified
  REGION 1..84: note = Description of Unknown:cds_NZ_WFIY01000004.1_cds_WP_155862484.1_240 target sequence
VMYAIATTVDPARDVLIIPNAMNDSLDHTSPHPPLGSKIGIDATRKLKEELGRDWPEEVKSDENIVKKIDPIWNKIIKKYLPSK

SEQ ID NO: 28348 - protein, 85 aa, unidentified
  REGION 1..85: note = Description of Unknown:cds_NZ_WFIY01000004.1_cds_WP_155862484.1_240 target sequence
NLEIAELSRRATYLHLPPLLFTNIKNYREWKVITNVFYSIDAVKEILGVDNLENIGKNFLTEFQGMPLSLIDKIKSLPNFLKLGK

SEQ ID NO: 28349 - protein, 85 aa, unidentified
  REGION 1..85: note = Description of Unknown:cds_NZ_WFIY01000004.1_cds_WP_155862484.1_240 target sequence
IMPKSGKPKFKEREIGLEGFPALKTWPKDAGRFFTFSLVVTKDPETDVHNVSVYRIQILNDKEALMHWQAFKRGSLTAAKYKEMG

SEQ ID NO: 28350 - protein, 85 aa, unidentified
  REGION 1..85: note = Description of Unknown:cds_NZ_WFIY01000004.1_cds_WP_155862484.1_240 target sequence
ITKIPVAIVNGVDPVIAFTAASPVPPGIDKYLFAGILRGEGVELYKLDNGILVPSSAESVIEGYVDLEDLRPEGPFGDHLGYYTP

SEQ ID NO: 28351 - protein, 85 aa, unidentified
  REGION 1..85: note = Description of Unknown:cds_NZ_WFIY01000004.1_cds_WP_155862484.1_240 target sequence
VDYYPTFKVDRIYIRDNPIFHATSVGKPPLEDAWIGKAVERIFLPFIRLVIPEIVDMNLPEYGLFTGIGIFSIRKTFPGQAKRVM

SEQ ID NO: 28352 - protein, 85 aa, unidentified
  REGION 1..85: note = Description of Unknown:cds_NZ_WFIY01000004.1_cds_WP_155862484.1_240 target sequence
MSIWGNGQLSFLKFIIVVDADVNVHDINQVMYAIATTVDPARDVLIIPNAMNDSLDHTSPHPPLGSKIGIDATRKLKEELGRDWP

SEQ ID NO: 28353 - protein, 85 aa, unidentified
  REGION 1..85: note = Description of Unknown:cds_NZ_WFIY01000004.1_cds_WP_155862644.1_426 target sequence
QIPKEKWKNNFSEWFDNVIFQAEIYDYGRYPIKGMGVWMPYGFKIRQNVINIIRKFLDETGHEEVLFPLLIPEYLLRKESEHIKG

SEQ ID NO: 28354 - protein, 85 aa, unidentified
  REGION 1..85: note = Description of Unknown:cds_NZ_WFIY01000004.1_cds_WP_155862644.1_426 target sequence
FEGEVYWVTKGGEEDLDIRLALRPTSEVAITYMESLWIKSYKELPKKYYQIVSIFRYETKATRPMIRLREVTTFKEAHTLHVSYE

SEQ ID NO: 28355 - protein, 85 aa, unidentified
  REGION 1..85: note = Description of Unknown:cds_NZ_WFIY01000004.1_cds_WP_155862644.1_426 target sequence
DAERQVKEAIEIYKKIFDTLGIPYILSERPEWDRFAGAEHTYAFDTLMPDGRALQIGTVHHLGQHFTKALDYKIQKADGSLDYPY

SEQ ID NO: 28356 - protein, 85 aa, unidentified
  REGION 1..85: note = Description of Unknown:cds_NZ_WFIY01000004.1_cds_WP_155862644.1_426 target sequence
QTSYGISDRVIAVSIAVNGDDHGPVLNPIIAPIKVVIIPIPAKTDEDNKKVENYCKEIQEKLSLAGISTVIDSDKEKTPGEKFYY

SEQ ID NO: 28357 - protein, 85 aa, unidentified
  REGION 1..85: note = Description of Unknown:cds_NZ_WFIY01000004.1_cds_WP_155862644.1_426 target sequence
WEMKGVPLRIEIGLREVNNETVTIKRRDTLEAKIIKKDELIKTVNELLSSLSEDLKKKAWDFFNSRIFYTNDVNEAKKILENRGG

SEQ ID NO: 28358 - protein, 84 aa, unidentified
  REGION 1..84: note = Description of Unknown:cds_NZ_WFIY01000004.1_cds_WP_155862644.1_426 target sequence
KKAWDFFNSRIFYTNDVNEAKKILENRGGIIEVPWCGDNSCGLKIEEELNARVLGYPIDAKKTSDPCIICKKPSTNVLRVAKTY

SEQ ID NO: 28359 - protein, 85 aa, unidentified
  REGION 1..85: note = Description of Unknown:cds_NZ_WFIY01000004.1_cds_WP_155862644.1_426 target sequence
GRYPIKGMGVWMPYGFKIRQNVINIIRKFLDETGHEEVLFPLLIPEYLLRKESEHIKGFEGEVYWVTKGGEEDLDIRLALRPTSE

SEQ ID NO: 28360 - protein, 85 aa, unidentified
  REGION 1..85: note = Description of Unknown:cds_NZ_WFIY01000004.1_cds_WP_155862644.1_426 target sequence
VAITYMESLWIKSYKELPKKYYQIVSIFRYETKATRPMIRLREVTTFKEAHTLHVSYEDAERQVKEAIEIYKKIFDTLGIPYILS

SEQ ID NO: 28361 - protein, 85 aa, unidentified
  REGION 1..85: note = Description of Unknown:cds_NZ_WFIY01000004.1_cds_WP_155862644.1_426 target sequence
ERPEWDRFAGAEHTYAFDTLMPDGRALQIGTVHHLGQHFTKALDYKIQKADGSLDYPYQTSYGISDRVIAVSIAVNGDDHGPVLN

SEQ ID NO: 28362 - protein, 85 aa, unidentified
  REGION 1..85: note = Description of Unknown:cds_NZ_WFIY01000004.1_cds_WP_155862644.1_426 target sequence
PIIAPIKVVIIPIPAKTDEDNKKVENYCKEIQEKLSLAGISTVIDSDKEKTPGEKFYYWEMKGVPLRIEIGLREVNNETVTIKRR

SEQ ID NO: 28363 - protein, 85 aa, unidentified
  REGION 1..85: note = Description of Unknown:cds_NZ_WFIY01000004.1_cds_WP_155862644.1_426 target sequence
DTLEAKIIKKDELIKTVNELLSSLSEDLKKKAWDFFNSRIFYTNDVNEAKKILENRGGIIEVPWCGDNSCGLKIEEELNARVLGY

SEQ ID NO: 28364 - protein, 85 aa, unidentified
  REGION 1..85: note = Description of Unknown:cds_NZ_WFIY01000004.1_cds_WP_155863345.1_1313 target sequence
AEQKRIHTNIPFRLDRLPWSPWHILVVISLGITWILDGLEVTIVGIIGDVLRSPVTLGLSCFEVGFLGTAYLIGAVVGAIFFSYL

SEQ ID NO: 28365 - protein, 85 aa, unidentified
  REGION 1..85: note = Description of Unknown:cds_NZ_WFIY01000004.1_cds_WP_155863345.1_1313 target sequence
TDRYGRKRLFMITLGTYIAGTVASAISWNFISLAIFRTITGLGIGGEYSAINSAIDELIPARVRGWVDLAINGSWWIGTIVGSAL

SEQ ID NO: 28366 - protein, 85 aa, unidentified
  REGION 1..85: note = Description of Unknown:cds_NZ_WFIY01000004.1_cds_WP_155863345.1_1313 target sequence
SLYILNPAVFPINLGWRLAFFVGASLAFAVLLIRRYLPESPRWLLVHGRVDEAEEIVTQIENKVRDQTGKELEEPQKFLVIHPRD

SEQ ID NO: 28367 - protein, 85 aa, unidentified
  REGION 1..85: note = Description of Unknown:cds_NZ_WFIY01000004.1_cds_WP_155863345.1_1313 target sequence
TIGFSDVINTVFKKYPKRAILGLWLMAGQAFLYNAIFFTYALILGKFYGVPADQIGLYIFPFAIGNFFGPLLLGKLFDTLGRKTM

SEQ ID NO: 28368 - protein, 85 aa, unidentified
  REGION 1..85: note = Description of Unknown:cds_NZ_WFIY01000004.1_cds_WP_155863345.1_1313 target sequence
ISLTYILSGALLAFTGYLFYLGVLSALTQTIAWVVIFFFASAGASSAYLTVSEVFPLEIRAMAIAVFYAIGTGIGGAIAPSVFGA

SEQ ID NO: 28369 - protein, 84 aa, unidentified
  REGION 1..84: note = Description of Unknown:cds_NZ_WFIY01000004.1_cds_WP_155863345.1_1313 target sequence
LEIRAMAIAVFYAIGTGIGGAIAPSVFGALIGSGLPINLFYGYLLGASLMAIAGVVEIFYGVNAERKSLEEVARPLTEVEKIEE

SEQ ID NO: 28370 - protein, 85 aa, unidentified
  REGION 1..85: note = Description of Unknown:cds_NZ_WFIY01000004.1_cds_WP_155863345.1_1313 target sequence
ISLGITWILDGLEVTIVGIIGDVLRSPVTLGLSCFEVGFLGTAYLIGAVVGAIFFSYLTDRYGRKRLFMITLGTYIAGTVASAIS

SEQ ID NO: 28371 - protein, 85 aa, unidentified
  REGION 1..85: note = Description of Unknown:cds_NZ_WFIY01000004.1_cds_WP_155863345.1_1313 target sequence
WNFISLAIFRTITGLGIGGEYSAINSAIDELIPARVRGWVDLAINGSWWIGTIVGSALSLYILNPAVFPINLGWRLAFFVGASLA

SEQ ID NO: 28372 - protein, 85 aa, unidentified
  REGION 1..85: note = Description of Unknown:cds_NZ_WFIY01000004.1_cds_WP_155863345.1_1313 target sequence
FAVLLIRRYLPESPRWLLVHGRVDEAEEIVTQIENKVRDQTGKELEEPQKFLVIHPRDTIGFSDVINTVFKKYPKRAILGLWLMA

SEQ ID NO: 28373 - protein, 85 aa, unidentified
  REGION 1..85: note = Description of Unknown:cds_NZ_WFIY01000004.1_cds_WP_155863345.1_1313 target sequence
GQAFLYNAIFFTYALILGKFYGVPADQIGLYIFPFAIGNFFGPLLLGKLFDTLGRKTMISLTYILSGALLAFTGYLFYLGVLSAL

SEQ ID NO: 28374 - protein, 85 aa, unidentified
  REGION 1..85: note = Description of Unknown:cds_NZ_WFIY01000004.1_cds_WP_155863345.1_1313 target sequence
TQTIAWVVIFFFASAGASSAYLTVSEVFPLEIRAMAIAVFYAIGTGIGGAIAPSVFGALIGSGLPINLFYGYLLGASLMAIAGVV

SEQ ID NO: 28375 - protein, 85 aa, unidentified
  REGION 1..85: note = Description of Unknown:cds_NZ_WFIY01000004.1_cds_WP_205737128.1_183 target sequence
VDVKRVNTYEWRIEKSGCMRVPVTIFADDVLIDKMKQDLTLKQATNVACLPGVQEGVYVLPDGHQGYGFPIGGIAATAIDEGGVV

SEQ ID NO: 28376 - protein, 85 aa, unidentified
  REGION 1..85: note = Description of Unknown:cds_NZ_WFIY01000004.1_cds_WP_205737128.1_183 target sequence
SPGGIGYDINCGVRLLRTNLDYEDVKPKLKDLVEELHRNVPSGVGSEGKVKLSTQQLDEVLAEGVKWAINKGYGWAEDMEHIEQH

SEQ ID NO: 28377 - protein, 85 aa, unidentified
  REGION 1..85: note = Description of Unknown:cds_NZ_WFIY01000004.1_cds_WP_205737128.1_183 target sequence
GSWDLADPSKVSDIAKKRGASQLGTLGAGNHFLEVQVVDKIYDERIAKALGITHEGQVMVMVHTGSRGLGHQIASDYLQIMERAM

SEQ ID NO: 28378 - protein, 85 aa, unidentified
  REGION 1..85: note = Description of Unknown:cds_NZ_WFIY01000004.1_cds_WP_205737128.1_183 target sequence
KKYNITVPDRELAAIPFESREGQDYFHAMVSGANFAWTNRQLITHWVRESFGNVFKVDPEKLDLHIIYDVAHNIAKIEEYDVEGK

SEQ ID NO: 28379 - protein, 85 aa, unidentified
  REGION 1..85: note = Description of Unknown:cds_NZ_WFIY01000004.1_cds_WP_205737128.1_183 target sequence
RKKLLVHRKGATRAFPPGSPEIPADHRNIGQVVLIPGSMGTASYVMAGIPEGRRTWYTAPHGAGRWMSREAAVRSYPANTVVENL

SEQ ID NO: 28380 - protein, 84 aa, unidentified
  REGION 1..84: note = Description of Unknown:cds_NZ_WFIY01000004.1_cds_WP_205737128.1_183 target sequence
TWYTAPHGAGRWMSREAAVRSYPANTVVENLEERGIIVRATTRRVIAEEAPGAYKDVDRVAKVADAVKIAKLVVRLRPIGVTKG

SEQ ID NO: 28381 - protein, 85 aa, unidentified
  REGION 1..85: note = Description of Unknown:cds_NZ_WFIY01000004.1_cds_WP_205737128.1_183 target sequence
DDVLIDKMKQDLTLKQATNVACLPGVQEGVYVLPDGHQGYGFPIGGIAATAIDEGGVVSPGGIGYDINCGVRLLRTNLDYEDVKP

SEQ ID NO: 28382 - protein, 85 aa, unidentified
  REGION 1..85: note = Description of Unknown:cds_NZ_WFIY01000004.1_cds_WP_205737128.1_183 target sequence
KLKDLVEELHRNVPSGVGSEGKVKLSTQQLDEVLAEGVKWAINKGYGWAEDMEHIEQHGSWDLADPSKVSDIAKKRGASQLGTLG

SEQ ID NO: 28383 - protein, 85 aa, unidentified
  REGION 1..85: note = Description of Unknown:cds_NZ_WFIY01000004.1_cds_WP_205737128.1_183 target sequence
AGNHFLEVQVVDKIYDERIAKALGITHEGQVMVMVHTGSRGLGHQIASDYLQIMERAMKKYNITVPDRELAAIPFESREGQDYFH

SEQ ID NO: 28384 - protein, 85 aa, unidentified
  REGION 1..85: note = Description of Unknown:cds_NZ_WFIY01000004.1_cds_WP_205737128.1_183 target sequence
AMVSGANFAWTNRQLITHWVRESFGNVFKVDPEKLDLHIIYDVAHNIAKIEEYDVEGKRKKLLVHRKGATRAFPPGSPEIPADHR

SEQ ID NO: 28385 - protein, 85 aa, unidentified
  REGION 1..85: note = Description of Unknown:cds_NZ_WFIY01000004.1_cds_WP_205737128.1_183 target sequence
NIGQVVLIPGSMGTASYVMAGIPEGRRTWYTAPHGAGRWMSREAAVRSYPANTVVENLEERGIIVRATTRRVIAEEAPGAYKDVD

SEQ ID NO: 28386 - protein, 85 aa, unidentified
  REGION 1..85: note = Description of Unknown:cds_NZ_WFIY01000004.1_cds_WP_155864363.1_282 target sequence
TEEKVSVDINEILDAAIEAKYNRVDQIEFHRRVVESGLSRSTIEAISKAKKEPEWMLRLRLKSLELFEKLPTPNWLPDVLSSLNV

SEQ ID NO: 28387 - protein, 85 aa, unidentified
  REGION 1..85: note = Description of Unknown:cds_NZ_WFIY01000004.1_cds_WP_155864363.1_282 target sequence
SNLELYIKPDVERTDSWEQIPKEIREYYEKLGIPQSEQKVLGGLVAVFESEPIYANVKQELQKKGVVMMPPEEAMVKYPDIFKQY

SEQ ID NO: 28388 - protein, 85 aa, unidentified
  REGION 1..85: note = Description of Unknown:cds_NZ_WFIY01000004.1_cds_WP_155864363.1_282 target sequence
FMKIFPASDHKFAALHGALWSGGVFVYVPKGVKITTPVEGFFVIGTEMEGQFEHTLVIADEDSYIHFIEGCSAPQFKNFSFHDGM

SEQ ID NO: 28389 - protein, 85 aa, unidentified
  REGION 1..85: note = Description of Unknown:cds_NZ_WFIY01000004.1_cds_WP_155864363.1_282 target sequence
VELFANDNAHIKFTTIQNWSKNVINFNNKRAWANKNSVIEWVEGSLGSKYSFVYPSTILRGEGASSTSLVVTLASAEGDWKDSGS

SEQ ID NO: 28390 - protein, 85 aa, unidentified
  REGION 1..85: note = Description of Unknown:cds_NZ_WFIY01000004.1_cds_WP_155864363.1_282 target sequence
KMIHAAPHTRSRVVNKNIGFNGGVNVYRGLVKVNKGAVGSKAFVKCDSLMLDEKTKAYTFPHNQVFEEDADVAHEAHTFRMSEDQ

SEQ ID NO: 28391 - protein, 84 aa, unidentified
  REGION 1..84: note = Description of Unknown:cds_NZ_WFIY01000004.1_cds_WP_155864363.1_282 target sequence
TKAYTFPHNQVFEEDADVAHEAHTFRMSEDQLFYLMSRGISEKEATSMLVLGFMDEIMRELPFEYAAMLNKVIKLELDKLGAVA

SEQ ID NO: 28392 - protein, 85 aa, unidentified
  REGION 1..85: note = Description of Unknown:cds_NZ_WFIY01000004.1_cds_WP_155864363.1_282 target sequence
EFHRRVVESGLSRSTIEAISKAKKEPEWMLRLRLKSLELFEKLPTPNWLPDVLSSLNVSNLELYIKPDVERTDSWEQIPKEIREY

SEQ ID NO: 28393 - protein, 85 aa, unidentified
  REGION 1..85: note = Description of Unknown:cds_NZ_WFIY01000004.1_cds_WP_155864363.1_282 target sequence
YEKLGIPQSEQKVLGGLVAVFESEPIYANVKQELQKKGVVMMPPEEAMVKYPDIFKQYFMKIFPASDHKFAALHGALWSGGVFVY

SEQ ID NO: 28394 - protein, 85 aa, unidentified
  REGION 1..85: note = Description of Unknown:cds_NZ_WFIY01000004.1_cds_WP_155864363.1_282 target sequence
VPKGVKITTPVEGFFVIGTEMEGQFEHTLVIADEDSYIHFIEGCSAPQFKNFSFHDGMVELFANDNAHIKFTTIQNWSKNVINFN

SEQ ID NO: 28395 - protein, 85 aa, unidentified
  REGION 1..85: note = Description of Unknown:cds_NZ_WFIY01000004.1_cds_WP_155864363.1_282 target sequence
NKRAWANKNSVIEWVEGSLGSKYSFVYPSTILRGEGASSTSLVVTLASAEGDWKDSGSKMIHAAPHTRSRVVNKNIGFNGGVNVY

SEQ ID NO: 28396 - protein, 85 aa, unidentified
  REGION 1..85: note = Description of Unknown:cds_NZ_WFIY01000004.1_cds_WP_155864363.1_282 target sequence
RGLVKVNKGAVGSKAFVKCDSLMLDEKTKAYTFPHNQVFEEDADVAHEAHTFRMSEDQLFYLMSRGISEKEATSMLVLGFMDEIM

SEQ ID NO: 28397 - protein, 85 aa, unidentified
  REGION 1..85: note = Description of Unknown:cds_NC_035460.1_cds_YP_009408066.1_115 target sequence
SIATVIDHKLFNELKKISKEHTINLFNLDGKFTEIVSTSINKFLIPIGLYSSSIPIKDPIINVTNNIINNYEYITLPTLYPLQKK

SEQ ID NO: 28398 - protein, 85 aa, unidentified
  REGION 1..85: note = Description of Unknown:cds_NC_035460.1_cds_YP_009408066.1_115 target sequence
VVTEVLTRMKKKISEKRSLYMTLHLACGFGKTITACYLMGIHKRKTIICVPNKMLINQWKSAVNNTNINYKISVDGVQKLLKELN

SEQ ID NO: 28399 - protein, 85 aa, unidentified
  REGION 1..85: note = Description of Unknown:cds_NC_035460.1_cds_YP_009408066.1_115 target sequence
KIPNVYDVLIIVSRHLSNDEFCKYIYANYDMFILDESHTYNLMNESIMSKFLTYYPPKICYFLTATPRRVNRIYCNDIVNVAKVS

SEQ ID NO: 28400 - protein, 85 aa, unidentified
  REGION 1..85: note = Description of Unknown:cds_NC_035460.1_cds_YP_009408066.1_115 target sequence
DLTKKINIVENFFEPYYTDVIRSLIKKLTPEYNKYHMYTEKILCEDKPRNDLIITTIIHAFEKHDINRVLVITKLRKHMLLIYNK

SEQ ID NO: 28401 - protein, 85 aa, unidentified
  REGION 1..85: note = Description of Unknown:cds_NC_035460.1_cds_YP_009408066.1_115 target sequence
LLEKFGNKYIFLGDAKNKNTQDIVKQVKTMERFIFISTAHYSGTGLDIPSLDSLIICLAVMNTMQMEQILGRICRDTELKNRIVY

SEQ ID NO: 28402 - protein, 84 aa, unidentified
  REGION 1..84: note = Description of Unknown:cds_NC_035460.1_cds_YP_009408066.1_115 target sequence
IICLAVMNTMQMEQILGRICRDTELKNRIVYIFPNTSIREIKHSVGMYAQRLILLACDKLGFEKHTPIPFHSKVELALFKALNQ

SEQ ID NO: 28403 - protein, 85 aa, unidentified
  REGION 1..85: note = Description of Unknown:cds_NC_035460.1_cds_YP_009408066.1_115 target sequence
LDGKFTEIVSTSINKFLIPIGLYSSSIPIKDPIINVTNNIINNYEYITLPTLYPLQKKVVTEVLTRMKKKISEKRSLYMTLHLAC

SEQ ID NO: 28404 - protein, 85 aa, unidentified
  REGION 1..85: note = Description of Unknown:cds_NC_035460.1_cds_YP_009408066.1_115 target sequence
GFGKTITACYLMGIHKRKTIICVPNKMLINQWKSAVNNTNINYKISVDGVQKLLKELNKIPNVYDVLIIVSRHLSNDEFCKYIYA

SEQ ID NO: 28405 - protein, 85 aa, unidentified
  REGION 1..85: note = Description of Unknown:cds_NC_035460.1_cds_YP_009408066.1_115 target sequence
NYDMFILDESHTYNLMNESIMSKFLTYYPPKICYFLTATPRRVNRIYCNDIVNVAKVSDLTKKINIVENFFEPYYTDVIRSLIKK

SEQ ID NO: 28406 - protein, 85 aa, unidentified
  REGION 1..85: note = Description of Unknown:cds_NC_035460.1_cds_YP_009408066.1_115 target sequence
LTPEYNKYHMYTEKILCEDKPRNDLIITTIIHAFEKHDINRVLVITKLRKHMLLIYNKLLEKFGNKYIFLGDAKNKNTQDIVKQV

SEQ ID NO: 28407 - protein, 85 aa, unidentified
  REGION 1..85: note = Description of Unknown:cds_NC_035460.1_cds_YP_009408066.1_115 target sequence
KTMERFIFISTAHYSGTGLDIPSLDSLIICLAVMNTMQMEQILGRICRDTELKNRIVYIFPNTSIREIKHSVGMYAQRLILLACD

SEQ ID NO: 28408 - protein, 85 aa, unidentified
  REGION 1..85: note = Description of Unknown:cds_NZ_WFIY01000004.1_cds_WP_155863296.1_1254 target sequence
SITFRDKFKQFYPKRYEGIYTSRGDNPLVSIRIRQGIGRDPAKWYANQWEKLAEIANNYGNKKIQLTTRGDVELYGIDMKNLEIV

SEQ ID NO: 28409 - protein, 85 aa, unidentified
  REGION 1..85: note = Description of Unknown:cds_NZ_WFIY01000004.1_cds_WP_155863296.1_1254 target sequence
LQDLESVGLDPRDSCGASVRNVIPCPSQLCQKAKVNAEKLALFIANFFRHNKDYEYPALPKRVKISVSACETGCATPVIMDVGII

SEQ ID NO: 28410 - protein, 85 aa, unidentified
  REGION 1..85: note = Description of Unknown:cds_NZ_WFIY01000004.1_cds_WP_155863296.1_1254 target sequence
AKDKDKFDVMIGGGIGDQAFEGKTLFTDVPASKLLPICVAVANILKREKEKRGFKHVVEKYGEEKIKEMIIQEANSIASSLPIFN

SEQ ID NO: 28411 - protein, 85 aa, unidentified
  REGION 1..85: note = Description of Unknown:cds_NZ_WFIY01000004.1_cds_WP_155863296.1_1254 target sequence
EDLTPEKVEFDKILTIKPIGGWLPTTDVPELVRIMEENEGYGYLFNTQELYIPITKNDIKEKVDILSPYQLSNKIWEKTFNVNSC

SEQ ID NO: 28412 - protein, 85 aa, unidentified
  REGION 1..85: note = Description of Unknown:cds_NZ_WFIY01000004.1_cds_WP_155863296.1_1254 target sequence
IGNDYCPPALVQTTEMATKVYERLKQENIKLRISFSGCTHSCGRHWIMDIGFGAVANMGNVRLNIVIGGGNKNLGKLIGSVPANK

SEQ ID NO: 28413 - protein, 84 aa, unidentified
  REGION 1..84: note = Description of Unknown:cds_NZ_WFIY01000004.1_cds_WP_155863296.1_1254 target sequence
AVANMGNVRLNIVIGGGNKNLGKLIGSVPANKYMEVTEVIVDMIKKDEINENELDAELIKERLMEKVQGFEEFEEKQKIQVKTP

SEQ ID NO: 28414 - protein, 85 aa, unidentified
  REGION 1..85: note = Description of Unknown:cds_NZ_WFIY01000004.1_cds_WP_155863296.1_1254 target sequence
LVSIRIRQGIGRDPAKWYANQWEKLAEIANNYGNKKIQLTTRGDVELYGIDMKNLEIVLQDLESVGLDPRDSCGASVRNVIPCPS

SEQ ID NO: 28415 - protein, 85 aa, unidentified
  REGION 1..85: note = Description of Unknown:cds_NZ_WFIY01000004.1_cds_WP_155863296.1_1254 target sequence
QLCQKAKVNAEKLALFIANFFRHNKDYEYPALPKRVKISVSACETGCATPVIMDVGIIAKDKDKFDVMIGGGIGDQAFEGKTLFT

SEQ ID NO: 28416 - protein, 85 aa, unidentified
  REGION 1..85: note = Description of Unknown:cds_NZ_WFIY01000004.1_cds_WP_155863296.1_1254 target sequence
DVPASKLLPICVAVANILKREKEKRGFKHVVEKYGEEKIKEMIIQEANSIASSLPIFNEDLTPEKVEFDKILTIKPIGGWLPTTD

SEQ ID NO: 28417 - protein, 85 aa, unidentified
  REGION 1..85: note = Description of Unknown:cds_NZ_WFIY01000004.1_cds_WP_155863296.1_1254 target sequence
VPELVRIMEENEGYGYLFNTQELYIPITKNDIKEKVDILSPYQLSNKIWEKTFNVNSCIGNDYCPPALVQTTEMATKVYERLKQE

SEQ ID NO: 28418 - protein, 85 aa, unidentified
  REGION 1..85: note = Description of Unknown:cds_NZ_WFIY01000004.1_cds_WP_155863296.1_1254 target sequence
NIKLRISFSGCTHSCGRHWIMDIGFGAVANMGNVRLNIVIGGGNKNLGKLIGSVPANKYMEVTEVIVDMIKKDEINENELDAELI

SEQ ID NO: 28419 - protein, 85 aa, unidentified
  REGION 1..85: note = Description of Unknown:hvTR_P52442 target sequence
SSLRNLLCRLISPLCKHGSYSHLQLFLIGDVSKSENCVLSMFVTNKKFLSKDLTDNFYRKFLKVWLKCDLDSRNQIKAIFNKMMM

SEQ ID NO: 28420 - protein, 85 aa, unidentified
  REGION 1..85: note = Description of Unknown:hvTR_P52442 target sequence
TKNFFLLLAYLYFLYRQCKVLKILALYKIQRLTWKQIVERFKQYPIHKLNQLLEIPSFVSFNDLYYYLFQQQLMLPISTHCNIPC

SEQ ID NO: 28421 - protein, 85 aa, unidentified
  REGION 1..85: note = Description of Unknown:hvTR_P52442 target sequence
MKLFCLRNFEQCNDITLRYAHRASNLTYQDIFHGCSLTVPCGNFIFAMAMAMIENYCYSFDRFLIPLENNNLVPIVLNKQEKHQL

SEQ ID NO: 28422 - protein, 85 aa, unidentified
  REGION 1..85: note = Description of Unknown:hvTR_P52442 target sequence
PKILTFALTTVLKRSLTSSIISLPVLCFCKTKCLRYAKIDSYLTVICSKCGHCLNSGKERLKGKQTFSLSSMFYYRDRQEKNIIY

SEQ ID NO: 28423 - protein, 85 aa, unidentified
  REGION 1..85: note = Description of Unknown:hvTR_P52442 target sequence
SMHTDLLYCSLCGGQRLTLEKVYELYEYSVSGIQVKSVSWKAIIGTNSACTILNDSVKFDAIVACSCRTCYSMIHLQNLTINKLL

SEQ ID NO: 28424 - protein, 84 aa, unidentified
  REGION 1..84: note = Description of Unknown:hvTR_P52442 target sequence
LNDSVKFDAIVACSCRTCYSMIHLQNLTINKLLKLISHSTEFQCQDCQNIYRETCLDLEDCGEICTGCKISQLAKCTQHGCDTW

SEQ ID NO: 28425 - protein, 85 aa, unidentified
  REGION 1..85: note = Description of Unknown:hvTR_P52442 target sequence
IGDVSKSENCVLSMFVTNKKFLSKDLTDNFYRKFLKVWLKCDLDSRNQIKAIFNKMMMTKNFFLLLAYLYFLYRQCKVLKILALY

SEQ ID NO: 28426 - protein, 85 aa, unidentified
  REGION 1..85: note = Description of Unknown:hvTR_P52442 target sequence
KIQRLTWKQIVERFKQYPIHKLNQLLEIPSFVSFNDLYYYLFQQQLMLPISTHCNIPCMKLFCLRNFEQCNDITLRYAHRASNLT

SEQ ID NO: 28427 - protein, 85 aa, unidentified
  REGION 1..85: note = Description of Unknown:hvTR_P52442 target sequence
YQDIFHGCSLTVPCGNFIFAMAMAMIENYCYSFDRFLIPLENNNLVPIVLNKQEKHQLPKILTFALTTVLKRSLTSSIISLPVLC

SEQ ID NO: 28428 - protein, 85 aa, unidentified
  REGION 1..85: note = Description of Unknown:hvTR_P52442 target sequence
FCKTKCLRYAKIDSYLTVICSKCGHCLNSGKERLKGKQTFSLSSMFYYRDRQEKNIIYSMHTDLLYCSLCGGQRLTLEKVYELYE

SEQ ID NO: 28429 - protein, 85 aa, unidentified
  REGION 1..85: note = Description of Unknown:hvTR_P52442 target sequence
YSVSGIQVKSVSWKAIIGTNSACTILNDSVKFDAIVACSCRTCYSMIHLQNLTINKLLKLISHSTEFQCQDCQNIYRETCLDLED

SEQ ID NO: 28430 - protein, 85 aa, unidentified
  REGION 1..85: note = Description of Unknown:cds_NZ_WFIY01000004.1_cds_WP_155863869.1_1773 target sequence
IYIFGNGIAGLSAAVSLTKSGYKVTVITKKITGGSTYIAKGGIAAAVGSDDSPEIHAKDTLRVGDGLSDEKAVNYVTSEAPKAVK

SEQ ID NO: 28431 - protein, 85 aa, unidentified
  REGION 1..85: note = Description of Unknown:cds_NZ_WFIY01000004.1_cds_WP_155863869.1_1773 target sequence
TLEEWGFEFATDLRLEGGHSRRRVLHKTDETGRDIYDFLMKKAKELNIPVVEDELLAIKTENNEVKGFITRNRGEVEADKIVLAT

SEQ ID NO: 28432 - protein, 85 aa, unidentified
  REGION 1..85: note = Description of Unknown:cds_NZ_WFIY01000004.1_cds_WP_155863869.1_1773 target sequence
GGYAYLWKYTSNQSTNTGDGIAIAFRSGALVADMEFVQFHPTVTNLDGETFLLTETLRGEGAILLNDKGERFAFKYHEKGELAPR

SEQ ID NO: 28433 - protein, 85 aa, unidentified
  REGION 1..85: note = Description of Unknown:cds_NZ_WFIY01000004.1_cds_WP_155863869.1_1773 target sequence
DVLSRAIYTEYLKGRKVFMDLTKIEDFENKFPVLTAYLKRHGKDKSFKIPVFPGAHFVDGGIRVNLRGESNIKGLYAIGEVSDTG

SEQ ID NO: 28434 - protein, 85 aa, unidentified
  REGION 1..85: note = Description of Unknown:cds_NZ_WFIY01000004.1_cds_WP_155863869.1_1773 target sequence
LHGANRLASNSLAEGLVYGVNLSLYIDKWEGLYVDDGEIENVKLHAGNNLSLDEIREINWENVGIVRNAEKLNKAISIYSSIDML

SEQ ID NO: 28435 - protein, 84 aa, unidentified
  REGION 1..84: note = Description of Unknown:cds_NZ_WFIY01000004.1_cds_WP_155863869.1_1773 target sequence
DEIREINWENVGIVRNAEKLNKAISIYSSIDMLSANEKSNSALVSYLTALAAYKRTESRGNHYREDYPYKDDKWKKRIYFQISK

SEQ ID NO: 28436 - protein, 85 aa, unidentified
  REGION 1..85: note = Description of Unknown:cds_NZ_WFIY01000004.1_cds_WP_155863869.1_1773 target sequence
TKKITGGSTYIAKGGIAAAVGSDDSPEIHAKDTLRVGDGLSDEKAVNYVTSEAPKAVKTLEEWGFEFATDLRLEGGHSRRRVLHK

SEQ ID NO: 28437 - protein, 85 aa, unidentified
  REGION 1..85: note = Description of Unknown:cds_NZ_WFIY01000004.1_cds_WP_155863869.1_1773 target sequence
TDETGRDIYDFLMKKAKELNIPVVEDELLAIKTENNEVKGFITRNRGEVEADKIVLATGGYAYLWKYTSNQSTNTGDGIAIAFRS

SEQ ID NO: 28438 - protein, 85 aa, unidentified
  REGION 1..85: note = Description of Unknown:cds_NZ_WFIY01000004.1_cds_WP_155863869.1_1773 target sequence
GALVADMEFVQFHPTVTNLDGETFLLTETLRGEGAILLNDKGERFAFKYHEKGELAPRDVLSRAIYTEYLKGRKVFMDLTKIEDF

SEQ ID NO: 28439 - protein, 85 aa, unidentified
  REGION 1..85: note = Description of Unknown:cds_NZ_WFIY01000004.1_cds_WP_155863869.1_1773 target sequence
ENKFPVLTAYLKRHGKDKSFKIPVFPGAHFVDGGIRVNLRGESNIKGLYAIGEVSDTGLHGANRLASNSLAEGLVYGVNLSLYID

SEQ ID NO: 28440 - protein, 85 aa, unidentified
  REGION 1..85: note = Description of Unknown:cds_NZ_WFIY01000004.1_cds_WP_155863869.1_1773 target sequence
KWEGLYVDDGEIENVKLHAGNNLSLDEIREINWENVGIVRNAEKLNKAISIYSSIDMLSANEKSNSALVSYLTALAAYKRTESRG

SEQ ID NO: 28441 - protein, 85 aa, unidentified
  REGION 1..85: note = Description of Unknown:cds_NZ_WFIY01000004.1_cds_WP_155862689.1_487 target sequence
NKKKVLLIGDGARENALAEALSNNKVFAISTFINPGIKNVVERTGGKYFVGNINSKDFVKEIIKQVNPDFGVIGPEDPLFHGVSN

SEQ ID NO: 28442 - protein, 85 aa, unidentified
  REGION 1..85: note = Description of Unknown:cds_NZ_WFIY01000004.1_cds_WP_155862689.1_487 target sequence
AFYEEGIPVVGPIDKDAMIEKSKVWMRQLMWKYKIPGRLRFKSFSNLAEAAKFILDYGGSVAIKPSEQVGGKGVKVVADIQAYLS

SEQ ID NO: 28443 - protein, 85 aa, unidentified
  REGION 1..85: note = Description of Unknown:cds_NZ_WFIY01000004.1_cds_WP_155862689.1_487 target sequence
NEKRQALSKSVDEIGKYVVDDEVKIIIEERVDGPEYTLHVLTDGTSYLPLPLAQDYKHAYQDGIGPETGGMGSISGPKNLLPFIN

SEQ ID NO: 28444 - protein, 85 aa, unidentified
  REGION 1..85: note = Description of Unknown:cds_NZ_WFIY01000004.1_cds_WP_155862689.1_487 target sequence
EEEYERSFNIVKMTAEAIEKETGEKYKGFLSGQMMLTDLWGPTIIEYYSRLGDPEASAIIPRIKNFGEILELMAEGKLSKAKIDL

SEQ ID NO: 28445 - protein, 85 aa, unidentified
  REGION 1..85: note = Description of Unknown:cds_NZ_WFIY01000004.1_cds_WP_155862689.1_487 target sequence
IEEPSVVRAIAPYGYPLNKSLAKGQKFYVDLQKIKEKGCILYFGSIALEGNELIAQGSRALELVAFGDFNEASKKLDECMAYISS

SEQ ID NO: 28446 - protein, 84 aa, unidentified
  REGION 1..84: note = Description of Unknown:cds_NZ_WFIY01000004.1_cds_WP_155862689.1_487 target sequence
ELIAQGSRALELVAFGDFNEASKKLDECMAYISSDRKMIYRTDIGRSINEMIEKAEIVRYAYKNREKNGILGVSADWSPNGGLW

SEQ ID NO: 28447 - protein, 85 aa, unidentified
  REGION 1..85: note = Description of Unknown:cds_NZ_WFIY01000004.1_cds_WP_155862689.1_487 target sequence
AISTFINPGIKNVVERTGGKYFVGNINSKDFVKEIIKQVNPDFGVIGPEDPLFHGVSNAFYEEGIPVVGPIDKDAMIEKSKVWMR

SEQ ID NO: 28448 - protein, 85 aa, unidentified
  REGION 1..85: note = Description of Unknown:cds_NZ_WFIY01000004.1_cds_WP_155862689.1_487 target sequence
QLMWKYKIPGRLRFKSFSNLAEAAKFILDYGGSVAIKPSEQVGGKGVKVVADIQAYLSNEKRQALSKSVDEIGKYVVDDEVKIII

SEQ ID NO: 28449 - protein, 85 aa, unidentified
  REGION 1..85: note = Description of Unknown:cds_NZ_WFIY01000004.1_cds_WP_155862689.1_487 target sequence
EERVDGPEYTLHVLTDGTSYLPLPLAQDYKHAYQDGIGPETGGMGSISGPKNLLPFINEEEYERSFNIVKMTAEAIEKETGEKYK

SEQ ID NO: 28450 - protein, 85 aa, unidentified
  REGION 1..85: note = Description of Unknown:cds_NZ_WFIY01000004.1_cds_WP_155862689.1_487 target sequence
GFLSGQMMLTDLWGPTIIEYYSRLGDPEASAIIPRIKNFGEILELMAEGKLSKAKIDLIEEPSVVRAIAPYGYPLNKSLAKGQKF

SEQ ID NO: 28451 - protein, 85 aa, unidentified
  REGION 1..85: note = Description of Unknown:cds_NZ_WFIY01000004.1_cds_WP_155862689.1_487 target sequence
YVDLQKIKEKGCILYFGSIALEGNELIAQGSRALELVAFGDFNEASKKLDECMAYISSDRKMIYRTDIGRSINEMIEKAEIVRYA

SEQ ID NO: 28452 - protein, 85 aa, unidentified
  REGION 1..85: note = Description of Unknown:cds_NZ_WFIY01000004.1_cds_WP_155862718.1_520 target sequence
ISAVGKKVVATQNYIASYVGAKILESGGNAFDASIAISAVLSVVLPHTSGLGGDGFILIKSSEGIKAYNSSGWSPKNLKAEKIDE

SEQ ID NO: 28453 - protein, 85 aa, unidentified
  REGION 1..85: note = Description of Unknown:cds_NZ_WFIY01000004.1_cds_WP_155862718.1_520 target sequence
RDPNSVVVPGLADLWRYLQENYTTMDLFELLKPAISLATNGFYVGRALHHAIITSPKFNPQFEKIFGNKRFGDFIKLPRLGRILK

SEQ ID NO: 28454 - protein, 85 aa, unidentified
  REGION 1..85: note = Description of Unknown:cds_NZ_WFIY01000004.1_cds_WP_155862718.1_520 target sequence
EISRDPREFYEGKISQEIVEGLKTQGVPVESEDFSQFHGEEISLLKIKYKDYDVYEFPPNTQGLTTLQILKMVELSRINKLPYND

SEQ ID NO: 28455 - protein, 85 aa, unidentified
  REGION 1..85: note = Description of Unknown:cds_NZ_WFIY01000004.1_cds_WP_155862718.1_520 target sequence
IKRVNNHVKISILAYDDRNKYIADPRFYQPPSYLLDEGYLIQKMTTEGVPVNLYDGDTTFFVVSDGENEVGFIQSLFYPFGSGII

SEQ ID NO: 28456 - protein, 85 aa, unidentified
  REGION 1..85: note = Description of Unknown:cds_NZ_WFIY01000004.1_cds_WP_155862718.1_520 target sequence
VDDIVFNNRGYGFKDGVNKPEGRKRPLHTLSILLASKDNEDLIIGCAGGDLRPQIHSEVFEYYADYSMEIDEAVNAPRFMYVNGK

SEQ ID NO: 28457 - protein, 84 aa, unidentified
  REGION 1..84: note = Description of Unknown:cds_NZ_WFIY01000004.1_cds_WP_155862718.1_520 target sequence
RPQIHSEVFEYYADYSMEIDEAVNAPRFMYVNGKVIAEKRLGIPATQTEYLSSEVGIVQAMKRKGNEFIAVADPRSEGVALPVH

SEQ ID NO: 28458 - protein, 85 aa, unidentified
  REGION 1..85: note = Description of Unknown:cds_NZ_WFIY01000004.1_cds_WP_155862718.1_520 target sequence
GNAFDASIAISAVLSVVLPHTSGLGGDGFILIKSSEGIKAYNSSGWSPKNLKAEKIDERDPNSVVVPGLADLWRYLQENYTTMDL

SEQ ID NO: 28459 - protein, 85 aa, unidentified
  REGION 1..85: note = Description of Unknown:cds_NZ_WFIY01000004.1_cds_WP_155862718.1_520 target sequence
FELLKPAISLATNGFYVGRALHHAIITSPKFNPQFEKIFGNKRFGDFIKLPRLGRILKEISRDPREFYEGKISQEIVEGLKTQGV

SEQ ID NO: 28460 - protein, 85 aa, unidentified
  REGION 1..85: note = Description of Unknown:cds_NZ_WFIY01000004.1_cds_WP_155862718.1_520 target sequence
PVESEDFSQFHGEEISLLKIKYKDYDVYEFPPNTQGLTTLQILKMVELSRINKLPYNDIKRVNNHVKISILAYDDRNKYIADPRF

SEQ ID NO: 28461 - protein, 85 aa, unidentified
  REGION 1..85: note = Description of Unknown:cds_NZ_WFIY01000004.1_cds_WP_155862718.1_520 target sequence
YQPPSYLLDEGYLIQKMTTEGVPVNLYDGDTTFFVVSDGENEVGFIQSLFYPFGSGIIVDDIVFNNRGYGFKDGVNKPEGRKRPL

SEQ ID NO: 28462 - protein, 85 aa, unidentified
  REGION 1..85: note = Description of Unknown:cds_NZ_WFIY01000004.1_cds_WP_155862718.1_520 target sequence
HTLSILLASKDNEDLIIGCAGGDLRPQIHSEVFEYYADYSMEIDEAVNAPRFMYVNGKVIAEKRLGIPATQTEYLSSEVGIVQAM

SEQ ID NO: 28463 - protein, 85 aa, unidentified
  REGION 1..85: note = Description of Unknown:cds_NZ_WFIY01000004.1_cds_WP_155863384.1_1357 target sequence
ENNFLSTPLIKIKVDVFYHSCPHNVTSGFYSCDPEEIASKLKGMKAVVIVGKYDEEHIKLYKEAALRAGINPLLVRVVDATWGEN

SEQ ID NO: 28464 - protein, 85 aa, unidentified
  REGION 1..85: note = Description of Unknown:cds_NZ_WFIY01000004.1_cds_WP_155863384.1_1357 target sequence
SIEENKKILENGWVAELALVEEKGLPVSRRELIKGELKIAKDRIDKPVWISDMCRLYRACTLCQDSCPYNAIKVDKKNGVIIDYN

SEQ ID NO: 28465 - protein, 85 aa, unidentified
  REGION 1..85: note = Description of Unknown:cds_NZ_WFIY01000004.1_cds_WP_155863384.1_1357 target sequence
KCVACGLCVASCPMSALQFPSFSQQAIFELSKIKGDKRISCYKDTGNSIKLPCIGMLSAVDLVMLRSSGKVELYCPGCELSKNLD

SEQ ID NO: 28466 - protein, 85 aa, unidentified
  REGION 1..85: note = Description of Unknown:cds_NZ_WFIY01000004.1_cds_WP_155863384.1_1357 target sequence
GLKSTVEDLNNAVGGFSLTVPGYNIQPKEVEKNIKIEQFSFLANKAEGRQNIIKNNNLPDISYEVQINEKICTMCESCAKWCPTN

SEQ ID NO: 28467 - protein, 85 aa, unidentified
  REGION 1..85: note = Description of Unknown:cds_NZ_WFIY01000004.1_cds_WP_155863384.1_1357 target sequence
ALTIEYSNDSEKLLFNPDKCIGCKICINVCPEGDNGCSSGSKAIKVFTAKEVKHEIKTLMKDEIVRCRVCGAIVGSRKSLNLVKK

SEQ ID NO: 28468 - protein, 84 aa, unidentified
  REGION 1..84: note = Description of Unknown:cds_NZ_WFIY01000004.1_cds_WP_155863384.1_1357 target sequence
KEVKHEIKTLMKDEIVRCRVCGAIVGSRKSLNLVKKVMKERGLECEDEWLERCPTHRAEYSYKKFFGKEVRFKPRRGPNDLGRV

SEQ ID NO: 28469 - protein, 85 aa, unidentified
  REGION 1..85: note = Description of Unknown:cds_NZ_WFIY01000004.1_cds_WP_155863384.1_1357 target sequence
GFYSCDPEEIASKLKGMKAVVIVGKYDEEHIKLYKEAALRAGINPLLVRVVDATWGENSIEENKKILENGWVAELALVEEKGLPV

SEQ ID NO: 28470 - protein, 85 aa, unidentified
  REGION 1..85: note = Description of Unknown:cds_NZ_WFIY01000004.1_cds_WP_155863384.1_1357 target sequence
SRRELIKGELKIAKDRIDKPVWISDMCRLYRACTLCQDSCPYNAIKVDKKNGVIIDYNKCVACGLCVASCPMSALQFPSFSQQAI

SEQ ID NO: 28471 - protein, 85 aa, unidentified
  REGION 1..85: note = Description of Unknown:cds_NZ_WFIY01000004.1_cds_WP_155863384.1_1357 target sequence
FELSKIKGDKRISCYKDTGNSIKLPCIGMLSAVDLVMLRSSGKVELYCPGCELSKNLDGLKSTVEDLNNAVGGFSLTVPGYNIQP

SEQ ID NO: 28472 - protein, 85 aa, unidentified
  REGION 1..85: note = Description of Unknown:cds_NZ_WFIY01000004.1_cds_WP_155863384.1_1357 target sequence
KEVEKNIKIEQFSFLANKAEGRQNIIKNNNLPDISYEVQINEKICTMCESCAKWCPTNALTIEYSNDSEKLLFNPDKCIGCKICI

SEQ ID NO: 28473 - protein, 85 aa, unidentified
  REGION 1..85: note = Description of Unknown:cds_NZ_WFIY01000004.1_cds_WP_155863384.1_1357 target sequence
NVCPEGDNGCSSGSKAIKVFTAKEVKHEIKTLMKDEIVRCRVCGAIVGSRKSLNLVKKVMKERGLECEDEWLERCPTHRAEYSYK

SEQ ID NO: 28474 - protein, 85 aa, unidentified
  REGION 1..85: note = Description of Unknown:cds_NC_010495.1_cds_YP_001742039.1_2 target sequence
ARKRLSALAIEKLEQVVGNSTAKPESAVFGLVDKLLHDGTPNVVKRLKMTATGVSETDEEPTILIPDRMELLLYPRRFKVFYGGR

SEQ ID NO: 28475 - protein, 85 aa, unidentified
  REGION 1..85: note = Description of Unknown:cds_NC_010495.1_cds_YP_001742039.1_2 target sequence
GSAKSRSCISYLIEKARFRNSRVGCFREIQNSIKESSYAELVDEINRKGHTQEYRCVDGEITHHSTRSKFVFRGLWRNITAIKGM

SEQ ID NO: 28476 - protein, 85 aa, unidentified
  REGION 1..85: note = Description of Unknown:cds_NC_010495.1_cds_YP_001742039.1_2 target sequence
AGLTDVFCEESENISQVSWDTLIPTVRAAGSEIIIVFNPNKETDPTWTNFVEPYINKMVDGIYQDDDIVVVNVNYVHNPWFTEEL

SEQ ID NO: 28477 - protein, 85 aa, unidentified
  REGION 1..85: note = Description of Unknown:cds_NC_010495.1_cds_YP_001742039.1_2 target sequence
KQHMNQMKTVDYDRYLWVYEGKFNKRSDEQVFGGKWRIDNFEVKPEWHGPYFGMDFGFSTDPTAMVEVYIEELPGGRRNIYINRE

SEQ ID NO: 28478 - protein, 85 aa, unidentified
  REGION 1..85: note = Description of Unknown:cds_NC_010495.1_cds_YP_001742039.1_2 target sequence
YGKVGLEITDTPAAMEQSFQMAKRARWYADCARPETISHIKRSGFDIHPCTKWPGSVEDGVTWLRGCDSIIIHERCKEMQNEAAM

SEQ ID NO: 28479 - protein, 84 aa, unidentified
  REGION 1..84: note = Description of Unknown:cds_NC_010495.1_cds_YP_001742039.1_2 target sequence
CTKWPGSVEDGVTWLRGCDSIIIHERCKEMQNEAAMYSYKVDKLTGNVLTDIVDAFNHYWDAVRYALNDHIVQRGSGMLIRRRR

SEQ ID NO: 28480 - protein, 85 aa, unidentified
  REGION 1..85: note = Description of Unknown:cds_NC_010495.1_cds_YP_001742039.1_2 target sequence
VFGLVDKLLHDGTPNVVKRLKMTATGVSETDEEPTILIPDRMELLLYPRRFKVFYGGRGSAKSRSCISYLIEKARFRNSRVGCFR

SEQ ID NO: 28481 - protein, 85 aa, unidentified
  REGION 1..85: note = Description of Unknown:cds_NC_010495.1_cds_YP_001742039.1_2 target sequence
EIQNSIKESSYAELVDEINRKGHTQEYRCVDGEITHHSTRSKFVFRGLWRNITAIKGMAGLTDVFCEESENISQVSWDTLIPTVR

SEQ ID NO: 28482 - protein, 85 aa, unidentified
  REGION 1..85: note = Description of Unknown:cds_NC_010495.1_cds_YP_001742039.1_2 target sequence
AAGSEIIIVFNPNKETDPTWTNFVEPYINKMVDGIYQDDDIVVVNVNYVHNPWFTEELKQHMNQMKTVDYDRYLWVYEGKFNKRS

SEQ ID NO: 28483 - protein, 85 aa, unidentified
  REGION 1..85: note = Description of Unknown:cds_NC_010495.1_cds_YP_001742039.1_2 target sequence
DEQVFGGKWRIDNFEVKPEWHGPYFGMDFGFSTDPTAMVEVYIEELPGGRRNIYINREYGKVGLEITDTPAAMEQSFQMAKRARW

SEQ ID NO: 28484 - protein, 85 aa, unidentified
  REGION 1..85: note = Description of Unknown:cds_NC_010495.1_cds_YP_001742039.1_2 target sequence
YADCARPETISHIKRSGFDIHPCTKWPGSVEDGVTWLRGCDSIIIHERCKEMQNEAAMYSYKVDKLTGNVLTDIVDAFNHYWDAV

SEQ ID NO: 28485 - protein, 85 aa, unidentified
  REGION 1..85: note = Description of Unknown:hvTR_P11806 target sequence
AGRQQELPTITPYLQETSPERAPSLPPKKKLRKNVQVPDRVPVLPPSPEVVPDSEEEEEEVVYTGFSHPGVQVVQKASGKRYVRR

SEQ ID NO: 28486 - protein, 85 aa, unidentified
  REGION 1..85: note = Description of Unknown:hvTR_P11806 target sequence
LEPKGVPPPSEENNEEEEPSTSKAVTSVVLNPQAEPLVSAWEKGMDLMIKLMEKYHVEAEEKNGFKFLPEQSNVYRKICQTWLNE

SEQ ID NO: 28487 - protein, 85 aa, unidentified
  REGION 1..85: note = Description of Unknown:hvTR_P11806 target sequence
EHRGLPLTFTSHKTFVEMMGRFLRAYVESYAGVKNNEWEPTGCAIWLHGCTEQEGVLRCYHGLEMIQKEQLVEMDVASENAQRAL

SEQ ID NO: 28488 - protein, 85 aa, unidentified
  REGION 1..85: note = Description of Unknown:hvTR_P11806 target sequence
KEHPSRAKVVQNRWGRSVVQLKNDDARCCVEDVSCATNVFSAKSCGLFFSEGTKAQTAFLQIEAFMQAEYPKMQNGLKRLLMVMR

SEQ ID NO: 28489 - protein, 85 aa, unidentified
  REGION 1..85: note = Description of Unknown:hvTR_P11806 target sequence
CDCLYKPTGVPQLGRQMCKATPFALSNVDSLRAEEVTDKVALASIQYPCVLVYQCANPVYRNSRGGQGPNCDFKISAPDLLGALQ

SEQ ID NO: 28490 - protein, 84 aa, unidentified
  REGION 1..84: note = Description of Unknown:hvTR_P11806 target sequence
CVLVYQCANPVYRNSRGGQGPNCDFKISAPDLLGALQLVRRLWGENVDGPLPKMLIPEFKWSSRLQYRNVALPASHGDGEKEPF

SEQ ID NO: 28491 - protein, 85 aa, unidentified
  REGION 1..85: note = Description of Unknown:hvTR_P11806 target sequence
KKKLRKNVQVPDRVPVLPPSPEVVPDSEEEEEEVVYTGFSHPGVQVVQKASGKRYVRRLEPKGVPPPSEENNEEEEPSTSKAVTS

SEQ ID NO: 28492 - protein, 85 aa, unidentified
  REGION 1..85: note = Description of Unknown:hvTR_P11806 target sequence
VVLNPQAEPLVSAWEKGMDLMIKLMEKYHVEAEEKNGFKFLPEQSNVYRKICQTWLNEEHRGLPLTFTSHKTFVEMMGRFLRAYV

SEQ ID NO: 28493 - protein, 85 aa, unidentified
  REGION 1..85: note = Description of Unknown:hvTR_P11806 target sequence
ESYAGVKNNEWEPTGCAIWLHGCTEQEGVLRCYHGLEMIQKEQLVEMDVASENAQRALKEHPSRAKVVQNRWGRSVVQLKNDDAR

SEQ ID NO: 28494 - protein, 85 aa, unidentified
  REGION 1..85: note = Description of Unknown:hvTR_P11806 target sequence
CCVEDVSCATNVFSAKSCGLFFSEGTKAQTAFLQIEAFMQAEYPKMQNGLKRLLMVMRCDCLYKPTGVPQLGRQMCKATPFALSN

SEQ ID NO: 28495 - protein, 85 aa, unidentified
  REGION 1..85: note = Description of Unknown:hvTR_P11806 target sequence
VDSLRAEEVTDKVALASIQYPCVLVYQCANPVYRNSRGGQGPNCDFKISAPDLLGALQLVRRLWGENVDGPLPKMLIPEFKWSSR

SEQ ID NO: 28496 - protein, 85 aa, unidentified
  REGION 1..85: note = Description of Unknown:cds_NZ_WFIY01000004.1_cds_WP_155864300.1_2294 target sequence
TDKNSSQQNKNIAAQLTARIDRLPVMVLPLSVVLSLAFGYFIALYDVIDVGIAFSATSLKYTGLTSSEASIVVSLGLFGYIPGAL

SEQ ID NO: 28497 - protein, 85 aa, unidentified
  REGION 1..85: note = Description of Unknown:cds_NZ_WFIY01000004.1_cds_WP_155864300.1_2294 target sequence
LLGYLGDRIGRKPMLMTTALLTAIGSLGNALSSNFIEFSVFRFITGMGIGGDLILVPTYLVEMVPAKNRAKYFNLVYIAGWAGLG

SEQ ID NO: 28498 - protein, 85 aa, unidentified
  REGION 1..85: note = Description of Unknown:cds_NZ_WFIY01000004.1_cds_WP_155864300.1_2294 target sequence
LGPFMASYIDVANPAIGWKVIFLVGATLAFIVFAIRGHASETVRMLALKGKIDEAEKVVKDMEEKAMKKAGVTTLPEPTVFNFET

SEQ ID NO: 28499 - protein, 85 aa, unidentified
  REGION 1..85: note = Description of Unknown:cds_NZ_WFIY01000004.1_cds_WP_155864300.1_2294 target sequence
KKVDPFYVFKNPKYRVRVIAVMLSIFFFYFGEYPYLTEFLLWTSTVHSLRLLSNQITLYYGDAGIATFIGAILLRAVIDKVRRPI

SEQ ID NO: 28500 - protein, 85 aa, unidentified
  REGION 1..85: note = Description of Unknown:cds_NZ_WFIY01000004.1_cds_WP_155864300.1_2294 target sequence
LTTISYFVGMVLGIAIAVIGATSANLTMMLTGFVLANLIGVGWSNQLNYLNGTENVPTYARATSFAFSDGVAHLGAAISTAIILS

SEQ ID NO: 28501 - protein, 84 aa, unidentified
  REGION 1..84: note = Description of Unknown:cds_NZ_WFIY01000004.1_cds_WP_155864300.1_2294 target sequence
YLNGTENVPTYARATSFAFSDGVAHLGAAISTAIILSIIPVLGAVTTWIGFQIPMVIMGIILIFVLPNTIGKSLEEINEASAGV

SEQ ID NO: 28502 - protein, 85 aa, unidentified
  REGION 1..85: note = Description of Unknown:cds_NZ_WFIY01000004.1_cds_WP_155864300.1_2294 target sequence
LPLSVVLSLAFGYFIALYDVIDVGIAFSATSLKYTGLTSSEASIVVSLGLFGYIPGALLLGYLGDRIGRKPMLMTTALLTAIGSL

SEQ ID NO: 28503 - protein, 85 aa, unidentified
  REGION 1..85: note = Description of Unknown:cds_NZ_WFIY01000004.1_cds_WP_155864300.1_2294 target sequence
GNALSSNFIEFSVFRFITGMGIGGDLILVPTYLVEMVPAKNRAKYFNLVYIAGWAGLGLGPFMASYIDVANPAIGWKVIFLVGAT

SEQ ID NO: 28504 - protein, 85 aa, unidentified
  REGION 1..85: note = Description of Unknown:cds_NZ_WFIY01000004.1_cds_WP_155864300.1_2294 target sequence
LAFIVFAIRGHASETVRMLALKGKIDEAEKVVKDMEEKAMKKAGVTTLPEPTVFNFETKKVDPFYVFKNPKYRVRVIAVMLSIFF

SEQ ID NO: 28505 - protein, 85 aa, unidentified
  REGION 1..85: note = Description of Unknown:cds_NZ_WFIY01000004.1_cds_WP_155864300.1_2294 target sequence
FYFGEYPYLTEFLLWTSTVHSLRLLSNQITLYYGDAGIATFIGAILLRAVIDKVRRPILTTISYFVGMVLGIAIAVIGATSANLT

SEQ ID NO: 28506 - protein, 85 aa, unidentified
  REGION 1..85: note = Description of Unknown:cds_NZ_WFIY01000004.1_cds_WP_155864300.1_2294 target sequence
MMLTGFVLANLIGVGWSNQLNYLNGTENVPTYARATSFAFSDGVAHLGAAISTAIILSIIPVLGAVTTWIGFQIPMVIMGIILIF

SEQ ID NO: 28507 - protein, 85 aa, unidentified
  REGION 1..85: note = Description of Unknown:cds_NC_030656.1_cds_YP_009268828.1_113 target sequence
FGYINITNKLYTYIKKISGSQPLFLFNSDNNHVEVFPNSSFKFLVPAGLFSSYRVMLRDELKYPIANNPMTNEKDLSLPNLYPLQ

SEQ ID NO: 28508 - protein, 85 aa, unidentified
  REGION 1..85: note = Description of Unknown:cds_NC_030656.1_cds_YP_009268828.1_113 target sequence
QLVVDKVVAAMKRKEEEHRPKYITLHLKCGFGKTVTACYLMAKERKRTVICVPNKMLIPQWKTAVELTKANYMISVHGVSKLLLE

SEQ ID NO: 28509 - protein, 85 aa, unidentified
  REGION 1..85: note = Description of Unknown:cds_NC_030656.1_cds_YP_009268828.1_113 target sequence
KSTPDVLIVVSRHFANEEFCNLVYSNYDVVIVDESHTYNLMNNSAMTRYLAFYPPPICYFLTATPRQSNRIYCNDIINVEKESSL

SEQ ID NO: 28510 - protein, 85 aa, unidentified
  REGION 1..85: note = Description of Unknown:cds_NC_030656.1_cds_YP_009268828.1_113 target sequence
NKTIKIIDCYFKPFSNEKIRNLSTKLNSTYNKYHVFTEKILTEDVHRNKLIIKTLVEEYTSRKINRIMIITKLRAHMLMFYNELV

SEQ ID NO: 28511 - protein, 85 aa, unidentified
  REGION 1..85: note = Description of Unknown:cds_NC_030656.1_cds_YP_009268828.1_113 target sequence
KKFRNDVVLGDAQNRKTPEIVNGLRSKDRFIFISTLYYAGTGLDLPSLDSLFVGVAVMNNMHMEQLLGRVCRETTLTDRTVYVFP

SEQ ID NO: 28512 - protein, 84 aa, unidentified
  REGION 1..84: note = Description of Unknown:cds_NC_030656.1_cds_YP_009268828.1_113 target sequence
DSLFVGVAVMNNMHMEQLLGRVCRETTLTDRTVYVFPTTSIREIKSVVDNYVQRLISLALDLGFVQLNTDKPCKEETALKLAFS

SEQ ID NO: 28513 - protein, 85 aa, unidentified
  REGION 1..85: note = Description of Unknown:cds_NC_030656.1_cds_YP_009268828.1_113 target sequence
SDNNHVEVFPNSSFKFLVPAGLFSSYRVMLRDELKYPIANNPMTNEKDLSLPNLYPLQQLVVDKVVAAMKRKEEEHRPKYITLHL

SEQ ID NO: 28514 - protein, 85 aa, unidentified
  REGION 1..85: note = Description of Unknown:cds_NC_030656.1_cds_YP_009268828.1_113 target sequence
KCGFGKTVTACYLMAKERKRTVICVPNKMLIPQWKTAVELTKANYMISVHGVSKLLLEKSTPDVLIVVSRHFANEEFCNLVYSNY

SEQ ID NO: 28515 - protein, 85 aa, unidentified
  REGION 1..85: note = Description of Unknown:cds_NC_030656.1_cds_YP_009268828.1_113 target sequence
DVVIVDESHTYNLMNNSAMTRYLAFYPPPICYFLTATPRQSNRIYCNDIINVEKESSLNKTIKIIDCYFKPFSNEKIRNLSTKLN

SEQ ID NO: 28516 - protein, 85 aa, unidentified
  REGION 1..85: note = Description of Unknown:cds_NC_030656.1_cds_YP_009268828.1_113 target sequence
STYNKYHVFTEKILTEDVHRNKLIIKTLVEEYTSRKINRIMIITKLRAHMLMFYNELVKKFRNDVVLGDAQNRKTPEIVNGLRSK

SEQ ID NO: 28517 - protein, 85 aa, unidentified
  REGION 1..85: note = Description of Unknown:cds_NC_030656.1_cds_YP_009268828.1_113 target sequence
DRFIFISTLYYAGTGLDLPSLDSLFVGVAVMNNMHMEQLLGRVCRETTLTDRTVYVFPTTSIREIKSVVDNYVQRLISLALDLGF

SEQ ID NO: 28518 - protein, 85 aa, unidentified
  REGION 1..85: note = Description of Unknown:cds_NZ_WFIY01000004.1_cds_WP_155862345.1_76 target sequence
SKRGKIIIISLALIAIVLTTVVLANYDTLYILYIKFTDPNDINIVFFAYTGNKLTLLQNVSVTIFAFYPTANGTVIKKIETAINV

SEQ ID NO: 28519 - protein, 85 aa, unidentified
  REGION 1..85: note = Description of Unknown:cds_NZ_WFIY01000004.1_cds_WP_155862345.1_76 target sequence
GYVRIPLNNLTEIAEHWIKHYGYKICPSLLGFASYTVNKADETIVYVQPFTVTISPYNITHGIGKTVVKLFINPKKFIVKKKFTP

SEQ ID NO: 28520 - protein, 85 aa, unidentified
  REGION 1..85: note = Description of Unknown:cds_NZ_WFIY01000004.1_cds_WP_155862345.1_76 target sequence
NETGLTNTTVPSKEGRPSLIICLNKVWFYPSNKSLGPIPLSIAYITDTNYNDYIGEILLKEGYSEASGIQFKFGVTILGYPVTVT

SEQ ID NO: 28521 - protein, 85 aa, unidentified
  REGION 1..85: note = Description of Unknown:cds_NZ_WFIY01000004.1_cds_WP_155862345.1_76 target sequence
GFSITTSANNLVLCKAGYFGEEGHSNFVEIYTIGQIAIASYCVYYYYCPSLPPVFLGYCNETFLTGLEVVGRGSSYLPALYNTTV

SEQ ID NO: 28522 - protein, 85 aa, unidentified
  REGION 1..85: note = Description of Unknown:cds_NZ_WFIY01000004.1_cds_WP_155862345.1_76 target sequence
SNLPPTCYFSNNLTFIGSVTPGNIHLHMCVSIATSNGFATYSVPIGLIIKLATILGLTIPSWISSLLLVISPYIGIVTFTNSVTY

SEQ ID NO: 28523 - protein, 84 aa, unidentified
  REGION 1..84: note = Description of Unknown:cds_NZ_WFIY01000004.1_cds_WP_155862345.1_76 target sequence
IIKLATILGLTIPSWISSLLLVISPYIGIVTFTNSVTYFASSISIVDLSSNTYYIYLMNDSVPYCIGGTKYYIPYYYYYINYTS

SEQ ID NO: 28524 - protein, 85 aa, unidentified
  REGION 1..85: note = Description of Unknown:cds_NZ_WFIY01000004.1_cds_WP_155862345.1_76 target sequence
TLYILYIKFTDPNDINIVFFAYTGNKLTLLQNVSVTIFAFYPTANGTVIKKIETAINVGYVRIPLNNLTEIAEHWIKHYGYKICP

SEQ ID NO: 28525 - protein, 85 aa, unidentified
  REGION 1..85: note = Description of Unknown:cds_NZ_WFIY01000004.1_cds_WP_155862345.1_76 target sequence
SLLGFASYTVNKADETIVYVQPFTVTISPYNITHGIGKTVVKLFINPKKFIVKKKFTPNETGLTNTTVPSKEGRPSLIICLNKVW

SEQ ID NO: 28526 - protein, 85 aa, unidentified
  REGION 1..85: note = Description of Unknown:cds_NZ_WFIY01000004.1_cds_WP_155862345.1_76 target sequence
FYPSNKSLGPIPLSIAYITDTNYNDYIGEILLKEGYSEASGIQFKFGVTILGYPVTVTGFSITTSANNLVLCKAGYFGEEGHSNF

SEQ ID NO: 28527 - protein, 85 aa, unidentified
  REGION 1..85: note = Description of Unknown:cds_NZ_WFIY01000004.1_cds_WP_155862345.1_76 target sequence
VEIYTIGQIAIASYCVYYYYCPSLPPVFLGYCNETFLTGLEVVGRGSSYLPALYNTTVSNLPPTCYFSNNLTFIGSVTPGNIHLH

SEQ ID NO: 28528 - protein, 85 aa, unidentified
  REGION 1..85: note = Description of Unknown:cds_NZ_WFIY01000004.1_cds_WP_155862345.1_76 target sequence
MCVSIATSNGFATYSVPIGLIIKLATILGLTIPSWISSLLLVISPYIGIVTFTNSVTYFASSISIVDLSSNTYYIYLMNDSVPYC

SEQ ID NO: 28529 - protein, 85 aa, unidentified
  REGION 1..85: note = Description of Unknown:cds_NZ_WFIY01000004.1_cds_WP_155862445.1_196 target sequence
ISKLVEDLKNGNLDPEEYVAKTFERINKLDKNINAFITLRDEEEVKKEVKESIKRGGKLAGVLIAVKDVISTKGIRTTCASKMLS

SEQ ID NO: 28530 - protein, 85 aa, unidentified
  REGION 1..85: note = Description of Unknown:cds_NZ_WFIY01000004.1_cds_WP_155862445.1_196 target sequence
DYIPPYDATVIEKLKNEGAVILGKTNMDEFAMGSTTETSYFGPTRNPWDLERTPGGSSGGSGAALAAGYVDLALGSDTGGSIRAP

SEQ ID NO: 28531 - protein, 85 aa, unidentified
  REGION 1..85: note = Description of Unknown:cds_NZ_WFIY01000004.1_cds_WP_155862445.1_196 target sequence
AAFTATFGLKPSYGTVSRYGLIAYANSLEQIGPMAKNAEDLGLLYSIIAGEDDKDATTIKYSVDSPPGEIPIKGIKIGILSDILE

SEQ ID NO: 28532 - protein, 85 aa, unidentified
  REGION 1..85: note = Description of Unknown:cds_NZ_WFIY01000004.1_cds_WP_155862445.1_196 target sequence
MSDKSVVSVIRTAIDKLSSEGAIIEETKLGYAEYALPAYYIIAMSEASSNLARYDGVRYGYSKHFEGNWIETFSKNRGEGFGMEV

SEQ ID NO: 28533 - protein, 85 aa, unidentified
  REGION 1..85: note = Description of Unknown:cds_NZ_WFIY01000004.1_cds_WP_155862445.1_196 target sequence
KRRILLGSFILSAGYYEEYYIKALKVRRLIKNSLDQLFSKYDVLLSPTMPVLPPKIGEVINDPIKMYAMDLNTVIANLAAVPAIS

SEQ ID NO: 28534 - protein, 84 aa, unidentified
  REGION 1..84: note = Description of Unknown:cds_NZ_WFIY01000004.1_cds_WP_155862445.1_196 target sequence
TMPVLPPKIGEVINDPIKMYAMDLNTVIANLAAVPAISIPAGFYNNLPVGLQMMGRYLSDTMLIGISINIEKILNMHDLTAPIV

SEQ ID NO: 28535 - protein, 85 aa, unidentified
  REGION 1..85: note = Description of Unknown:cds_NZ_WFIY01000004.1_cds_WP_155862445.1_196 target sequence
KLDKNINAFITLRDEEEVKKEVKESIKRGGKLAGVLIAVKDVISTKGIRTTCASKMLSDYIPPYDATVIEKLKNEGAVILGKTNM

SEQ ID NO: 28536 - protein, 85 aa, unidentified
  REGION 1..85: note = Description of Unknown:cds_NZ_WFIY01000004.1_cds_WP_155862445.1_196 target sequence
DEFAMGSTTETSYFGPTRNPWDLERTPGGSSGGSGAALAAGYVDLALGSDTGGSIRAPAAFTATFGLKPSYGTVSRYGLIAYANS

SEQ ID NO: 28537 - protein, 85 aa, unidentified
  REGION 1..85: note = Description of Unknown:cds_NZ_WFIY01000004.1_cds_WP_155862445.1_196 target sequence
LEQIGPMAKNAEDLGLLYSIIAGEDDKDATTIKYSVDSPPGEIPIKGIKIGILSDILEMSDKSVVSVIRTAIDKLSSEGAIIEET

SEQ ID NO: 28538 - protein, 85 aa, unidentified
  REGION 1..85: note = Description of Unknown:cds_NZ_WFIY01000004.1_cds_WP_155862445.1_196 target sequence
KLGYAEYALPAYYIIAMSEASSNLARYDGVRYGYSKHFEGNWIETFSKNRGEGFGMEVKRRILLGSFILSAGYYEEYYIKALKVR

SEQ ID NO: 28539 - protein, 85 aa, unidentified
  REGION 1..85: note = Description of Unknown:cds_NZ_WFIY01000004.1_cds_WP_155862445.1_196 target sequence
RLIKNSLDQLFSKYDVLLSPTMPVLPPKIGEVINDPIKMYAMDLNTVIANLAAVPAISIPAGFYNNLPVGLQMMGRYLSDTMLIG

SEQ ID NO: 28540 - protein, 85 aa, unidentified
  REGION 1..85: note = Description of Unknown:cds_NZ_WFIY01000004.1_cds_WP_155862981.1_851 target sequence
PKIGLEVHIHLNSLKTKLFCSCPTDYVGKEPNTVVCPVCLGLPGAIPVLNEEALKKAVMVAIALNCEIAPYLIFSRKHYFYPDMA

SEQ ID NO: 28541 - protein, 85 aa, unidentified
  REGION 1..85: note = Description of Unknown:cds_NZ_WFIY01000004.1_cds_WP_155862981.1_851 target sequence
KNYQISQYDGPGSMAIAKAGYLNIGNKKIRIRRINIEEDPAKSIYPSGSMLTSKYTLLDYNRSGIGLLEIVTEPDIEQPKEAREF

SEQ ID NO: 28542 - protein, 85 aa, unidentified
  REGION 1..85: note = Description of Unknown:cds_NZ_WFIY01000004.1_cds_WP_155862981.1_851 target sequence
LNKLRSILEHLDVCNCEIEGSMRADVNVSVEGGERVEVKNVGSIRDVEDAIKYEVARQKAAIAQGLKVTRETRHWDAERKVTVPI

SEQ ID NO: 28543 - protein, 85 aa, unidentified
  REGION 1..85: note = Description of Unknown:cds_NZ_WFIY01000004.1_cds_WP_155862981.1_851 target sequence
RLKESEEDYRYFPDPDLPPYQITEDYIRKVKESMPELPDARIKRMVEMYGITEYDAEVLVSDKALADLFERTAKLYNNYKKLANV

SEQ ID NO: 28544 - protein, 85 aa, unidentified
  REGION 1..85: note = Description of Unknown:cds_NZ_WFIY01000004.1_cds_WP_155862981.1_851 target sequence
IINDYLRWINDKNLRVSDSKATPEALAELMNMMDKGIISIKILKEILPQIILEGKNPREIIEKEKLNVISDKDYLEKIIDEVLEE

SEQ ID NO: 28545 - protein, 84 aa, unidentified
  REGION 1..84: note = Description of Unknown:cds_NZ_WFIY01000004.1_cds_WP_155862981.1_851 target sequence
PQIILEGKNPREIIEKEKLNVISDKDYLEKIIDEVLEEDKDAALAAKKDPKVINYLVGKVMKKTRGKADPYLTNQLLKEKLQNI

SEQ ID NO: 28546 - protein, 85 aa, unidentified
  REGION 1..85: note = Description of Unknown:cds_NZ_WFIY01000004.1_cds_WP_155862981.1_851 target sequence
GKEPNTVVCPVCLGLPGAIPVLNEEALKKAVMVAIALNCEIAPYLIFSRKHYFYPDMAKNYQISQYDGPGSMAIAKAGYLNIGNK

SEQ ID NO: 28547 - protein, 85 aa, unidentified
  REGION 1..85: note = Description of Unknown:cds_NZ_WFIY01000004.1_cds_WP_155862981.1_851 target sequence
KIRIRRINIEEDPAKSIYPSGSMLTSKYTLLDYNRSGIGLLEIVTEPDIEQPKEAREFLNKLRSILEHLDVCNCEIEGSMRADVN

SEQ ID NO: 28548 - protein, 85 aa, unidentified
  REGION 1..85: note = Description of Unknown:cds_NZ_WFIY01000004.1_cds_WP_155862981.1_851 target sequence
VSVEGGERVEVKNVGSIRDVEDAIKYEVARQKAAIAQGLKVTRETRHWDAERKVTVPIRLKESEEDYRYFPDPDLPPYQITEDYI

SEQ ID NO: 28549 - protein, 85 aa, unidentified
  REGION 1..85: note = Description of Unknown:cds_NZ_WFIY01000004.1_cds_WP_155862981.1_851 target sequence
RKVKESMPELPDARIKRMVEMYGITEYDAEVLVSDKALADLFERTAKLYNNYKKLANVIINDYLRWINDKNLRVSDSKATPEALA

SEQ ID NO: 28550 - protein, 85 aa, unidentified
  REGION 1..85: note = Description of Unknown:cds_NZ_WFIY01000004.1_cds_WP_155862981.1_851 target sequence
ELMNMMDKGIISIKILKEILPQIILEGKNPREIIEKEKLNVISDKDYLEKIIDEVLEEDKDAALAAKKDPKVINYLVGKVMKKTR

SEQ ID NO: 28551 - protein, 85 aa, unidentified
  REGION 1..85: note = Description of Unknown:cds_NC_035460.1_cds_YP_009407986.1_35 target sequence
ATTNIIAITLENYLARQPTVNEYHMLKSQIKTIQRILKFNKDVFISLVKKNKKKFFSDIKTTPSDIKNSILQYFTKQHNVTSIGK

SEQ ID NO: 28552 - protein, 85 aa, unidentified
  REGION 1..85: note = Description of Unknown:cds_NC_035460.1_cds_YP_009407986.1_35 target sequence
LYTIIELQNLLVTTYTNILGVLTIKQPDIVLSQVVMDTTAMKKLAANALNSMNVANITEKVMGRHNVSLLVDDVNKLIEEYLRRH

SEQ ID NO: 28553 - protein, 85 aa, unidentified
  REGION 1..85: note = Description of Unknown:cds_NC_035460.1_cds_YP_009407986.1_35 target sequence
NKTCICYGSYSLYLLNSEIKYGDIDILQTNSRTFLINLAFLIKFITGNNVILIKVPYLKNYMVLKDKDENHIIDSFNIRQDTMNM

SEQ ID NO: 28554 - protein, 85 aa, unidentified
  REGION 1..85: note = Description of Unknown:cds_NC_035460.1_cds_YP_009407986.1_35 target sequence
VPKILIDNIYIVDPVFQCMAMLKMLSQYDRLEDLAKNPDKQTIRLATLLEYIRCKYGIVFNGNSNNMPMKAILDKTNRIITVDTS

SEQ ID NO: 28555 - protein, 85 aa, unidentified
  REGION 1..85: note = Description of Unknown:cds_NC_035460.1_cds_YP_009407986.1_35 target sequence
KYNFSYIKAYIYLDEISLTSDILDLNANDSIDFENVTNSIFLIHNNILYTYFSNTILLSDEKEIHEISLRALSAHILMYQILIRG

SEQ ID NO: 28556 - protein, 84 aa, unidentified
  REGION 1..84: note = Description of Unknown:cds_NC_035460.1_cds_YP_009407986.1_35 target sequence
LYTYFSNTILLSDEKEIHEISLRALSAHILMYQILIRGEYINALSDILNSLMFRPSKPIYLVIPRDKKIGRHGIIDIEKDTIIH

SEQ ID NO: 28557 - protein, 85 aa, unidentified
  REGION 1..85: note = Description of Unknown:cds_NC_035460.1_cds_YP_009407986.1_35 target sequence
SQIKTIQRILKFNKDVFISLVKKNKKKFFSDIKTTPSDIKNSILQYFTKQHNVTSIGKLYTIIELQNLLVTTYTNILGVLTIKQP

SEQ ID NO: 28558 - protein, 85 aa, unidentified
  REGION 1..85: note = Description of Unknown:cds_NC_035460.1_cds_YP_009407986.1_35 target sequence
DIVLSQVVMDTTAMKKLAANALNSMNVANITEKVMGRHNVSLLVDDVNKLIEEYLRRHNKTCICYGSYSLYLLNSEIKYGDIDIL

SEQ ID NO: 28559 - protein, 85 aa, unidentified
  REGION 1..85: note = Description of Unknown:cds_NC_035460.1_cds_YP_009407986.1_35 target sequence
QTNSRTFLINLAFLIKFITGNNVILIKVPYLKNYMVLKDKDENHIIDSFNIRQDTMNMVPKILIDNIYIVDPVFQCMAMLKMLSQ

SEQ ID NO: 28560 - protein, 85 aa, unidentified
  REGION 1..85: note = Description of Unknown:cds_NC_035460.1_cds_YP_009407986.1_35 target sequence
YDRLEDLAKNPDKQTIRLATLLEYIRCKYGIVFNGNSNNMPMKAILDKTNRIITVDTSKYNFSYIKAYIYLDEISLTSDILDLNA

SEQ ID NO: 28561 - protein, 85 aa, unidentified
  REGION 1..85: note = Description of Unknown:cds_NC_035460.1_cds_YP_009407986.1_35 target sequence
NDSIDFENVTNSIFLIHNNILYTYFSNTILLSDEKEIHEISLRALSAHILMYQILIRGEYINALSDILNSLMFRPSKPIYLVIPR

SEQ ID NO: 28562 - protein, 85 aa, unidentified
  REGION 1..85: note = Description of Unknown:cds_NZ_WFIY01000004.1_cds_WP_155862560.1_329 target sequence
PSSPEDMLKFLKDNKIEWVDLQFTDVPGRLHHITIPANEFDENTVKTGFGKLDGSSIKGFTMIYESDMVLLPVPETMTLIPWTPG

SEQ ID NO: 28563 - protein, 85 aa, unidentified
  REGION 1..85: note = Description of Unknown:cds_NZ_WFIY01000004.1_cds_WP_155862560.1_329 target sequence
VARVITKVFWGGGKGRFERDPRFIAEEAEKYQLSQGYTSFFGPEMEFFIFDKIDLDVATPQRGTGYKIIAREAPWQNSGGFLIRY

SEQ ID NO: 28564 - protein, 85 aa, unidentified
  REGION 1..85: note = Description of Unknown:cds_NZ_WFIY01000004.1_cds_WP_155862560.1_329 target sequence
KEGYYPAPPVDQLMDVRLEAVETLVKYFGFTIEATHHEVATGGQGEIDFRFSTLADTADKVQTLKYVVKNVAAKHGMVATFMPKP

SEQ ID NO: 28565 - protein, 85 aa, unidentified
  REGION 1..85: note = Description of Unknown:cds_NZ_WFIY01000004.1_cds_WP_155862560.1_329 target sequence
MFGDNGTGMHTHFSLWTADGKKNLMYDPNDEYAEISQTGRYVIGGILHHARALSAIVSASVNSYRRLVPGFEAPVYIAWSKSNRS

SEQ ID NO: 28566 - protein, 85 aa, unidentified
  REGION 1..85: note = Description of Unknown:cds_NZ_WFIY01000004.1_cds_WP_155862560.1_329 target sequence
AIIRVPSYYKGIEKAKRIEYRAPDPSCNPYLAFAAILMAALDGVNKKIDPGDPVDENIYHLTPEKRKQLGIKELPRSLDEALDEL

SEQ ID NO: 28567 - protein, 84 aa, unidentified
  REGION 1..84: note = Description of Unknown:cds_NZ_WFIY01000004.1_cds_WP_155862560.1_329 target sequence
KIDPGDPVDENIYHLTPEKRKQLGIKELPRSLDEALDELESDKEFLKPVFNSSILDTYIDLKREEAKTLQMYPHPMELYYYLDS

SEQ ID NO: 28568 - protein, 85 aa, unidentified
  REGION 1..85: note = Description of Unknown:cds_NZ_WFIY01000004.1_cds_WP_155862560.1_329 target sequence
GRLHHITIPANEFDENTVKTGFGKLDGSSIKGFTMIYESDMVLLPVPETMTLIPWTPGVARVITKVFWGGGKGRFERDPRFIAEE

SEQ ID NO: 28569 - protein, 85 aa, unidentified
  REGION 1..85: note = Description of Unknown:cds_NZ_WFIY01000004.1_cds_WP_155862560.1_329 target sequence
AEKYQLSQGYTSFFGPEMEFFIFDKIDLDVATPQRGTGYKIIAREAPWQNSGGFLIRYKEGYYPAPPVDQLMDVRLEAVETLVKY

SEQ ID NO: 28570 - protein, 85 aa, unidentified
  REGION 1..85: note = Description of Unknown:cds_NZ_WFIY01000004.1_cds_WP_155862560.1_329 target sequence
FGFTIEATHHEVATGGQGEIDFRFSTLADTADKVQTLKYVVKNVAAKHGMVATFMPKPMFGDNGTGMHTHFSLWTADGKKNLMYD

SEQ ID NO: 28571 - protein, 85 aa, unidentified
  REGION 1..85: note = Description of Unknown:cds_NZ_WFIY01000004.1_cds_WP_155862560.1_329 target sequence
PNDEYAEISQTGRYVIGGILHHARALSAIVSASVNSYRRLVPGFEAPVYIAWSKSNRSAIIRVPSYYKGIEKAKRIEYRAPDPSC

SEQ ID NO: 28572 - protein, 85 aa, unidentified
  REGION 1..85: note = Description of Unknown:cds_NZ_WFIY01000004.1_cds_WP_155862560.1_329 target sequence
NPYLAFAAILMAALDGVNKKIDPGDPVDENIYHLTPEKRKQLGIKELPRSLDEALDELESDKEFLKPVFNSSILDTYIDLKREEA

SEQ ID NO: 28573 - protein, 85 aa, unidentified
  REGION 1..85: note = Description of Unknown:cds_NZ_WFIY01000004.1_cds_WP_162309148.1_765 target sequence
IIERVKELSSLGEIFAGDKIEEKIVNKIRKFFDKCDETRVIPIPVLNYSESHEIFGKNKIENSEYLPYSPSVDIEGKLTYSLDEC

SEQ ID NO: 28574 - protein, 85 aa, unidentified
  REGION 1..85: note = Description of Unknown:cds_NZ_WFIY01000004.1_cds_WP_162309148.1_765 target sequence
KDSILGVKIENLFDIPRYYIKAEERNCVGIVFFTDKRRKFVIKSDPLLNLFPTPPPKIPGIIIPESEKNKIEDKLSIKASVNIKE

SEQ ID NO: 28575 - protein, 85 aa, unidentified
  REGION 1..85: note = Description of Unknown:cds_NZ_WFIY01000004.1_cds_WP_162309148.1_765 target sequence
STGYIIECIKNSKNDKKVYITAHHDHWFKGEHDNLLGVSLLPELKSEKYELHLVSFTAEEAGALGYQSFSWSYGSRKYFELQKKG

SEQ ID NO: 28576 - protein, 85 aa, unidentified
  REGION 1..85: note = Description of Unknown:cds_NZ_WFIY01000004.1_cds_WP_162309148.1_765 target sequence
FNDGILLNINLDNIDPCNLKIKAVPSISSVFEKYFNNSIIYEPEIYSDGYTFIKNGIPSVTLEGYYKEYHSIDDEIIPSEEVCIS

SEQ ID NO: 28577 - protein, 85 aa, unidentified
  REGION 1..85: note = Description of Unknown:cds_NZ_WFIY01000004.1_cds_WP_162309148.1_765 target sequence
SLVLSINKILNDENVEQIRYDMLKNELMQFMSTTQAPMRTYLLNILDNLNNKEIYENLLKLYGGILPRDSLAIVKLFHKLAGIQY

SEQ ID NO: 28578 - protein, 84 aa, unidentified
  REGION 1..84: note = Description of Unknown:cds_NZ_WFIY01000004.1_cds_WP_162309148.1_765 target sequence
DNLNNKEIYENLLKLYGGILPRDSLAIVKLFHKLAGIQYEKPVYVEGKPALKISSNDKLYLRSIAKEFEDEYMSKLYEISKKFL

SEQ ID NO: 28579 - protein, 85 aa, unidentified
  REGION 1..85: note = Description of Unknown:cds_NZ_WFIY01000004.1_cds_WP_162309148.1_765 target sequence
IRKFFDKCDETRVIPIPVLNYSESHEIFGKNKIENSEYLPYSPSVDIEGKLTYSLDECKDSILGVKIENLFDIPRYYIKAEERNC

SEQ ID NO: 28580 - protein, 85 aa, unidentified
  REGION 1..85: note = Description of Unknown:cds_NZ_WFIY01000004.1_cds_WP_162309148.1_765 target sequence
VGIVFFTDKRRKFVIKSDPLLNLFPTPPPKIPGIIIPESEKNKIEDKLSIKASVNIKESTGYIIECIKNSKNDKKVYITAHHDHW

SEQ ID NO: 28581 - protein, 85 aa, unidentified
  REGION 1..85: note = Description of Unknown:cds_NZ_WFIY01000004.1_cds_WP_162309148.1_765 target sequence
FKGEHDNLLGVSLLPELKSEKYELHLVSFTAEEAGALGYQSFSWSYGSRKYFELQKKGFNDGILLNINLDNIDPCNLKIKAVPSI
